United States Patent Application Publication US 2007/0067865 A1 - sequence listing, part 8

SEQ ID NO: 33087 - DNA, 606 bp, Glycine max
ctggttaatactgaatgttcagtagcgtttttttttcttctttcaaagtggatatggaaaaaagcactcctcataactgaggttccaaacttgcaaaaaataaaaacccttactatttacatagctgcttgaacaaaatttgctttgaaaccattaaattaactagtgtcatacattgatcttttgatcaactaaaaagagtggttatatatatgtatatatatatagaaaacggtttcactcaaggcatatatttatatgttcccattctcatctagtgatgaatcagaggcagagtcatctagtgttgagtttgatgtagtctccaattgacccccactctcgttatcggaagttcccactgtcctttcttcatgagggtgttttaggcaccaagacattatactagctgttagtgtaaggatcatttttggattcacctcagtgatgtcttcaggaagcaggaatatagaacatccaagctttcttgcaatactgataatgtaggtggcgttcatctttttctcttggtaggttactccctttgttacaagaccccaatttacagctctgggtgtcactgaacttagaagctcaaggaaaaat

SEQ ID NO: 33088 - DNA, 402 bp, Glycine max
tgcctacccagtaagtactaatggaatttttgttggctctgctgctaactacagcacctgaaacagtgaaatttgaaagctctctttctttaaaaaagtcttctttctttctttctttgtagtactatggagactagagagagagaggactgaagttcttgccagccaggcctcaatacattgtgttcagtttttcacctcctttgttttctgttcctttttccttctgtttcatcatcttcatggatccacagtaattcaccacaaatcttgcttcttcttcttctccttcttcttcatctcctactcgattatcttcttgatgaaaagctttcagaatttaattttcggactcaattttcagtttctaaaaagctccttaatttctcttcttattcttct

SEQ ID NO: 33089 - DNA, 312 bp, Glycine max
gggtgatgcaaaacttttttgcggcattggtgtgaagactggctgccaggaggacacttcaagatctgagcagtctttaaggagaagaaatggtttggctgacttaaatgaacctgttccggtggaagaaacatataattctccatatgttcacctactgaatcgtaatccctgtcaaggggcaactgaatgctctgatatctctgctgatgctgccaaacaaaagtcagacttttttgctctgtctagggagcaattgctcaactctgatcatggaactgaaagttggactcgaagtcatgaatatttgga

SEQ ID NO: 33090 - DNA, 167 bp, Glycine max
caaaaaacgcgtttggtgtgtgtgttcgctctcaccactctcatgccactggttaacggaggcgatacttaaaacaagcgttgggggggctttaagacggcgtcgttttgtatgagacataggatatcgtatttgatggacgagatctgggagagagctatggaaac

SEQ ID NO: 33091 - DNA, 514 bp, Glycine max
acatactagttctttctaagtacccaacaacaccaacactgcactttcagcattttaggaacaggaataggaaccctcatattccatagtttctcaatcagggtgtagcaagtttggctcgggtgtgtgtcactattcctgctgaggaaacacctctatatcgttttatccttttgctatttcactgtgtctctcctgccggtgggaggtagacatgcacattggaatgatggtgatgatgactcaagcattgaagaccattgtgtcatcctatcatgactatgacaagaattcccgtctatgtcctttgcctatcagtcgatccagaagccgtcagtggcgccaatgccgcattggaacctttgctgtagccatagcagcacttcttatatctaccactgcttggctttccgttgtcttctctgatgcaactacctgttgctttcatcacttaaaggattgggaaagtagcccccactctttcaattggaagaagtgcatctctcatcgcctt

SEQ ID NO: 33092 - DNA, 461 bp, Glycine max
tctgtttccaattcaagctcttcagctgtagtcatcggagacgggtcagatgaagagtacgaggaggaagaagaagatgaagaaggtgttggtgttggtggtggaagaagtgtgatgaaacgtagcggcgagattttcgggttctctgtgacccaaaatgaagaagagtccatggacagtgaccatccacctgtgactagacaattttttccggtggaagatgctgacgtggcggttgcaaccggtggtggctggtaccggcgtaagctcaacgttccctcgtgctcactgggtaggtgtgaaattttgccaatcagaaacacttggcaccggaaaatcatcagtggaagtttctcagcctatgaagaagagtcgccgaggaccgaggtcaaggagctctcagtatagaggagtcaccttctacagaagaacgggtcgctgggagtctcatatatgggatt

SEQ ID NO: 33093 - DNA, 491 bp, Glycine max
ccattactggggcgatcagtggtttggcgaggacttgtccatcttctcgctagacgacaagccagttccagcaggttcattttcaccagaagaatcccgtgcctcgctagatcgaaattctccgtccttctcgagagcgcaatctgtggataccctcagcgtcacgccatcgaatctcaagcagacggtcagcagcgagcaaatgagctccagcaggacggatggcgatgttgcgggtctgcgagcagccgaggcattcattcgaccagcacccgtggctgttcatggcgacatctcttcgttcgttttcgacctcaagacgtgcacgttcaaattagccctcacagcaccaagttcaaccggcgaagatgcgccaacgacaacgtaccttcccgagttccactttcctgcaggacaaacgagcgtcgaggtcagcggcggcaagtggaccatgacatccgaagagaccaacggcgcgctacagcaaacac

SEQ ID NO: 33094 - DNA, 464 bp, Glycine max
catgtgcctactatcaggcatcaagaactgattaggctgctccctttcataggtaatgtagtcttgatccatatacataaaaccccaacatgcacgctttaacgccgcgtatgcaactccaggctgaacatgcgatgcatcttcgcagacaaacaacagatggatgcgttgttaaaaaatgctgaccgcgtgatcatcgcatgacggtattggaccactcgagtttgctgcgattggccgaaatgattgcccctcaacaccacgcccactatcgcgactcgcgcctctacatcactgcacaattctgcttctggcactgcgccagatagccctcgtcctcttcggtgcctaatgcgcttcccggcttgcgcactgcacctttgaccgtaatggtttgatctccttcagcatgccaccatcggagtgttcgctgtaacgcgccgttggtctcttaggatgtcatg

SEQ ID NO: 33095 - DNA, 507 bp, Glycine max
ctcgctacggtagctcggaattcggctcgaggcatagttgaagatctcccaatcacgacccatggatgctattgaaacttatcagtaccttcttgcattggttcaagcccagaagaaatcctttgggtctctccaaattagttcaaaggttgagtatgataaagcaaatgaatttgatatttggcatggtctggcaaattcatatgctagtctttctcattggaaggatgctgaaatctgtttgcaaaaggccagggagtcgaaggaatactctgcagcattgatgcacactgaaggtgttttgtctgaaggacgtgggcaaaatgaagaagctctttgtgctactattaatgctatactactcgaaccaaactatgttccatgcaagatcttgatgggtgctttgtttcaaaaattgggtacaaagcatttggctattgcaagaagcttactgtctgatgcactccgaatagaacccacaaaccgcaaggcttggtataacttggg

SEQ ID NO: 33096 - DNA, 450 bp, Glycine max
aagccgcaaacacagacagtagctttgcattaagagggtaataaacaaagtcatctctgcccatcataaaaatgggtataaatgtccattttgaagagggaaaatatttaaggcttaatacacattcatatgtaacaacttgggcttgtttggatacaagccgaaagttcttttgaaagcttctttactaaaaatataggattttttttcaatacagaagctttcaaaagcatttctagctctgtatcctacaagctcaaaaacatcaaaggtaacattttttttacagaaatgctcatcacaagtggctgcagtagaattcaagtgactcctaacattttcctttttatgccctgcagatgtagccaacaaactaaagcacgtacaagtagaaaactgaatctctactgtctttacaatgatactgctccaaagacattaacaaggccg

SEQ ID NO: 33097 - DNA, 605 bp, Glycine max
  unsure (1)..(605): unsure at all n locations
gcttgagcttcatctcattcgcagacgtggtgcaggcagaacacgtcgagcacgacagacaggaagtcttgggtgccacgtccaacgaggctctgcagtttatgagcctgtcgtcgacggcgaaccggtcgccctcgccagtgaggtctgccgcgtcttcgccgccaaccaccagtggagcagcctcgcccaagcatgcggatctggcgcgcacgcggtcacccgcgagtcctacgtcccctatagtgctcgggagccctaacccagcatcgggcgaagagctgccagtccagattgaaacgatgcgacaagcactgcgcaagacgcactcgggcgatcttagcggcgcgcgctcgcagccattgagcgcagcgagtctggaggagagtgcggctgataagcctccgttcaagtgagggtgtggagagattgcgcatgaatgcactgaaacgaagttcttaatttcattttcgacaatgttgggagctcagggaggggttattggttggtcagatatccatgtgcgatgtggcgatgttttttttcccccagttatccgataccaatgctattnnnnnnnnnnnnnnnnnnnnnnnnnnnnnnnn

SEQ ID NO: 33098 - DNA, 849 bp, Glycine max
  unsure (1)..(849): unsure at all n locations
tcggctcgaggttacgctttgttctgatttgttttatttcccaacagccacacctgaacctttgatgctcccctgacttttgtttgtgtttcttcttcttccttttctctctctcacctcttctcctgctccatctctgccttagccaccacagccacactttgttccccaaaaccaaacccgacaaagttaacgcctttccctctgtctcgaaccagaaaccttttcgtgacccttgcatgtgttgcgatgctcatcccagaaataaataatcatgaaagcaagactcaataaagttgattgttggtttatttatgtgattggggttatacgcctggctaagaagagatgcgctcctctaatgctccgtttggcatggcactctgctggaacctttgtgacatgggtcagatatatctatactatttaccttatttctgcttaatcagtattattgttgttgcaattgttgttcctgctcaatgttatcgtgttctaatttatgttataaacttataatactcttctatgtgtgtgttttggtcataatgtttgtgtgcaatgaatgagttattattgacaaaataaaaatgacatccatgttcgtctgaggctcaaatttcctattatgtcatactgttccttatatgctaattattttttcaacaatatttatcaaagttacatttgacttttctgtgattatgaaaaaagtacacttatcagaatcctgcgatatatcaaattatggtacatatgatcggttggctcaaaacaacatcatccttattttacaaaanaaagtgttaaaaaaatacagtcatgcaggattacattatttttttaaaa

SEQ ID NO: 33099 - DNA, 448 bp, Glycine max
gctcaatgaacctatagaggtttgaattactgagtggaatactgggggcctgctaacaaggattgagggtttgcgagctttcctacccaaagctgagcttgtaaaaagagcaaatagctttactgaattgaaagaaaatgtggggcgctgtatgtatgtacaaattactcagatagatgaaactaaaaacaatttgatacttagcgaaaaggaagcttggcaaaaattgtatcttcgtgagggaacacttcttgatggaactgtgaaaaagatcttaccgtatggagctcaaattaagctaggaaaaactaatagaagtggattgctgcatgtttctaatatctctcgagctgaagttacttctgtcagtaacatactttctggtgatgagaatgtcaaagttcttgtggtgaagtcaatgtttcctgataaaatatctcttagcatt

SEQ ID NO: 33100 - DNA, 435 bp, Glycine max
tggaaacgaacatgtcgtggcacttgttactgctggagaatcatacaagggcgtggatgatctagtgtgctacacttggggtaacaacagtcatggtcaattaggcttaggggacacaaagaataggccaagaccacaagtggtgaaaacatttgatcttgaatccccttgggcaatatatgaggtagcatgtggtgccttccacactgctttgcttactcacaaaaagaggcacagtgacacattagaaagcacatgctggacctttggccttggggataatggccaactaggtcgtggcacaacacaaagcacatcacttcctgaacctgttaaggaattgccacaaaatgtgcatcttgtttctgttgactgtggcttgtttcacacttgtgttgtttcctctgatggggatgtgtggtcatggggaatgga

SEQ ID NO: 33101 - DNA, 631 bp, Glycine max
aagcatctcagaagagaggctcagcgttcaagatgcagatcttcgtcaagaccctcacgggcaagaccatcactctcgaggtcgagagctccgataccattgacaatgtcaagtccaagatccaggacaaggagggcattcccccggaccagcagcgtctgatcttcgccggaaagcagctcgaggatggccgcactctttcggactacaacatccagaaggagtccaccctccacttggtcctccgccttcgtggtggtatggccaagaagcgcaagaagaaggtgtacaccacccccaagaagatcaagcacaagcgcaagaagaccaagctagctgtcctcaagtactacaaggttgacggcgatggcaagatcgagcgtcttcgccgcgagtgcccccagcccgagtgcggtgctggtgtcttcatggccgccatgcacaaccgccagtattgcggaaagtgccacctgacctacgtcttcgacgaggccaaataagcgcatcgccgccggggcacgcgacacgatcgataacgagttacggcatcaaggcatatatgggaggagctgaataggtttcaccacaacgtcggacatctagaatcaatcaaacttgtcatggacttcac

SEQ ID NO: 33102 - DNA, 448 bp, Glycine max
acaccttcctctccacaccattcaaagaagaacctcacgaaaaaaatcacgacttgctcttcgatcaaaatggtttccttcacagtatacaaaggcggcaaagatggcaaagtcaccaaagccaccaccgagaaaggcgaactcgagcgcgaccaagttctcgtccgcgtcacagcttccggactctgcggaacagatctccactaccgcaccgcagatatggcgttgggacacgagggcgtgggtgtaattgaagatgtcggaccacaagtcacatacatgaagaagggcgatcgtgttggttggggctacctgcacaactcctgcggacactgccaggaatgtctcaaaggcaatgagacgtactgtcctgagcgtgccatgtacgccatggcgaacacggaccagggttcttttgctagccacgctgtttggcgggaagcatacc

SEQ ID NO: 33103 - DNA, 449 bp, Glycine max
tgagaattgacgtggatttccctagtccagatgcagcttcacaagtgggactactgcataaggaaattgttggaaaagctatgatttacaagttgtctgaagctgttgaagaaggagatggtgctaactttgttaaggtgttgaagcaacaatgtgaggaaaataagctacgtttgtctgatgtttttgataaagtcaccctagcaggtcattcactgcttcatgtggcagcagatatggggcaaaaaagtattgtgcaggtgctttgtgatctctttcctttgcttctaattaggagaaatgtaagaggtgacactccacttcatgttgctgcgaggtctaagaaatatgagacagtcaagttgattctctcccaatatgccacatagaagtcaacatatgatgagatgaaagataaaaagatagcaagagaaacaaatgaatgtggg

SEQ ID NO: 33104 - DNA, 428 bp, Glycine max
caaacatttaagcagagagatcaaagttttgagaagaaagaaacaatggcgatacattgtgggttctacagtgtgaatggggggtttaagatatctgatgaagataaaagttacatgcaaggttgcaaagttgttgtatctacttgtgcatttggcggtggagatgatctctatcaaccgatcggagtgtctgaggcttcgcttaagaaggtttgctatgtagcattctgggatgaaatcaccctgaaagcgcaggaattagtggagcgcagaattggggaaaatggatttattggaaaatggcgtgttgttgttgttcgggatcttcctttcgcggaccaaaggttgaatggtaaaattcccaagatgttaagccatcgtctttttcctcaagcaaaatactcaatttgggtagactccaagtccca

SEQ ID NO: 33105 - DNA, 483 bp, Glycine max
atctatctatctatctccatcttcatcactcccatggacaacgacacaaacacaacaccaaccaccacctcagaaccacaaatagcacacgattttcccggtctcatccgtgtcttcaccgatggtcgcgtccaacgcttcaccggaaccgacgtcgttccaccctccaccactccccacattacatccaaagacatcacactcctccaccctcactccgctactctctccgcacgcctcttcctcccaacaccacaaaccaccagccgccgcaacaacaacctccctctcttaatctacttccacggcggcgccttctgcgcctcctcccccttcaccgcaaactaccacaactacgtcgccacaatcgtcgccgaagccaaagtcgtcgctgtctccgttgactaccggctagccccggagcaccctattccggcagcgtacgaggattcatgggctgcactacagtgggtggcgtcacac

SEQ ID NO: 33106 - DNA, 432 bp, Glycine max
agctaaatagacacacttcaaattttattgccatatatggtttttgtcagagttcctgatagaaggacatgacaatacttaatttactcttttagatggataattagtcttggccatcattaaacaaacaaacacttggctattcaattccatcaaaattctgacaatctttttgtaacggttaaacctccaactttcggagtggtgggggcttcctgatcaaagttgcttgctcaaaggaataagcaatttggatgagctttggttccgagcctttcaaacctccaaagataattccaaatggtgcacccttttcatatcccgctggaacagttactccaggataacctccccttgcaagtatactagcaaagaatgaaaaaggtaccaccattgcgtcaaggttatttgttatcattaatttctcaaatc

SEQ ID NO: 33107 - DNA, 548 bp, Glycine max
ccttaactcaaaatagacgaaagaaaggtcctttcgatgtcttcatttacttaaaatttgctatcattcctatcgttccattattattatctttaatctacaaatcacggaacaacgcaacaagctcgatcataagcacaaagagagccaagtggcgaattaagaatgaaacgaaaaatcattgcggattctaataaaagaaaagtgaatcattatttcaggatggcccaagtcattaggtccgtgtgtactgtacagaaccacttacataagctcccaatatctacttgctacttgctaggatttttttagcatcaaatcttcactaagcaacaaggccttaattcagtttcctcatgtgatgctgcacgctggattcctagcttccttgtccgcatccaaaacatgaaaccggaaatttagggcaatttaacaaaattgaattgaacctatagggtattgctagtcatacgatcacaagtaaattatgggacgtggaccaggcggggaataaatgtcttgtcatcaagtgttcagtttctcttctt

SEQ ID NO: 33108 - DNA, 438 bp, Glycine max
tgcagaaatcatggtttgcattggactactcctaagcttccatataatgattccttactcagtgactcaatatgttggatcagcccttatcacatttgtgtctgctgaagttcttgaaggtattttttctcattaagtaatgctcgaaatttatttagtaataaacagaactggcatgaatagaaaggtttgctgacaactttgcattatcagatgaaaatggcaatacttcaactattctgatgactatgaataggtacatagttagtttgtacccatcatgtaataaggtctgattatgatatcatgtaacccatcaattgttaaacaggttgattatttctgttattggcattaacctggtaatttactctatgtgacaatcttaaatttcataatggtgctttttcttctcatctgaaaatattttagatagat

SEQ ID NO: 33109 - DNA, 387 bp, Glycine max
gcatttttctttttcttttcttttttttttgttgcattgtttcatgtctttaatgttatgtctattccttgattattggtttagtaacttgattgttggagatgttaatgttggacccttcaatctaaaaggctaatattttaagcattatatatttccatcaattgaattgaggcttcctagttccttccgattagagaaattgtcggcttgatgcttttcaatctagaatttttcaaatgtttagagtgcgttttctctgttgatttttgtaataagaactaagaaattaccttacattcacaacaacagtatttaagagcccatgtttcggatcggattggatactcttgatgatgcagatggcagcgtcatcagcatgccttg

SEQ ID NO: 33110 - DNA, 851 bp, Glycine max
gctcgatgatgctcgtctcgtgctaacgcgcgcagcggtacagcagggccagctgccggctcggatactacttggaccataacgtcgctcttgggttgatatggcggtggagcttctccattctcgtccaatccctcctctcgtcgaacatgtgtgggctggtgtcgtccgactcttccatgcatgaatcgccgtgccccagcccacccctcgagatctctcgccagagcgtgttgaccgatcaaccggcgctgctgcttctgtcgcttctttcgcacgtggagccaccgcagcagcaccgcagctaggatagcaaacactgctaggaagaggaagtagtaattgaagacgttactatcgtggtgggcagggtcggtcgtgctggttggagtggggtagatctgcagaggagcggcttcggtaggagtgctcgtggcggttgatacagtgctgtggatgacgatcaatgttcttgggtccgtggatactgggattgatataggcataatagctgtagttgtgagcggtgccgtggctggtggcggctggatttcgatcgcatcttgcgctcccgacaagggcacgagggtcaccagggctagcaatgataccagtgacacggctccattggtgctgagtccgagaaaatgttcacttcgtatcagcatcatcgtcagagagtaattgctctggacggcaggtggtaaggtgcctcgcgaccgggaaagaaagagcagacggggacacggcagtcacaagtctgggggattgtctcaatccatagtgagaacacgtggaagctgatgcaatgccacagctcggggccgggctgctacatagctatagctggt

SEQ ID NO: 33111 - DNA, 569 bp, Glycine max
atcataatatagcatctttccgctttcaatttttatcattaaattgcagaattctttcatgttaaacttgtgggatcatgggatgtttaacatatttcatgctaataacttgtatcgagtctgtcacatcctgccacaccgtagtgatttgcatactaaccagagcaaacattcatgtaaaaataaaacaccatatacacaggatttcaccagatacaggtagtttatacttacatattacacacagacacaggctgctatcaagaatagctagctattcgttacaagagtacatgtataacagttactgcttaaaataaagctcaagaagcttcttcaaagtgtcaaatacacttgtgaaaggattaagctcaataggggcgttgagtcctagatcaggaaattggtttgtaagtgcctgctgcattccagacatagacatcatagctgccaactgactattggacattacttcacaatcctgaggcgtatctttaattttgctaggatcatatccatagtttgcaaggtaagacttgtacttctgtataaattcaggtccagggtta

SEQ ID NO: 33112 - DNA, 499 bp, Glycine max
gatgaatcagagcaagtacactctagatgctgtcttaagtgaactctcatgcccgttgttgctgctttggggtgaccttgacccatgggttggtccagccaaagcgaatcgaatcaaagagttctatccaaaaactactcttgtgaacttgcaggctgggcattgtccacatgatgagacaccagagcttgtgaacaaggctttattggattggttgaccaccctcactcctgaagtgactctccaaacagtttgaacgcgtatgattttgtaaagccaattgaaaacaagttcttgattaagttttgagtttcaaatagttaatagtagttatcagtatacgttgtgtacaaagaattgggtaaaggatactcagaatagagaaaaatcacagcaagaatactttatgatcattgttctacttcttctgcacacctgtacatttttttcgacctaatgtatgcattcatttcttacataaaaatccttttcattgatc

SEQ ID NO: 33113 - DNA, 521 bp, Glycine max
gtttcacttgacaatttggagatactgagagttatttatggaatatttcccacatatcgccagaggtattaatttgtattagaagatgtatgtaaaaatcagttgataagttctacaataggcttcccattactgtcttatcacacacacacacaatttgttttctcttgctgaaagttcttgcttcacttaagattgacacctgaaagcaatacagccagtcagccagtagtttgaccttgaagattttaatactagaagttaaaacacatcattcatttaattcctttgtcattcatggttcctgtaagaatttgaaccatgtattgtgcatggcaactcactgtggaagctactaaataagttgaacttccttatgcctgttccataatgtctcacttggaaattttcaaatgtttctttggctaacctgtcacttccagatggcactactccattaaatggaaataaatgaaccatccaacttttaattgaacatcagaaaattatctttcaacttg

SEQ ID NO: 33114 - DNA, 828 bp, Glycine max
cttctgctgctatcattcatttacaaagaatcaagggtacttcagtacactttgtggaagctcactatgtgatcaagtcagacacctttattataggattagatcaaatgggccacttgcatatactagtatttcggcatcaactaccaattctgtccatcagctcttaaatggtgctcagaacaaggctcctgcttatttgggtggcatttctgtctgtgtctgttttatggttgcagtggtgtctctgggactagctctcttgattgttcctcagcaagtgatgccatggactggattgcttttgatgtatgaatggacattcacaattttttttatattatttggaggttatatccatttgatttatcagtggggaaaaatagtgggatcacgagcagcatcttccttgtcacagcctgggtccgattatgattcagaaaaatttcatcagcgacagatatcatcttgtgattctgctacatggtactatggtttagggatggccttgttggccattgcagctccatcgttgccttgtctttttggaataactgctttgtttttaaggttaggtttgatggttgttgggggcataatattggcgtctttcatgacatatgcttccgaacatcttgcaatccgatcatttcttaaaggcattgatgagcgcgataatgctcgaaatagtagctcgtgtttcttatgttgatttgattgtgacaatagcaagtggtgatgtaaactatggtcgatattttcttccctttttcagcttacatatctaatgctgttctagtggaaaatgtatttaaggaatttttgtct

SEQ ID NO: 33115 - DNA, 391 bp, Glycine max
tcgagccctactactttccccgcgctatgttctttgcttgttgttcttcttcttcgctgcttcttcttcgcgaccgtgagaacaacttcttcagcttctttgtacaacttgttcacgaccatgacatgttgccacatttcctaggagttagtttgtggaagtcgtttgcttcaaggattaggtttttgctcgcaaggtgtcattttgagtgagtggtgatctgatcaaggtatgaggaaagcttcaagtctccgcgccattgttttagatctcactgccattgtgactattttggttcaaggtacatttggtggtgacctgatcgaggtacgaggagagcttcaagtctctgcaccattggtttagatctcagtgccattgtcactgtttg

SEQ ID NO: 33116 - DNA, 478 bp, Glycine max
cgaaaatgctggccgcggacggctgtgatgattactatcatgatcttcgtctatatctccttattcttcgcccatcacgtctccctcaatggtatcctctccctcctcgcgatatcgtatacccaatctttaatcggcttcacatcagtggacttgatcggcaccctgtgatccccatcccactccacaacttcactcgtctccggatcacaatactgcttcaacaaccttcgatgcaaatgcaacccattatccctcaaaccatgcacatgcagcgtaggtaacttcaaaatatgcggactcgtcccctcaaacacaaacccctcactcaactgcccagcacttaccaacgcttccgatcgactatgttccccaaaactcaccaacggattcctccccgccatcaacaccccaaatgtatacctcggatccacctccaaccccctctcttccctaatctgctgatcatacagcaaac

SEQ ID NO: 33117 - DNA, 886 bp, Glycine max
cagatggcggaagtatggtctgaaggcagttaaaaatagtcctttccctaggagctactaccggtgcacaaacagcaaatgcacggtgaagaagagggttgaacggtcttccgaggacccaacaattgtgattaccacatatgaagggcaacactgtcatcacacagttggatttcctcgagggggaatcattagtcatgaagctgcatttgcgggccagttggctccaacaatgtcacagttttattatccgattcaattacccagcagagagaatgatgataataataataatactttgagcactatttctcagccatgccaagcacaggatgaaactggagaaggatcaagtgttatgatgccagctgatggatcgtcaccgtcacagcctcccacggatgaagggttgcttggagatattgttcccccgggaatgcgcatcagatgagagaattatttgatggatgatcaggtggaagtggagcagagaaaatgcatggacatgcatgcatctttattttctgcatactctgagcaagtaggccacaagtggcagcaattttttttcttttagcagcaagtcccttttagccatctattgtctcgagaagcgaatctagtattcatgcatgggtaccatataatacctcagtagcaggtaattatctaccttgggtcatattttgaccttgagcagttgagctgagttatatatatcattcattctgtgagagttatatattattatatatgtatttatacagtttagattatcatataaggagtagccaccgtgcataatgtatactaaccaatttagattgctaaattctccttcaggattgtacaatttatttgaaacctaaattcctagtacactttc

SEQ ID NO: 33118 - DNA, 646 bp, Glycine max
cacttagaaaactgtgattttctctttgtcttgaagtcataaaatgccttgtagtgtcatcatatccaatcatgtttctgtaaaattcgtgaaatttgctatgcttgtgtaatttaaaaaattgaacatttacaaattacaagtaagaaaatgaagatgaggataactttacataagtttgaaagaatcgaatttgttggtaaccatttatatcattttctcaaacttatcaagcatttttaccctttgcatggatctgacaaatagtgtcataaaaatacctgcaccaatgaaagatccattcgcaatagttatgttgccttggctgctcatagtgataccaagatttagcagagttcctcctaatacggtatacatagttgccatttgtaaacccgttgctttccgagcagctctttcagactcaagcactcggacccgaagttttagatcccctgcctcaagttgctttgtaaactcttctattctttgaactctgtatggcattgacatggtataggttgtagcatcatctgcttgctttcttatctcctccacaagctgtggtgcagtgcgctgcttttgccttatctctaaaagctcctgtgcgtagggtgcagcaatcttagaaaaggagaaatttgga

SEQ ID NO: 33119 - DNA, 407 bp, Glycine max
caatgcaaatcttcaaatactcatcttaattgagttcgacaattcaaaattaatgctataaaaaaaattctgaactttaaaacaaatgaatcctacaacagtatgggagaaatacccatgaaacattttcataatttactaattctgcaacaattttggaacatttcaaataagcataagctttctaattactataacaatttaatgaaactgattagattactggctgactcttcctgtacgactgtacctagtgaaagaaaacacgcacaaacacaaactgaggaaaaaaggatcaagtgaataaggctgcacttcccgcaatgcttaggtctcttctcactgaaacgaggtattaatagcaaaggcaaaactatgatttattttcagtagttccatgaaatttc

SEQ ID NO: 33120 - DNA, 202 bp, Glycine max
ttagcttgttctgatctagtccagtgacatttggtacgatgttataattggaacaagggaacagttagaacttgtaaatgttagcaaattttcccttgtcacaatttttttgcatgagattgtaataatggtatcgtacagtgattcaaatatatttttagtctcttgattaaatatataataaattttagatttatttctt

SEQ ID NO: 33121 - DNA, 738 bp, Glycine max
atatgatgtaatttatcatataattctgctgctacatagggctatttcatataagttcaaaatgacccatggacacgaaatgtgtattttcactgcaacattaatggccttattccaatgattactgccatagactcaaaaattccccctaccattctggcagctgagtgacaccaaatcccaggtaactagatatattactctgaactgcctgccttgccctcctcattattattcatggccttctttgctaactcataacctgcaaagctcatagcacctagaggagcaatccaaaagaacctgggtactgctcctttgaacaagccaaggggtccctcatgttttagtatggagaaggctatcaaggtcattgacacagatcggccctgtgcagtcatcattctagttttcatgacatcgatcggcgttgtaacagcagccgccaagccaccagataaagctccagcagcaattgtttccaagggaccgagttcccgctctagtagtcgttcggcaacctttttagattcagcatagagccccatgccagcaacataaaatggaacctcgcggcacaaggtagctccggttccacgaaagaaacccctaagaccatcctgctcccaagtcgcaacaaaagcctcgcccacgttgtcaaaaagacccgcctgtaacctctgcttcaacacttcgcaggggatccgtacagctgttcccaaaaatgtgctacagaat

SEQ ID NO: 33122 - DNA, 454 bp, Glycine max
aatgcactcctatgaaagagagggaggtcggtggcgatgtgatggtggtcgcaaagtgtctggcacgacggtagcgtccaaatgcctcggaaatgtgatcatgccgccatgttctgctgcgatcgtgggcatgggcatgacaaccgcaccattgaaatgctccacaactgattttgacaacatacgtttacaccagtaagcatttccactcatccttcttagcagggggagtgtggccattagttgtgcttaacctgtatatgtcttgtagaatcaatacaaacttttgagttgagttcagttggtaaatatgtgtgtgacctcgtgtgagtacatcaattgagctgggtatgtatccttagttaatcctggtgactagtgtgttcttgatcagtagtcaaaggtgccgtctaccttaaaaaggacgtgatgatattagatgctaagtattaat

SEQ ID NO: 33123 - DNA, 439 bp, Glycine max
atgaaagagttgcataaacctgcctcttctatataaatagatcatcattctcaagtaaataatataccttagataaaatacaagctccacaatgaaaatacacatttacccttctttcacttggtcttttgaagggcagtgatggaactgccatccccttggatggaatcatacctgcgaaaaaggtacgccacaatcaaagccgcggtgagtgtgacaacgtccttacccgcgcactgtttattggacacactgggcgacccggtctgaggcccattggaccaatacatgtagttcaacaactgggcccctttctcttgggtgaaccggtccggcttgaaccggtccggttcgtcgaatataacggagtccctcatgacgagcttctgaaagccgcacagcaactcgcccttcttgacgtggaagaccgagtcgtgcg

SEQ ID NO: 33124 - DNA, 508 bp, Glycine max
ccgtcctgataagctaccgtggagccttgtcgatgtccgtcgacgacagctcgaacgtgcttcggagctatcggatttcgtcctcgatgccgaacgtggtttccgcaacggattggatccgagaggacgctaagaatcgcgcttcgtcgctggaaaatctccaattcgttccatcggggcttccgtctcttcgaactggttccaataatggagagagtgttcaggttttgtgttcatataagaggataggttctgttggtagaattatgaccccgcggtcaccgggacgtaccacatttgaaagtgctgaggattctgatgaggaggaaatacagcttgctgatgacaatcgcattcctttctcaaatacttacggactagattcaaatgtgtgcaatttgcccgctgttccattcagagttgaggatgcaaacaatcagatgtatggagaggcttcaaaggaagtgaaagctggtgcagatatgaatggtcatggaataacagattc

SEQ ID NO: 33125 - DNA, 479 bp, Glycine max
ctcgagccgctcgagccgttctgggcttgacttaagccggcccgaggaggctctagatggcgatggtttaccgatatcgcctgccaggactccaccaagatcgcttgcctgggatgaacgctggcaggtcactgtgagatactttccgtattatcaatcagtacccttcgaccatggagagagactggaagtctactgcggaaaccggagcattcctctttttctagagtctatcccagaccgggacacaaaattatcgctacaatctgagtctggtttacggagctgtggaaatccgattcaacgtgacttgcgaccatttcacttgtatcaacaagaccttttccctagaaggggttcaaatctccggcgtcattgccaaagatctcactcgcaggaaaacccttcttcgggaatcgttgtcgaactaatcaagctgtggatagccaggtgtgagagccatccgcagtgcaatcgaa

SEQ ID NO: 33126 - DNA, 563 bp, Glycine max
  unsure (1)..(563): unsure at all n locations
gacctgttatatttattgacactgacaagttgcctgctttagaggcaagagatcagaagattgtaaataaccctattgaagctcagataattgctgaggttgcaaaggaattggtaaagaatggaatcggaagtgaacacattggcattattactccctataattcacaggcaaacctcatccggaatgctgcttccatgacttccttggagatacataccatagacaaataccagggtagagataaagactgtatattagtatcttttggaaggtctaccgaaaacccgacaagctgtgctgcttctctgcttggagactggcacaggataaatgtggctcttactcgcgctaagaaaaagttgatcatggttggatctcggagaactcttcttagggttcctctattgaaacttctcattaagaaggttgaggaacaatctggaattntaactgtgactaagaaggatatctatcgaaaaagtgagctcangagatgttctcaaatgagatgaatggaaattcttttacccttattttgagggttataatatatatcatca

SEQ ID NO: 33127 - DNA, 430 bp, Glycine max
ccacataacatctttgaaaaattcatgtatgcatacagctacaaatcgttgcttgcttttccgcttttatttcgtgaaaaagacgcaatgccatgctcctggcgaacaacaagcgccttgaacgcctcgctatgcaagtgaaatctctggcagcaggacggacaacctgcgtcgctcaaataccagaacagatccgcataccatctgcaatcacatgccagcccatctattcgtcatcctcttccagttcagcagtgttctcgtggaagtcctgcccgccgttcgtcgcaacaatgataccctttcggatgacaaagtcaccgaacctctcaccctcattcctctccaaagcatattgcttcaacatcggcttcaggatcgccagaatttcctcctccttgattgagcttcggtacagcttattcagtct

SEQ ID NO: 33128 - DNA, 589 bp, Glycine max
aaatgcactattcatggatgtaatatcttctggcttggacagctccacgactgttcaaattatcaagtgtctcagacaaattgttcacattctagatggaatagcggatatctcattattgcaaccagagccagagacatatgaactctttgatgacattagcctcctctctgatggtcaaatagtataccaaggacctcgtgaggtcgtccttgaattttttagaatctaagggtttcagatgtcctgagaggaaagccatcttccttcaagaaaatattcagatatatctatattccatgacatgtgacttcaaggaaggatcagcagttcccgttgataagagaaagaaccacccagcagcattaactactatgaagtacggggtaaacaagaaggagcttttgaaagctaacttctctagggagtatttactaatgaagaggaatgcattggtttacatcttcaagctatctcaagttagttttagttcgcgtttaaatgcaattatgtttgattattacatgattttaatgtgcgatttttctgcttcctttcaccactagcttgcactgatggtagtgttagc

SEQ ID NO: 33129 - DNA, 798 bp, Glycine max
aaaaaaaacaaaaaacactcttccttttatttgaaacaaattaaataattacatagatggattaagccaagaagtggcgtaggggagaaattaaaataaaatcagggggtctcggggaaaactttttcctctaaaaatttgatgaaacgttcatcatacatcttgggttcaactactgatattgtcatagggtcaaattgcagcgatttgtatgcatgctcaattttctttctcagattatagttctgcaatatatcaattacgcccatgtagaggacaacatcatatacctcaaaaagctctacttcttttgcctccaccttatccttatcctcctgaaccctccgagtagcttgagctggcatgtttactccaagctgcacccgcaaccttgcaataccgggaagtagaagatcaacttcattatcacccatggagtatgctctcaatgtgttccctctaatgtggggtccaggagccgtgttgactatactcggttcatgggaaactaacagcaagcctttaggaagaatcaagagctgcccttcatctccagaaggtaaactctcctgacgctgcactgattcatgatgttccacgaaggccttcatattctctggagctcggaaatgtaatcccaacagaaggctgtaatcaattatatgctgagactccaagaacttgcaatctagggaaatttgcttgagtagggattctcgcaattttttatccatgtgaaactcatattttagatcaagatctttcaatgttgtgttgcaattgattttatcattgttt

SEQ ID NO: 33130 - DNA, 218 bp, Glycine max
gcggtcgcccttttttgttttttttacgatctcaacaggtaacgttattttcattcacaacccattaaaaataatccaaataccacttcatattcgcatccgattcaaaagtgagattacaccatccagttcaaaagactgagaaacacttaattcctcagagcagatatctaaaaattaaccaaaacatgtatattacaaccgcaataaaataaaaa

SEQ ID NO: 33131 - DNA, 443 bp, Glycine max
aaaagtacaataaagccttggtaatataaaattatagatgtaaaaaaagaaactcaaaacaactgaagtcacattggaaaggctaattgaaggcaataaattttacaacttttctccttgaatcgcaataactcatttgcagcaccaccttattgaccaccaaaattaggctttcgagccaaaaagaagtacattggtgtgaaaatctctttctttccaccttcaagtagtccatctgctgccctttgcaagatttcttgaacttttagacttccccttggagctagtcgaacaaattctaaagcccttatcagacttcttgtgaaaaatcgtccaatagatgttacaggaaaggtactaagtgagaagtgacttgcatccaaatgaaagtaccaaggaactggagaattaactgcaagatctttctcccagattacctcaaa

SEQ ID NO: 33132 - DNA, 760 bp, Glycine max
aaaaatcatgatatacatgttgggcatataccctacatcatagtagtcctgaaaagagggaaatcacacacgacgaaacaagccgggtccaactactggtccttgaactttttgccttcgccttgtcgctgcacaccgtatccgggctcgtagaccaacttccctccgatctgggcggagtaaaaaaaaatagggatggcgatagcgctagctgccatgttactacttgggagcaagtgttgagggtgtttgaacgatcggaacacgttccagcccacaatacccgcaacgacggttttcaaacttgcatgtttagaagtcatatagagcttcgtccccccttcgtccgccttgttccaagcgtccgagatgactttactcaaagatccgttctgtttgatttggtttctgatcatctggtattcttccccgaaacctgtgatgatagatggtaaggagaatgctaaacctgctataccggcataatgggctatagcggggaaagcggtgactggggggaagaatcgggagttggcgatcgctccagggatggcactgactgggatggctccgacgacgaggttggtagagaggaacgcgataggccagtggacagtggctgggtggataggatgacccgtagcgtgatcgggatcagtgaattgacccaataaaggctttgtagctttatccatagctacatcagcctttcccgctgcgtctgaagctgcattatgaagagccatgttgatgatatgag

SEQ ID NO: 33133 - DNA, 437 bp, Glycine max
gaaacaagaataccaaagtataaagttgtataacaaaagtctaacaaaaaataatatctgtccagtaactaattatttgatgggggatccaagatggatacccctctaatgtctcaaacctgataaatcaaactgaacttcacttacaatttgatcagaaacatgtcccatgaaaaagatggtgacaagaacaaacagctttgccaagcattacagtggcaaaaaaaaattcaaaaattaataaactatcattaagcatactaaatatggggcatctctccagcaatgcactattaaactactggaaccaatcttcctgagtatatcccgcaatctgatgttacacctcaatcaaattccaagaaaggaacctagccttgaaaaataaagacaaacaaaaatcccaaaccttacacaaaaacacttgtgactgattt

SEQ ID NO: 33134 - DNA, 463 bp, Glycine max
  unsure (1)..(463): unsure at all n locations
nnnnnnnnnnnnnnnnnnnnnnnnnnncaatattagttgggctacttttataatatttatgcaagaaaagttaatgacacaagttttacatatcaaattaataaaaaataagattcaaaagtgtgacccataaccgacaaatcaatgtttggaaatgaccataaaagacataaaactaaattgatttttttaaaagataaaaaataaccaaaatataaacacaaaagactaaaagtgcatttttgtcattataaaacaatactgtacatagtatataggatataattgccttcgaactcgagaaaaagttcaataggggaaaaatgtacatttgaaacactgtattggtggctatagtatttgtccactttgaaaaatccatgaccttgaaagtatggaaacatcttaacatgtgtggtctttttctttatttgaggctgaagttttatctacatcgtggtgg

SEQ ID NO: 33135 - DNA, 329 bp, Glycine max
gaaaaaggttcagtttgcaaggtttacgggcttgaagggctatttcttttgggctgttgggaaggataaggattggaccatctcaagacaagcttcaaatgcatggagacactgacggctagctacgccgagttattgttattcatattgctgttcgacttgctaggattttacgtaagtcagaatttcatgtaatcctcaagccttaattgatgatacagaatcctcatattcggagttgtggtgccacaacataaataggactgttacatacttgaatactgtgattatgcaccaataatgaataaaaaaaaaatatttcgaattcc

SEQ ID NO: 33136 - DNA, 672 bp, Glycine max
  unsure (1)..(672): unsure at all n locations
gacaccccaattgctcacaaattttttagcaacatcacgagcttgatgggggccccacattgggtcccggtcccacttgaggtggatgagcacatgttcatcaccattaacataaaccttgaaaggtgtcccaagaatggcacgtgtcaaggtgtgtttggacagaaattctccgcaagcatgaacaacgaatcatttgtgcaccccgttggaaaagggtactctatgttggaagcatcgttttacaatgtgagtggtgtgtatactactgatttccctgacaagcctccaatcatattcgatttcacggaccccaaaattgctttggataccaagtatttgtttacgccgccaaaatcgaccaaggtgaagaaactcaagttcaattccaccgtggaggttgtgtttcaaaatacccaaattatgaacgcgcaaagccaccccatgcaccttcatgggtttagtttccatgttttggctcaagattttgggaatttcaattacaccaaagataaatacaagtttaatttggtgaatccaatatttcgcaacacgattgctgtgccagctggaggatgggctgttataagattcaaagctaacaatccagggatgtggtttgtgcattgccatgtggatgatcatcagttatggngactagacatggttttc

SEQ ID NO: 33137 - DNA, 488 bp, Glycine max
tgcaaaaacagtcaccagcctctgatttcacttatcaatctactaaaacctttgcacttgatggtatttttttatgaagacaactatgaaatttgtattcatcatgtttaataggtcatgcataatgtgagctacctaaattgcaatgcaacatatccctgaatccatagactctaattgctagcttcctcaattttgcttttacaaagagcaaaagggcaacttcaaacatgtactttgttggaaactcgtagctagtaactgcatttttgctttagcattcaaggatccttgattttcctgtataaaaaaagaaaaaaagaacttcccaagttatagcatagttaaactctattatattgtcatcaacttaaaaaaaagtgagaaaaaggaaggctatgtcttgtgtctcgcactacagaatcttcctcttttgtattcctaaaactgatgctaataagttataagcactagtggagatataagat

SEQ ID NO: 33138 - DNA, 345 bp, Glycine max
aacatggggaccaaatttattacaatacaagatgcctttacacaaaaagctattgctataaaaaccttctgatggggaagtaaccagatggggaaaaacattgaatttacataatttcactcatcccttacccaaaatctggccacaattggggggtgtagcgtgggataccatttactttaataatgccaaacgcagccggttggtaattgtaaggatcccttaacgaacttaacttaaagatgttaggaaaacaagcattactttaggcatgagagcatgcataagtaactagttacaagtgacatgtgaaagtgctagtaatgataaaataaaaaaactaaa

SEQ ID NO: 33139 - DNA, 391 bp, Glycine max
catgtcctggaatgatagagaagtaccaacatgtagaggatcatcactgggcaattagccccgtgctaactgcaattggtctattcactgctctcaaactaggcatatcagttggaaagaaagtgaggaggaacaacaaggtaactgcaatagaaactgaaactcaatatcttgatggtcaaaatcaaaatgctgccacctctgctacaactacaactactacaaagaaaccttccacttccagtgctacaataccagttagctcaatgtgggttcctgcagttgctaatatgatttttaaggaaagtgttacctcgtccaatggtcggtagtttatttattttggtgtttctatctcaaaacagttacataataattaaacatggacttt

SEQ ID NO: 33140 - DNA, 755 bp, Glycine max
atcatcaggcaaataatgagttatattgcccttgcacaagtgttaattttttacgcttactttcatgaacccagatggcagaaaacgaaggttcaacgaagccatcgttaatatgctatatccctctcccgattctcctcctcaaccacatcgcgaacaggagttggaacctgtggaagcagcttttatcgacgacgggtctggttctgacatcatttcagacaatttggacgattgcgacaacaacgcctccacgagcggcaacgaagaacatgatgactctgagacgacggagaagctcacaagggttcaacgaaagaaaatccgtaagaagaagctgaatgaagaagccattcatcgcggaaaactaattgggccgttgttgccacctccgatgctccagctgttcgatcaaatgctcctgaagaaggttatgccacgcacaactttgtttaggtgatgatgtgacggcttgtgctaaatcagtgaaagtgaagcaacggagaatggcaaaaaggctcgccaaagaaaagcaaaatgccactacttcggagaacgccaatcaaagttccactgtagatatcaaagaaacccatttataagtatatgccggcaacaatcacaaaatagagcatgcaatttatcagattacagttcagcgtttacctcgtgatttgattgtttgaagtagtttagattggatggatgtattaaaacgattatgcgtattgttaactctagaaattttcttggtt

SEQ ID NO: 33141 - DNA, 457 bp, Glycine max
cacaaatggacaaattcaccatcattttcaactcaattatacattatagctattattttgcatacaacctaacccgaaatttcatatattcataattgtcacacctttgattgttggaattcaacacattaaaccaaactattcaacaaaagaaaaattattacataattcaagattatcatagacaatctggaataattttcaaatgatacgtaattgagtttttaaactctttttttatattaaaaaactcaattacatatcacataaaatttcagtaggaccatagatatataatggtcttagattatgcaataatttatcttccagacacaatgatttacaaaaatattctaccacttctcaactgaagaaatggcggggggaacgatggggagagaacaggcgaagaggggagagcatccccatgaagcctggggaagcaagaccattgata

SEQ ID NO: 33142 - DNA, 742 bp, Glycine max
gtttttgaagcaggactaaaacgctttatgcacgagcctgtttatattctcgaatatgctgatttcttgatacgtctgaatgatgaccatgatatacgtgctttatttgagagggcattaagttcacttccaccagaggaatcagttgaggtctggagaaagttcaccaagcttgagctaacttatggggatcttgctagcatgctgaaggttgagcaaagaaggaaagaagcactttctggagctgaagatggaacagcattagagagttctctgcaagacattgtatcacggtacagtttcatggatctgtggccgtgctcctctaatgatcttgatcatttagctcggcgacagtggcttgccaaaaatatcaataagaaagtggagaagtctattttgcctaatggaacgactcttttagataagacatctatggcaagcatttcaactatgccatcaaaaattgtttatcctgatacttcaaagatggtgatatatgatccaaagcatactcctggtgctggaacaaatgcatttgatgaaattctgaaagctacaccacctgctttggtatcatttttggcaaatctacctgcagttgaaggcccaatgccaaatgtggatatcgtgctatcaatttgtttgcaaagtgatctaccaacaggacaaagtgtgaaaacagggattccaacacaagtacaaagtggtaaagcaggaattccagcactattaccagctg

SEQ ID NO: 33143 - DNA, 469 bp, Glycine max
catcatcatctctcgctctttctcttcctcttcctcctctctttcctgttttatctaaattatgaacttttttcggagtgattatttcggagttggcaacatcgtatgttgtcgaactctttgtctccctcgatctgtttcctatttcgtcgaaattctcggaattatcgctttcatctctcacctgtgtactctaaaaattttctctttgagggtatccgtaattttacctcacatacctatttaagcgccagtgatgcgtaaaatagaagttctctctcagccaaaaattattcggaactgatgccgtcattcacctgtgctgccttgaataacctttaaaagccatgttctcccaagtaaatcaacgtacaatatatagccattcatcttctacctggcaacaatgtcattcactgaacaatcgatcagtcgtatcattggacgaatagacatttcttataaatca

SEQ ID NO: 33144 - DNA, 473 bp, Glycine max
ctgcttttctttgtttcgcttacgcccttgcctcgttcatgctcagcgcgcgcttccgcggcagcatccaacgactccatcccttcccgcgccgtatgatgcacgtgagcggggccgctgcagcgccataccggaacgcggcgatcgctgcgcagacggaggggatccgcaagccggatctcgatgaccgcagctaccgccacctgctgctgcgcaacggcatggaggcgctcctggtcagcgatccgaccacggatctcgccgctgccgccgtggacgtgaatgtcggccacttctcggaccccgatgactttccgggccttgcgcactttctggagcacatgctctttatggggagcaaaacgtatccggacgaaaacgcgtacagcaagtacctgtcggagaacggcggtcactcgaacgccttcacctctatggagaacaccaactactactttgacgtgaagtgggac

SEQ ID NO: 33145 - DNA, 520 bp, Glycine max
tcggtggtgaaggtgttctgcgtccacacggagcctaatttctcgctgccgtggcagaggaagaggcaatacagctcgagcagcagcgggtttgtgattggcgggagaagggttctcaccaatgcgcattcggtagaacactatacacaggtcaagctcaagaaacgtggctctgataccaagtacttggccactgtgctcgccattggaaccgaatgtgacattgccatgcttacagttgatgatgatgagttctggcaagggatgtcacctgtagagtttggggaattgcccacacttcaagacgcagttacagctgtgggctacccaattggtggagacactatctccgtcaccagtggtgttgcatcacgcattgagattctatcttatgtccatggttctacagaacttctaggtttacagatagatgctgctataaattctggcaattctggtggacctgcatttaatgacaaaggaaactgtgtggtgattgcatttcagtccctcaagcatg

SEQ ID NO: 33146 - DNA, 464 bp, Glycine max
ctcccggcctgttcttttttttttactcaataacttgcttaattaatttctcaatcggtctaactcggtataatatactgttcggtttataagagagtagcggctactactagctggctagctatatatatataactatgacacaacttcactagtttctttagctctaagatacagtttcaataaattggaaagtttgaaattaagttgaaactgaaactatagctaacactagcagtagtgtccaccgtactggctctgcagggtcatgactgatgctgaggctgaggctgaccccattgcattaaattcaacaaggtcttgttgaagaaaaggtcttcttatagagtcaatactattattatgatctccaacacccaagaaatctcttgttaaaccaagttgttgattcttggtatttgagcttagtgatgagtgcaattgctttcccataattgatgctt

SEQ ID NO: 33147 - DNA, 367 bp, Glycine max
actaaaacatccaatagtatccctgcccattttatattgccaagcatgttgcaatcaaacaacaaacactggtaaaaaggaagaaaaaagagacattgagaatacatcaatttattacaaaaccaagttcatgacctctagagcaccacttaggttggttctaacaatatattttaggttgaaggggaatctttggtaacttttccaagacctggtgaccgtggactaggtgtctgcattaacttgatgtccttcctgaatggtctgaggctgatttcccctataaatgcagctactgtagggctataaatgctacttgtgaattgagggctattagctggacttatatctcccattgaagttggag

SEQ ID NO: 33148 - DNA, 495 bp, Glycine max
gaaaaacaataaaaattcctttcttttccaactaaaaacaccacaagtacattgcttttcatttgaaagctaacatttcaccaaaacaatactacattgtaattgtaaaaaaatccaatcaaaagataaaagcagagactaccttaatatagttaattccatattttgaagaagatgcatgcacttaaagccagtgtagtagatttaatagtatgagagcttggcaatctgcccttgtccttccttaagaaaaggccttggtatattgggaaattgatgagaaccaaaaacccacacaatagaacttgcaatgccattttctcaccagtcaaagcaactttgcaaaggactaactcttttatagtggctagtaagcaaaacaaatggagtaatgcaagtgttgctagtacagtgaaaaatggagaagaggttccaaactccatgacctcgttcttgtaacgttgggaaacatcatcatcttctacaatcttagtt

SEQ ID NO: 33149 - DNA, 379 bp, Glycine max
tgcaagattgaatagatatgggtcatcttctttggtctcaacttcacagatgagaaacataagctctaggtccttaaaacacaagcaaaacgaaatttgggcctttccaaagggagaaaaactgcatgctggtactcaagaatcaaacatgttggtgtccagttctgtgaaagatacttcttatgagaagtcaatgcctttagcgagtgatcttggtgtggatagtgccatgaaacaaaaagcaataatttcttcagggccttctcagggatcaaatcacagagggtggaatcaagtggttcttcatcaattcaaagttataaaacagaagataaaacatgttcttgtggaattcagaaaaagcggttaccaaactact

SEQ ID NO: 33150 - DNA, 368 bp, Glycine max
ctttctttcctgtcttgaatggccgagccccactgcaccgccgcgatgcttcctccctccaccgcccggttggaggaaactccgcccgggagctctcagactcccctccgctccggaagaggcggctggagtattgtcgatggctccttcgccattggtagggacaatacctgctcctgcttcgtcgtcgtcttcagcttgtgggtcttcgcgtcgatgactatgaccctgggggttcatgggtccatgaccatcgtgctgggtccaaaatcttcaattgttttccaacctagtcccgtgttcgatcaatctgagaagaaaacttaaaggcaaaccctggcccaagacccattctttatgggacatat

SEQ ID NO: 33151 - DNA, 390 bp, Glycine max
aaaaagtaatctatgattccggtggctattcatctagtcactattacagtaggcaatgctgcaatggccaatacgaccctcatcagcagacaccatttgcttgatcattgttaatgattggcaagaaaataatgtatagttgagtacataaaaggtattctatgattctggtgactactcatttaatctctacactaggaagtgcactgatcaaacagtgaaaatcttcctaaccttcttcatgttcctacgacaaacagggcaagttccagctgcctcggctatcctagttccacaagcaaagcaagccacacagtgtccacatggaaggaagaagcagtccctcggagcatcaaagcaaatagcacaaagatgccgtgtgttattact

SEQ ID NO: 33152 - DNA, 641 bp, Glycine max
aaccaaattacttttactagccattgtaacactgcatacgccaaccaaacgtctttttttggtaagtggaggaaaaacaagaaaagaaaaaacagaattacagtcttaggaaactagttccatgagcatctgcttggagcatagatttgagaccttgcggaacacttgcaaccagctgaagctgcacccctgaattaggaccaagctcagagatgaaatcaacactcccttcccttctctgagagtatgacgaagatccaccacccacgtccacgccaaccaatatataattgctagtaaaatattttatggccattttaattgccattaaaagcaatatttatttccattgaaggggcttttcgttgtagctgtggaagcaacaccaagcagcacggattgcataattaccaaaccatacactttaagaccaatacaccatggattgatattcgatggcactggattaactgactgaaacaattaagttctatgggctatttaagtaaccatactttgcacaaataaattacaagttccaaaacatgtattaataacattgacgacaaatgcatatttcacccctaactatgaccagaatttaacgagggtatagctcaaaaattgaagcctcacttact

SEQ ID NO: 33153 - DNA, 493 bp, Glycine max
ggcgtgaaaaaacttaaaactatatatttgattgcataatgatcattattttcatgtaacacttcttttcaaataaccaagtttaataacagtgtttccaatatgaacatacaacaaaacctccatgcacggggataatggaagattggaataacattggcaccaactggctgtgttgaccgcagccattattagtcgctggaagcaaccaatattttcccagaacaaatcaggatgcttttttcttcaacaaaaacataaatagcacgcctgagaatttgcacaaactccgtgtccatggtctaaacttttggtaattgatatatactagcctctttgggatacgatcaccaggctcacacctgaagcagatcaagaaagttcaaatccggcatttgaactgatggcatatagaagctttgctctcaaagtgcctggacgtttgtatgttggaagcttaagagtattgtaccaggttgaagctgatggaagt

SEQ ID NO: 33154 - DNA, 529 bp, Glycine max
aaattaacacgcttacttcaaaggaccaattttaataacagcgtttccaatatgaacataaaacaaaacctccatgcccggggataatggaaaattggagtaacattggccccaactgggtgggtggaccacagccattattagtcggttcccaaaccaaataaggatgctatttttttccacaaaaacataaatagcacgcctgaaaatttgcacaattgatatatactagcctctttgggatatgatcaccaggctcactaaaacaatggtttgtgcctgaaaacagacacataaaaggtcccccgaacaaatagactactctcaaattccttgaatatgaattaaacagcaagagattagctagaccacctgcggcatttaagtatctgttaattgaattgcaacaatgtactatgtatgattttcagactcagataaacagacacaaactcaaactggaaatccaaaatccaatgacgttattctagaaacaatcctctctcatttggcttgtttataaattgcc

SEQ ID NO: 33155 - DNA, 395 bp, Glycine max
gctgttaatttgcatgtatatattgtggcatttgaatttcgaaatgagaacttagatcatacaaggagtgacatgtgcataatgttggtccctcttatagtttatatacgaggtgacatccacctttacatgtatatatatatatataaaaaaaaccaatccacaaatcactctgcagatctctgttttctgtgcaccaaaatagtaaacactacacagtcagtataaactatgtacacattaccatacaatcgaaatattcacctaaaccctgatttacatacagactacaatataacattcatcaacaagagccaaaattaaaaaaaataaaatatataaaaacaggttgaggatgagattgccaatgccacctccatgatttacacccaaaa

SEQ ID NO: 33156 - DNA, 293 bp, Glycine max
gaagccaaacaaatcattaagccaattgagtaatccattttgatattacaatattgagggcaacaaataagtttttcacaatctacaattcaagccaatgtataaaatgtcaaacaagagagtttactaccttggctttcatgttgcatgcctgttcaagctcctcactccaatagggtgtaattggtttcctaatgtttttaagcatgatggacaaactaaagataaatatcaataccaggtttaagacttaagagttgcatatcatggcatgaaatacaatcttagctcga

SEQ ID NO: 33157 - DNA, 555 bp, Glycine max
tgagaattatgactatgatgttcgggatgatacagaaaccttcctcaatgggatagttccagagggaccatctgcgccttggaagcatactctagaggggccagatgacatgccggcacatattaaatcgtcgatgtttggttgtgcactcatgatacccatttcaaatggaaagcttaatatggggacatggcaggtacgcccctccgcttcaatgtagaagattggagattccgctaagaatgaggagaaccatacaactcgttaggagcttgtcagaactcagcaggaacatgagtatatctctacatgagattgagttgatgctccatatgattggttttatgtccacaagagattgacgtaacttcttctaagaaggagtatatcgccacataacgatgaatgccatagaatttgatttatttagtgttgtgtacattggttgtgatattatcattgttatatgaaaaacatgtgagatgacattaaaatatcttgttatgaggaaattattattttcaaatattcatgttatcactagtgttattattg

SEQ ID NO: 33158 - DNA, 575 bp, Glycine max
agcgcgtatacagctgtttatgcaaatctttcaaagaccatgcttagactagaagggatctaacttcgaaggtgacgatgccttaaaatgtttattagcttaaaagtaaatccgacaatgatgactaggatctttagttagcggtggttaagattccttttttgctctataaatcatctatattctaattcttgtggggattgctatggcggttgtgattatcttgacgacatgtacccaactaccttgttttaacagactaccttgttttaacaggtcctattcaatttgtcaattcaatggtcgatacaaagtttttagttatgtgttttgcgtggaacttgcaaagtggacggtgtggccttcattgtcaatgcagcattttttattttatttttgtacaatctttggctcataagacttttctctaattccagtccctgtcactgtgctctcaatcatggtagtgtgaacatacaagctgtagagcgtatgtagcatatgttatcgagggaattttctttcttcttgtaatatgtgcattacttgaatttagatgttgtgaaatcttttat

SEQ ID NO: 33159 - DNA, 705 bp, Glycine max
aattttctgactattctcagttgtaatgtttcattactgatgcaggagggacaaattttgtgagtgctatgtctgcaatattctccttggttttaattatatctactaccttataattaactatcaggtgcgaacactggatcccaaagctgtcaatgatgaaaattgcactggaaatactagtgatggtggcaacaacacatggtgaagtgcaggctcggagaagaacaagatgaaagtgaggaggaagctaagagagccacggttttgtttccaaacaagaaatgatgtagatgtgcttgatgattgttacaaatgtaagaagtatggttagaaagttgtgaagaatagccttcacccaagcaaaatgaaaagaaagatgactccaatgaagtgccaagtagcaattatacagggattgagacagaaaaggatttttaggttgacacaataagccttagtgaggactcatctatacaataatgtatactagtggaactactggtgaaatgacattatgcaactttggttattcatagtaagtgttgtttttgtaaatagtttctttagtaaaggttaaatgatgacatacttgcaatgaactatcatggatcctttgtaagatattagggaactaagtttgttcccatatgaatttgacccctcacaaattcatataaaattaatattattttaatattcgtt

SEQ ID NO: 33160 - DNA, 551 bp, Glycine max
  unsure (1)..(551): unsure at all n locations
nnnnnnnnnnnnnnnnnnnnnnnnnnnnnnnnnnnnnnnnnnnnnnnnnnnnnnnnnnnnnnnnnnnnnnnnnnnnnnnnnnnnnnnnnnnnnnnnnnggaagggtaatgactaatgtgggtctcaatttaatggtcagctagtagtgcgttcatgctatcaaattttgtactagtgttacataatttcagcatctaattgaatttagcccttgattattcatctgaccatataaaaataaactgtttggaagatgacgaccttgcttatgagacagaattgctacgatggatgtcggaattcgaatctcgattgcgggggccaatcatctaatcatcctgttcttgatctcttatccactttggagccacccacttctccccttttatcacggggcagctcccatggagtgatgtcggatcaattgtcccattagggagcaatgaataaaatagaagaccatccccttggcgtggctttacttttaaaccaatgcagtcctcatacccatagttaccatccatgttcaagccattctcaaatggaaacat

SEQ ID NO: 33161 - DNA, 221 bp, Glycine max
gaagaaagaaaggttcagctcatcgtcaactatgtgcactaagctatagtgatcaaatgaaatgcgtcaatattttagtgcgaccaacacctgaaaagtgagggctttgttttgttgtcctccaagttactggatgtttgtattggaacaaatgcatgtatcattattttaacttgtatatcggattttttttttaatatacaatgtactctacatttgtc

SEQ ID NO: 33162 - DNA, 678 bp, Glycine max
aaaatatgaccttattgggagatttagtgctttcaaataaacttgtcttctatgaccttgaaaatcaggttattggatggactgagtacaactgttcttcaagcattaaagtgagggatgagcgaacgggaacagtccatttagttggtttccactacatttcttttgcttgtggtttaaacatcaacttggtgatgattttgtctctacttgctctacttcataaatgggtatattgaaatgaagcaacaaatacatataccaaagtcaaaattatggtcaaaggatttgaaaatagaaagaacatgaaaaaaatgctgtgagaaattgacttttcaggaacttccatgatttataaatgtaatcttcaaggaaaactaggacactgaccattgggaaacttcgctgtgggtaaaaattttcttctcaattcccatcatggtgaatatgtaaattgcaaaatcttaccaccaattgtatatgttattagactttgatttttgacttagcttggatctcaatgccaaatgtataattaacatatacaagtcacgcacggaattgaagttatagttgcaaatatttaacagtagttattgtagagcatttctgtgctggttgactccattatttgacctatttttagcgagagttataatattgttacgacaagttctt

SEQ ID NO: 33163 - DNA, 877 bp, Glycine max
gcttctatatgctggatgttggtcaattaacaaagatatcttgtttttcatttagaatataggagaagaaagtgttttttatggttaagaccactgaaatcctactgccagcttcaactagcatgagttcactctacattccaattacagtttacacatgacaccttcagcttcaaagaatcttttaaaccaaaattttaataccactgaaatgatcacctcgttaaccagttgaggcctacattccatttagagtgtagatgtgctgagacatgtcactgatgacttaagaagaaatcactaatcaatatctagcaaggacaggcaagagtagagcttatagaggcttgggcaatcctcacctcataagctagtttttgggttaagttagcccaaattcaatagaagctcgagccgcttcataaattgatttattgaaatggagcaacagatacatataccaaagtcaaaattatggtcaaagaaagaagataaaaaatgctatgtgagaaattgactttttaggaacttccatgatttctaaatgtaatcaagggaaaactaggacactgaccattgggaaccttcgccgtgggtaaaatttttcttctcaattaccaaggtgaatatgtaaattgcaaaatcttaccaccaactgtatatgttattagactttgattttttacttagcttgggtctgaatgccaaatgtataattaacatgatacaagtcatgtttggaattcaaggcagtgttgcaaatatttaacattaggtattgtagagcatttctgtgctggctggctccctttgtttgacctattttagccagtgttataatattccttacaacaaattcttatataacatttttaac

SEQ ID NO: 33164 - DNA, 332 bp, Glycine max
acagtttacacatgacaccttcagcttcaaagaatcttttaaaccaaaattttaataccactgaaatgatgacctcgttagccagttgaggcctacattccatttagagtgtagatgtgttgagacatgtcactgatgacttgagaagaaaccattaatcaatactccctctggactcatatataagcaaaaaagtgatcttttaagttggacttaaatataagcaaatttaactaattttgtcttattcaatgcgatcattcctaaaacatccctcatttaattgtaattctattttcaatgactcttttttattcatgataaccagttcc

SEQ ID NO: 33165 - DNA, 735 bp, Glycine max
ttccatcttgcaatctatccttcacaagtatggggacataggagcaaactgccacttggaatcagttgctatgcgctcatattacattgagtgtgtatgctttgtggtgcaagagttacataattcctcctcagtaatgcaattaagcaagtccaaagtcaaagaattgttggctattcttaaggatgtagaatctgctcaacttagtgtggcttggttggctagcgccctcgatgaactagctcagaatatcgaactcattaataggtaccaggaggtagaagcacaaaaggataactctggtggccaagtggagtcactgagagaagagctagaatcagagttggaaagtttggctcagaaagaacaggaggttgctaatattaaaacgcgaattcctgagatcacaggtcgtttgagccagctcgagctcgagtcagaagtactcagcaaaagcatgcgatctatcaactccaaggttgataatttgcatatcaaatctttgctatccgaactattataactgttcagcaaattcgttaataagttttaatgcttaaaaatagaataggttactgaataaatgcatgcacggatcaatattttctagttttagagattatacgagcacatactgatcacatacggtagagaaatatgcaccttctccattggatttggactttaattgtttgaaaacttgtatctctgactgtatacacattttattcctgt

SEQ ID NO: 33166 - DNA, 963 bp, Glycine max
gcaaggtgttcagcggctattgcgcaagatgttggatccgaatccggaaactaggatttccatagataaggttaagcaatgttcttggtttaggaaggggccaaatggtagacagaaaacacaagaaggggaaaacctgtgtgtctctccttcagttacaaatcattctgaacaatgtggtgatgaaagtgatgatttagcagcagaagcaagggaagagcaagttgtgccagtaagtataaatgcctttgatataatctccctttcaccaggttttaatctttgtggattctttgaagacagtattcagaaaagggaagcaaggtttacttcaagacaaccggcatcagtcatcatctccaggctggaagaaatcgcgaagcagatgaggatgaaaataaagaaaagggctgcaggtttgttgaaattggagggccttcatgaaggtaggaaggggattttatccattgatacagagatctttgaggttactccacttttgcatttggtggaggtgaagaaatcaaatggagatacattggaatatgagaaaatactgaaggaggacattaggcctgctcttaaagacgttgtttgggtttggcaaggtgaccaacaagagcaatcacaacagttggagcaacagaagcagcaacaacaattaccacagtcataagtacaacattatcttagtttttaatgtctcatgccttatatttgtgcattacataatatgaaattttgttttgaataatgctgtctcttatcttctgttttacaatgccatgaccttattgtattacgtcctgtgtctcaaattctgttggcagatgtttctttagttttaatgtttagtggttagcaaccgtttctagtggctcctcgtgtttttaaggacatgactgaataacgagaatgtagttgcctatgaagaaaaactatatataaatggtttagtttctt

SEQ ID NO: 33167 - DNA, 506 bp, Glycine max
ccaagaataatgaactttctttcaaaaaaactaaataagggaagaaaaactaatataactgtattttgtcatcaaagccaaattaatacagttcgtgtgaatcatataatatctcagccttcgtactttatctttgcaggaggcaaaaggcaatatcacaagctttgacatggacgtgaaattcaagaaacgaaactggcccatgaatgatccaattattgccacgccgtgaagagcaagggaaggactaaggaggggcatgggacccaaaaattgaccacaaccaaccactgatcgtgtcagtctacaatttgaggtggggaagggctttgtttatcttcaacggatatttcagtctctaagtcatccatagcctttggtgttaatgccctttcaatcttcatgcccgtgccattgacaaccatctctttttctaagtgaaagcagtagctctcaaaaacccgtgagcttaccataactctaaaatccaacagaaagagtaactc

SEQ ID NO: 33168 - DNA, 560 bp, Glycine max
ttttttttttttttttttgactaattactagtaatttttttattgttataattaaatttttatataaccataattatataaaaatttaatgtttatatggactaaacaaaacatcacgtacgcaaacaaacaagcaccccccgttgaaaaaaaaaaaagagcctaacaaatcgttacataaagctatcagttcacccccccctcttccacattccccagcgaatcttgcatggcaacctcaagttctccccctgttgatatccccgcaccacgtgcgcatccataggtaagataagcaaagaacaccgcatggaaaacaaaaaccagcgtaagaacaaaagccactatggttgtaaagcaaatgagaggcatcctgaagaaaccgctagtcacagcaatccctggtgccttgcccaccagatctggaatgtggacgaatagtccaagaaaggagattgtcaccataaccatcccacataatggttgtggacaactaagcaacaaagccagcagaaagaccagcatgattgccatctcatatgcaatcacagtacgaaacc

SEQ ID NO: 33169 - DNA, 571 bp, Glycine max
aaaaacaattggggaatttttattaccaggacaataactaaccaagtatccgcccgcacaagtcatattgtataaaccgtttctacactcaacacatgcttacactctcgtcctcccccttcctttttttgctggttcagtgtattctcattacaatttccacaacaaagagatattctaacgtttaatcataacccaagaatgctataacatacaaactactcttctttccttccgatattggataacccacaattcattcggataagaaatctcttctatttgtatttagaggatgcgcagctgcagcaattttctcccgcaggttgaatttctttgcaattagtggccggacatcatcaacaccaaccaagctctccaagaacggaagtaacaaaagcaattcttgatctgaacgatcatcaaaccaactctcgattgggattccattatccacttggaatccaaatgcctgtggggaattgtcaattattataacatgtgccaaatcacgaccaagcactgttaaatctttgaggtaattcccctccacataaacacaggactcacg

SEQ ID NO: 33170 - DNA, 513 bp, Glycine max
ccgccctttttttttttttttttttggactgccaatgttaaatttagtttattattcttgtattacaacattattactgccactcaccggctagacagcaatccaactctacaattatattaaattttcatcacactttacaatatagttcgcaccaaaggatcatgatcattactcatacaatctacatggtatcacataaatgaagcaaaaaacttggaaagactaatcctgtattttcaaacccctgaatctaaggaagaacctttagtctgcacaccaagaactaccaatggcctcaggaaatggagtggcgtcgattcttatttggttttgtgcgacctttgggaaaaggcaagacaccatcggcacgcacaaaaggagaaagcctcccaagttttttggacactgaactcatgaatgatcttcgaggcaaaggaggcttatcagcagaaggtgaagcacttacaacaggactattaactgttgatttaagcgtggaattttcaatct

SEQ ID NO: 33171 - DNA, 465 bp, Glycine max
gtctactgctcaccgcgaatgacttgcaactgaaccagacgaaggaagcaacttctgggaacgaacaacagtacaaccacaatccagtagacctggcaccacagtgcaagcagaacacaaccgaccagcaccgcgctccagtcgcgacgagacacacgctcacaatgtccttccccacctccaacaccacaacccgcagcagctcacccacaacgacatccgaaacccccaccaccctctccaaaccccgcatcctctgcctccacggcggcggcgtcaacagcgaagtcttccgcatgcaatgccgctccctcatcaaacacctcccagccttccgcttcgtcttcgccgatgggccctggttctgcgaagccggaccgggaatcgtccccgtctatgaagactgcgggccttttcgacgctggcttcgttggttaccgcatcagcctgaaacggacgatgagt

SEQ ID NO: 33172 - DNA, 363 bp, Glycine max
tctttctatacatagagtggataagccaatgtaagtatgacttaagtacaagagaatactccagaaaagcacaaataactcttgttttgttccaatttttgttcagttttttcttccttttctcttctgttttctcttaaagaatggtgtcattaaagaaattttgggcaaagtgacataagagctggtccatctggaaatggtgttttgttctcaagcaagatggtgaatgtccttaaacgagccatcctgtcctggcccttttgcttctaaaattttgcagaacaaacttaggcctcactaatttcttttagaagattctggaacataaatgttttcattaattatctgatcttggatttg

SEQ ID NO: 33173 - DNA, 398 bp, Glycine max
aaataaataacacaatgaatggaatgtcttgtatatacaataaacgacatggtacgatgcaaactagtaagatcaatatacaatttgcctctagggcgtatacttaatttaacttggaggattgaggaagccataattagaatgaaaatgtgaaaactaaaagttatttggctaactattgtaccaatggttgatgaaaatttcttttctccttacaaaacaatgatattcactttatcatgaaggaacagtttcttgcagcttcattaccctccaatcatgtttctgtacaactcgtactcgtatatcttatgcttatgagaaaaatatgaatggaaaaagagatcaagaatatatatatatatatatatatatatatcatgcatatgcttgaagcc

SEQ ID NO: 33174 - DNA, 433 bp, Glycine max
gttttgctgcatctaaaaaaacagtacgattcgcaattgttgttgatcactgactcgaagcgggcaatcttgggaggcgggaacagaagatcaaaaggtggaaacagaaaatccaacaccagcagtggcagcggcattcctaaatctcgaaaaagaggttcggatgttaaaactgcattgttcgtcgaaggcggtttcttgtctgattggcatctcccttcccctacccaaattccagggagaagttctggatccaataacaaatctgggagccatcgtagaggtgaaggctctgtatctaaaagtgggtttgcgaaatctttgggagctactattcgatacaattatccttcatttgatgttcaggaggttgcatgtgctgggattgggaacaatggtgaagatagtaatttaaatcagctgcaaccttttg

SEQ ID NO: 33175 - DNA, 683 bp, Glycine max
gtagcaagttaagatcaccatgtactactttatatattaaatcatcggtggttgcactcagtgtgtgcatggagtatattaaatccaggatctatttattatttgtagcactttcaactattatttgctgttaaataaaattcatgcagtatatgctagaaagcttatgttcaataaattcttaaaaaatgaaaaatgcgtaggctatcacattcctacatgttacacagttctcaccaaaaaatattgctcaagggcgatcatactgtaacagcggacctttgctgttgtacacaggaatcgttgctttgcagatatccaacgttgcttatcttttttcccatatgcatcttacgacaagaatgccatgcacaaaggaggggagctgcagaaaccagattaagaaaaatacctgtagggcttctaggtatactgtacagtgcttctcttaaaatagtacagtaatggacaagaagtggagagaaaaattacaccaacaccagatccccttctgctgcttcttgttcctgttgttctggtagccgtgcttcccgatatgggagaagtattctcctgatttcttctgcactaagtgtctcgtactctaataatgcatttgccagcacatgtaatgccttctcatgctttttcaaaagggctttcacacgatcatatgctctcgt

SEQ ID NO: 33176 - DNA, 467 bp, Glycine max
aaagattctactctgaaacgaggttatgttccataatccattttacatttcaaagtcaagtatgcatatttcaggtggctaaattgtctactggtgactctttagacatgacacagcaggatggatcattaattattgcaaatgatgccacaggtatagatatggaggtaacctgattatttgtgttataccttgggacattccgctcattctattgggaatggaatgaatccacatattcacaagtaacatcttgtatcatgaaacagaatccccatttgaattgcagaggactgaattactaggagttgttctcatgtttcctttgtggaacttaactcccccgtttcaactttttctccagggagctgctattgcttatgttgccgacctactgaaagttcctgcaatttttataaaagccgtgactaataacgttgatgatgacaaagcaattgtagaagaat

SEQ ID NO: 33177 - DNA, 482 bp, Glycine max
aaaaatgggagtgaaaaaattcagagcggagatttataagaattaacataaaaaaaattcttacattttcactcacattttaaagggatagtaaactcgaccttagtgaaaaatattgggaatgcagaaattcatccaccatagtcctttatacatgaagtacaattctagctcgtagaggttttcactcaatcccaaaccacgaccaaagatcagtaaaagtatatctaaaatttatgattcttccggttgagcatcagaaccttggtcttcatcttcttcacttccagcatccttaatttgggcttcatcatgttgacttccagcttctttattcttttcactgaattttaagcgaagcggtcgtcccattaactccttcccatccacagtataaatggcagcctctgcatactccctggtaagaaaagaaacagatccgtacccagcagatcgtccagaaaggctgtcaaagacaaccc

SEQ ID NO: 33178 - DNA, 519 bp, Glycine max
gaaagctcagaaatcatgcttaaagcataaattaaatttaggtatagttgcatcatgcaaaaactagaaacctataatgtacaaatcaccctcaaagcccaaaatgcagcaaatgaagaaataacctgaattcaagcacacctatagtcccatcaattcaacaattctcatcaaagatacatataaaccacacagtttcaacctcctcatgttcctctccagaacatctgccttcctcaaattaccgcctccactctgcttgaattacctttccattcccatctctagaagatgatacagttctgtcacttctgtggccacctttgcctcctgattgaacttgtctcagtgtcctaggtgaatgcgaactaattttgcagttagttgaggatggcagagaatgtcgccgagtatggttgtttttttcacttccatcttgtccaaatctcggggatccttgtgccttcaactttgcctttgcagattcagttgctgccatgtaacttgtagtgctggact

SEQ ID NO: 33179 - DNA, 646 bp, Glycine max
aagaaaattaggataattagttcaaaccctacctaaaatactcgaccatgacagtcaatactccaaacatccaaaacattataatcattgactgccaaatagatcctgaagaattcatttttttcatgatatacatttcttactgaaaaattgacttctgtagaaaatactaaccttagcaggtagaggggaaacttttacttcattttcacttgaaagaattatggccttactctcctgttgatgcttgaaactgtgaatgactgacatcttctgttgtttccctgttacaagtgcctcacactggttcttcatttggtcataaggtaaaggagttgaggaagtggagaaacttgcaacttgccgtgcagtttccaaaaccgaatccaagagttgattaacatttagaacatcggggtagttggttgacagtgatgttttgtgatctgactgacttcccctatgttcaggtccagtctcctcctccatcaaatcatccggagccattatctcatcaaaatttgggaactcaatctgagcaagaggagaacatggtcttggcgtctccataaataatggaggtcctgatggatatgcatcatcaggggaaaaaccttgtagaagttgattctttcccacgcgaccg

SEQ ID NO: 33180 - DNA, 693 bp, Glycine max
ggtaaagagacaacagctaaccaaaacaaaaacaaagagagtgttcatctctatataaataaatagttacatacacatctattatgccaatcttgtaccattaacatccagcagctttcaagaatttatcaaaggggcttgcaggtggtagtttcaaagaatgttgctgtccaaagtcatatgaacataggcgaacttgatattgtgcttgaattggctgctgactcactaacttcagatcaccttctgaataatccagtgtcttaattggcagaggggaaactttcgtttcattttcacttgaaagaactagtgccctagtctcctgctggtgcttgaaactgtgaagaatcgacattttctgttgtttccctgttacaagtgcctcacactggttcttcatttgatcataaggtacaggagttgaggaaatggggaaacttgccacttgtcgtgcggtttccaaaaccgattgtaagagttgattaacacttagaatgtccgggctattgctagatagtgatgatttatgatctgactgacttccacttgatttgggccatgtctcttcatccatcaaagctaatggagccacaatctcgtcaaaatctgggaactcaatctgagcaagtggagaagacttccctggtgtctccataaacaatggaggtcccagtggatacgcatcatcaa

SEQ ID NO: 33181 - DNA, 422 bp, Glycine max
gattctcgttacctttttcatctatcctagtcttactactgtgtacctcctttacaagatctttctcagaagtactcctgtcaggccgatcatttttttctgatttttttctgctttccctacctgaaagatcatctgttgctttttccacactgatgttctttccaggcagttcagatcttgatacccctgaagaatctttagaactaaaaccattaaatctatcaaggcttctttcaatggaattaagcccattatccttaagatcttcagtcaccaccttggaagaatgtgaatgattggattccttggtcaccttgtcatcatgcaacagatcagtagcagcatcattgctacttctggatggtaaagagatggttttgacctgattattcatcaaattagtttcacttctatcatgc

SEQ ID NO: 33182 - DNA, 393 bp, Glycine max
tggacaaagtgttcaatatttgattgatcagtgttattggtttcctcagaagtcacagattgtagaatagaagtgtcagtatcatctctgttctcactatcacttgatgcctcgggttgaacagaagaatttctcttttcactttgttctgcttggaccctctcttcttctttactctcctcttttgtctcaacttgagaattttcatgcccatcactaatatcatgtgattcacccgactccgtagtgacaccctcaactacattgtctccaagattagaaggcataaattgcactgacactagactcccagaggatcccggatcagcaatctctttctcttgagaatgttctacagaatctgaactctcaagcttctcaacaggggattca

SEQ ID NO: 33183 - DNA, 567 bp, Glycine max
aaaaacataattatttctctaaaacaaattaatctaaacatgcaatttatatattattatctatttgatgcttgtatttttttacatgtttgttacagacggctcatctccccgggctttttagctgaacactactacctatttcagcctctggaagaggtaagttgttaactagaatgtgtgtttgtacatcaagtgcttctggcatgtaagagattgcagacagtgttatgacgatgctagtgcaatccaataattttccaagcataaactgtttggtgtgccaatgatccgtgaccaagcccattctgtctcctctacaagttgtaattctgccaacccgccatctctgaagctcaaatatgacagaaccttcagaaaatggaattggtctggtggatgccacctttggttcacaatttaagttaaggtcagcaaggttatcttggtccttgctcaagccagatgcacaattttcatcgatccgaactggtttctcctcattgattcctccactatgtgtttcaacaattttatttcccatagaggggaaactacaatcctggt

SEQ ID NO: 33184 - DNA, 564 bp, Glycine max
tttcaggaatcacaacaaagtacaataatgaagatggtcaccgggtataaattattgtatagtctattctatacaatcttaaccaatctccacgtgacacattattaattctttttaacaaactgataaaaatataattccatgtcatgtgtagatcagttggaagttggaataatgcgattctggaccatataataatttctcgtgagagtggatttttctcgtttatttttcttcattctggggaatgttttgaaccgtggacacaaagctagtagagtacacgttttcatcattacgaggaggtggatctttgagcaacattcccgtatcaaatggtacaacactttggtatttgtaccattttgcacacatcagataaatgacaaagttaattatgctgagtatagccaaaaaccagtagaataattcaacatggtttcggttcaagtcacgtccctctagccaccctttcttgctcttggcaatcttaccagtcaccaagttgatgagctcaacaaaagctgtgctcaagtagtaaccaatggacaaggaaagaaagga

SEQ ID NO: 33185 - DNA, 450 bp, Glycine max
cggaaaaaccaaatccaactatatttctcaaagcatgtgaattattggatgtaaaacccgaggatcctgttcatgttggggatgaccgcagaaatgatatatggggtgccagggatgctggctgtaatgcttggctttggggaaacgatgttcactcctttaagtaggtagcacagaggattggggttcaggtttgaaaaatgatctctttacaataagtttgatgttatgtatagagtcctttaggctttagctgtaaggctgtacatgttctgctcccttttccaatgtatgtatatatgtatgaaaaagatgtgaacctataaaaaccattaataggtgtaggtaggagcttttgtttttccattgatccgtgttttctacgaagtttattttaaaattataaataaaaaaaaaaaaaaaaaaaaaaaaaaaaagggcgagccgccg

SEQ ID NO: 33186 - DNA, 440 bp, Glycine max
gctactagtcggtggtcggcggccgccctttttttttttttttatcactcaatcataacttgatataaatattaagtttgttggctattacaacaatcatctcaaaaatcatactactatgatacactatagtgtatatatggaaatttaacttgtaaaatttttgtttcttattttaacattttttctaacttcaaaagaagaaaatttagttcacaaacaccagatgcaaaggaatgctagtataatctggactatggagggattattgcatggttttaattttaaacttgattgggtatatagattaatcttgcaggatgcactgatgcgcgcactcctaattttcaatatatctcagaaattgtttgtccaaaaagaatgtaatatattatattttggatcgtgcttttgcagtaagctctcttctgagaattttt

SEQ ID NO: 33187 - DNA, 463 bp, Glycine max
attaataataaaaggatggaaatggaaatatttatatattttgagaaattacagaaacaaccatgagatactctgttaagttctcagttgcaaaaaaaagcaagaaaaagcgcgtttgcttttcggttataacgtgtatttacataacgtgccgattatatcttcatcacaaaatggtcaacaacaattccgagcatcatgtcatccactactcacacttagctgctgctccctctccgtaacactataatttctcgagggcaatttcgtcacaaaaaaatgcgtagtagtgttcccagatgcttaaaaaagtagtacgaaaaaaattgcggaaaaccagatctccctgcatgaatcaggcaacctccgggagaggaggcacgttcaggtcaagatcaaggagcacgcggcggttgtaatcggaatcggagtcgttacggcggaaatcagcggcggggcgttc

SEQ ID NO: 33188 - DNA, 473 bp, Glycine max
ctgatgcggagatacctaagtcagaaactgaaggtgtgcttgaagataaagccttgcaaacaatacttgatgaagcattggtcaaaaatgaagcagttgatgaaagtagtccagaggatagacagctagaagccgaatttacagagaagtttaacgaagaggggcagacacccacaatatgatattaaggagactgcagaaataaacaccaccaatgctactgagaaacaggaagaggttcctgcatctaatgcaaaggaaaatgtaggggtcgaggacgatagcaaattcaatcaagaagaagccaaagggattgaagaagcaacaataaagcagttaccagttgaagaagtagagacaacattgcccactgattcctttgtccaaggtgatactgatcaaaaaccgaagcaacaaacactgcaccatgatgaatcagaagttattgatattgctcagaacatctacacacc

SEQ ID NO: 33189 - DNA, 558 bp, Glycine max
gtctcgagtttttttttttttttttttacgatctaattatattattagatttatgcaaactgagcttgccagggataatatcagctacagctttacgatcttatctattccaagggatgacatggatacaatccacataattgaataggcaacacatgatttacttacaagcagacatcatctgtgcataacacccagaaatcaaacaataaaataaaataacaaatacagagctaacacatctacttgacaatttatacatggactctaccaggattcttcattaaaacaacttttccaaatcccagtagttcctagggtagaaattaaacttgcacatgtctacaaagacataaaatattccctatgcagctagacactgctagatagctccatacttgcccaatttgaaattccaaatatgagaataactacctggcatgactgttaccatcctcttctgatatgttaaacaagaactttggaagagatgcgattctaggaaggtggagaagcaaatcactaaacgagtctttcctagacatgcctagtgcttgc

SEQ ID NO: 33190 - DNA, 417 bp, Glycine max
atgccatttgatctacttgagttcagtggatctcatcaattgtatgactggagaaagagagctcatcaaagcaagtaagtgacagctacactttgtctgattgcttacaatgatatcttcacctgttgcaaaatcatttataactttgtcttgttatatgctgggtgattcactgaagagggggcataattaggcataattcataacactcttataataaaatattaagaatttagtcatatctttatcttggaaggttcaccatttgcctttgaaactttattacagtggacctggatcatcgaattattgagtgtatttaacatgcattggatttggtgtttcggtcctttttttccttgagtttttcttttccttcaaaggtaaagttggaccatacaattttagaaaagcttt

SEQ ID NO: 33191 - DNA, 613 bp, Glycine max
cctcagcaaaacattccaagttccatagttggaaccctgaaagcaaaacattaggtcattttgatcgagttgcaaacatgagaaagttgtgttttaacccccaaacagagtcgtttgcgttggcccgcagttctccttcttcaccactatccttaacctcaagcccaactcctccgaggctgagcttttccgaagctgaggcactgatactgaaatggaaccctgacacttccgcttacgccaaagtcacttccctcttctacgaggacaaaaccgaagccaaacactacattgactccgttaaccagcttcagaaatccatgcattccttgctctctcagaacccttcctctgagaaactcattctcgctcataacctaatgcagatggctatgaagaggctcaagaaagagttctaccagatcttatccatgaaccgcgcacaccttgatccagaatccgtctccgccagatcctctcgcacctccgccaactccagcgcctccgattacgacgacgacttcgctgctgaggacgacgatatccgcgccgccggcgactctatctccgaagtcgagcaggtttcttccggcgccatggcagatctgaaact

SEQ ID NO: 33192 - DNA, 481 bp, Glycine max
  unsure (1)..(481): unsure at all n locations
cacgaagaaccagggcttcgagctcactaagcaaagatacggcaaggccaacgttaaatttttacgcgtatatcgtgagggtggaaagcatgaagtcaaggaaatacgtgctcgcgttctcttagaaggtgctttcgagatcagttacacaaacggtgataactctaccatcgtcgcgaccgatacacagaaaaacactctcttcgccctcgccaaacttcatccaattgaacccttagagcaatggtgtctgcaagtagccaatgattttctgtccagacataagcacatctcagctgtcaatctgaaggtagaagagcacccttgggacaggatccaggtggcgggcaaggaacacccccactctttccagaaaggaagcggcggtatccgtattgtgaagcttcgcatgcctcgtaatggcacaccttcactctcctncggcttcagagagttggagatcatgaagaccacccaatct

SEQ ID NO: 33193 - DNA, 514 bp, Glycine max
gagaaggaatctggtgtaggagaaggtcgagggaacgagttttcttggtaccatgttgaactaccgaaaggaaatcaaaagttgtcacaatctgcacaggacctgattggtgttttctgcccacctttgaaactccaagacattctttcacttgttagcaatggacccttttgtgcacatgtagatggggcacttgtcttccgtgttaattcgcccggtcctccctccagcgacttcacgtttaggattgctgctagagttacggagcattcagtaattactgtgtccttgggacgtgttcccaggttaggcttctcccgtgtgggtgaatctctactttccgagattcctagtgttgagagtttctctcctttaagaggtcagcagcaggaaaggacagtgatcaaggagcatgttcttgaattcttattgactatgaatcactctgaggaagctgacaaccctgtgcctagatctgtctcaaatcttgtagtacacataattgacacacatg

SEQ ID NO: 33194 - DNA, 449 bp, Glycine max
  unsure (1)..(449): unsure at all n locations
nnnnnnnnnnnnnnnnnnnnnnnnnnnnnnnnnnnnnnnnnnnnnnnnnnnnnatcagtgacaataaataatataagaaatcaaaaaatctgccgctaacaaaaaaagacaaatacactgtacaagtttgaaatgtaccaatagttgccaaaaagaaagggatagatccatatattctctcctataggggggaaaaacaatgaaagaataagcaataaagcttgccttgatcacaaactccattttactggaccagagaatctgggcttcatgagaattccatttaggcttcagatgattggtttactgaccactaattgccagtttattacgtttcttatgggcgtgcgagccattgaaaagcagctgataaaatagcttgcaagtgaggcattcttcaaaacagaaggaagtaattattgacttaaatgttcgttgatagaatgaaa

SEQ ID NO: 33195 - DNA, 441 bp, Glycine max
gtgtgctatagcttataattaataatcccattattccatccactttgtcattttcaacagctgataataattttggttcagctagtttaaataataggtgaattacagttgcttataagcagataaatcaactaaaaggtattgtagtctaaatttacaaatttggtgaattgttgaatttttaatgtcagtcttaaaaattcggtttatcctttaagggaatcatgtgctatgttgataaaccatggcaggattggcaaagtgtataattatatcattgtacttcagattggatgttgaatgtatggaactagaagctatcattggtgtttggcgcatttacaattgtaattgttactctgaacacaaattctttgaaaaaagacatgcatgcatgcatgatttcctacattctttttttactatcctatgtgacattga

SEQ ID NO: 33196 - DNA, 617 bp, Glycine max
cgataaacagaagctcgttattgacttgatttgatagccagattgctattattcttattactcaatgtttgacaaaccagagaactaaaacggagaaaagttctagaatggctttaagctccaaaaaactggatcaagtatccatttgtgtaaatgtgactaggaaactgttgctgattactgcatttcgtttttagtttcctttgttaagagcatgattctttttctttttttcttttttgctgagagcatgctatacaggtgctaatcactttttagtttttggcatttctttatttttcagattccattctagatccttgtgctaactatttttggccattggcatcttggacttcttggctctttgtaattgaaaatacctgtcagaaaaatgacttcatttcttctatttccttaatatgtttaaataatcattggctaaaagaatattgatatagatcttgatggggatcctgtatcttttttagtctagtaattctgtttatgtataacagaatgattttagactctgaagttattcgtgaatcaaaggaatcaaattctgtagatgatgttggaatatctgatgatgaggctgaaacagagcaattact

SEQ ID NO: 33197 - DNA, 158 bp, Glycine max
tatagagggtgcagtagtgtgtttgtatttttcttgttcctggtcttgtatatttgatggagccctcggaactggaggtaggtgagactttaattctgaccagccaaatccgggaatgtctatggttgatgaacttaaatctcaatttcaaataaatt

SEQ ID NO: 33198 - DNA, 455 bp, Glycine max
gaatgccaacacgattttatttcaaaagctgaccacgttatgtgtcaccaaagaatcctcgcttttcctcatgatgagtcaggaacttacttttgttgagtgataccaaagattcaaactccttttatctgatctaaacctctcaagtttcttacaatttgagcagatcaccaaacctattttccttccctattgtcctaaacaccacaagaacctatataattagagtagagactcaacctatatacagccagttctcactcccccgagctctcgcatgagcttccaagatttgaagttatgtcatgcaccaaaaccctgattattttgcttcctgatgatcttgaaacatccatgcactcctgtaggtctgcatcacaggctatcaaaacccattcgtgatcatcatccaggtacttgatttcaaatgtacccacctctagtttcaatctttt

SEQ ID NO: 33199 - DNA, 441 bp, Glycine max
ctctctctcaccaaagccttcctagaacgaaaaaaaaaagaagagcaattttccctcaccaaagaagaagaagcaaacaatggccgatcaacttaccgatgaacagatctccgagttcaaggaagccttcagcttgttcgacaaggacggcgatggtttgttctctctctctctctctcaagttttgtgtatttgatttgatttgatttatgcgtttgtggtttttgtagatcggtgttccttttcgtgataatggattaggaaaattagatgaattctgattctattttagaatcctttttttgttgttgttaatttggtagagttagatcttggataagctgaactttgtagaaagggtaagagataaagtgttaacgttagttttttttctggcgattattttcttgtctctgtttggtggacgaggagagagagaag

SEQ ID NO: 33200 - DNA, 458 bp, Glycine max
gaaaagaatcagaagcaaatatattataccatatgtatataatcaagcgatgatgaaattcacccgcacaattcaagcgaaaacaataggttatgtacatcactcagaatcacactgaaatattcaacctgttccttttcgccattcattctctgcaccagcccatttacactttttatatttttggcaaaatcaggaattttgtcctcctaaaattccttcctttccattataccccaccttgacaaaaaccaaaaacaaaagggtaaaataagataagaaacttgaaggtttccccacaagtatatgtataggccaagtagaattttccaaactcatttttattgtcttctctgcctctccggaaatgatttagcaggcctgaggacacgtttattttgcggcaccggcgctccaaaaaccatagtttgggaacgtgtcaccatgtcaaccatgga

SEQ ID NO: 33201 - DNA, 524 bp, Glycine max
tcctttttttttttttttagacagaataacaactgggaatcgattaactaacatttatattcgatgatgcatgaaatcaaaattatctttgtatacagaaagggcaaagtgcacacataaatagtcagcttctcttcatctgcgtcttcttctcggtcttgttcttacatcagtggcagactattcaccatctgccattcggtagcttgtttgtactaaaataaaataatactgatggtgtattgacttgtggtgcaatcaagtctactactttatgccaccaaaccaagtcttgcagagccataccttcaaccataagaaatttgtatttgcctatgatttgcatattcatttatttacaatgagatgtattgcaaaccaggtctgcacactcctactcacacatgggacatataccagaatccgaatattaatgattaaaaagaaggttaaatgagctatgattaaataataaaatttatgtaacaattagatataggtagctctactctcatatgtaatac

SEQ ID NO: 33202 - DNA, 464 bp, Glycine max
ggagaaaaacacaccaatgctttattttttctaacaaagaccacagaacaaggttctataatacattgttcctcgaagtcagaaatacaaaatacaacaccacgtttagacattattcgaagcacacataactagagtttcatgctttcattttcacacaaagacagaaacatagttgtcttctgcatcaggatatcaagtcattagtttgtaccatgccaacaacattcctgtgcagaaagacaaattactgcaagtacatctagccaaggatgagtcgccttcagttacaatgagccaaggatggattgccaaagtatgagccaaggatggattgcctagaccagatgtgaggacgatcttaccgagcgaaacttgtcacagtcagcacacgcaactgaaacgaagcttcttcatctggccttatcgaggatgggcctggtgcaatgctacagcaagcccac

SEQ ID NO: 33203 - DNA, 593 bp, Glycine max
taaatttaaattgatcgcagagataaaagtagattaatagttcatatttattgttgaaacttgattagtatagttggtggcataatcaactaaaattcttaatacttacaagttacaatttactaatatgttgcacaatcacctttaattcttaactgccggagttgcgagcttgagttaatgaaacacatcctaagaagctaaataatttcaaaaagcatcttctctaaaaagcatctttaagaaatatgattcagcatgattttgctgcgtcaacatgctaaatgaaataatacatgagattagacaaattgagtgcacttcacttggagtaattacgagtcgtcattcaatatcaattttcttaatttccagcttgaagtttcatccgccgcaatgaaagatatgccaataaacggtaaccaaaaaccatggccgtcagagcagcaacctctctgaatccactgtcaattctgatcccatctatggtaggtgtaatgtgttcatattgaaccttgagcaaaagtgtatacgtatggtacgctgaaagatatgtagcgaatccatgatataaatatggggactttcttcac

SEQ ID NO: 33204 - DNA, 375 bp, Glycine max
ggtcaccgttgttcaggttggtttcaggcatattgactgtgctagtgcgtataagaatcaagctgaggtaataatattgttgacaacggttatataattatgggttttttttctcttttttaattactttttttataatatttggcttttctcaactataagaattaaaagatgccaattgttgtttatttccccaatttattggtgttgctagtacgttatatgattttgttttgcaaaatagctagaaaacagtaatttttttgctagccaattgacattttatttttttaattgtggtttttatagattggttctgctcttaagaagctttttgatgatggtgtggtgaagcgtgaggacttatggatcact

SEQ ID NO: 33205 - DNA, 804 bp, Glycine max
ttacaagctgttcccgagtccattctgaagaagaggaaacgccgggatgaacggaagcaacgccagttgttcagatcagttaaaggtaaccttaacagaatcaggaagcgtaggcagatcttcttgcgtgctgagaaatatgtcaaagagtacaggatgaaggaacgagctgagttgaaaattgccagagatgccaggaaacaaggaaatttctatattccaggagaggcaaaacttgcttttgtcgtcagattgaagggtatcaacaaaattcctcccaagccaaggaaagtgatgcaattattccgtctccgtcaaatcaataatggtgttttcattaagttaaataaggccactttaaatatgcttagaataattgcaccttatgtcacgtggggctaccctaacttgaagagcgtcagagaacttctctacaagagaggttttggcagaattcgtggtcaaaggattccaattacatcaaataggatgattgaaacccatttaaaacgatacaacatcatttgtatggaagatttagtacacgaaattttcactgttggtaggaacttcaagtacgccacacacttcttatggcctttcaaattgaacacgccaactggtggctggaagaggaagtccgtccactacaatgacggtggtgactttggcaacagagaagacttgatcaacaaattactcagatcgatggtttaattttatacttgtattttattttttttagtttttacatttcatctcatgttgacttccatcttgtcaataaacaaactgacttttgtt

SEQ ID NO: 33206 - DNA, 399 bp, Glycine max
agaacatgtgatccattatcagctgggaacaatcaatttcataggttactggtgaaaatgcggcagacagaaatgcctgcctcgaagtatggaacaaatggcaaagctgttagaatggtacggacatatgactgagtgaaaagaaagagactgttagagaataaggtgttgaatggttcagcaccttcaaaggtagtgagaaaaaatggtatcacaggcttgaacaagacagtgaaatctagaaggtcattggaagagctaaaggctttagccacagatgaaggtttcagttgggccaatgaaaattacagttcctggcagaggtctattgatgcttggtcttttgtggctcctttacgcattcggattatgttggacaatgcacaatggacatatttc

SEQ ID NO: 33207 - DNA, 380 bp, Glycine max
gatagctgtgtttcgcaccctaattgctttgtgtgtcattgcactgggacactttcccaccaaaataatggatgatgaatcactgttgaagcagggtgcttcaggttcaaccgagttagctattcagtacagaatccaaaagaaatctgtgattatagacgtaatgagaaatatctcaaggaggttaaagcttctatcatcaaaggaaacagcaaccgcagaaggctaagttatagttaacaattagtaattatttgcttgctgtcatgaatctccttccttcgacattttattctccatcttactggagagtataattttgattgaaattacctgtgttttcaccaaataaaaaaagaaaagtaaatacatgaatgcgc

SEQ ID NO: 33208 - DNA, 207 bp, Glycine max
cctttctcaacgctcagttgcgtgagcgcttttcgaggcacgaatgccgatcacgtacaattggcgaaagatggcgtttcgtccacagtcacacggctcgatgcactacgtcgatcatcccgaatctaactttgctgtccaccttaattctcgggaagcgaaaaagctggctctgacggtgaatcagtcgcgaagctttgggaaagg

SEQ ID NO: 33209 - DNA, 486 bp, Glycine max
ctgttggaatctcggcaccagcttctgaggtggatcaccaccactgtataatgtcttcctgtaggataagagagagatggaacaaagtaaacaaaaattagatgtccattccataagttaataatggctgttcgtgtaaatcactataagattaaataattctgataatcatataagattgaatgtgttgaacacaccacttgctatgtaaagtttataagacaggaccattgacagttggtggggctgagaaaaagcaaaagctaacgttactgttgtgatccactcatatccaaacttaataatgttggataacaagttccaccttatagttagaaacaaataaaaggatgtataaaaaaaattgaatattaagatttttttgtaataaataagtcactgaaagttcaccagtatcatattcttagacacgaccagatcataaattttaaataaatagttattgactttgacaatcaggacttg

SEQ ID NO: 33210 - DNA, 551 bp, Glycine max
atgagaaatctaagctatattttctagagcaaaaacaagactttgcaaacgctaaccctgtttccttccttttaatagcagaggatagaaagtaaagcttacaggtttttatttttgaaatacatgaaaaacattagtataagaaaagtgtgtgacaatacaagaaaacataaaaaagaactaagtagaactggagcatgtttatggtttagtatgttcagtctttcatctctgtgtgtgtctgtggtgacattgaagatgacctcgatgacattgcaagctccttggcaacctgttccatggtagggcgagatcgtgggctttcagtcaagcaagcaattgctatcttcacaattgatatcacctccttatcaatagggcttgttgggtgtggaagacgttcgtccaatttaaccatcaatgacatatgatcaagtgttgaggtcatagtggacgaagatgatagcaatagagaagatgtaacatcaccagggtgctctccaaacaatatttccaacgcaaagaccccaaaactatacacatcacatttc

SEQ ID NO: 33211 - DNA, 441 bp, Glycine max
atacaacaaaaaataccattcattgctgcccgttatgccctgtaatttcacataaccgaaaataaaatttcagagaaaaaaataacttgcgaaaacatttttctgttcatattttattcgtaatattgctaggagaatttacattatcaaatacaacaaatgatgtgagttgaactacaatcgatacctatacaaatttactattaaggaggtgcaaatgaacagagaagacatcttcagaagaaaggaataccaaagactagcttccaccacatgaacaaactgcactgaatttacttccctgtcaagctagagttgccctcttgccttttgtatcccttgactgggcagcaaccgatctttttgaatccaggaactggtgatatatattggagagtcttctcttctcttcttctgaaacagatggtctagccttggatg

SEQ ID NO: 33212 - DNA, 629 bp, Glycine max
  unsure (1)..(629): unsure at all n locations
gggtcttaatttattatatttataaatggcagaaacggaggggacataaaagttatttacaagagaggatgttcctccatattaacatcacccgaatccaaaacaggaattctaatcatcatgtttggatcctaacaatttcagagaaaaaattttaacattttcaaaaaaaatattggacccgatcattctaaataagaaatatctggaaagaaagcatgattaaacccataaccataaccattgcatggggctttttccactctcaggaacatagcttctgccgaattcatgatctccaggaaccacacacacacgtgcacccacaaaacaacctcgccgaagcgcttcagaatacgacggcgtttcaacgccctctgattcaagcattcagttgatcgcaataaccgttgaatatcaatattcaattgtttgaaggttcaaaattcaggaatgcgtgaatgcggataatccatttcagtccactccggttatggttgacgctgagactcgctccgccagaatccagttcctgcaaaccgggcccacatctccttctccaatccctcttcctcttccttctcgcacttccccttnctctcgtcctcccactccttcttcataaactc

SEQ ID NO: 33213 - DNA, 328 bp, Glycine max
aaggaaaaatgggtttcattgctttcgacttcaaatgcacttattataatacatggtagtcatgagtttcattaatgctgcatccttgcatgatgtgcgaataaaggcacaggccatccacaagcaaaacattgcccctcacgcgttggctcgcgggggttctgaatcttgagaaaaacaaaagttgatggatgagaagagaatgaaacaactgggggaagctgctcaatctggaagcattgacacgcgcattgatcctccatctcccatcaaacgacacgtgaagtgggagctaacccgcaccaagaaaactggtcacatgacatct

SEQ ID NO: 33214 - DNA, 530 bp, Glycine max
aaagttgaatttgaagacaatcaagattgccttaatctttttgaaaagaaaccactggggctactatccctgttagatgaagagtcaactttccctaatggcacagatttaacctttgctaacaagcttaagcagcatttgaattccaactcatgcttcaaaggagaacgagaaaaagcctttactgtgcgtcattatgcaggggaggtcacttacgatacatctggattcctggaaaagaacagggacctattgcacttggattccatccaacttctatcctcaagcaaatgtcatcttcctaagttatttgcatcccatatgcttactcaatctgagaagcctgtagtaggtcccttacacaagtcaggtggggcagattcccaaaagctaagcgttgcctctataattcaagggacaattgttccaattgatgccacgtttagagagtactacaccacattttatccgctgcatcaagcccaataacctccaatcacctggatcatatgagcaaagccttgcactgc

SEQ ID NO: 33215 - DNA, 654 bp, Glycine max
agtacaagtcaattattattgctacattacggaaaataaatgcaggggggaaatataatacattttatttatacacgtccaacagagaatgttttcttacaattgacagtatggactctcttttttttttcttcttcacaaattaattcttttacctttctatcatctcaacaatcaccaattgagattgattattttttcgaatggattaatatttctgggaagtaggcaaatattatttgttccaaactcacatgatccttttgctacgactcagaagatcccgcagtcattgataaactcctcactgcaaccttgactacaccaaccacactaagttgtctcttctcaggactcaaacaatggctatcatcgtttttattgttgtcttctatttgaactcccacaaagtatgcaaccttgccagaagcatcacgaacgggtgagatatgaagaaaattccaaaatgagcttttgtccttcctgtaattcaaaatacgtactgtgcatggttgttctgttttaatgctttcccttatcagatgtaaagtcgaggtatcggtatctgttccacctaaaaatctacagttgtgcgcccaccacttcattttttgcataacctgtcaaattcaagaaggcgtcactagcataaac

SEQ ID NO: 33216 - DNA, 490 bp, Glycine max
tcacaatgctacatggcattaccacaatataacaagatatgaagcattgtgataaatttgcaatcaggccctttgtgtattatgatagacttggcttgatttgttcctcttgtcttgtctttttttcttttgacaggggagcttattgttgctcgagttgtcggtttcatcgggctaagcagcgggtagtgtgtccaggctttaggtgtttaagttggattcccatgttcctttattattaccatacaggcatgggattgtggttgtgttcatactccatatctacctttatagatatcatgtgtccaaattgaagtagcatgggatgcaccaatttaaccagtcggcaaggtggcattggcatgcctaagaataaattgtgttaacctagtttcatggtttcagttttctcttcttttccattggtgtagatgtgtagttttgtatcatcatttcttgtttctcaagtcaattggactattattgctct

SEQ ID NO: 33217 - DNA, 425 bp, Glycine max
gtcctttttttttttttttttgacttacagaattcacaactgtataacagagatgttgagacattgaccatcgtgtgctatttcagatagatcttcatactttatgtacaagggaaaatcttcattaaacaggccaaacaaggtagcatcccacataacctataatagcttcagaaaaagctatggaatggtcaatgtcattagataggggatcatcgacctcatgatccggcctatctggaggttttgcaggtcccacatctccctattctgataaacgcttgacaagatgagtcagccaagcaaggaatgtattaagagcctgtcccatgaccttaacctctttagtgggtacaggaatgagagcatctgcatctttaacctccttaacaccaaccttgacttgatcatgcaacaaaggaatg

SEQ ID NO: 33218 - DNA, 574 bp, Glycine max
gaagttaactggtattaataaattttatttatattatggagcagttacaaacaatttatatatgctatgtacttgaaaacaaaacaaaaagaatcttgataagttgcagaaggaaatagaagctctagtctacatctccatctttagattgccagcttcaaccagacctgataacagctgagaagggaaagatgtagcccgtgcttgatcaaaatcaaaactgcaaaggttttggaaatcaccttcccatgttgagcagggtagcatttgtgtgaaacaggacgattgaagatatgtttcaggcattgatacaggagcacttatggtccttctgagccccatatcggatgggtctaatccatcatatgacaaaatttgttgtggggaattaaactgatgataggcagggttagaaatgtctgatgctgatgcaaatccctatgtttggaaaatctgtagcacaagtagaaataacatctttgtcacatagatcatcaatactcaagtcaagccttgggttcacagcagctaatttcattgagagaaactcaacttgtcgttgaagagattgaac

SEQ ID NO: 33219 - DNA, 798 bp, Glycine max
  unsure (1)..(798): unsure at all n locations
nnnnnnnnnnnnnnnnnnnnnnnnaattcagatgagaagatgaataatctaatttaacttatgttttaaaatcaaacattcaaattagaaattttcactttttacgaaccaaagtacggatgctttaactttattactcgggagccaagtgccgttcattagtcacggaagaaaaatctgcttgcccgaaccgaattgaagatctgctgaatatttctcccaaatggctccaagtgatccttcctctacatttctcccaattctttctggcagtactcaacatttaaaatctttctcctcgattgatgcataatttcaacataagactaagagatcttaaccatatgatgttcctacacacgctgggccagtctctcttacacacaaagcttaaaatgtacagcgtgctaactaattctattgtcagatctctcatctaaccagtaaatgtgattttcccataatccactttagaagagtcgaagagagcagagtgagtgaaacggtggcagagagcgctttgtgaattaatgaatctcatagcctctcaaaaagctttcactatctagtgtaggaaattggccacagaagcagcttccataaactcctcatctgattccagcgcgctcactgcatcaggcgaaaggcaaatttccaaatctatgcttccctctccttcatatccttggtatgctgtcacgttcccatcatttttgttggcatatccactcagaactgcaatcgctttccccatcccaaattcattcccatacatgttgaacctcggggaactcgaca

SEQ ID NO: 33220 - DNA, 389 bp, Glycine max
ccgaaaaataacaatgtactaatagtttttgatttggggacaaaattgcaagagacaaaataatttcaagttaaaatgtaacctttgactgtaaaaaaatatgcgcgttaccagtccaactatacatgtacatgactttggcaaaatggtcatggtattgcaagattcacctctactttaagatacactaatggaaaatcataagttacgatgcactaaactggttacgttggtcaactccgcattcgtttcctttgggaaccctcttcatcggcacccttttcatccagcccaagatcttcagaggtggccatagtagattctgatctgcattgagcatgaattatggggcctaactgtgacctatccatgcctgctgttattcctaa

SEQ ID NO: 33221 - DNA, 556 bp, Glycine max
aaagtgctactccatttaataaatgccagataatttgttctgaatacgggaaacaataagagcagcaaaactacagctaaaagacaattatccaaccacgagctgttaattttacatcccatcatcaatggagcatttataggataatctgatagagaaattcatatatccttaccattattaccatgcctgacaagacgtatgtacatttgctaactgtaattgctattaagatacacgatgtctgtctgagaaattatggtccagatatccacagccacaactacatcctctataaacttatatatagcgagggataggaaaacctaagaatcacggaaaattggttgcggcatccacttgagatgcaaattcaaaaagccagatttggctccatctagcacaaaacgttctttgtattccccttccagtattaccctggtaagcgtcaatatgcatctgcccatatagtcctttccgaatgtgtcgtggtcccaaacttcaacaattagcatatcatgtaatccatcctcaacaacaaagtcaaatgtttgat

SEQ ID NO: 33222 - DNA, 455 bp, Glycine max
agaaaaggcatgagcaattcgtttctcaagacagcaaaacagagaagaacagagccaacataacaaaacaactctcactggaactgtttcttctttcctctccaaagatcctcaattccgttactaatctctccgtcggtgatcgccatagtgtgctggaaattcttctcaggctgttccggtggaagattcggtgtcttcgagcttttggttctgggttcggttgccatggacaaattgcttttcaaagcttgtatgggaactcaaactatgtagaaatatttaaagaagcaggaaatttttagattgaaatgttgatattgctatatctcaacaacgtattgagaaagtagacaagaacattgagaaggcaggtgactgaaatggagtgcaataaggatgaggctacccgagctaaagaaattgctgagaggaagtttgctgcaaaggataca

SEQ ID NO: 33223 - DNA, 451 bp, Glycine max
ggaatcaatttgtaatttattgtattgatctttaacggagctaaatatcttacaaatttatggacagcgactgaagcacctgccacactaaatctgctttacaaaacaaaattgagtaagcccctaaaatgtaaatagaaaagggcatgtagccttgacccataatgttagaacagaagggaaatccccccccaatttgtagctagcaaaaaaatagcccaaattaacccttcccaaaatatgatggttggataagagaaaatgattgaaatctctgatccatccaattaataatcccaatgtcccctcattatggatcctattttgtcaaattaattttgggtctctgtattcttcattccttgcacgagccagagattccaaaagttgatttcttgtagcatgctacatccctttgcaattacaagctactgcaaatcttctctctctt

SEQ ID NO: 33224 - DNA, 491 bp, Glycine max
aagcaaacatgtgaaacaaggagttaccattcattgggaaccaacacttcatttcttttgttacaccaaattaagttactaaccccaaagataccccatggagaaagggacaagagaatatgactttggcagttttggctataagttcttttaaaaaaaaaaatacattatctgggtattggtactcaagtaatactatagggtaaaagtaacaacttcccattctgcaatgaagcaactgggggtctgccttcaagttcatggcttttcagatctttcatgtactctgttattaataaattagagtgcaagaaaatcatcaattagaccacgagaaccctttaaatttgaccatgcaaatagcgtgaattagaaatcatcctctagatacttcaacattaggacttgagtcccttgagctcttccctttggtacttcgaatgtgaaatttcagttcagatgatcaagattaggtgtagcacatgaaactc

SEQ ID NO: 33225 - DNA, 397 bp, Glycine max
aaagactaaaatgttctatcttgctttccaatacaaaggtaacttgaaaagtaaataagtaaatgaagtttatcgtcggtattgagatgtaaaaatttgaccaagctattagtattatcttatagcccattctataatatccaaagcattggatctttgggggctccaggccttctctagtaacaggggaacttcctacactattgctatgatgccaaactttggcacttcttttcttggttacttcaagattctcgcttttgctaactccagggcttcttttcctcatagttacctcttctaataatcttttatcctcttgagaaagtttagatcccaaaggcttgttaatactgtctaaagatataaattgcaacatgtttgattgaaaatcaag

SEQ ID NO: 33226 - DNA, 829 bp, Glycine max
atcgaaacatatcacatgctgcttcaacacctgtggtacagtatggccatcaaaagcagcaaaatttcaacttcttgtccttgtcagcaggaagtaatgggttaaagctcgaaaataattataataaaataggaagtatgttggaaccattatcaaaattgcaagtgccttatttacagtcactagcacctctgcatgggggcataccaattcctgctgttcagagacagtatgcctcaacttcttaccttgatcagctttctgttgcaggaccagaggttcggttgcagcaacctcattattttggtaacccgttatacggaactcattatggttcaacagtctcacataaacaacaagagcaccaaagcttctggggggtgcaacaagcagaacaaggtaggtctacagtaaatttcaatattttgaggactcaatatcctaattggcaaagtggaaggcatgactcttctgcattgagtccatgtgcccaagccatccttccttgttcccctgcatcacaagaaatatttggatccaagatcacttcaatctctgggcaacagaagcagctacttgcccccttccaagacaaatggactagaccttcgtcatctcccttcattatgtgaagaaattagagtcactgcatatgcgattgtaaagtgatgagcaacctgaaaacgattcagttattttatacttctacacatccagcttttagggtatgtttgttttcgaggaaagaaataatatacaagaggaagttttatactttaaaaaaaaaaaaaaaagggcggccgccgattaataccgtcgacctcgaggg

SEQ ID NO: 33227 - DNA, 199 bp, Glycine max
cgttcatgtatgggtgaatcatgaaggaacagctgaataaattatttgtatttttcattattaccgttaccatttgtttttgagttttatctgctacaattaagctactcaagttagttagaaatgaaatgaaatattgtaacaagtcatacgtacatgtttttatttcattagaaatgaaatggtacatttgtttttg

SEQ ID NO: 33228 - DNA, 498 bp, Glycine max
cgcgaacaatcaaaccattatttgtaaatcaacaggtgtcgaacatccaacataggcaaatgaatgagcctccaaatgttttgttctgccccagtatcgagcaatcataaactacttaattggtatgttttgtaagtttagcacggtgccgaaaagaatatgcagttatatatttccatcctagaggcaaaagcaactacaactttagtaatcacttccttgactagaaagaaccaagcaaaattgctcccacattctaatatattcattgtatcaacaatgctgcctaacttactaatgcgtgcaagtttcttgtctcagtcaaaatgcattccctgtcaaatagagcagaaacaacagcaaccccattgagatttggtgcaccaagtttcatgacttcacgtgcatttgacagaccaatgccaccaattgcaaccacaggaagtgtagaggccaggcatacttccttcaagccttctaagcctatagtacgattat

SEQ ID NO: 33229 - DNA, 510 bp, Glycine max
atggcttcaatctcaggcatatgctcatcctccccaactctcaaccactccaccccaaaacgacgccgcaccccactcctcccttcctcctcattcccctctaaaccctccccgcctcgctccctcgcgcgtgagacccccgcgccgcaacaacaacaacaacaactctccgcagtaacaaaaccactccacgccgggctcgagaaggagccacgcgccctatggcggcgctacgtggagtggctctaccagcacaaggagctggggctctaccttgacgtgagccgggtcgggttctccgacgacttcgtccgcgaaatggagccccgcttccacgccgcgctccgcgccatggaggacctcgagaagggtgccatcgccaaccccgacgaagggagaatggtggggcactactggctcagggactctgctcgggcgcccacctcgttccttaaatcgcagattgataacacgctcgtcgccatttgcaccttcgccgacgacgtcgtc

SEQ ID NO: 33230 - DNA, 452 bp, Glycine max
caaaaaagtccgtccaaataaatttaaatttaaagaagaaaaaaaaatcatcttcattgtagatggagagatccaacaaccaaaacaacttataataccattatggaatgaggatttcattaatctactactcaagcgtacaattcatcaagattacactccccaagaaaaaccttgatgctcctcggagaaccacagttaccttcagcaattagtgctctgtcattggcagccatatgagcaatgatcttgtaaatcatttcaatatcttctggggcatggcaacggtcagctacttcttcaagtgttaatggttcaacaggctccttgcagcttgcttcattgagtactgccaatacccgtttctgaagtgctaacacttctcctgctgctttcttaccagcttccacaccaggttggtgataagcatttatgttaacaagcgaagcata

SEQ ID NO: 33231 - DNA, 527 bp, Glycine max
gaaagagagttttctaattgatctgattaaacattcttaagggtgaacaattatatgagaataaaacgccaagtttccattttgcaagagaaacaaaataattcttaattataaaattttgattatagcatatagatctatctcatctgtgtaaactcaccagacataaaaaccttcatttcctccaacatcagaatgggaaacttgcactcttctgcatccctgcctatctatatacactctgtcctttgagaaaaaccattgtatgctattgaccaaatttcatcatatctaaccaatctattacaacctatagtatatatcatctagggaacaatttactaagtggtcactatgaacatgtagccatacaatcttgtggtagcaacctctcttcttgatccacagtgtccttaacagcatgataaaactctaaccatgaagaagagttggaatccaaaggaccccatgaaaatgttagatttggacttgcagggcaggcagtaaccaaatccaaaactgaaact

SEQ ID NO: 33232 - DNA, 640 bp, Glycine max
attctcagttacctcctgttatttgggaaaacccatccatgaggcttttctgttgtatttgctggccatatgacacagtttagatgttaagatatgatctcccaaataaatggcaccaatgcaattcaacgatattgcatagatatattcctagctgcctttaaattgcttccctatgcagttcaatacaagttcattatgtttggagatggacacaagaacccaagctactgtgatcttgtcaacatgattacttctaatgtttttgatgctgccgtaggtgacattgcgattgtctctctccgaacaaagattgtggattttactcgaccatatatagagtcggggctagttgtggttgctccagtaaaaaaaattgaagtcaaatgcttgggctttcttgcgaccatttactccacatatgtggggtgtcactgctttttttttcctctttgttggaccagtggtgtggattcttgaacatagaacaaacgatgagtttcgagggttcccgagggaacatatagttacagttctttggtaagtactcttgttgtagcttgtgcacatagctagttagtcataactcatctttgtatgcttttgcagttttagtttgtcaaccatgttgtttgcgccc

SEQ ID NO: 33233 - DNA, 432 bp, Glycine max
gtgctatgtaacaacttctccgtgatgttcatcttttctaattgattttccaactcatcatgagtcacctatgaaacaataagacattctctataataatggcagttaatgagtctaaagaatgggataggaacagtctcaatggtatgaaatacatcctttcttctgcttgtcagtcttacatgcttgacttagcttctgaagggttagtggcaccagaaaaactaaatcgctgaggcagaacatgctgacatcaagaagccactacgggcgagatgagccgatgcctagattgcgtttgtttgtgctatgcaactcgcggagcaatccagtttagaagtgatctccacgagatgcaaattcattaatcaattgatctggcttcacctttagctacagtcatctccatgacaaaaatctcaatgttttcag

SEQ ID NO: 33234 - DNA, 445 bp, Glycine max
caaagaacataaacttgctacctattaccaaatagctgccttactacctatcctttccaacgatcacaccctacagtcttcagcctaaaagccaacccgaagaagaaccaaaggaaccaaaggaaccaaaggaaacaagcaaagggaaacaccacgctatgcagatacccaaaacattttctctctcatccatcctacctgaatcatcgatttcacaccagagataacaagactagaaaagggtcgtttcgtcatgtttttcgtatgtaatgatggccgtccgcgtgtctcctaataagttccagaatgtaccacaatctttgagggagtccaaagtgaaaagttggcaataactgttttgatcccgaatgtgtaggggaggaagtaaaacatggcggcttgacagcggcgaagtaaatgtgtgtatgcatatacatctcctgct

SEQ ID NO: 33235 - DNA, 428 bp, Glycine max
tcccgggtcgccggcggccgcccttttttttttttttaaataactctgtttaccaattagcaatagcatgtcctcgaatataaacataatccaaaagaaatttacaactaagattataatatatgaaccagaaaagttgtaattgcatccttcactttcctaacccatccgatatctaattaattctgatttaatatttgttttcaggtagcaataagtattactaatgaaggctcgttgtgcaaggctatgttgttgtctcagtcttgatatcactgtaaccatgaactactacttgaattttcattgagccacctacaaacctttcaaaaagattgttcaccattcatagaatgataagttaaagtcctttgttttcctggacaaccatgaccaagaatggactttaatcatctcccatactattt

SEQ ID NO: 33236 - DNA, 489 bp, Glycine max
aaccaaccaaaagtccactgtgaaatttaatggcctttttttgtaactcaacaaaaagtgttgcaattgcataaatggttgcccggcagtgcaaccaaaagcgtgcctagaccgaaacaagcaccaaaactgctggtgtgagtgcttgttgattgttaatatgagaacctatattgaacacaaaattcagaccttttacatcagatatatatgatctataaccacacttatgtacacttgacatcattcatcctacttggagggtacccctttgtcacaaacactgcttgcttagagattctttagataacagcacctgaagcagctcacgtagcctctcagcaccaggtcctgacctaaacattgtatcattgccacgaacagaacaagggtcagccccaccatctgtgttcccaacacaccatgcaccaggtgaaaatctatgtgtgcgccccagaagttctttgtcaatcttgtctaacactggat

SEQ ID NO: 33237 - DNA, 484 bp, Glycine max
gtctcggtaaatagaatatatatagaaaatagcatcatgtgctatcgaactacaaatccaagagaatgccatgacataacgttagaacttttttaatgtagcattgataatttcaaagccctcaccctgtcaatttggatcaccaagtttctaaacagttgcctcaattctaggcttcatccaaccacgccagtgtgacatgtttagttggcaaccgattttgtcttacaagttcaattgctccattgttgaccattatttgctttccaacaagttcaatgagccaaactgttttgtaaatgtggcttataacaatcagccagagggcaagcagcaaacaaaggaaatcaacaagcaaattcttcaccaccttggagatataaactttcatggtttcgtcattctcaaacagcttctgttactgccctgaatcttcaggatccaattgacttacagtgatggcatgcttttgacagatcggaag

SEQ ID NO: 33238 - DNA, 508 bp, Glycine max
tcggggccgccttttttttttttttttaggggaaaatatacaaagatatttaaccactcaataaagtctgatgtaatactatgaattttacactagcattgtgtggtttgtaatacaagaccgctaggattactcagggactgttgcaacttgcaacatcagctgagtatttaagaatagtaaaaaacagagagagccatggccaacattaacatgcttgaccaacattgtccatcacatctcaatgtcttcaagatcagggagaggaaaccgaagaatcgcagcaatgccacttatctgggctagttgttctccagagacatgcatggacgaaaatacatggacagagccccctgaatccttaacagagttgaccaagttaacatacttttttcttgctgctatatctgaattcctgaaaagctcatccgtaatgagaagcatttgtacagctagtcgttcattggcaacctcaacatgtttcattccataacatgcacgtgatgga

SEQ ID NO: 33239 - DNA, 466 bp, Glycine max
gcaaaattgttgtcctcgtatttattcaactgagcacctactgctgtcaaactaaaacaagagaaaaatggtcatttgtttgttctacgaggtattgatgctacagaaaaaaaaaatagctcgacaccttacaataagcttacatactacagtatatgaaagacatgaaaataaaaataaaaagaggaaactaatatcctctacttctagacgcatcttgaggccaggtagtgccttgcgcataggggggtccacctcctggctgtaggttgctaccctggggagaaggaacccactgagggtcaaaatttctttgaccatgggtcacattcattgggggttgaagatattgtggtgtcattattggctgttgctgtgaacccggaaatgattgattcaaaatgtgaggcctaagatgaaagttgtgcattgtctgttggggaggaaactgattctgggagttttg

SEQ ID NO: 33240 - DNA, 520 bp, Glycine max
aaaacataaatcaccgctagtttgacagcgggagagaattacacattacaagaagcaaaattatttaaaagaattaattatttgcaattctagaagtggagctcagacatacagggtaacatacatatttacaaatgcacctaatatggtcatgaactgatgaaagaaaaagtaagacaataagctccaaagctgaaaagaaaaaaacaattttacaacagcttgctatttactctgtcctattatacctcaagatttgattgagattttcacgacagaattaatgattcaagtcaataccaagaaagccggtaggatttcttctgcgatcgatcggcaccttacagagaagcctacttgaattgaaagcctgtttatttatttttcctgccccgtctgtatcatatgcttagctcattctaggctcttcttctattcagcatctttcgggcaagccaagtcaattaaataaatttacatcatatatataaatgcaaaggaccattctatgtgaaaattc

SEQ ID NO: 33241 - DNA, 689 bp, Glycine max
tgcaaaagaaacaaaatgatcctacctgagttcaataagaatactgtaatttacaagggacatgctgggtctatctgtttccttagttctctttcatctatcataattgatgtttatttacgaagacatcagtttccaatgaacaaaccattaatttcctccttaaaatattactttctcttctaaatcgtccttaaagtaaacaaattatataagtaatccctcgagtattaaaaatcatgctaaatagtctttcaagcatcgaacaatccttcaaactagttcctggaagttagtaaaaaatatcaaagtagggattaaattgatgaacattcaaaataccttagggactacttatataatttcattacttcaaagactttagagaaagagtaatacttaaaagaccgaattgatggtttattcgtttcccaatctattcatgtggatttgtcttcattcccaaatgctgggttgtgtctactgtctagcggatctattcaatgacctttatagcatcctttgcaagtcgtgtgacatatgcagcagctaatgcagtggccaacagtcccagccccagtgttagcaactgactgtttcctccaaatatattactaagttcagattcatcttgaattattgctcttccaaaagcaccagcactgacataagcccatgttcctggaagc

SEQ ID NO: 33242 - DNA, 432 bp, Glycine max
gctaaaacaattatgggatactatcatatgcaaatacaggggaagaagcgggcgctacattcagacgccagagaaccaccgtattaaggagaaggggaatacaccaccaaacataaacgtaaaaaacagttatacatgaaacgatctaaagtgctattcccgttggaagttaaggatcttaagataaattaccgaataaaatagcgtgtgaatgaaaattcttgcgttttgatgggacataagccctcctcatcagtcgtttccatgaatgggagattataactctattcaatggcttcgatccaatcaccatatatcctactgattttatctggacctttccacttctgatgtgctctctgtcctggcctctgaatagccatggaagaaggcctttgtgaagggactccaatatgatacacatcaaaaata

SEQ ID NO: 33243 - DNA, 527 bp, Glycine max
cagaaaatcgtaaaggggttttcattgcatcaggacaaccagatcctacgcggtagcaaaacaatcctaatgaataagttcttgctaaaataaaaattatgggatactatcggatgcaaatacaagggaagatgttgctacatttagacaccagagaatcaacgtattaaggaaggtgaatacaccaccaagcataaacctacaaaacagctatcaatgaaacgatctaaaatgctattcccgttggaagttaaggatcttaagaaaaattaacatgtgaatgaaaaatattgcgttttgtataggacataagccctcatcagtcgtttccatgaatgggagtaaaactctattcgatgtcatcaatccaatcaccatatatcctactgattttatctggacctttccacttctgatgtgctctctgtcctggcctctgaatcaccatggaagaaggcctttgtgaagggactccaatatgatacacatcagaatgagcgacaagagtaactgctgcaaccacatta

SEQ ID NO: 33244 - DNA, 428 bp, Glycine max
acagtaagaattcttattatttattatgaatgaagacgtaaaaaaaatcaaaagaattacgaagactatttgaaaattgaaagaatgagcactggtcaaagtcacctggtccccgaagggaagaaaaatcaatcctcttgtgaaacattcctctaggaacggtgggtgtgacattgcagaagtttctaatcgaacgtgtctcgcgcactactgctaaaaaaactccttcgctgtgataaaagcaaaagagtggtgtcaatttcttttaacgttgtttccccataatttcttccataaccaatcttctaaatctgtttacggtgagaaagcacaaatagatatgctcttcaagttcttccaacatatccaaaaagttagattcgttgtcctgaaattccttcacaacccgcttcaatatttcacactta

SEQ ID NO: 33245 - DNA, 408 bp, Glycine max
gtcgttattgagatcgttcgtttatttacatatgtcatcaactgtacttggattcgaatagttgacagattacatcaaaaacgtgcttggcttcgtcttcattgaagaacgcaaacgcattatatcctccagtcattgagaacttgtggaagtatggagaggtctcttcgtattcgaacttctcatcgggaacgcgaaggagaaacaaagcatccaacgtctcgagatcggaaacttgaaagaagagcgtgttcttcttatcttgcaataatgacaataatccgacgatggacgtatccttccattgaggatccttctccaagaactcgaacaactttacagaaccaaaagcaagaacctctaatccattgtctcttgcttgactcttaaccttggattgaacttgca

SEQ ID NO: 33246 - DNA, 519 bp, Glycine max
atatatacctgcatcactattccatcctgatattgaaaaattgacaatgacaatgttgctgtttaaaaaataaactacctcctcaactataaaaattaaaaactataagccacttctggtagcaatattttttttgaccatttacatgaaaacgctttttatgtgctagttacaacctacacaatcaatcacacaatggatgtcaacccatcatgatgacaaaatttaagcatctatgccatcctttgaaacaagaacattctttaaagacttatgaagggggaaaaaaataccactgatggtttgttgccttgaagatatagagcatataagttcaaactcttgaggggtatattatatgaacctcctcttaaaattacgagtagttgcttggtatgagcgtactaacaagctaactcctataccaactcctacacataagccaagcccaattccaacaccaactcttacaccagcattaaaccatgatagttcaccatcttcctcatctacatatat

SEQ ID NO: 33247 - DNA, 201 bp, Glycine max
cacttgtataatatttcgagcatgtcttaacatgaacctgatatggtagatgtaaatttcgttatcaatgatttttttgttgtttagagttgggcttcatcaaatatttccagaagtatatatagaaagttggcccaatcttgtgtttggctttaacaaaaagaaaacaagtctgtcattggaagacataatttttaagat

SEQ ID NO: 33248 - DNA, 415 bp, Glycine max
agagttacaattatatcaacataggatcaaatattatgtaagagtccatcaacaataaaacctcttcagacaaaaggaacataatttacaaacaaacttattgtgatttacttcattccatggtctggacactacagcaataatcataatttcaaaatcatcctcttcaacttgagaatgaattacttcttgccactttgcatcatagaaagtgagaaactttcttcacatacaactctgccttctattgttggagagggtggatgaatgaacaaagcaattatgcagcagtcaactaatgttgcaaaaagatacatctctcatccaatcacctagaagcgagcccagcatctagtgcattgtgcaatacagtctcccttacaatcaacattataacccaaaacttttggatttc

SEQ ID NO: 33249 - DNA, 471 bp, Glycine max
gaaaatgtgggtcatggtatcattttgtcaataggggccctccgaaaattgcaacatgccacattaatatttttgtgttggctgtttcttctaagttagttactgtttcaaacataggccacgtaagtgaaattctctgttcattctatgggattaagaaactatttttatgtgaccaagaatctggagtctcttcttcatcggtttggcattgaagaagaccttttgtgattggaaatcaagtaaatcaatggggagttcttgtgggtctggtaaacatcgtgggggcatggtgatcattttgttttgagctcttttagtcctcgcagaggtgccataaagtggttgctgatggggaaacactaaccttgtcaccgtgcagataaattttcttcccactttactgtgatatgatctctgtggaaactttaaattcttaagtggtctactttcatacaacagccttcacga

SEQ ID NO: 33250 - DNA, 309 bp, Glycine max
gggtcccgggtctacctgctcggcggccgccctttttttttttttttgaatgaggccaaacccgttattcaatagaatagcaaaacacgttatacaagttgcaaattcctatgaacatagatatgacgggaattaggtaaagtaaaccaagaaagccacctaaatcataacaagttactagttaaccccaataagaaaggagtatgaatattctgctcttaattgtttctcgtcacttgctttggagctaatatacacattgctcacaaagaattagtttggacattcttgtaattgtagctcaacact

SEQ ID NO: 33251 - DNA, 450 bp, Glycine max
tcttttttttttttttttcaatgctcatgcaatttatcagttcataatatgttccaaacttcgagtagggatcattacaaaatcttggcatcaactaagctctttagctaccttccaacaacggaggactcactatccatgcattttattcagttaaagcatccagtctaacgtccccatacttaatcagaacaggctatgcagtgtccggcctaatttgtctcctccccaacagcattggtttcttccatgctgttatcatgtgagtttacagcatccgcaactacatcatgattggggctgctacttacttccactgcagcacccatttctagcatggtcttcccatcatcagtatagctggcagtagcagcaacttccagttttccatcgacattctctgcagctggtgtgggattagccaatttatcagaatctacatccatgtca

SEQ ID NO: 33252 - DNA, 427 bp, Glycine max
aagcgaccaaagaggttttatttcccattcaataaaaagcttgtattgtttacatagcaaatggatccaacttaatcacatcaattatgattgcgaggtggcaattgtataatgaagatcctgcttgttacaagtccaatctggccacattgccaccaagctgaaagtaatacccattcccccataacccaaaccaatgggggggaaaaaaaagggtaaagaaaatcagaggttcagttttacacacccaccaacatattgacatgtcaccagctcctcctaactgtaccccctactggggatttgtctcatctagtatccaaatgctgctttctcactatagggacaaattgattcttcaaatagtgaaaaatcattattaccaaattgtttgctgggctaacaaataaaacatcaaggccctcta

SEQ ID NO: 33253 - DNA, 453 bp, Glycine max
gccgccctcgccctttttttttactcaccatctcatcttcactatcatcgtcatcactcgccaattcatcttccatcccagcctccacaacattctcatccatatacctaacctcatgaatcctccccttcttcttcttcttcttctccgtccctccctcaatcgaatcactaacctcaccatccctctccttctcattcttcttctcctcaaccttaaatccctcaatcttcaactgcacatcaggaacagtctggtagaccggcagagccacgctctccagcagcttcaaatgcagcgacctcacattgccccacttcttgggcacaacctccacaatcccctcaatcgcggcaacgacattctccacaatctcatccctctccatcctcaccttggcaaccctaaccacactacaggtccccgtcctcatgaacagcatcgcggacgagc

SEQ ID NO: 33254 - DNA, 447 bp, Glycine max
ggaaaggaaggaaaaaaattttgaaattaaagtttcacattataaagggacccaagttccagataggaaattaaagtttcacaataacttcaagggggaacaacatttgatagacaatgtaaacattcttttaaatagatttacatggacctttcagatgccaaatcaagaagcttacggaagaattgatgaggatacaacgggggttgctctactagggcctgatgaatcagaacaggggaaggggtctttccaggcacagtttttacctctataatcaaaacctctccactgtcaacatttacaaatgcatcaatgcgtgaaaatccttccaattgaagagtgtttgcaatcagttcaatatgctgtttacatctcttcaaagcattctcactcataattgacaagggaggcggagtcagattgatgccagtcccaccttggaac

SEQ ID NO: 33255 - DNA, 734 bp, Glycine max
agacccctcctagaccatgcgccttggccattttctcctgctcacgactcttgccgtcatcgcttgctgtagcacctctgctatcgctgaagacttcgttcaagtcaacagcttaccgacggattttcgacacgagctgacccacggaagccgtcgcaatcttaaaggaagcgtgagtgaaatcaatttcgctcaaaacagcgcaatttccaatttcatggaaaagctcaagatgcaaggacagtctttatcagccttctggaaggatttcaaacaagctgctaaagtaaagcttcccgaattctataagtttctcatatcccatgtaaagatgaaaaagaagcaaccaaacatggcggaaacgcctccgaggagtccttcgtctgccggactggatcgtcaacattcgacaccgaatcatgccgtccctccgcaagaggtgactgcgtccgtcaagccgaatatggaattaacatcgcctgggatgtcaccgccgaaaaattcgccagctttgagtgaaggcacttccccgcaaatactaccaaaaccagacggacaataaggcccgaggggtgcattgtcttcaagaatcatcgcctggtcacgtcgagacaagtaagtacccgtggtgtgttcgtcacgcttgcatcgcatcaagtcgcagtagctatcgaaagtattccatagtaatcgcattttgtccgttaacatccaacatccaattgcccaacttg

SEQ ID NO: 33256 - DNA, 437 bp, Glycine max
gggaacaaaggcttgctcatgttgtccttgagatcaaaacaaatgaaccgattggttacttacaacatagcaaagaaagaatggctgaaggttcctgggtgtgtggtgccacgtgggagaaaacgacagtggatagcatgtggtactgcatttcatccatgcctgactgcggtggcatgatttcacatctatctctaacagcaatggcctagcaacggcctgccattccccccccccagtctcggttcttttgcaatttgcaggcctttggtgttgttgtacgtaatcctaatgttcattgctggtttaacaaagtagatgaaaaataatatgggtttgtagtgattcacgttttttcatgctctcagacatgtaaacattactttggttttgttatgaatgcctcatcctgggaacaccttggtaaaaggtgatat

SEQ ID NO: 33257 - DNA, 448 bp, Glycine max
ctcttctggatgcagactccactcgctgttgttgctggcggagccctttatctggcggttccaactcaattctctgctgctagaggcaacagcaaagagagtatatggaagaagctgggaacataggattaccttgggggttttactttgactggcggaatcgtgctggctttttcagcgctgacgaaccctagccgcattcccatcctgcccatcatcttcagcatcatcgctatggcgactttcattctcaacgaaatttacttgggtaccgaccccatcatcccagtcacgctgctcaagtctcgaggtatggcgtttacatgcttgagcacaggcggcttcatgatggcccgctggagtgttcttttcttcacacctacctacactcttgcgggacgtggctgggctcccgctgctgctggtagcattctgatcgccacgaacg

SEQ ID NO: 33258 - DNA, 692 bp, Glycine max
aaaaaacctctcaaagatatatcagttgccacaggagttgctgaaggaaccattaggaactcatacaaggatctttatccccatgtttcaaaaataataccaagctggtatgcaaaagaagatgattgtgaagaaccctgggcatgccttaaaggcaaaacatagcgaccacatttaacaacttagatgccattggaacgttctgttctggatctactgaactgttttatacttttaattcaaaatgaaaatgcctcttctattagtattttcttcttctaactgcacattaattttggttaaccctcccaatttgagaattctaggggagaggcaccgctgatatatagaattagctcaacctttatgatagtaagctcattttgcacttgcgttgaaattgctgggtcatatagggtaatagttatttgtagcatgagaaatgctaaatgctctaattttttttttgaatatatcttttattattagatgaagtttattggaaatctcaattttgtagggttcattattttttctttttaattttgtaattttaataaattaactaacaaataacaatagtgtgttgtaggagtgtgttagtgctaatgtgttaaaaaaagtacgttggagagtgtatctttagcaattcttttgtagctttgtagattatacaagatactattgaatct

SEQ ID NO: 33259 - DNA, 461 bp, Glycine max
taattcccggtcggcggccgtcctttttttttggtcgccctttttttttttttttaatttgaaaaataaagggattgattcactcctaagaaccaagtattcaatgtagttttggttactggtgacctcttctgtacatgtacaaactcactcgtgtaaccaaaggagataaaacaaaataattgggaatgtataagattatgaatgttcttgtgtattttctgcctcgtcctattgctacctttgtaatccttgtttgcaaagagggcagcatgatataattcttagccattgatccacacattttaggtggaacaaatgggaacagggtaattgcctaacttcttctttgtctttgtatttggccaagcaaatgcaacattctggatcttggttgatcaatctttcactgctttgagagtcattggcaatgtccaagttggaatgaagccctttatatc

SEQ ID NO: 33260 - DNA, 385 bp, Glycine max
tgtcgtcctttttttttggggggaaaggaaactttattattatttcttttaaaagataaaaatggttcttatatgtataaattagaatcccagtgtcatacgattattataggtacatccaaagcaaatagtaatatatatgacaatgtgagtaatgattatataaatagcatatacaacaaaaattcgtaggttactctataaaacggtatattgtaattcttcagcaatttcctgaataaactggaatcccatttatttttctgttcaatattgctggttcttgcctgtatacagggtgaagattatcagggtaaacttgttcaccctttagcatcagcaattatttgctgcaaacatttcataacataggagaaagaaggtc

SEQ ID NO: 33261 - DNA, 516 bp, Glycine max
ccgccacctccgcctctgtcgctactccccacgccctctccgatcgtgtggcgcagttcggcgagggcgtggggaggttcttccgcgagctgcgggagatggcgcggtcggatccgcggaaggtggtgtttgcgggcgaaggcggagctgtcgctggcgctggtgtcgctgttcatttacatcaaggaggagcagctcagcaagtactccatctgggccattctcaccgtcgttgtcgtcttcgaattcagcgtaggtgcaactttgaacaaagggttcaatcgttctttgggcacaatttccgctggagggcttgcgctgggaattgctgagttggccgttttgtctggaaagttcgaggaacttatcattgtactatgcatatttatcgcaggattttgtgcaagctatgtgaagctactgcctgcaatgaagacatatgaatatggttttcgtgtgtttttgttgacattttgtattgtattggtatctggaagaactagcagggaatttttc

SEQ ID NO: 33262 - DNA, 486 bp, Glycine max
cagtacgagactttactgcgaagccacacatgattgtcattcgatccttcgacgtcaacaagcctggtgctgaaatcgatgagctcaagggtggtgttgctggtggcagtatcctgactggtgtactaaagctgggagacgagattgagatcaggcccggtattgtctcaaaggacagcgccggaaagattcagtgcaagcccattttctcaagagtagtgtctctattcgctgagcacaacgatttgaagttcgctgttccaggaggactgattggtgtcggtacacgcgttgaccctaccttgtgtcgtgcggatcgtctcgtcggtttcgttcttggtctccgtggacatcttcctaacatctacactgagctcgaagtcaactacttccttctccgaagattgcttggtgtcaagactgcagacggcaagcatgccaaggtagccaagcttgcaaagaatgaagttttgatggtcaacatcg

SEQ ID NO: 33263 - DNA, 436 bp, Glycine max
  unsure (1)..(436): unsure at all n locations
acagntgcaatttactttaatattagcagcagaaccctacgaaagaacaggatatcacaatttgtctaacagcacctatccaggggcacaattttttttcggtatattgaaggtcatatttcaactattttactccagctgggcatactaaatacacaggaagacggtaaaaatgtttatcctcaccaggattacaatccaggaggcaaccttaatgcctaaatatattacaaatattggcaaccatatgttacaaaattgggcgtctacctgggtatgaataaaattaaactattttagcttttactattagatctgcgggcttaacatttacaggttagttgctctcggcagaaacaaaattgcagatataatattctttacagcactataccagtaccatcagttcctagctgaaaatggggaataatagcat

SEQ ID NO: 33264 - DNA, 446 bp, Glycine max
agattaaatgccttgaatggatttctttagaattggtattcttatagcttttattgctaaaagcctaaaacgtcaagactatatacaggtaaacaattttaaaattaattagttagttttctcagtagataacaagctaaacatctgtaatatatatacaaatctatcaaaacttacatgttcataatcaaccccttctacttcgttgagcagtagggggtaatttctccgatggaccagtaggaagcttctgtccagtctcttgttcaatcctcttcttgagctccctcagtatacgaacttgtcccaacttctcaggagacaacttgtcccaataaattccttgaggctttgggatagatgtatttgtaaaaatgacctgtgtcggggtacaaatgatatccactggtacatcatggattaacagcttttcaactggaatatca

SEQ ID NO: 33265 - DNA, 447 bp, Glycine max
  unsure (1)..(447): unsure at all n locations
nnnnnnnnnnnnnnnnnnnnnnnnnnnccaaacggacaaaaggctgtgattgccacggcatgtctaacaactgataaaagggggagcccttcgctggctcgaaaaatctcccacatttacgaatgcttcgtaataactcttctggttcaagcttgagttatgggttctcattttgcccaggttatgcttaactattcggccgtaatacaaatacatcaaatgtccaattttccttcaaatgctatgtgatcattgcgtaaccttttgttgtccctcctgagccttaggttcgtttttaacgcccttccagccagtatccgcttgtacaacgcaccatgataaaggcgagaccaccagcagctaaaaacaatcctctcaaagcgtcttcgtacccagcaatggctttagctttacttcgctcctttcaacaaactgaccatagctgga

SEQ ID NO: 33266 - DNA, 324 bp, Glycine max
gtaaagaatggttctggtatcttgaatcatgaagacagttcaaattttgattaaaaaaaatatatgaagaccttaggttgttgattacaagttgaggaccttttagttttattaactaggcttaactattgaggtacaacacaatttggagaagtggttgatgttgatgattcgttctgaacatgaaggattggatcaccaaacatgtattttgaatgtggaattttgatatggctattttatatctctagttttctcagtttgctcctttatgaaagagaccttgaagaacaaagtagattaccgatctacggtgaacaaaaa

SEQ ID NO: 33267 - DNA, 512 bp, Glycine max
ccaaaatcatgaagaagatttattgactataattgaattgtttacaaaacacaatctagcatttcaagtttccaacatatggtgtgcaagcaatatgcaccttctattggcaatgaatttagtcatcagtaccaataagctgtcctctaacttaaaaaggagaaaaaagaaaaaaagctgcccttgccggcggcttctaatccaatgcagacggccaattctgtaaaagtcaaattggaatttaataccaaaatcctgacaagcccgttaatccttgttgcaaccaattttttgctcattcttatctgcacactccatggtagtagccaagaccagccataatccatatgttatctagtttacaattgcagtactgttctaatatctgataggaccatcaaggctcccggatgcaaactgctggacaattggattagttgaagttgtaaattcatgagtcattccttcccaaacaatctttcccttgtgtagaaacaacaatctatcaatgg

SEQ ID NO: 33268 - DNA, 413 bp, Glycine max
ccgtatttcatatgcttgtgaggacaaaagttctttgaaaagtatgtatagtccagtgcttggttaccttgacaaagtgaaggagaaattacgaaatcctgaggattaccaggaatttttgaagtgcctaaatatctacagcaaggaaataattgcccgacacgagttgcaatcattggtgggcaatttactgggaaaacatgcagatcttatggagggatttgatgaatttttggctcaatgtgagaagaacgaaggattccttgctggtctcctgaaaaaaagacacggaccaaaaccagtgaaggtagaggacagggatcgagatcgtgatagggatgacgggatgaaagaaagggaccgcgaatgccgagaaagggacaaatccaatgcaattgctaacaaggatgttt

SEQ ID NO: 33269 - DNA, 394 bp, Glycine max
gaagaagttcattgcgttttgtagaggctctgaacaaaaaataatatgagaagaggctcgaatcgtctctctaaatcgaaacaactcgctgcattcgcaagcctagaaaccaaacttcgcgccaatgcgcttcgctcttactgcgatcaatcgcaccttcgccgccaaaaccgtccagggccgcttgtgcagtacaggagtctagttgatcaagggaagttgcggcacgatccttcccatagagtgttgcatcggagcttgagaatttgcttgcaaggttggagcagtacgagaaagatagggcagaggttcgtgtgaatctagcgtattgggagaagcagcgggagaatgagcgtcggaggcttctcatggaggaagttgagctgcaccagaa

SEQ ID NO: 33270 - DNA, 561 bp, Glycine max
ccgcgtccctctgtaccactactcctggttgaactcgagcagcctcgccaacgcttccggcgatcctaactacggatccaccgacttcattcccgagaacgccctgaacggctccgcccagcctgtgcacaaagccggcggcgctcccggcggcaaccccagcctctacgacgtgctcttccgcgtctacgccactgtcaagaacaccggctccatcgtcggcgaggaagtgccccagctctacctctctcgcggtggtccctacgaccccgtcaaggagctcagaggcttcgagaggatctccatcgcgccgaacaccactgccagagtcagctttgatatcactcgcaaggatattgccagctggaacactgttgagcaggattgggttgtgcagaacacgactaagaatgtttgggttggcagctcgagcaggaacttgcctcttagcggtgtgcttgcttgagattgttgatgggttggatgatttgatcttcatggctgatgatagaatattactacacgatagacatagatgaatatactactgtacataatcat

SEQ ID NO: 33271 - DNA, 156 bp, Glycine max
accaaaaaaaatccaaatatatcaaattgtcaattaacagattgtacctggcaggtaactgatccaaaaggaatcgatatagttcagtaaatacattgacccagaagagccagacataataaagtattccataagatcaggtggttggaatctaag

SEQ ID NO: 33272 - DNA, 529 bp, Glycine max
atcacggcaagcatgttcgcctccaacttcgtcgtcaaggacgaagccctcaagcacacccgtggcgaagacaagctcacgcgcttccgccaaaacaacaccatcgccacgggcaactacatggaaaacagcttctgcagcgtctgcggcaccctcatgtaccggcgcagcagcggctaccccggcatgagcatcccgcgcatcggcaccatcgacgactttgccctgcaggagaccaagttcaacccgcgcgtggagacgtttgagaaggatcggtgcaagtggttgcagcctgcgacggtggacgagcatgtcgagggcgcgtattatcccgcggggaaggagtggaagagtaagcatgatggggcgggttcccagtcttgagtgggagtggggaaggtgtttgggagtttgtaagggtccggtgggagttgaaagctccaagtagcggacacccatatccttgggtcctggaagtagtcgacaatggaagggtgatccctagttccagcttgatattgtagttccc

SEQ ID NO: 33273 - DNA, 499 bp, Glycine max
cttattttgaatctaaaaaggtgataaattgataccttttatatctaaggaagactgtaaaaaaggaaacaagcaagaaacagagaatgcgcagaaagatatgagagtaaatgctcccccaaagtcagataagattctctggactcctatttccattaccaaattcctccatatcccccacaatcattacccctccattcttataccagaaccctctcagcaattctttgtcctctaactaacttattcccttgacaaaagtctactccaaattagacccatttgccctcttgggcctacggacataaacctgaaaaggtttcttctctttgggccggttcccatcataaattatgtcccacaacacagttttgtcctgtttcaagatttgttctaaactttgcttagttagtctgtaaaattagcgttgttctagatctacaaaatttatcagtttattatgttcataggatatatggttattagttccatgttcaaa

SEQ ID NO: 33274 - DNA, 469 bp, Glycine max
ataaaaaaatattaaattataaagataaaaaatatatttaattcaatttcttattaagataatgtatactacatataattaattagagttgaaaaacacacaaaaatatagcgaaagcttccaaaagttaaaattttgtgtaccctaccacatgtcacatgcaaatttagggcagaatttaaataaataaataaaagatgtatcctaactttcaacaagattcaatgggttttcaagttcccattgatcttgtttaatttatcccaacttacacaacagaaatgaaaactaaaaaagaagcatgcatgtaacatgctcgatcaattccaaagtatcactacgatggaaatgcttaaaccttcattgctgaagacgtactgattttcaatcctgaacaaaggatgacaactacgaacaaaatttctaagtataaaaatcctgtagattttacgcatgaatccttcttttg

SEQ ID NO: 33275 - DNA, 484 bp, Glycine max
acaggaatgttgaaacttcttatttgaatataatccagaaattaaagtacaaagtattcacatctcttaatagttgataagcaagttcttgtaaactacatctcttaaaacttcttcaccttaggcgtgtgttcactgcttggaagtaatatctttaagcttttccttcaattcaccagtctggtgcatattgagaacaatatctgatccaccaataaactctcccttgatgaaaatttgaggaaatgttggccagttactgcacagaaagaacagggagaacagtaggatatcattaaaaaaatcgttatttattaattattaaacttttaaaggaaacaagtgattaaacttggaagcaccagtacttgtcaatttgccatgataacatgcttaaaaacaaatcaaatatgagctcacagttatatcacataaaatgcaaagacaaaatgacatataaccacaaacatgcgtagacatttgc

SEQ ID NO: 33276 - DNA, 402 bp, Glycine max
actggagaaggttgtagctcattttcatctagcaaaaccaaatagataggcatagtgtgcctggttcttatgggcatctcatcgattaatcccatacatgcatgaaaatgaacgatgtctcaagaattatacacttacagcctcgcagtacaataactttttgtttagcgaatatcacttttgctttggtacgggaaggcttataagtatattcctaacccaacctcttttggattcggtttcaaccatccatggtgacctgttcattataaagttaaacgttccctggctagcacgcttgagaagaacttctcttgcttcaattggaattccttgagcctcttcaggaaaccaaactcctggctgcgtgcttccttcaagaattgcaagtgcaaaagcagc

SEQ ID NO: 33277 - DNA, 706 bp, Glycine max
aagacaaaaataactatttagacaaatattttgtatcaatatgaattataataaaaaataattaaaaatgaaaagcttctaaaggcatgatcaggttactgatcgatcatatagctaattccgaatatgaaatcacaatgccatgcatgaacataataagggaacaaaatacatatcgttaatacacaggcatatcgaataataccatgaaacaagaccactaatcttggcccttcccaagaataaagatcagtctcatccacataaagggcgctataaattaatgcaaaccaaaaaaaccttgcatctccgttagtgtcaagctacaatctagaaatggaaagctaggaaagcggaagaccttacagagatagggaaaataagaaggatggagtgaacagaccaactgtgttggtgattttggacaattctactttccactaatgaaatggggccttgggcaggaacctttcaaaacagtcatcgaacaaatggagtcaaacggttttatcacccatcagtagtgtatgccaccagccacaggcaacatttcttggccggcaaccagaaatagaaacttgaccaggaatgtttctgtccacagaatctcccaaaccaagctgaccatatttgttccacccccaagtgaataggtgaccatcatcttcgatatgataaacaacgaacaagtacgaacatgtgtgaa

SEQ ID NO: 33278 - DNA, 419 bp, Glycine max
ttttcgttctttttttttatataacaggcctttttttttaacaatttggaacacgtaaaataaacaattcatattggagatggacgccctaacatagaattttgggtggtagtatttggtaagatactgtcctaggtcaatcctcacttatgatttgagttgtacccattatctgtactgcacactagaatctcatcctaacatggatgctaaataacaagttcgaagaacgccttggtcaaaaatttgactcatcatttttgtaacaaaatgacagacacacatgcaagtcctcattgatcacaacaggacagggggaactcaagctatggagctctagacattaatctaccaagtcttccttactaaataaaaatcttaaatgaatcagtatcgtcttgtcaggtcaatgctgattc

SEQ ID NO: 33279 - DNA, 500 bp, Glycine max
gaaaaagtacaaggcgttcaagccgctgaacctgccagacaggcaatggcccaacaagaccatcgagaaacccccgagatggctgtcaaccgatctgcgagacggcaaccaatctctggttgatcctatggacggcgagcaaaaatggatgtacttccagatgctcacaagacttggctacaaggagatcgaagtttccttcccctccgcatcgcaaaccgacttcgacttcacacagcgcctcgtccagacacccggcatagtgcccgacgatgtctggctgcaggtcctgtcgccgtgccgcaaagagctcatccgccgcactgtcgactccctgaagggcgcaaagaaggccatcctgcatctctaccttgcgaccagcccgtgcttccagcaaatcgtcttcaacatgaacgacgaggagacaattgccctggcggtcgagtgcacaaaatacgcgagatcaatcacaaaggacgaccccgagcaggcagggacac

SEQ ID NO: 33280 - DNA, 465 bp, Glycine max
gacaggtgtcaaggtgcatttttgtcttccataataccactacagctcttatggtccactgtgagcaagagcgctttgctggtccaaagtagggattggactttctcgcgctgtgataagtctggtgtcttgagaataaacttagtacgcacttttgaacaccaagttcctgcccaatgccaatgctatcatctggaaagcgcaacgagaatgaaggcaagtcgacctttaaacgcctgcgctcttcacatccgcctgctcaccactgaccatcgcctccagcttgtcaacaacagtgccattctgcttctgctcaccctggtcatccgcactatgcgcgctcctcaggggactgttaggaatatccagggtatcactcctcttgggcctgaacgggatgggagtgctaggtcttgaagacaaaaacgaagaagccgcgctgagcagcgcgatcaaactcgcctg

SEQ ID NO: 33281 - DNA, 425 bp, Glycine max
cgatcgcataccggaacgagtactagagattgtcagtattgcggaaggacattttcgcgtaacgatgtacttcaaagacatctaaagacgcatgtggggcatcaagttggggatggtagaccgagagcgtcacctagtccatctatcgctcctgaggttccggattcaaggtcaattatccatcaaacacctcagatccaacaagaccagatctatcctcaggaccctctctctgcaaataccaatctgacggttcaggctggaccatcgactggcgattcagctataactggaccggtatatacgactcaacaggatgaagcttggagaatccttcatgggctgttacaagctactcaacctgtttctgccccttcatactctctcaaacaagatgtaatcaacccattccccgatatgttcag

SEQ ID NO: 33282 - DNA, 436 bp, Glycine max
ctttttgccattggtaggtgggaaaaggtttgtccaaagatgataaggcgcacaaattagctctaaggcactggcttgaagctattgatccacgtcatcggtatgggcacaatctgcacatatactatgctgtttggtttcatagccagagttcacaaccttttttctactggttggatgttggagacgggaaagaagtaaatcttgacgagtgcccaagaagtgaattgtataggcagtgcataaagtatcttggacccaaagagagggaagcgtatgaagtgattattgagggaggaaggcttgtttacagaaaaggccagaaccttgtacacactgttgagggatctaagtggattttcgttcttagctcatctagaattttgtacgttggggagaaaaagaaaggctcatttcagcactctagttttttagc

SEQ ID NO: 33283 - DNA, 329 bp, Glycine max
agccaaaaaagaaacctatttcatttccttgcatctgcacaaaaaggtacaatgttcctttggtgccatttcagcccaatacataaactgggcaaattaaccgggaatgaatagagaccactttgcagctcatgttttaaacaaccaatacttaaccgcacttgttttgcaattgcaaaaataccacattcaacttccagagttttagaataatcgcttcctgcaaactgaggctccacagtagcatggcatttgcttaatcttcccatccgagtccaacacgctttcaagcacgccaccatagtcatatgttaattcctgcaaagggg

SEQ ID NO: 33284 - DNA, 410 bp, Glycine max
tcgctgagaacgtttcaaacgcctctaaagtatccaagtgatcctccagtaatatcatagcatgttacatcaaagctcacaatttagactctagttcgcatacaagttgtcattaagaaattccacatggcgatcaccaaatagaatataactcctccacagaggtacgcctgtctatttagtgaactttcgttgacagtgcaatacagcaatgccagcaatgccagcaagaacaccggcaacaagaaatggaggtttccctatttgatgtgataagctgccactaccgtaagcccatatccatcgagatagaaaacgcagcccacaggtatttttgaacttctggagtgaagaatcctttggtaacttgtgttgttgggctagatgatccacatggagaatcacaaatg

SEQ ID NO: 33285 - DNA, 397 bp, Glycine max
gtcgatcaaaaaactataaattttaatgcattaagtttcagaactacaccagtatattaaaataatataacacattcaagaaaggagacccaacacagcacccccacaaactcgcagacaaaagaacactgcaggaatacacagtaggatatcatattcttgtcttcaaacagcgacctaaatcctctttcacgggaccaaaagttgaaccctgatccacacgagcttttccctttcgcctccaaaattttcttcattcgctcgcacccaaacaaatcaaatcattcgctcgtcgagactgtgcaatcaaatcaaacgatcaagaaagctctcaacagccgctcctcctcccgtgactctcacttgcgtgagataaacgccgaaatccaacaataaa

SEQ ID NO: 33286 - DNA, 316 bp, Glycine max
ccaattctaaacggcttcattttacccatctttcctttaagaacaaaagaaaagcaaaagtatagtacaatcagagttaattaaaggctaaaaatacactaatcacaagaaaaaaaaagttggatgacttttggaacattgttttgccattttatttttaacagcagacagcattttttccaaatgagaacgataaccttggcttcttagttgaaccaaagttaaactttatgtctccagcttcattctgaatagcagtattacttgtagaagggaaggaaaaaactactgctggactggactttttcagaccaaa

SEQ ID NO: 33287 - DNA, 302 bp, Glycine max
aaatcgacacttcatttaaaattgtataatcatatattttgatgtaacaatgaaaaaatatgataatgaagtttggtatgctactacgatttcatgcatactccctttctctaatgcactcacagtttagtaccattcaagtcctggcccaattttagtggcttctaatgcactcacgatgaacaataattaaatccattttagaaaacctatatcaatttctactgttacaaatgaagttctaacttttgatacccctcggatgcgagaaacgttagcaatttcctacagggacaggttca

SEQ ID NO: 33288 - DNA, 431 bp, Glycine max
tttatttttatatatcactgccaaaatttcttcttcttcttcttcttcttcttcttctgcttctctttctgggttttgttctctttgctttgtccacaaatggttacaccaaagcatggccacagattcttcaagttccgggcactgtttctcataaccacttcttccacttattccttcttcttcttgtgaatgccccaaactaaccctttaccaaagagccacacgtgccatatatgccttcaagattcttggcacacaaagggcagtgacaggaacatgtcagtttcataggagaaattagaattgttatccgtttattccattcttctcacctgtcttatcgtgtcaaatcttgcagcctctactccccccctctctctctctcatacacacacttttagttttcaaaaaacaacaaacaaaactat

SEQ ID NO: 33289 - DNA, 329 bp, Glycine max
tttttttttttttttttaaagattaatcttttttgaattattaagatccattttaagggagataggattccatgtatttctatttacacccatttgaaatcgaacaccctaataatacaataatttaggtatatctatggcccaacgattttttccaaatagtaccattattctttgtaagtgtaataataactccatagcacatcagccttatcattttctctagtccatgacacagaagttatccattttctcctctttgactccaaagctcaagagacaaccatttctaaaaaaatttctctctattaaagttttctctcttgcta

SEQ ID NO: 33290 - DNA, 470 bp, Glycine max
aaaaatgaactcaaactttctgggtttttttttggatgtaaagaactcaaactttcttgattccaaatatcgagtcatggaagcataactacaaaacattcttatttctaacatcttcctaattcacatgcacttctaaatatttgaacacttttctaaacttaaagaacttctagatttctatataggtatctccaaatagtttatctaatttcacataatatataaccaacattccaactatgtttcttattttgaacagtaaacagcaaactcaacctgaacttgaacagtaacttcatcgtcccttgggatcattaatctcagagaaaacattctccgggacgattaacctgtcggattccttactcccatagcttgtggtgttcaacccagtgctgttactataatccgaaagttgtatgctactgtgggtactgctaaacatgtcttcactatcttcataatcc

SEQ ID NO: 33291 - DNA, 505 bp, Glycine max
atataattgatgtactgcataaaagaaaactaccgaaacattgatcaaaatacattacgagaatttgaggcacttgattaaatatcccaaacaaattacattattcccatacggtagcgtgcaccatcacttcttgttaaaattaaacatatttatataacatgcatgaacaatttatttcacaactttctaggagaacacatcttcaagaaattgaccaaagcatttatgaaggcacacttcgacaaaataaaaccactgtctccgccaatgaggattgatccaaaggattatcaccaacactatttgtaccatgacatagcatgaagcagaactccaacagaaagcagtgaaatcaattgcagtgtcgttttcctctccatcatgcaatgcagtacttggtggtggcagcgttgttagactgcctctattactgttattccaagtaagatatggatttcctttgtagttgtcctcatcaaaattagcaaactgtcccttatca

SEQ ID NO: 33292 - DNA, 465 bp, Glycine max
gaggaatcttatgtaaatacctcagaataaggtttggtcctattcatggggattctgtaaatattccattccaaaaagagaaaaaattcgaaacaattgggattttttggagattggatgcagttactaattcatgatctgaccttgtacagattgaaaacttcattctcgattctacaagaatttttatgaaagcctttcatttgcctctcttcgatggaagttttattttcccagaatgtatcctaatttttggcctaattcttcttctgatgattgattcaacctctgatcaaaaagatatatcttggctctattctatctcttcaacaagtttagttatgagcataacggccctattgttccgatggagagaagaacctatgattagcttttcgggaaatttccaaacgaacaatttcaacgaaatctttcaatttcttattttactatgttcaactctat

SEQ ID NO: 33293 - DNA, 645 bp, Glycine max
  unsure (1)..(645): unsure at all n locations
aacaaacccctgctctcaaagatgttagggctacaagtgaggtggtggagcgctcaaacagaaacttcaaataaaggggatcaaagccatttgggtttgggatttgagatgtccctttgtggtcatgaacttaaggtgggcatgggttcaatagcggctgctgaagtgtttgaagcacatcgcatatctgtagttgacttcacaagttctgcttcatcaataattaaaaatcaaaatcttgttatcaagtttaaagagaggtacatgacatgggaaaaggctgctcctcttggtcttggaatggctgtttatggtttagatttacctgttgagtccaaagatacaattcctgtggaacaggatcatgcattgaagtccagggatgatgatctgggatcatcttcgtctggacgcagatggagactttggcctattccttttcggaaggtcaaaacatttgagcatactaatagcaactcatcaaatgaggaggtatttctagattctgagtctggatctctgatagaaccaactccaacatccagtacccaaggatcttctcataagcaatttctaagaacaaatgttcccactactgagcagatagcatccttaaatctcanagagggtcaaaatttggtaacc

SEQ ID NO: 33294 - DNA, 392 bp, Glycine max
cttagcttagcttcttcttctgcgatcaacagtcgcctcctctcctccttattttgcgtcgcctcgccggaaagacacaaaacagagagagagagagagagagagagaagggtccgtataaattagggtttctttcacctaacagagccatcgaacctagcctcttttttcttcctctttcgcagagcgagcgactcgcgaaaataagatcctgctcctgatctaggtcgcaaaatcgcagaatcattcgattttgcgattcagatcctgatttttactaccttgcctgtgaggaacgatgtttggctcgaaccctcttgggcagtcgtcgtcgagccctttcggctctcaatcggttttcggacagaccaattcgagtagcaataatcctt

SEQ ID NO: 33295 - DNA, 438 bp, Glycine max
ctagcctaaccccttcttaaagcaaccctctttgttacttcctcttgttggtaaagggcgattaacacaataaacctttacagcaatatcacatcaacttgtcatcttataattgaactgtatgtaaaaaaaaaatttcagaagaggttacgtaccctcctttcttgtcatggaggtggagaatcagaagcaaagaagatatcaaaagctacgcaattggttcaatagcaagcaaaaggaagataggccatcttcattcagtttgaacgaaatacaagatggagcagaagatgagagtgatgactatgagggcaatctctccctgcggtcattggaattagatccatgcattccaacaaataaactaagggtctttgttggtacttggaatgttgctggaagatctcctgtaggaagtttggctgctgacttggatga

SEQ ID NO: 33296 - DNA, 433 bp, Glycine max
aaatgatcataatgaaaacaaataatgataaaattaaagtatattttcaacgcgactgagccactgctataaataataaagaaatggatacattcaaagttgtaacctgtgcaaccgacaatctttaaaatggaagtcattccaaaaatctggtttcttaagtaggattcctaaagaagatatgatcgagggcttggcaagctgtaaggcgtttggtcggatcatatgttaataagccatgtaacaagtcagtcaaggaggaccttgaagagtccacatttcgtgatacaatatccttaagatgaccaagcttcttcactgcactaatgctctcccttgaaacagctccttcaggccatcttagacgcgatccacgcttgaaatatttttctgcgcccttgttagacctgcgaatcatgagctctgggataga

SEQ ID NO: 33297 - DNA, 706 bp, Glycine max
ccttcttaacacagactccgaaacgaaacccgaaaccctcgtcgcaatggcggaggaggaaaagcatcgtctccaagaagacaccgacaagctcttctgctcctacataggcgcgagcttctcgatgttcctcgccatgctggcgaacaactccgtcccagcgctgcagggcaggtgcggtccctctccctgcgcgcggcggaggcggcggaggagctccggcagatgaagtcgcggcggcaggaggactcgaaggcgaacgcgacgcgtggtggagatcttcgcctcgcaccggaacgcgtggcaggcggaggagaagcgcctcctgcagcagatcgacgccgcggcggaggagatcgcgtgcctgcgggggcgcgtggcggagctcgaggacgccgccgcgcacggggagagggacgtcgccgagagggacgagatgatcgggttcatgtcgcggaggatcgaggaggagggattgggtgggagggagagggagcgctacggtaagaagagtgaagagtggttccaaaaagtagaagatatggtggggtccaccgctacgagtttggaagaagaagaagaggctgatgttatctatgaagaacagcatagtcagcatttcgggaacaataatggctttgattctaagtttatggcatctgcttctaagttctgggctgagaaagcctcactttgtcagcgcatg

SEQ ID NO: 33298 - DNA, 501 bp, Glycine max
ggctcgagggttcagttaattagtttctctcttcgcactttctcttgtttccacaaagccatgaaagcacgtcctttgcacatagcaatgtatccatccctggccatgggtcaccaaaccgcattcctccacctatgcaacaagttagccattaggggccacaaaatctccttcatcaccccaccaaaagcacaagccaagttagaaccattcaacttgcacccaaattcaatcacctttgtcaccatcaatgttccacacgttgaaggccttcctccagatgcacaaacaacagcagatgtcacttaccctttgcagccacagatcatgacagccatggatctcaccaaagatgacatagaaacccttctcactggcctcaaacctgacctcgtcttctatgacttcacacattggatgccagccttagcaaagcgtttaagcatcaaggctgtgcactattgtactgctagctctgtcatggttggttacactctcaca

SEQ ID NO: 33299 - DNA, 731 bp, Glycine max
  unsure (1)..(731): unsure at all n locations
cacaactatttcaggatcatcaaaacaagaaagcaatgagggtagccgtcttttcaagataatggcaaaatccttttcaaaaagatggcagaatggagaaataagcaatttccagtacctcatgcatctaaacaccttggcaggacgtggatatagtgatctcacccaatatcctgtctttccatgggtccttgcagattatgagagtgaaaatcttgatttgtccaacccaaaaacatttcgtaggcttgataaaccaatgggttgccagactcctgaaggtgaagatgagtttagaaaaagatatgagagctgggatgatccggaggtcccaaaggtgcactatggatctcattattctagtgctggaattgtcctattctatcttctccgcctacccccattcagtacagagaatcaaaaacttcagggtggccagtttgaccatgctgatcgccttttcaatagcataaaggatacttggcttagtgctgctgggaagggaaacacatctgatgtgaaggaattgattccagaatttttctacatgcccgagttcttggagaatcaattcactattgacttgggagagaaacagtctggcgagaaggttggngatgttgtcctacctctatgggccaaaggtagtgctcgagagttcatcagtaagcatagggaagctcttgaatcagattatgtctcagaaaatttgcatcactggatagacctca

SEQ ID NO: 33300 - DNA, 465 bp, Glycine max
ttttccccaatcattggcgtcgctgttgcggtatagtgtttttttttttgtcggcaaatgttaattgtcagtacggtttgttttttgttattggggattcacttcttctaattcttggtattgctattgttgggtcccttatacaagtagaagtggattagggagttattaagttgtgtctcgatcaatttctcaacagatactcattataagtaaagattttcttatatattaacttatccataggttaaaatcaacctctggagaagctatctgaaagagctctggaaattaacttatgcattgactaattttgatggttctgtacataagtagaaatggattacggagctcttagttgtagatgttttatgttaagagaacatacttgttcttgtgagacaattctgcttgagtcaagttaaataactgtactgtagatgacacaatctcagtatttaatgt

SEQ ID NO: 33301 - DNA, 406 bp, Glycine max
aagaagaaagacaatatagcttgacacactgtgaagaactctgtgtaatttacatacaaactgcacattccaataccatctttcccattagggttatcaatggtcattttcaatatagatatgacaaataggttacaataaacctgttaacatctctctcttataacataccagggtacaaggtagaggctgcgaaattagaaacttgattatgatcgaactttagcaagccgggcccttatttcttccatttcttcttcatcatcaacaccctcagctatagcatcttcctttgcgccaacactttgagcaggtagcttcaccctctctttcctcacagcttcaggaagttgagcagctgtctcaccagctattgcgggcaagactttatcaacttcttcttcta

SEQ ID NO: 33302 - DNA, 426 bp, Glycine max
catgacaacaaagcaccaaatatattaatattcagtcaaataaaaaaaaactgaactaaagcattgtacttgatttaaattgagagaacaacaatcaaaactaagatctgaagtctaaagcggattgaaaaaaaaaaaatctataacgaggtgttaaaaccaaaacagattgatgatgattgacgattcaagagtcaagggtcagtgtaatggcaaagttgtgttgcctattttaccctcgtgacttggaattattctcctgtctgtgtctaacaattccaccacgtctcgggggcagtggttgtcccaaggaaaccaaagccctgttggggcttcagaagcgcgtggtggtgatgatgttgacggtgcggttggacttggtggtactctacggccccagtgaacgctagcatatccttgacgttg

SEQ ID NO: 33303 - DNA, 826 bp, Glycine max
gtacttttgcaactggcaatcatttgggttcattgtggctaattgaatcaagaaatcaaaacaatcatccctatcttcttgattggtactacacttcccaacctcatgatgcaacaactcaaagacatattcaagctgatgatccatttgaaagaacggagcatcaatccccagattggatgccctccatcttggtacaaaatgagcaacatgggcatgaagaatacataaatgagtattgcgatgaacgtgtcacttcccatcttggcgcttccacatcagctcccatcttcagggaaagcctaattcaggatcaacattccattgatatgcccctcactaccaggagtcattggtgggctagaagtcactcccagagtggacatggtcagacaagcttttttgagccaccagatttcaatcaccaaccagtatacaattaccatgaaaagttttctgatagagggtcagaggatcatgatcaggaacaacacttgcactggggagattatcaccaagtagtatctagtacagcacatgcagatgatttagatgcaggagaattcaatcttctttttgatgatgtttatagcagtcctccacaaaatcccactgtaaatcctagcactgcaaccttttaagtgtgatggctttgtccttcattatttgttttggctggttcttgcctctggaatgcaagagttccgaagtcaagtcatgattgtcatttctatgttatttgtgtggaaatggaaactattctttgctgtaaatagatagattctttgacataaggcagttcagatttctataattgttttgcgtt

SEQ ID NO: 33304 - DNA, 628 bp, Glycine max
ctctgatcttggagcgtagaatcgtgaatggtgacaaaggcaaacgcaagaatggagtcacgcatggaagctatggagaaagtggtagaggagaatcacaaagtagtggaatcgcagttgagttcgatcgaagggatgatccacaggttggggtggcatgggagaaaaaatctcctgcgacgaacgtgcacgtagttgatgcgagcgaaggagatgaaggtacagtggcacatgatggctatcggtggaggaatttggaattgcccatatttgacagtgaggattctatgggctggttgacaaagatcgagcgatacttctggttacgcgctgtaagggaagaggacaagctggaggttgttatggtcacgatggatgaggaagctttgggttggttccaatggtgggaatcttggaatccaaatcattcttgcgatagaaggacaatgcagggattcataggccaatttgagaagtgtgttggaatggtgaaagggttggaggagccatttctggtggaagtgttcctcaaggggttaaaggaagagattagcactgaggttaggcttcagaaccaaagaacttgatggaagccatggttaaggcttgaagagtggaggataagaac

SEQ ID NO: 33305 - DNA, 430 bp, Glycine max
gacaaatatacttttttatgtatttttaaatatagattttttaatgggtgaatggtctctggctttatttcatccaactacatcactttatactgtcaacatgcagttatattctccactatatagcataaaagcaaagctggacgaatatttttggagagacagaatgggcttttacactttccttagtagagaatagattgtagaagtgataattgtggccaagatatttgatgttacaactagagcagttgaaggataaatgcgtccaacatctttccttatcaccaaaccttcaatgattggagagttaacaacaatgatataagctggaagtaaaagctgtatgaacatcttgtcccaatctcccacagataacactctgtagattccccctatgaagcaagatatgttgatgatgaggagtgca

SEQ ID NO: 33306 - DNA, 438 bp, Glycine max
gaaacgaagaaggatattcttttattcaacaagaggtgctcatcacaaaatgctaaaattttaaaatccacgtaagaagtgctcttattttatgtgactagcgtaagtgagaatacaaaaaatacttgtgatgaccaccgaattcatcataaaattgcgaccaaaattgggtgtagttctcagaataagcagagagactcccctagcaacaatttacactcatgttagataattgactagacaaaccagatccaccaccatccaaatcccttttctttggcttcagtgatggaggtacccagttaccaataatatcagcatcagcatgttcatgatcatcataaccaatgacatcatggctaggctctttacgactcacagagagccacttggcttgcatgtatgaagcggttctccatggtggcacgtggagaccct

SEQ ID NO: 33307 - DNA, 715 bp, Glycine max
cgaaaatcatagtcacaggaccgaattcaaggcaaggctagcttcaacgcaacacttggaaaagtatgcattacatacattatactcacctataccaattgaacatgatttcaagataccaaaattttacaaaagacccttttcccttaaccatctggtaattcagtggaaagagccttctgcgaaattttgacgttcaaaaattatgtcaaattggtatagacgtgtatattttccaagtgttactttgaaatcattgccttgaatttgtttttcatactgaagaccattgcttatcaattatgagccaagattttatctactctaaagtgttggggacaagaggtataacatagagcatgtattattggctaatgtcaaatgggaggtcaatcgtgttgatgcaatagttgtgcttgcttattctagtctctttctggcctaggagttgtatgtttttccattatttggattttcttatgtaaggggctctcgtgtaggctgctaagagaggggcatgtcttgcacttttttcttcttttattagcaaaaggaggatggtgaatcgtgaaagagtattacaaaatatcaaaggcacaatgattttggagtgagatatgaaagagttaagaggtgtgagaagaaaaggagaagggatgctttgttaaaaaaacaaaagaaaagagaagggaggtaggggtgatgatatttaagt

SEQ ID NO: 33308 - DNA, 141 bp, Glycine max
ggaaaattactgatatgaatgcttttattgccacaaaattatttccaatttgaacatgttcaaagttatccaaaattcttggtcaaaatgatctgcagattggtggaatcatttttttctttgcacaaaaggacggggggg

SEQ ID NO: 33309 - DNA, 275 bp, Glycine max
ttgttttttttttttaagacaaactcaattaagatgagctttatatataaaccaaaccaaaactcactgtactttgaggctacacaaagcaaggattgtaggaagcatgtggtataatcttgttatgtccataaatttggtaaagaaataagcaaaaatggtgaggtaaggttgagttatagactatcttcctactcaaaatctcacatcatcttgattcgtttgcagcttgaagtagaattgcgtatccctctagttgtcacagaatatggagc

SEQ ID NO: 33310 - DNA, 474 bp, Glycine max
gccgcccttttttttttttttttttgccttacttagctatttcttatcattatcctcagctatggcaacaatttcagtgttggtttgccccagcaagctgcttatggatcgagctttcaccattccaagcttcatcctcctctttgggacaatcacttgctttttctcatcattgttttcagcatcatttcccaaagggtactcttcatgagtgacacgacttgtagtactagactttgttgtttgtttttcgaataaattctcggattgaggcacaatattgatattgttctttggtgcaacacttgttgtgccaatggacttgtttctcacacttgtcatgcttctcaaccttcctttccctaagtgatgctcgcaaagagagtaacccaccaaggtttgttggcaacacctccatcctctcccatttacacgactgcaccttgaaccttccattagtgcaccaccccttac

SEQ ID NO: 33311 - DNA, 482 bp, Glycine max
ccgccctttttttttttttttttacgcaatgtaattttatagatcaccgcaaaaatgccttctgatcctggtgctacgcgtacattttgcacaagctaaagctagtagattatctataaaaactgccgcgcaaaatggcttctacaacttgtctagactcctagaatttgaaggtatatatgggtctatatacaagaattgttttggatataggaatggtttcaccgccttgaaaataccaccaagatcaacatggacatcgagaccaccattttgaatccagaagtgtcccagaaattctggtttagcttatctgcggctgcaacttctctttgttgctttgcagctaattgatctctcagttctttgatagctttgtcccgtcgttcacccatcctttgcagttttcgtgtctgagaacgagcttcctgcagacagaattctaacttcaacactttcttcttcagctcttgatcagcacg

SEQ ID NO: 33312 - DNA, 347 bp, Glycine max
atgcaaaactattctcttgccaataatagtttcatctatagtaattcaagccatttcatgtggtacaacgaaaatgactatagaatataatgtcattaatttactttccttcaaaatctctataattccatatgcggatgatccttcatggatatcctgtacaatttgataaaaagggggcatctatcctaaaccttttgagggccaaaattgtgggcatatactactgtacagagggcaaaaatacagaaaaataatagttatggaaattggtgaggcattttaaatagggcaccacagttgacaatacgcgcatctatacatatctcattcaattacaacaaaat

SEQ ID NO: 33313 - DNA, 374 bp, Glycine max
gaaacaaaacgtcttttttactacaaaattaagattgtccattcaagtccaatatggtacatatgataatacaagtgtcactgagcgcagcgggattttatacatgctataccctactcatgccgcgggcagcaaaatcaacaattacaagtttttacgatattttatgagtttgtttagaacttgaaaagcaataatattgggaatatataatatatagctctcccacgtttccaattggtatagcctggacaactaactatcaaggaagtgcccatgtttagtgaaggcagatcgtgattcttagcagcaccttcactacagattaggggcatccatagcttcaataagcatttgtcagcctattgccttac

SEQ ID NO: 33314 - DNA, 435 bp, Glycine max
ggccccccctttttttttttttcccttttttttttttcttatagggtttttatttcttttcttttattatggttgtatgttttttccgcttggaaaaggaaaagagatgttatctatctatactatttacaatgagcacaatttctatgtttctgtctatgctactactctctacagcctatacaaatgttaacgactaaaccaaaatttcaaggtaaacaattgaatcatctctctatgaaagacaattcatataatcttcatgtcgactgtcgccagaggccatgctacaaaattttcagcaccctgtttcttctgcttccaccaaaaagaacaacccactgacacctgctcccagaaaaaaaaaaatcaccaatccaaaaaattaaaattatatatctgtatggatatatgtctaatcacatcataaacaag

SEQ ID NO: 33315 - DNA, 820 bp, Glycine max
tatctataaaatacaatggaagaactaaccctattaacagtatgggctaaaccctatcaaaggcaagggccactaaaactcttctgaaaaactagtaccaataatatctccattatataccatccttttgtctccatgaagaaatctacatatggcttggtctcctcttaccagaatctgttctcaaacgctttacagggtttgcccaaccaactgacccagcagacccatttgagtgttgagatggctggctaacccttccctgttgagccaatctagcatcctttggggttgaacctgaccctggacttcttatagcagcactaggtggagaaacaggaccagttgatccagtcctacccttccccgatgatttgtccctgtcatttcttttcttcttgcacacaaccaattgacctggatgagcaagcagtggagggttatcctgctgaggttgttcgcgtgcactgccgcttccggttcttgagttcttctgtggcaaatgacctttgaacctggtgttttcgccgttggtagttgatccgctttgtgacggcttttgtgacgggcatggatcggtttctgcatcattggtcactctgtgccttttgctagggccaactgtcacttgcctaggggatgatgctgcagtaccagcaggaacttggctggagaaagatagtgcacctcttgcttctacaaagtctgtatccggaaacgcaattttcaaaatatcaaagaagagatcatgaaccttccttgcttcagttcttacctcatatgagtatccatagaaatgcattgcacccctcaacatgaa

SEQ ID NO: 33316 - DNA, 473 bp, Glycine max
aaaaaagtacttttgctacttatacgatggctaagtgcttttcattctctctctctcgttttctgatcttttcgtttgtgctgctacagacacaaacggggaatgggtcaaatgcaacaccgatcaagttgagagtaggggtacccaagagagatggtttccgccaatttgtggatgtagtaccttcggactctcatgaaaaaaagtacaacgtatctggatattgcatggatgttttcaatgccgttgttacccgcttacctttcaaggattctcttcatattcaacaaccttatggtattgaatcaagtgagatttctggaacatacgatgcacttctccatcagatcccagcaaagtacgatgttgtggtaggggatgtaacaattctggcgaaccgttcaaatttcgtagatttcacgctgccatatacaggttcgggagttaaaatgttagtaccagctcaacatggg

SEQ ID NO: 33317 - DNA, 528 bp, Glycine max
ctcgagccgaatcggctcgagctcttatcacctcattactcacccacgttacgccagcaatacctaccatgtccaacaccatcccgcccactgaccccgtcgccgccgtggtttccgactcgctgcccaagccggtggcccccgcagaggccatccagcagccacccgctgccgcgctggagccgttgaccaagaccgagggcggctttttgcaacaggcccgagagaccatcctgccttacgtcgagaaggtgcaaagcacggcgaagccatacaccgacgctgccacgcacaaggtggaggagcttgtccagaagattgagggcactgccccgacgtctgcgaccaccaccgacccgaccgctacgcgggatctgaacgccccggctggtaccaccacgactggacagaccgtcgcggagaaggcccagggcgtcttcgcgcaggtctgcagcgctgtcacaagcaccttccagcaggtcaccaacaccattgagacgcgcacgacgaccgacacgcacccgggct

SEQ ID NO: 33318 - DNA, 419 bp, Glycine max
catatacgaagcatattattttcatacaacttatacataacctttattctatcaaacttagcaaaaacacatggaaatcattctagacatacaacttgatatattacatatttccaattttgaaaaccttgctcagattatccttgataaagtagtagcaattcatgctcaccaattccatgtagtaaaaccatgcctgcctccaataaggattgatgtataaagctgctgcagttaccaacaatgctgatgtgcatgacacggcaaagctcacacagaaaacatacttttccaacaaactatcattgtctccatcagggtttgagtcatttggtataatagtaggggggggattgcaactctttggcagtggaagtccacaaaggaacggattaccctcatagctgttttcatcaaat

SEQ ID NO: 33319 - DNA, 377 bp, Glycine max
cagcaagaatacgggctttacaaaaactgttaaaaaagaattccagtttttaaactcaatccatgctaaaaatgaccttgaacgaagtattgtagtttcaagaggggtaggggtcaactaaaattgagcatgcgctttgcagaatctaatgtattacatagtagcatagcaacggtcataggcccaaccccgccaggcacaggagtaataatggatgccacttttacggcctcttcatagcatacgtcacctgcgaggcgataaccatcctcgcagccaggatcctcaaccggagttgtaccaacatcgatcacagctgcaccaggttttatccagttcccacggaccaaattaggcactccagcagctgaaactac

SEQ ID NO: 33320 - DNA, 560 bp, Glycine max
taagtctctcggggtttcgttttaggatgtaagcatataaaatctttattacagtttaagaacaaagtttcagcttcctacgtgaaattaaacattgctccatcttcgttttaaatttcctcacatagggcattttattgatcacataaaataattgttattattccacaacagcagagctgctccgtttgatgaataacaaaaaaatatataatattaggggtatacatcagagaaatatcaatatccagagtgacaagatgcatcgtactaattgacctgcttcatggttgagacattaatttccaaataacctttgcaatctggactgtgaacgtcccgtgctacgcgatttgagactcggctgcttgcccactggttgttgaggttcatcactaggaacaggtacagtcttaaccaaattcttgaatataagattatagaacatctgaatgtatctctgctttgcctccttttgttccttattcacttgtctccaaaaggtataaatgttccccatgtttaccatcttgtttgcataaatcttccaggtatagcat

SEQ ID NO: 33321 - DNA, 549 bp, Glycine max
ggaaaatgaaaagttgttgctgacaattgaccatccctggataatcaactcaagccattacgttctattttcaagcattttgcatcaaagttgcatcgcaaacaaggttctgctgcaaaatgaaagtatgcagcagagaaagtatacaataattttgaatgcattaactgataagaagacaggtgagatcaaataaataaagaagtaaataatacaaacccactttttattacattgataaaaagaccgtaggaggtcacataaacaaaggagcaatagcaaacgattcaaatacacagaaatcttcaaacacagccagcgtgaataatctagtctgggctctccaaatacgagaatactcaatcaggactatagtgtttacttcccactgaaatatagggaacatgagctatttttgaccagtcctccccggtttccttctcacatcgcttctctaagtcaggatggcaaccaaaaatagtcaagtgttgcagattgatgaggcttaagcttgttggaagacacgacaacttggaacaaaaaaaaata

SEQ ID NO: 33322 - DNA, 507 bp, Glycine max
aaacaaagaatagcctttgaataatactattgatcatggatagtaaaatgtgttttgaggagttaaatcccctgctaatctacaagtggaacaatcttatcatgtatgcataactcacactaacaaaaaatatatgagcaagaaagaatgacaaacctaactatatagaaacagccagagtccaagcattgtggacactacctcaatagtcttcaaccaagcaaaaggtgcgcattattctatattgggtgtgcatacaacacttgctttgaatgctatcttgcacatagcgcattgagaagaacatgagctaacataaggtccacgaaatattgatgtccaatttggccatctctccacttcatctttgctggagctcttccatagtgaactccatcattacaccggttatcaaaatgccatggaaatgtcatatcaaagttatcaatcacaccagaaacaactcctgattgcttcaatttctccaacaacacaccattgaacacc

SEQ ID NO: 33323 - DNA, 398 bp, Glycine max
  unsure (1)..(398): unsure at all n locations
gttctagatcgcgagcggccgtccttttttttttttttttttcacacaaagacatatcaatttggaaaataattataatttacaaggctttcagcccgtaagaattcaaccgaatcagacaattctgcttcttttcttaggcctagaaattgtcagatccttataacaacaggtccaaagctcactttcttgttggaaactatttctatatcccctcacatgaccttccttctggacataagcccaagaacctcatcccaaagcccaatacttcccacactccccagcccaaccccacttgggctacacgcagccccagtccaatacccagcccttatctcatttttcnnnnnnnnnnnnnnnnnnnnnnnnnnnnnnnnnnnnnnnnnnnnnnnnnn

SEQ ID NO: 33324 - DNA, 571 bp, Glycine max
gattagaatgtaatttattctatgatctgatagccataatttttgtacagaacaacaacaacaaaaaaaaaagaaaagagtaagttctaattgggggtaagggtaagaagcagatccatgaagaaagcataagcaccaaccagtttttgagatcaggtccaatgctatgacacagtaatggatccaaataacttacaacaacacattcatgcctattataatattactctacaacaccacaacacaatctaacaacttttaattaattaattaaaccagagatgaacaacaacaacaacaataacaacaacaacaagaaaatgatgattataccgagaagaggttcttcttcttcttcttcttcttcttcatcagaggcacagcgcggtggccggcaggtcgtcgtcgttgtcgtcgtcggcatcggatggtgggaggtttagatcgaagggcagcggttgccggaaggaggagatgaggacgcagtcctggccgtcgtcgacgacggaggaagaagagtcgcaatcgctgtggcaatcgtcttcgtcgtcgttgagagggatgatagggt

SEQ ID NO: 33325 - DNA, 537 bp, Glycine max
aactaggaacaacatttcataaaagacaacacagtacacgtaatacatttgttttgtatcagaagtcaaatatttaggaaatacaataaatatttatagaagtttcactgtttgaagaataatttaccagaaataaaattattttatttctggtaaaattcttttcaatttaagaacaatcagccactaaaattgttcatgttgaacaaaattaatcaattatctgactaattgttcttcaactgaaaatacttttactaagaacacttgtatttttttcctaaacattatagtgaatatgctacatatataccatatttacagcggtatagtgtgaaagaatcagtaagattctacaagtttgtggttatctccatcagcgactctgcttgtgagggaaggcctcattgtgacaatggctgattcattagccccagctttaagagcagcctttgcagcttccaggaatctcttcaccgcatcttctgcgtacctgtttgcttctttctcgagccgctcgagccgaatcggctcgag

SEQ ID NO: 33326 - DNA, 543 bp, Glycine max
ccacgccgcggcagggcggtgcgcgatgccgccgacagggtgctcgccgtggccgccaaggggaggacgcggtggagccgcgccatcttaacgaaccggctgaaggtcaagttcaggaagccggttcacaagaggcagaaggttgttgttgttgggccgggccggccaaagaaaaaggcccggttcagcgttctccggctcagggggaaaaccttacccgcggttcagaggaaagttagggttctgggccggttggttcccggttgcagaaaagaaccgcttcccgtgattctcgaagaggccatcgattacatacccgcgctcgagatgcaggttcgcgccatgcaagctctcgctgacttactcttaggctcttcctccgcctcaacctccgccgccgcgccgccaagttgatctccctttccggcgaatatgccacgggtcatatattttttttcctcttcttgatttttggtattatttgcctcgttttccctttcgtttatgttaattgtccagtacatacatattatatcttcttct

SEQ ID NO: 33327 - DNA, 658 bp, Glycine max
aatgtccaaagttcttgagcagaaccacaaataaaaatatttaaaatacaaatgtgattttagtttccaaggtaattaataaataaacaaaaagattgatcaagatgcagagaaaatgccatgattgcattcattacaaaacattaacgaagcatttaagtgaagaaacattaaagcatgacgacaatggtcgtagcgaaagaaaaaaaataaggtttctatgcaaaacttccttccccttgctctattccattcttctcgaccatgaaacttgttatgtaacgaacatattgaaattcaatccacgttagaagttctcttgtcaaaggcacaaaacctaagatccaaaaaaaaagttcgataacaaaaaaccatgttcacactaaaggctgaacttaaattctaggaaatccaccaggaacaaacagaaatgttgatagaattcatgttttcttgctatacaaacaagctgtatacattatcattctactgaagtgaagcttttggttatcttcatagagttaactgattcatgatgttggtttgtatattttcaggaagaacatcctctgagaagataaaatgcttagttgcaccaaacatgctggctagattcagaatgacactctgatcggacgcgtgggcggacacgtggaca

SEQ ID NO: 33328 - DNA, 452 bp, Glycine max
ggagatgcgtccatcccattgaatatcaacatagggaagggtaaagctatcaacagaacacctgcactcataatcaagcctttgcaccaaccacttcacctctcgcaccttctccatgccaagtcccgcaggtcgaccggcctccacttggtaatcgcaagcgaacttgtccgattgcgtgcgcttcacatggtactcaccggctatttgttgcacttctgccactggacgtacacgacttgggtgaacttgacatcgggcgagtcggtggcgagcagaccggtagcagagctgttggagctggtcaggcggacctgggagttgatgttgagcatgccggcggcaccgcagggcgaccagacaatcgaggtagagtcggcctcgtcgtgcttgaggtagtcaccggtgactgggccaacgaagctgtactcggtggaagtctgagcagtctg

SEQ ID NO: 33329 - DNA, 471 bp, Glycine max
aattgggacatgaggttgctttaaaatatttctctattatgtggcacatctagagtagacttaaattttactagactgcataaggtacgtacaaactacgcataatataatactaggctactttcagcagcacatacaactagattgcatgtaggatgccatgctacatgtagcagcttggagcttaagttacaagaaaagtcagctctactagactctgaatcagtgtgagcatgctggtaaatttcacgaggtattaggttgcttagagaaggccttctaactcgagacttagcttggtgaataaccttcctgtgagaatttcctctaatttctagtttgatctcttccttcctttcagaacccggggagaatatccgcacgacattgctataagaaccagttgcaaaatggagtccatcaccactaaagcagcactcgaatttgtcaaatatgcagtcattattatat

SEQ ID NO: 33330 - DNA, 409 bp, Glycine max
aacaactaattagtcattagacaaactgtttagtattcatttgaacaactatttttacaaccagtcactcacaatctcctatgggtcctaataaaatttggtggattcattgcaatggcggttgagcaagcatagactccaacagagcagagagctgcagatgccaagagaaggaccttccattggctcccagaaagcagaattgccaacgcagttaatgcaattgccacagctgaaagagcatttttccaagcttcgaaagctttgacgacgggtctacatcctttgcaatgaatcacatgcctaaaatatctgttggcaaaattaggggcatgcattggtccaatgccccccttggttggtgaggaagctgattgtcctgcgactagtccagcaggtgcgtgttcaa

SEQ ID NO: 33331 - DNA, 383 bp, Glycine max
agaaaaagcaatccaccatgtatacgttttaatccaatgctacatgcaaacaattaaaccagaacacaaaacacaacaatttccatccctaacgtacaaaacctcaaacaacacaattgaaccactaaccctttcacgtcacaccatggcttcacccatcagacccaccccaagaacaaacgcaaccactccaaacttgaaactcacggaagaaccagcagaagaagcttcagcgggcaagtccttgttatcaccattgtcactatcatccccagcggcaccggacttcgtcttatccgtcttcggggaagcccctttagcctttcctggcgccggtgccggagcctcactgggaagcacaaggtcaagtgggagaagcacct

SEQ ID NO: 33332 - DNA, 543 bp, Glycine max
ggaactcaaaaacagggtttcattgattgtaacttcgatattatttgtcactgacaaatggtaatccactgcttaccttatgttgaacatatgatgattcactcacaataaaattactttaagcatttaaaccgataaattggcaaatcatgaatgaactttatgatgagcatcctccaaaaggggtttttaagttactttatactccctcagtgataaatgaacaggtattgtgtagcttcaaataaaaaatccaacagcttatgtgcatttttgccagaaccattgcttctgacttcgaatttccagggtgttgcagttgcaaacttgcaattccttttcctaagagctgtaactggaggagtccactaaatgtgtagcaaatatatgtggcaatttaagatcttaatcctcacaatttcaaaccagaatggagataagaaggaagttctcatgtagaatcagcatgtctactcttccatatgattggagctaccagcatccataagtagacacaaactgccaaccattcatttactattc

SEQ ID NO: 33333 - DNA, 342 bp, Glycine max
acaaactgttaagaattctatctatataggctgtgcaatttcctggtacaaaacccattttggtttgcctatgtatcattcataactatgtcagaagtcctataccaaattccagggaaccactggacattaccaaaaccaaccaagagggatacccaaaaaagcgtggcagaaaaatgggttaccaccagttataagttcagcggcttctgaactgcttagctaatggttcaaccaaagctgcttttctaagcttataggactgatttactttgtggtcctttgccatggccctcaaatcagtcaatgacaagctattcaagtcaccaggcagcaaagatg

SEQ ID NO: 33334 - DNA, 451 bp, Glycine max
acttgagtagtcaacttgaaacttttacatcattattcattgaaaaataatttaactttctgatgggggcagcacaacagtgacacctcgatcgcttcttaagcagaggcatcactgtgcacaagaaattttagcatacattacatagccctgtttaaaaagggctaatagaataaataaattatgttatggactgaaaaatacttgtaatgaataaaccatcaatatcatccttaaaagtattacactctctcctaaataacccacaaagtaaaaatggtacaagtaatccttcaagtatcataaatcatactaaatagtctcccaaatatcggaaaattcttcaaattagtccctgaatgttagtatagtatatcagtttagggactaaactgatgaatattcaatacttcagagattacttatataatttcattagtttaagggctac

SEQ ID NO: 33335 - DNA, 477 bp, Glycine max
gaacaaacgtactgaacgtatatttattatataactgaagaacaagtaaagaaaacacacatgttaatgtcataaatatatctttatttaagcataggttttccatatatatattattgtgttcctttcaaactttcgatcaaatttgtttcacaaagatcctacttaagttgattggaagaatttgtgtgtctggttggcagaaacttctccctcagttcagcagcatcaacctgtccaaagtgattctcaggaatccaatttccactcttaggatctctcatccaaaacttttcctctttaatattaatgacattatcggatgctgactttgacttcatcgttgtgccttctatttgcttccttaaactttccgctacaacaacataacatctcttcctgcacctgagaagaaaagaaggacagacaagaatgttggccatgatgcttagagttagaaagatgagtgtaagggtg

SEQ ID NO: 33336 - DNA, 359 bp, Glycine max
ggaagggggggaattaccaaatgtagttgcatttttttgctgccatataatgtatagaaataggaacaacttatatcttacaagtcgattttgtaaaattgaattaaactcaaagttacatctaaaatgatattaaaatctatattagtgagtgttgttgggtctgtcgtgttacccgttattggactacgtgcaaatgttcaacaaacttcatgctggagatgttaatcccaaaattaaactccactgactatccttcaataaatttgattggaaccaaaggtccataagattcacgaaaatgtcagcatctgaattattctcaaggagtgaggttcacacttttttggccagcatgc

SEQ ID NO: 33337 - DNA, 474 bp, Glycine max
acacaatcattcaaactcccatttttgaagtacaagaatgagaatatgtataaccccaagaaagactgacattaaaatcaggaaattagtaaattaacaatgatctcttgatctattctctcatgtagtatataaaagccttccctaacgaaccttcctcatatcggccaacgctaacctctccaagtttacaaggggaatgaaaactagggaaataaaacacagtcaccctctcttctagtaactggaagaaaggggaattagaaagatcaaaagaatggcagtggtagcatctcgtggcagtgatcaataacaagagcagcaactccttcacactaccttccgagcttactttgctttggattatacccccaaattctattcatcatctgattccagagttgggctcttagagcaggcttccttttgatggagttccaacattttcttttctggattacataggcctgaaca

SEQ ID NO: 33338 - DNA, 394 bp, Glycine max
ggcgaccttcttggacttcttcttcttcttcttgccgctcttgtctttcggcgctgccgaagtggaggcgacggtgggctcttcctggtcgatggcctcctctcgcttcttgtcctttttgccggccgacgtggacagtttgacgattcctcgcttttcccgtcgactgtcggagttgatgtatcgaaggacctcagagagcggcaagttgcccatgctgctgggagttgcctgcgtgggaagaagacgggtggtggtggccgcaggcgcaggctcaggtcgtctcggcgcggtcttcgggagcatcgcgttgatttgattcagctccttctgcttcgcgacggccgacgcggtgaatcgggtcagccacaaacgggattccttcgtcctggtg

SEQ ID NO: 33339 - DNA, 738 bp, Glycine max
gtttccacttgaatccctcgaaatttttacccacccacctcacaatttttggtttcgcctccttccaagccatgaattttaggagcctggaagatttctgggccttctacatgaaccagcactccaaggcttacacaaggcgctggcacttcgcaggaacactcttcagcattctatttttcttttgctccctcttgttcagctggaggttctcgctccttgtccctttctgtgggtatggatgtgccttctatagccacttgtttgtagagaggaatctccctgagactttgagacacccctattggtccctcatgtgtgacttcaagatgttcgggttcatgctcactggcaacatggatagggagatcaaaaggcttgggaagagacctgtgctgcaagtgttttgatttttgtataagcttttggtgataattagtgttatgattataattttgaataaacattgaaactggattttttaatgtatttttttagaattttttttaattgctttaataagttatttgggtgtgtgtggatgattttgctgtatattgtggctgaatggacccaatatgtgtgtgatgatgctgcaacttgatggagtgtggtgagacagattttgttgagacattatagcttaataggtaagtggagctaaagggaatcggatgaatatggtttaacctgtgcgttgctgtttatagttgttgaagatgtgtaaattattccaac

SEQ ID NO: 33340 - DNA, 486 bp, Glycine max
gaagaccccaaaatgtattagatttataaactgatgtgattcataattcctttaaattgctttatatgtaatacactttaacataggatgacaagttttacattccctccaacaattaaaagatttttttttaatatccaccatctgtaccaaaaataaaatgaataggacactgtagtcactgtctgaatgtgacaaaaaatttccttccactgcatacatgttcagtgcttccccttgtccttcacggcttcacttagtcacatacagtttcattttgaatttttgattcacttcatttgtggttcctaggatagatcaatgccaccatctatacaaagtatacgtatgtgaatttctagtgcttcttgattgatcacactgaacccttgaacaaaaagctgaattgaactgtacaaatttcctttttaaaagcccattggtcctaaacctggtgtagccatgggcatgggcatgggcatgggc

SEQ ID NO: 33341 - DNA, 454 bp, Glycine max
gtctataccataggggtttatggggaggggaagaggacatcaatccaatttcaaccttatgctgtggaaagaaacatccacgtcaatttaattacattccatttaactaatgttgtaaatagaaggatatgatatgtatccatcttcaatattattaccctgaagcgtttcttgcactgcgtgtactccccttgattgactcaattctctgaagccttatttgctctctaaacttagcaatgaactcatcagccttcttatccacatctggtccttcatcaccatctgtttttgaactttctccaccaataacaggtggactctttccactgtcattgttcttagcaacggttcttcctccttcaacgtcttggtcctcgatttctgtgtcatcgtcgtcatcatcatcgtcagattccacaagaaggctttctttctcagctggctgtgacac

SEQ ID NO: 33342 - DNA, 501 bp, Glycine max
aaaacttaaaaaaatgtcatgcaccaatccttaattatgtacgtctcgtgattcggtgaaagaggctttattgggagtttattttttaaacccgccaaaaatctgagcaacactcaatattttgtaattatttctttttttagcacgctttgtgcttaaattaaagttatattcttcgtgaataaaaatgtttttgcttaaaaaatatgcagtgttgaatttaatttaaaatccatgtgcataaaaaaaaaattatctcctaaattttcttcctgatggctgagcatatcccgacaggaagtaaactaaattataaccaagtttaccctaacatataatatagggtatagtgtaaataaattcaagcagcctttgggaataaaatatttactgtcgaattttatactttcaatcaagtgaaaagttttatagtaagtttgactattaaggaagtaattataaaataaaataaatttactattcattaatttgtgatatatt

SEQ ID NO: 33343 - DNA, 470 bp, Glycine max
agctcggaatcggtcgaggcaacatgctcgccctcaagtccatcctcttcctgctcccgctcttcatcgctggccgggccaacgctgcgcccgcgcccgtcccgagccgaggcgtcggcgcgaggatgaacgacacgccccccgtgtacgaggttgtctctgacttcgactaccagtcgttcgtcgtgggcctgaaccaggagtggatcgagctcgatctgttcaactacggtgtcgcccgattctcccccgaggagttcgccgaggccggtctcggacccgatgacatctcgttgatccagtttatggccaaccaggagatcggccacgccgcgctcttgaccaacatcatcaacaacggcggccgacccgccccgaagcagtgccagtacaagtacgactttgacaccgtccgagactttgtcaacttctgccagaggctcacccgatggggagagtccggagtgtac

SEQ ID NO: 33344 - DNA, 493 bp, Glycine max
cattaaaagtgatcatcatcagatttttcaacgagaattaatcattagtaaattcggtggcaatggatacgtcacaccaataacatgaaggctaggagttaagccgcatagtgcagcttttgtctatgctgtatctttttcttaggcagttgtagtattgttattataagagaaatgctagtgatattctggtgggatattataatttttgtatcatggtggttgggccgctttggacacatcttgtacatgaaattggcccttttcaataataagtaatatttatttgctactaaaaaaattaactgcaaatcaatgacaggcatcttctggtggtgaaaacaattttcacttgacgtgcttgataaaccaattcaacatgtcttgatgcgcctcttgggcgctcttaacagttgcttcatcatcatccccctcccccaaagtccatccatgactaacacctagagtatagtttcacaaagctctcaaactc

SEQ ID NO: 33345 - DNA, 488 bp, Glycine max
  unsure (1)..(488): unsure at all n locations
ttnnttnnnttttaatttttttttttttcgcaatatctcacaagatgtgggtacttggcttcgtacagacgaatgtcgctcgcctttgctttgtttgccgttgtcttagctgctgtctccgatctgtgccatcgtcctcttcaactcctccatgacgccctcaaccactccaaccttttcaccttcatgtgcagaggacagactgtcctcccccacgttcaattgagctttgttgcctttcttcacccacttctcgagcccgcccagctcgctgaggcgccccagcaaacctctcagcttgtcctgcgtattgcaacccggaagctgctcgagcagctcgggctgttgattgggtccggccgccgagatgaacttggatatgaggaggggcggtgtaggaggatatgattcccgaggtgccgccgggctcattttctccctccatgtgcgataggtagacttccaatagtaacctagccagactgatg

SEQ ID NO: 33346 - DNA, 385 bp, Glycine max
aacttcttaaacatacattactttggtttcgaactgagacaactttaagaaaagaatgtggaatacattaatgcaccaaaaggaaaatgggatcaaggtacccccttccctcttggtgcctttcttctgttttccggttcccctgagacagttaaggaactgaatgatatccctaaatatttacggacacaaattgcaaagacaaacagaggaaatgaaatgccagatattgcctgtgatgtttacatccacatatttacagacacaaggcaaataaataaacattgcagttttaaagacaacctaaagttgctggtttcagctacttgtggaagggccaaagtacatacagattgggggatcaatcctcaaaatagaaaggatt

SEQ ID NO: 33347 - DNA, 472 bp, Glycine max
aaaattgaacattaaaagtgataccttttcctttatttaaatggaaattgcaacattgggaaaataaattactaaaaggagaaatagtgttcgttgagtttcgccaaatggtcataaagaaataaattacaccgctgaaaatttcaattcgtagaaatgcttctcttcatatttgagtgaccatcctgatcctccatatgagtgccgcatagactcttcaacagttcttgtctgattcaatcaataggcaggcaattcctaagaatttctgaaggaaggtgatggtgatgcaggaggcttcaagtcttcatacctggatgttcatttgaatgaaatcagaatgttaacaatgcctccaagaaacctaagacaaatatagattaaataagaaatgtagttagatttgcttaaaaccaattgatactaagtgaagttactcaatagatatgtaagctacagtccaagaattgag

SEQ ID NO: 33348 - DNA, 501 bp, Glycine max
aaaatgtacccttttgatcggcttcttgttccattctgtagcatagaattgagaacagagatagaatatatttcttaatacatcctcccgcgcattgtttctagtgccttttaagggaattcaagtagaaaatgaaacacaaaaaatgatatgttctcctaatatacacattgaacagatctttaaatatcttgcttgggttgaacttgaacatcccagttcccgctttaatacaatcattttgttatgtacaggactataggtatcatgtgcaatttaaacttattgttttgttaataaaaaccctttaaaattgcataatggagaattgaacttgattaatctgtattagtcttacattatgtattaggccaaagctatgtatcaccttcttaaggagtgacaataatttttcttttgtaactcctctactggtttttgtttccctcaattagaactcaacgtgattgctatgtactaatagggaagaaaactgttcat

SEQ ID NO: 33349 - DNA, 410 bp, Glycine max
acattattagttatagagtctactagctacattaataaataaaattatttttctctgggcaagaaggaccatgtcctttaatttaaaacccgaacatttaaatcccatactgcatacaggcttaggattcctgaaagatgacaaagaataggaacttatttaacttgttttcattgggtcctttggtctcatccaattgatttggctttgaatgattgcattcccatgtctttgagctatatttctcatgcttacatgtatgttttctgcctatgtacatgcatgacagagtcttacattttcaggtgcgcaaaagctaaggagatcagatcttgaagcagcatgtgaagattttagtaatgtaattggtacttcacccatcggtacactgtacaaaggaactttgtcta

SEQ ID NO: 33350 - DNA, 212 bp, Glycine max
gacagagaaaccatacacaatttatttcgtttgatgaaagagtaacacaatgatattgaatcatccgaatcatcaatcatcaaaatcaatggccccaaatttttggggttagaattttccaaaaaaattcttgacaagattaaagcttcagcattacaaaacaacgggttgctctccttccagctcaaatatgactatcaaggagtcaatca

SEQ ID NO: 33351 - DNA, 127 bp, Glycine max
tgcgtggttcttgaatctggaactggtagtggatcgtcgactacttcgcttgcaagggcggttgctccttcaggacacgtctatacgtacatgataacaaagctaatatctgccctgtgcccttgct

SEQ ID NO: 33352 - DNA, 445 bp, Glycine max
gtcgcccttttttttttttttttaccttttcaatggtacatcattgtaaatatcagcatggggatcatccaacagaatatcaaaattttcccagataaactagttattggagtaacttaatcattctactcgtcatcttcatcgctgtcttcataatcaaaatctgattcatcacttcttggttgcgtcagtgaattcatgtcaaatgatggttccatttccatctcttccatgtcaatagtgtcatagtccattcgttgctcaaatttctcattagaacaattaagcatccatgacagagaacacttcaaccctttcttgacaaccatcttatgcctaggttttatagttgactccaaaccgtaagtgaagaatgcagggaaagtaactaagtcttccaaggccttttataaccatttggaagtaatcaaagctaagtttcata

SEQ ID NO: 33353 - DNA, 453 bp, Glycine max
gaattttaaaaatgaccctactggcaaaattcctcaggtttacaaacaattttctggtcaacgtgtgctggtaatggaatggattgatggtatcaggtgcaccaatccacaggccatcaaagaagccggtattgatgttgatggatttttaacaatcggagttagtgctgccctacgacaattgttggaatttggattattgcatggagaccctcaccctggaaatatttttgccatgcgtgatgggagaattgcatatgtggactttggcaatgttgctgttctcagtcagcaaaataaacagattttaattgatgctgttgtccatgctgtgaatgatgactatgctgagatggctaatgattttaccagattaggcttcctgtccccagggacggatgtgactcctataattcctgctttggaagcgatttggcagaactctgctggaaa

SEQ ID NO: 33354 - DNA, 427 bp, Glycine max
ccacttataaacaaaaatgatacaggagatcaaccaaaggattttctaactttacaaatacattcgcgtaagctgttagtgatctgaattttgaataactaagaatttaattaaaacagttgtagtataagagttttttacactaatatccaatcataaattgtcaaatataataacattatgggcttacagaaattaaattactttaaaagtcatctatacggtgatttttattagttgatgtgaaaatttttacaccaacagaatatgaaaattaaacataagatagattttattcaataaataaagttgaaggaagctcaacgactacgtgaattttttggaattttttggacttttccccgtgaaattacaacttgatatttactgagcagaataacgtttcctacacaggatgtagcactga

SEQ ID NO: 33355 - DNA, 464 bp, Glycine max
ctcaaagcgataatagcatccagattttatagtatgaatttgaatcaagcatcgtttcacaagaagagcaattgcctttatccctttgctttctatgatacatctttgatactctggtaaacttgaaagacaagtcaacccaattaagttaataaccagttgaagtttatcaaatgatccataactttctacggatgatgtataatccagagtatgtattaaattaaacttttcaagcatgacaagccttttgcattcagtacatctaataataagaatctagcctgcgaggagatagaattacgtggagaatgaatcatcacgagaacagcccttgatactggttcgccttgaaaaggatcagcaatatccttttgacatattcggcaccatttttcaagtgtatccacaaaactcaagttccatgagtatgagggtttaaattttctccacagtgaatagta

SEQ ID NO: 33356 - DNA, 496 bp, Glycine max
gccctgcaaattctgaaaatagtgatcactatggagatgcttttggaaccaacaaacaatcagaagacaaacatttacctaatgctattttgcccctcctgcgctattgccagtatgaaagctctgaatcttcctgcaggttcatgtctctggagcttaattgttttattaagaaataagttttgttttacttctgttttcaaggctcgccttgtgaagaccgaaattttaggagtgatgttgatgataatgagacagaagaagcatctttctccggccaagaggatttaaacgacttaaatgatattcttgaatgggccaaggaaaataaccacggaccactacaaattgtaagcgagttttaccgtttaagttgccctgccaggggctcatcacttacatttcatcctttggagcacttgcatcccttggaatatcacagatcagctgagacagttctacgtcttgctggttcaacagttgatttgaaaacgtc

SEQ ID NO: 33357 - DNA, 491 bp, Glycine max
  unsure (1)..(491): unsure at all n locations
nnnnnnnnnnnnnnnnnnnnnnnnnnnnnnnnnnnnccggataacagtcttaggagcataagattaatcatcttttagttttgttgcatggaagaaaaaaattacatagaatgaaacccttgtaactcttttagctaggcttgaatacaacattcaaatatgtatttacaggtaccgcagacgcacaaagcctaaaaaaaaggtgcccggggatcgttttgggggcagagactggattggataaagggagaaaattttaaacccaatttaggaaaattatacaacactgaacttgcgttcaagcttgaagcaaaacaatatatattaccataatgttttgcatggcaaccctattccttttgtaagaaagaaagaacaaggtctgtatgtacagaaaaaagctgtgtatccacgaaaagcttcataaaaggctgatcacgatatgggaacgactcaatgaaactctccttcagaagcaatgataccttatc

SEQ ID NO: 33358 - DNA, 424 bp, Glycine max
gttattggtaacttaactgggttggaggctcatcattaacttttggctggtgtgcatgtgtgtaatgaggtgctttgattagcttctacatgtgtgtttcaccgtttcctgagttgattcaaaggggaagctttagtgtttatcactaggtggtgacttttgatgctaaatgtaaaaatgtctctctagttgagttatgctatgacagctatgcagttgagttggtgcatataagagtgggcagctagttaaacatgttattcgtatttgattactgattgttcactggattgagatatctttatttatattctgtcaactatagtactgtattgtgcatgcttcatgatcatacctctagattggaatggttaatacatccaccaattcctacattattattcttgatgttgagatttctcta

SEQ ID NO: 33359 - DNA, 448 bp, Glycine max
  unsure (1)..(448): unsure at all n locations
nnnnnnnnnnnnnnnnnnnnnnnnaataaaaacataacaattttatacagaacaggttcaattatttacaagcaaaagaattgtgttagcgagcactttattacatcaaagcatttacaagcagcctctaggcttggcttttttttccttgtcgccgtcacttttttacatggttgataaacagagagacttcataaatatttattgaaagcagaaaaagaaaatgacactaataacaagtcagaaaccaaagcaccctcctcatccacatggctacttgctggtgacaacccctgaccctggcccttattattaaaaggagaagacagtttcagtttctggatggtgcttgtgctgcggcttagtctgctgatgggaccaataagcgtgggccactagaaccctgtccaatagttcttagggcacacgttcacccctcctttgttga

SEQ ID NO: 33360 - DNA, 343 bp, Glycine max
gaaaataatattcttgacgctcattgaaccttttatatctacaaagaaatatgtaaaggtcatcaagcaggcatagcaaaaacgcctaaaatttctgatgtccgaaaaataatttaaaacaaagaaaatcccatagataaaactctaccgacccatctcacagagaaaaccattctctgcaaaattgagtactacccccaaaaaagcacgagccaactaatttttaccctctacaaaaaaaaataaaaaatacaatgagcgtcactaccatctaaataaatttttccaacgtccttgatgtgttagcattaggtggccggaaagtttccgacctcaagttaga

SEQ ID NO: 33361 - DNA, 428 bp, Glycine max
gtctccaaaacgcctctacgatttagggggccgtgctaacgccgtgcaatgcaaaacctcatacgactcgctcataccagcagaacagcgttcaagcaaccgtcgttctcggggttgttcgtaatttgagcatatcgaccccacacgacctttccacccgcagtaacaagtcccaactcagacacattgacctcaataatcggacccttggtcagcacacccaactgtgtgtacagcgggttctgcgggttcttcttcacactgataattggcaactgcaccgtaacgcttaactcaggatgcgtcacattcgccttcttgtacctcaatcccatgggcgtaatgaagcgctcgtatttcaccggtcgcctcgtgaatccaggtccaacaaacgtcggattagtgatcatgcgcttccagctcttctt

SEQ ID NO: 33362 - DNA, 483 bp, Glycine max
gaagtccatcctaccattctctttaataatgaccaaaagctaagaattttggaggcaataatcaggaacaaacaaattttacagtgactcaatcctcaaaatcacaatggtcgtgttaaataaaaaggtgtggtaaaaaaaaaacaatttatgatatatatttatatttgtcgagaaggaaaaaatgaaaggtaccaaaggaacaaagcttccacgaactgcagttccagaatccaaatttgtatatgaacccctccgtgtacaatgcagtttgatctgctctcatcctgtaatggcagggtgtggcttctatacatgaatgtggtgatgatggattatttgcatattttatatataaagtatccgtcggctaccttctcgagctttcatgaaaagcccattcccccttccccattctaactgtcactatatgactgcctctgtgatacaaaaaagctgtcatcatctttgctaaactgcgta

SEQ ID NO: 33363 - DNA, 508 bp, Glycine max
aaagcaaaatatccctccagtcagaagctataggactaaccctcaaaatataaaaataacaaaagtttattttatcttttccaacaaaatcttctcaaccatctacaaaatgtgctggacctgttagtagcaaaccctcaatcctgcttctaacagtttctgaaatctaacggaagatctcattatctattatacatacataaatgcatcagttactccctcggactctgttatcagttacaccaaactacgagtcacagaaaataaacactgatagaaataaaaaaaaaactcttgactagtcaagcattcatcatttctcattgcacacccctagtgtcccactaacttgaacgtcttgcattggaaggatgtagtaggctgacgggataacaatctgaatctcggaacaaacagaaaacgaatctgaaacgttaattaaatcagatataacttgaaatatattacactttttaatcatataataatatggtctaccctatgatca

SEQ ID NO: 33364 - DNA, 378 bp, Glycine max
aaaaaaaccaagcaagaagaattaaatgcgctcaaagatacaggatttcccatcgagcccggaaagaaaacttacagggcaactgcacaaccacttattcctatatcattaaaaataaaaattgcttatcgaaaaaattctcccccctcctctgttttacatcagcacaatgcaggatatattttgaaatatcctcccctcaggggcctacatgttacaaacaacagttgaatttacaaaactaaaaacttacaagcgtctgggtgtcatcattggattctaagattacaaattatggtactgccatgatgtttgcttgtagccatcccatcccccatcagggtccttccttttaagaacatcactgtttaagtgaaa

SEQ ID NO: 33365 - DNA, 474 bp, Glycine max
ggaaatccttgttgaaagatatatttattggttacatttacataagaagtgagatatgaacacgaggtcttctgaaaaacagaagaggtaaaagtgtgttcaacatggagggactaataaaagagattagacacttgatgcgtattaagctagctttttaaatatcatgatgtcacaaaaatgtaattcaagaaataaatctacgtagtttacacaagatacaatcgtagacagaccaaccgtaacggctgatttcatatccaacaatttgtcgaagtcgaacttcattccatttccatcacgtacatgctggagaacatagctctggtgcaatagataagcatgtgcttcctgtattaaatgtgtactcccagcaactacggtgcgatgcagccgtatcgagagagaaacaggagatctctacaggggttggggccttgtctgtacgataaagatgtctttttcaacaagaca

SEQ ID NO: 33366 - DNA, 418 bp, Glycine max
cagaggacacagatacatgcgtgaagctaggtagctacatgtggaagaattatactgtttgtgtggcagaattgcggatttcgcgccacttcttagttcgcctggtacaggccgaacgcgaagatgtggtcgttcagcagcgacaggttgtagggcgtcacgtaaagatcagtgtcgaccagggcgacaaagtctgttccattcacgatgttgttgatgtcctcgaagaggaagccctcggggtggacagtagttcccgtgttctcgccagtgacagtgacaggcgagtacgtgacgttgagctgcgagatgaaagcggcgaacgcgggggtggtgccgttgatcaatccgccgatcgaggtgttgtacagaccatcgtacgagacagtctctccgggagccgaccagctgagctgca

SEQ ID NO: 33367 - DNA, 506 bp, Glycine max
aatggtaaatttttgctatattgctatcaaaatattgcaagatatattccatcgttctcgcatatttttggttatctgttgttattgacaacatgaataaatttcttacaagaagggggaaacaaatatttggtataatcttctgttgaatttctaaaaaatatagaataaagaagcatagttcaaaaaagaaccaaaaaaaaggaagattggaattaggcaaaactcatactgttgaggcacttgtgtgaagttggactaaggaagcataaaatccaccactgatgttaatgagcttttcatgcttccctttctccactataactccattttttacaacagcaatcacatctgcattttttattgtagatagacgatgtgccacaaccacagtagttctgttcaccatgactttgtccaacgcatcttgaacaactctttctgactcagcatctaatgcacttgttgcctcatctagtagcaatatctttggacttttaattatg

SEQ ID NO: 33368 - DNA, 295 bp, Glycine max
aacagtcaattttgattttttattgataaaattttgttttacggaaatatgtggtgaaacataatcagtaattaataaaataggtatgttgggttctaatttcataattggctgtcactctaggagaatttgatctcccacactgttacccttaccctctgttgcgaaaagaatgctttcaacaaatgcaagagaaagcctctcactctcggtaacacttgattgtttgatcaacgcacgcgagcaggattaagattattaaactactattggtcgatacattcgaatggaatga

SEQ ID NO: 33369 - DNA, 763 bp, Glycine max
caactgcaacaattttggataagcacctttaaccctttagagcagatcctgatagaagaagggctaatgcatttgattatggatcagggtttgtgaacccctcaagagttctggatcctggtcttgtatatgattcgaatccagaagattttgttgcgttcctttgttcacttggttatgatgagaggtcactccaccttgtcacaaaggacaacatcacatgtgatagggcattcaaaacaccatctgacctcaactatccatctattgcagtgccaaatcttgaagacaacttttcggtaactcgagttgtgactaatgttggaaaagcaagaagtatatataaagctgtagtggtgtctcctactggagttaatgttactgttgtgccaaatcggttagtcttcacaagaataggacagaagatcaagttcactgtgaatttcaaagtggctgctccctcaaagggctatgcattcgggttcttgtcatggaagaatggaagaacacaggtcacgagtcctttagttgttaaggttgcaccagcaagtcatgggttggtgagataacaatgcttgtaattatgtatatatgcttaggagccgtgagatccctatcgtaactaagactagaacaactattctcagtgaaatccggatgcaacctaaatgatcacttccaaacttacgttatagttatatgcttggggcagtctgggatatcaaacacagaactgaatacaatgatattttgatgccatgac

SEQ ID NO: 33370 - DNA, 629 bp, Glycine max
gttccacaccaaagggtcagaaattcaggattcctgagatttcaacatgccctccagcaccaaagaagccaagggttctctccaattgctctttgcgtaggtctccactctcattctttgcaccccctgacttggagcacttcttctttgtggcacttagagatgtctcggtttgattttgtgtgttaatagaagattaagaaagatccatgtgttatagtaataagatcataccactttagaagatggacttttgaagtggttttttagtatattattatgtacctctagcaaatcacagaggtatgtatgctttgagaactttagatgttggtgtgtgttcatcttaggaaaatagttactctttaatttctgctaattttaacaatttctagggtttgccagtcactaaatttagctggggtggctctccaactaaatttggattttaagcttacttttttttctcccttttcctcttatagaagacatgttctgacctttaagtgtgtgctgagtgcaaatgtaatgggtttggtttaaggtttgtgagtgttcaagcttgcaactctacaaagcttcagttgtcaattagagaaagtaaagtcataccctttccttttgtatgc

SEQ ID NO: 33371 - DNA, 759 bp, Glycine max
agaccaagaactgcattgcatcatcaatttcttacctaaatcatacgaaagttttgcttgaatatgttggtctacagctatgttcgctctacagctacatatatgaatgtatattcctacacatatgaccttacacttttttatctacactgtaaaaaataaattgaatatctagtttttgagagaaaaagaaaactatgtacaggctcaacagaaattaggaatgcttcattcatctttcattgcaagctcatgcatctttttctgcccgatttccacaagtagagttaagagagcctcacagacctgaaatgcatctccttcagaaaggtcatcatttagtgatgaataaaccatccatgcatggtccaattttcgtttaggtcgcaccacaacggatccgggaacttctgcatctcggcatgtgacaagcccgtcacttttctctccatacctcacctgcagcagctgtgcacaagcagccatagcagcaccaaggggcatcaccacaggaagttttctagactcaccggctggagcaaccaggggtagttcagcatgtgcaacgtgagataatgtggctaaaacagcaggggaaatgccagcttcggtccgaaaggaaacaattgggacttcttttggcagatgatgctctttcaaaaactctctcctcctttcatatgtcaagtcttctaaggctcgcatgtcacccttaattactttacagatgagaatctctgtaagtttccgtaaatttac

SEQ ID NO: 33372 - DNA, 469 bp, Glycine max
agttctaaggatgggtcatccattgcctttggtcactcgggaatgggtggatccacgggtttttgtgatgtcaccaataacttctctgttgctgtgagctcgagcaaaatgtcctttggaggtgtcactggaaaaattgtccaacttgtgtgttcagagttaaatattcctgttccagacgatttcttgagatttgcggttgagcaaagtggaccagatgagcaattatcaatggggaggcccattattaattgagggtggaaggttctttttaacccttttccaccatattttcatgtataattttgaattttacctaaagccttggtgattatatacgggaatctttggagcctttttctgtgctcttcttgcacttgggatatctttgcgatacttactatgtaattatgtaccctcgaagttgcaattttaatagtcaaatttatcaaattcaatagtttctttt

SEQ ID NO: 33373 - DNA, 529 bp, Glycine max
ggtatgaagaattattgtgttattatgtcaatgacaactctttgaaagccacaagaagcacaatttcgtacaagaatactattcaaatgacagagctatatggaactcaatatataatctcatcttggatgtgaggatgtaagtttcgtctaataagtgtcatagcaagcagctctacttagctgtatgtcctgtttcaaggcatagaacttaagcttaggtattacaagtgaggtcccaccaatcttcaagcattcacctcttgtagaaagaaaccataggagacaactgattaagctcttaaaaccacattgtgctcctgcttgagattgttgtcatataggttacacaaaagatgtaaatgtatactgcagggaaaatttttccttctgtaagctttgatgtcctcaggcttattgcttgcctgaaattgagtagaaaatctccccaatttaaacttggggaggaaaacccaaaaacaaaaaaaaatggaacaaaatcttataattgatggttgtcaattcacaaa

SEQ ID NO: 33374 - DNA, 465 bp, Glycine max
aatgtaacagtttctccttcaccaagcacatgcggaggggtgcactgtgcagtgtgcacagagccataaagtcattaagcaatcgtcatatatactattcacatactacaattacatgtacaccactagtatagaactataaggtagcaatagaagaagactacggtcaaaattatggcttaacagagttttatgacatacaacaaaaaattaaaaagacaaaacacggacaagattttgcgggttcttagcttcccaacttaaaagcatctacaaagagacctaaacatatgccagctttccagtagttcaccagcactagaaaagactgcaacctcccagtcctcgcggtaggtagctttctatatattagcatgccaatcccctcaattgcagccaccacaacaccagcaaccagaacatcccaatcaccggtttgcccaaggattgtagctagtgcatttg

SEQ ID NO: 33375 - DNA, 426 bp, Glycine max
gaaagagcaaaatacatatataatataacaattaataataataaatataaataatatatatttgtattgtattatacacaattgaaaaaaaaggtctaaacgtaatttgatctccatggatatcatttccctctttaggttgtgaaacgatggatgttccatttcttcatgggcccaaatcccgagttctaataaattcattgagcagttctaaacgtactaaagacttcaaaaacgagcaaaagctaaagactaattactgatcaaaagaagaagaagaagaaagtctgggagagcattttctttcctttgtagctgatgaaagaacaaacgagaaagagaaagaaagaaattaaaaatataataaaaatgctgcaaaagagagtgtagctgctagcccaggtaggtggtgactttagatcaaac

SEQ ID NO: 33376 - DNA, 546 bp, Glycine max
  unsure (1)..(546): unsure at all n locations
cgtgcgttgtcgttcgttntttgtcaaaccaaggtgcatcttctcatagtaactctggctaagtgtccttcactcgaaggctagtgtatatctggtgatggataaaaaaaagacgggatgtggcaaaatcagtttattatagtaggtcataggcattccttgtagctatgtaccatgcaagaatagaaatcaaatttgaactcactatggccctctagcatagagctattcacaccatccccacatccataattgagtcctacttgtagctacgaaaaatagttgtgcaaagagtttacaatgttttaattatttcacacacatgctatttgtacatgtggtgttgatcttattaatcccctcactccaaaacaaaattctcgtgtgcttggttgaagttaagttccccctttcattgtcaatctggttttacagtgttagtcccgtcccatgtaacagtttgttctactttaattatggcttttatcaagtgtataataatatacatccaacaagaaacaatgtgctttctctttcttcttttgt

SEQ ID NO: 33377 - DNA, 410 bp, Glycine max
atgtgtactacgcgcgtaacatcaaaaccggcgaaggcgtggccatcaaggtaatcgacaaggagaagatcctcaaaggaggtttggtggcgcacatcaagcgtgagatctctatcctgcgccgtgttcgccaccctaacatcgttcagctcttcgaagtcatggccaccaagagcaagatctatttcgtaatggaatacgttcgcggcggcgagcttttcaacaaggtcgccaagggaaggctcaaagaagaggtcgcgagaaagtactttcagcaattaatctctgctgtgggattctgccacgccagaggggtgtaccacagagatctcaagcctgaaaatttgttgcttgatgagaatggcaatctcaaagtctctgattttggattgagtgcggtgtctgatcaa

SEQ ID NO: 33378 - DNA, 355 bp, Glycine max
gaggctgcgtatcggttgggctggtgtggcacaaagatcttcccgtcgcaccgcgccggatccgactctcgacgtgtgggccctggtgtagagatgcgcgctgatcctgtggagcgaaggcggaggaatggccaggaattggacatgtacacgtctcttgagtagaagccgcaagcaaggttgaggttcctggaacgcatgtgtacatacaagtgcgattcatggcataggatttatacgcataacgagtacggtctcgacacatctaagagtgcgaataccgacatggcaagtctgatctggcacgcatttgcatatgcaatatttgtacaaaatctgactatgcgtactgccc

SEQ ID NO: 33379 - DNA, 627 bp, Glycine max
gtgacaacataatttcatttgattcatataaccaacagctaatgggacaagacctctgtagtattcaccaagatacatccaacattaaagaacttgatggtccagaatgctttgttagatgatgatagaaccctatgacatgcatttcacttaaatattcatcgagtatgtaaacaaatctttcctaatgatccatataggaatacgtgataatttccctcacagtgaaaaacttctgtttgttacttctcatattgggaaaaaaaaatataatcaggtaattttatatttttccaaacaggactataacttcttgcagttacttcccctaatttcacctttatggtgtcttaattagatatttcaggcataacgaactatccgctacttaatctaataagagtgcttttatcaaatccttgctgcaggattttagtaactacaaagctaccaatgacatcaattgttgttcaacttcttcccagttcttaactttgatcaccaggggatgctcatcagctgaattggtcttggaccaagggtacgagttttcataatcaaaaagtaggactctaattccggcttcagcgcactccatcgcgtatcttgggttatccggacgaatgg

SEQ ID NO: 33380 - DNA, 554 bp, Glycine max
ataggataatggcaaaggtatctctgtttgtggtgtgtgtcgtttgcattctggcattggcctctgctcagagtgctacaaatgtgagagctacttatcatttgtaccaacctgagcagcataactgggacttactcgcagtcagtgcatattgttcaacttgggatgctgacaaatccttggcatggcgcagcaaatacggttggacagctttctgtggaccctctgggcctcagggccaacaatcttgtggcaggtgcttgagggtgacaaacactagaacaaacgctcaggaaacggtgagaattgttgatcagtgcagcaacgggggcttggacttggatattggtccgttccaaaagctggacactgacgggaatggcattgctcaaggccatcttattgttaactacgacttcgtcgactgcggtgactaaactttgactagctagcgttggttatatgcaaaaggaattgaataaagaaagccatacaagtgctttattcctgaatagtaataaaataaataaatgaaagcagtaattaatagtatt

SEQ ID NO: 33381 - DNA, 485 bp, Glycine max
ggtagtcaataaatttttctcttaaccaatgtgatgtggtaaacatatgatctgatctaagatcatgatctcatagatgctacgtacattgcagcattacataaggattactggcggattaattaacttaaataatatttttttattttagggtaatgtgctctaacacatatttaaagaaacggataagaggcttgcatgttaatgccgcaaagaccttgagggttaccagtgtccctcataagcttcatgtaaccaccctcaccccaacttttgccccatgaattccttatgagccagtattttccctcagcctcctcaccatacccaacaatggtaactgcatggttaagttcagttccacactcgccactgaaaactcctcctgagtaaaactgaaacccttgtcccttggcttcaaggagcaccgagacaggttgagaggccactgcagttagaagttgctcctcgttctggggagttac

SEQ ID NO: 33382 - DNA, 523 bp, Glycine max
caagcaggcaccgaatgtcatggtcacctctctgcgtcggtcatcgggattagctccatgtctggtatcatgcgtcacgcgcaagggcacttcagctacaacgccgcaaagggtggcactgttcacctgacaaagttgatgtcggccgagtttcagaagctgaaaattagagtcaactcgatcgcaccaggttacttcccctctgagatgacggcgaaggagagcaacgacgagcagaagagccatgtgcctgatgagaagatccaggagaagggccacgttcctcacggacgagctggccatgacgaggagatggcacaggcggtgctgttccttacgaagaactcctatgtcaacggtgagatcatcgctgtcgatggtggtgtccttaacgtcgtcgctgggcgttaacagaccccgcttctcgtgacgaatacatgcataacgacggcgcctggcgaacacttgcacaaaacgtggatagatcacatcatgaacaataatgagagcaatgatacccgag

SEQ ID NO: 33383 - DNA, 618 bp, Glycine max
  unsure (1)..(618): unsure at all n locations
ccctcatattacaaccagggcggtgtttcgccagactactacggcggcagcccgaaccgctaccaacaaggcccgccccaaggccagtacggaccgccacagggccaatacggtcctcctcaaggacaatacggatacggaggccagcagatgcaataccagcagggaccgccacccccaggcggctactaccaagatgacaggagggccgatggcggcggcggaggcttgttcgctggattgtgcgctggtctggcgtgctgttgttgcttggactgcttgttctagacaggtcgctgtggacaaacagtgttggagggattgatagaaatggaatgcgcaagaggcggcatgttacatggggcaatctggcttttcgaccccggtaaatccgtataccatgcgaacatggagtgacgggaagaggattcggcgtacagactatagaccgatgggctttcttttgttctatttcaattggggtctctatggatatgactggttatcgatccgagggcatattaaagagtactgccagctaccaacttacctaattcccccctttcattttcnnnnnnnnnnnnnnnnnnnnnnnnnnnnnnnnnnnnnnnnnnnnnn

SEQ ID NO: 33384 - DNA, 649 bp, Glycine max
gttatttcactgcctaatgggaaagtttttaaggtgaaagaggagagtttggtgccagctaatcctgatattcttgatggggtggatgacctcatgcaacttagttatttaaacgaaccgtcagttttattcaacctgcaatatagatacaatcataacatgatctatacgaaagctgggcctgttttggttgctgtaaatccctttaagaaagttcctctgtatggcaatgactacattgaagcctacaagtgtaaatcaattgaaagccctcatgtatatgcaattacggacacagccatccgagaaatgatacgggatgaagtgaatcagtctataattataagtggtgagagtggagcagggaagactgagacggcaaaaatagcaatgcagtacttggctgcccttggtggtggaagtggaatagagaatgagatattaaagactaatccaatactagaagcctttggtaatggaaaaacattaagaaatgacaactcaagtcgttttggaaagctcattgagattcacttcagtgaaactggaaaaatatctggtgctaatattcaaacatttttgctggaaaagtctagagtagtccaatgcaacgaaggggaaaggtcatatcatatattttatcagctat

SEQ ID NO: 33385 - DNA, 1149 bp, Glycine max
gttcattcaacaaaacccttttgaaaatacattatataaatgtggttgcacgtgcagtcaaaagattccaggtatgcatccatcagattccagttagcttatggtaaacagtataaaacgttagttagttttttttttaaaaaaaaaagttatattgaacattgttatatctgaatatgatattttactttgatatacacactatagacaaaaaaatttgaaaaagaaaaatgggtaattagcatctacaattttcattcctctctagggatccatctgctccaccaaaagcttttccggcgtcttgtgagctcatccatactctcatttaaggttcttatagttcttataattttcctctgaagtttaagggctgaagctagagcatttcttggtgcactagccttctttttaggttcaatttctctcagttcctgaagctgagcttcggtgaatccaccatccttctgtgtccctgattttgccattagctgaataatccacctagcagcttctgaataatcctgctgagttgcacgtaagagctgcagtctcagtgtttgcatgaaagacaatgccaacaagccttctctgacaaagtagggatgagctaatgctgcttttgcactcagtctttgtcttgctttgtaccttaccattgatttcagaagttcccatcctattccaccatccaaatccaacaactcaagccccttcctaagttcagatcgagcctcagcggtttttctccacgggccaagtcatagtcacacctctttagttgacggttgaattgtatgaggctattatcagaacgtaaactggggaatgccctttgaaagaaagattaaaccagcactatagatatcgaatctgtctggtaaattcaactgccataagactggggaaagtgcagttgcaaccggaactgagggtgctgatggagtttgtgtgctcatgatgtactgttctggtgcagcatatcttggatccaaaagaaactccttcggaatgtagttgatgccaactcgcaggtctgtagcagctccaagatcaataattttgaatgtacgtgattcttcagagaaaataacgttttgtggcttaatatccctatgcacaataccagttgggtgaagaccatccgct

SEQ ID NO: 33386 - DNA, 564 bp, Glycine max
gggaagctgatgaactgcgggggatgttgtagctgcggaacatgcatagctagagatgggttgaaggaaaggatcttttaaatgaaagaacaaacactgaattcagatatcttaagaagaaacccgaatcttggaggctggcttgtcaaactattgtcggaaacaaagaaaactctggcaaggttgttgttcaaaggattcctcagtggaagaagtaatagaccatgctaagcaggacctctggattcttagaaagaagagcttcatatgttcctcctcaatttaacacagtttgaagcaacactacaaatcactgatgctttcatcataaatatatggaaacttttgctttggttcttaatgtaatcacgcagatatctgtattgtataattttccttcatgatttgtaatgcttgccacttggtttcaattctttaggttaggatacaaatctttggcgaataatagcatgtgtgctttatccaaaaccagccaatgtgcagaatatgtgaaaagagtacataaaggacaaaccaacaagcaatgcaattttgaacttgttt

SEQ ID NO: 33387 - DNA, 570 bp, Glycine max
cgacaacagtgacccagacaatcgctttctgattccccgggaaatctatcacaatgccgtccaacagactcacctacaggcgtcgcgccccctacaacaccaagagccagaaggtccgcgtcatcaagacgcccggtggtgagctccgttacctgcacatcaagaagaagggcactgcccccaagtgcggtgactgcggttccaagcttcagggtgtcccagccctccgcccccgcgagtacgcccaggtttcccgccccaagaagaccgtccagcgcgcctacggtggatcccgatgcgccggctgcgtccaggaccgtatcgtccgtgctttcctgatcgaggagcagaaggtcgtcaagaaggtcctccaggagtcccagcaaaagaagcgttaagcggttgcattgagtgaaggggtttagcatgtcaaaactgggtcttcggggttcatgtgcattatgggcagtttcctggttcggtcggcttttacgatatcaaagcgatttttacgtccctcccccaggatgtagctgagtagggtcccgaatacatcccccagctccccgg

SEQ ID NO: 33388 - DNA, 817 bp, Glycine max
gattatccttttcacagccacgctttttttgctttcactgattatcaccctccccttgcgtattggttcctcttttcttatttttaattaatctttctcgtcaagtcttagatttttttgtttgctctctctctctctctctctctctacttcgagctaatttctgtgggtatggaacacatattatttatgtggtagagatcgagggtcgaccgtgctgaaaagagagattgaacgcatgctactttttcccctccaaagagattgctttatctatggtagagctgcttaatgttaaattcgtggtgattttgctgctttaagaactcggaaaccattggctagctagcattctgtatctgatcggttcaagggaaaagaaaaggacttgcgcttctgcagaattctttctctctctgggacactctcctaatgagaactgatattggtgaaggggaagagttacaaaatccccgctcctttaaggtgcatagtaaaatctgcacagaactcgcaaaattagtggatagaatctcaagaatagttccagacatagaggcggcaaggccaggattctcatcaggaatagagtctctgtgtttgctgaacaatgcaattgataaagctaaactacttctgctacattgctctgaatgtagcaaactctacctggctgtgacaggggatacagtactctcaagatgcctaaaggcaacaagatcattagagaagagcttaatccaaattcaggatatggttcctgttatgttggctgtagaggtttctagaataattcatgatcttgagtgtacgagat

SEQ ID NO: 33389 - DNA, 439 bp, Glycine max
cagcattacgtccaaggatcatattcaaaactctgcattcgcaaacaagttcgattacaagccatggccggagactcgttgctcaatgaacaatgttagtcagccacaatgaaaaaggcataacaaaatccagaagtacaaggaaaaacacctccaactccaccgctaaaatcagacgatagcacagtcgtcaagaacgaccgccaaaaccttgcccaataaccgtgccagtttgacacgattccctcctcttccacgttttcatagagctccccgtagtcgtctagcgagctgaatgtctttttgcatgatggtaacgcgtttcgcatgcagggcgcagaggtttgtgtcttcgaaaagatgcacgaggaaagcctcggcggcctcttggagcgcttggatggcttgagactgccatcgatggccttctaacgatgca

SEQ ID NO: 33390 - DNA, 704 bp, Glycine max
tcgctcttagcttgattgtgattttgagagtatccttctctgattttttctctccaaaatcaaaatctgttgaacccttttcctcctcataagattctctctccctttctaataattatctgacttttatcctctcacatccacaaatgcttttctcaaagaatggccatagattcttcaaattcagaagccaggtttcttgcccatgtcttttatactgtcttttcaatttttgataaccttttcaccctcatcaaactctcttcatcatccacaagaattttcaaccaaagcactcatcagtcttttggctcaacactcacaatcttatttggtgtgaccttattgtgggactacacacagtaatcattattgttcttctttaataatccatacaacaaacagtttccaaaatatccctctcaaaggagtggcacctcttgttgttattgccactcttctcctatattttaagtccttcatacacaccaagatttattcacaagttaacaccaatggttcacaagcacttctacgagctttcatgtggagttgttgaaatggcttggattatgcttagtgttgactactcacgcctactgtggcaattgtttggagtattttcttacgagaaccatgaatggaaacctcggatcatctagcacacacccttcagtttagtcacataatagttacatataata

SEQ ID NO: 33391 - DNA, 506 bp, Glycine max
gaagttcctcgaagagaagcagaagggtaacaggcagttgctggaattctacactggtaacccggatgacgccgcgaagcgggcgcactacaaggctaccaaggagatgtggacttcggccgggattgttatcaggggtgtgatcacgcaggctctgcagaagactgggggacctttcgccggaggggacaagccgggagaaccggatttccacatcatcacctggctcgcccgaatggcgaccaacgcaggtgtcgagcctggatcaccggccagcgtggctatcccaaagctccaggagaagaccggcggacacgctttcgacccggtcgtctcgaaatactgggacgcctggacgcaacgagagtcattcaagaagaacaatatccactaaatcctgcggcgcagcggtgtagatacccagaactgtgcttgcggggaagatgaggattgacgattgagccaaaacttcgttgctggaacgtatgaatgagcgttctgacgag

SEQ ID NO: 33392 - DNA, 228 bp, Glycine max
aaggtgcataggtccattgagttggaagcttcctaggggcttttcccgtgggaaattttgcaggaggcttttaaatatgtttcctttagattttatttttatttattgattaaactgtttcctttatatttcaaagttgagttgtagcccaactcagagttttctatgcagggtaataaagcctttgtacccggtcataaaaaagaaaataaaataatcccctcctgt

SEQ ID NO: 33393 - DNA, 527 bp, Glycine max
aactttcatcaatcaactgcttgtggaacttgatggatttgagaaacaagatggggttgttttgatggctactactagaaatctcaagcaaattgatgaggccttgcagaggccaggtcgcatggatagaatatttcatcttcaaagaccgacacaagctgagagagaaaaaatattgcacttgtctgcaaaagaaaccatggatgatcagtttattgattacgttgactggaaaaaggttgctgagaagacagctcttttacgacctatcgaattaaaaattgttccaatggctttggaaggaagtgccttccggagcaaagtactggacacagatgaattgatggactactgtggtttgtttgcgactttcagttctatgattccacaatggctgcggaagaccaaaattttcaataagtttagcaaaggattggtgaatcatcttggactgacattgacaaaagaagatctgcagaatgttgttgatttgatggagccatatgggcaaataagcaatgggatag

SEQ ID NO: 33394 - DNA, 159 bp, Glycine max
ggaacccactacctcgacgcagggcaacgacggtgccagtattgctgccgtctcgacaggtgctttcgtggtcgccttggctgctaccttcttctaggcatagtcttgaatgaacattcattgtaggatcgttaaaagaacgtaaggtgccctcatcgc

SEQ ID NO: 33395 - DNA, 616 bp, Glycine max
gtcagaaattgtgcttacacttttactgtcattgaggtttatcagtcttgtttttgatgaggttcggaacattgctttggggattgtatctcgtaggctaaattggaagcagctgactgttatggagacaattgatattttctttaactacttccgtcgcatcttcaaaaatattttcagccatgcagagcaaatttctcaggctatgatagtcagaggttttaaaggggactgtggcactcataaaatttactttttgtcagaatcatcttttgggatggtagatattatatgcttgctgtgcttgacacttttaataggagctgctctcctgtctgagtactaccttgtctaacaatatatgccactcctgcatctggcaaggcagattgcagcaaattatgcagtttttcccatgaagatgtcaagggccctatgaagatacaaggtggcaatatgaaaaggatcgaaagttgaagtgaggaaaatttggatggcttctgaacggtcaaacttattgagctattgatcatgatatcgtgatcattcgtgctacagttcgtatagactccctcttgtagagataaaccaaattccttatacatgtgcgttcgtt

SEQ ID NO: 33396 - DNA, 489 bp, Glycine max
caatgtcaggattagtggtagaacaatattctttactcattttattgttgatagagaccaagcagaaaaccgaaaaggagggatgtacagtaagatttttttttgaagcggcgggcaattacctgcaaatggattgtcaaattatagggatgcagtggacttgtaaataaacattctagattcaagttagagacagtgcatgctggttgctgtcttcatgcagaatctgacaggtttgagcaaccgaggcaaattccagagagatcgaggtggccaaatctgtaactggccttggtggagttttttttttctctctattttttttccctgcttttcccttagtctacagtatttacatgtattttttaaaacagttgatagcattgggcatttattttaaaattttgactttacttacctgttcttataatgcacatagctatattcatttaccttttagtaaacgataatctcttatcctttcggttt

SEQ ID NO: 33397 - DNA, 575 bp, Glycine max
atgtcaatgatatatgttaattttattcagtctcatatctagctaaataattagacgagaactccatgtacgtttgacgtcaggtctatattgaggtgcttacaaataaacatctttttatacaatattccgatctgctaacacggttattttatttacataatatgtcctgatcggggttccctgcgatgactattctgaggcaacacgtcaatttaatagctgatacatcatcactcccagtccgtgtcgaagaaacccgcatctttcatctcggaataatacacattttccaaatggaaattttcctcctggaaaaagtctgctaggaatgttgtatacaaaaagggaagataaaatgcatggtagaagacaaccgtgacacgatacagccagaaagcaaacgcagcaccggttccagcaaggccacaagcaagtgtcgcaatcgcattaaaaatgaacatgattgcaacatacttgtaaaaggcaatttttgctgcatgaaagaagaggaaattaggtaatcacaaacatcgtgtaataatcccgtcaattaactcaccaggcaacgtttc

SEQ ID NO: 33398 - DNA, 918 bp, Glycine max
gtccatattatgatgataacattttgcagccaccatctttcttatcaattgacagatacttcaaatcaactgtcaaagtaaaaaaatgcggaatatgccctctttataccaaaaagaaagatgataataatgcaggtgcaggcgactattctggatctgtgagattttcaaaaaatggcattgaagaacctagtggaagcaatgctgcatgaaaggaggaagacctttaataagctacctaggcagctaatatcttgttcttctggttcactcaggtgttcccaaagagattttgaagttgtggtgagatatagtttgttgttgctatatcagcataagttggcttgctcggtttttccacagctgcaatgtttcatagtcttgtatggaaatacaataagatagtaagctagtctcttgttcttccggttcattcaagtgtggacaaagagatttctaagttgtagcgagatatagtttgatgttttcccacaacgaaatggccaaatattacttcatgcttgcatagcagcaaaggcaatatgaattttagaggagctccatttataaaggaatttaaaattcagctggatttggtgtatacaactctcatggcattttctacattctggccctgattgttttgcttatctgtgcttcatgttgaatacgagtccaaattcaaatatgttctttcttcacattgggaaagcttgtttcgggttgtgagttataagtgctgttagcatgtgttaattgtagtttgataatcaagttgaagaccattttaatgtataatcaagttgattgaatctcttattatcattttctctttgttttactcctttcgcgactttctttcagcatgacaaactacaaactatccttattggagggtttttaatgattttttgtaag

SEQ ID NO: 33399 - DNA, 559 bp, Glycine max
atttaaagggctgacgagaaaatgagtgctggaggtaaaaaaagaaacactttgaaattcactaccacttgcgccgtagctgctggtagatctatgatcatagatgcttcatatgctggtgaaagggatcttcactatggagggaagattctcaagaggaagaatcagaagccactctatgaagccctgcaaaaaattaaagaagagttgatgctgttgggctttatttctctgctactgacaataacacaaaatgggatcatcagaatttgtgttccagtgggttggactcaccatatgcttccttgcagtctaaaggatcatggaaaggaagaatcaacaaaaaccacatcacattttcagacttttttctctttctctgatatttctggcactgctaggcgccttttagctgagagtgagagtgagaatgaggatcaccaaccagcaacaggagaaaaactttgtgctaggaagggcaaggttcctctattatctgtggaggcactgcaccaccttcatacctttatttttgtcctagctgtggcccatgtcacat

SEQ ID NO: 33400 - DNA, 427 bp, Glycine max
gctgagttgagttgagttgagttgagaagcctctcacaccaaaccaaaccttattcaattctctctctctctctctcatatcgagaatccaacagcaacatggcggaatcgtttgagcttccgaatcggttagcaatccttcctttcaggaacaaagtccttttgcctggcgccatcatccgaattcgctgcacttcccccatcagtgtaaagttggtggaacaagaactttggcagcgagaagagaaggggttgattggcatcttaccagtacgtgatgctgctgctgaaattcagcccgcgggtccagttatatctcacggcaaaggtaccgattctctagaccaaaactcaaaagttcaagggtggttcatcagattctcaaaagcttgatgtgaaaaatcagcatgatgttgttcattggcat

SEQ ID NO: 33401 - DNA, 276 bp, Glycine max
ggaaccctacaaaaagaaaggggacatttaaaaaaccaaagcaacccaacgcaaaaaaggcctgaaactcgctgggcttaaaaaaaatggaatcggggggtccgacaaacccaacccattaaaaccccgataaataaaagcaattttgcccccggcgatcaaaaacccagttttgggaacaacagttgccaaaagaggggggggacttaaaactttggccgaaaaacaagcttccttgaaaagaagaccccagggtcccgaaaagaaacccacctt

SEQ ID NO: 33402 - DNA, 767 bp, Glycine max
ccctaattaactggcgggctgtgtcgctgtggaggtcgagcttgtgaaacaccagttccggttagtccagctgtcttctccggccgtggttagcttgatgcttggctacgtttaggaaactgtatttggaaaaaaggagatctaactgcagcaaagaactgcctcagtcttgcattagacaagaatcatttccagaatatgtgacatagtgctgccacaggcattgacctgcacagatgcatactttggtcagcaaggactaaccgtttgttgataaattcaagaaaatgccacttcctttaggacatacaaactaaagtgaactaagcacattttgtctggggaaaacttaagcaaggaacttcatgttcgaaggttgaccctgctaccctggatttgaatatgctggtggaggaacactggagtgttgtctctgttgggaccacttcgaatcatatctaaagtatcttgatgaattatgtagcgcctgttatgcttggagttgtttattgttatgtggtttctcatggaggtgctgagacaggttctctgtcattgcagagatagattttccaatcgttagtcaaggaaaaaaaagactaaagaaaaagattcataatgaataatgatgtgtattaaataatactaaataggtcttatccaaaactcaagtctgaataggatccataaatcaaatattgagattttcatccattggagttggatgaaaggctaattaattatacaattcattgagttcaacacct

SEQ ID NO: 33403 - DNA, 899 bp, Glycine max
gcaagatgcattaaatgatgcattaaaagaagaaattcagcatttgaaagcactgactggacaagttatgccaaatggaggaccggtaaattttgcttcatttggtggggggcaacaattctatcccaacaatcaggctatgcacactcttttagctgcacaaaagtttcaacaactccaaattcattcccaaaagcagcatcaacttcagcagcaacagcaatttcagcaacaacagcaatttcagcagctgcaacagctgcaactgcagcagcaacaacaactgcaactgcagcagcagcaacaacagcagcagcagcaacaacagcagcagcagcagcagcagcagcagcagcagcaactgcaactgcagcagcagcagcagcaacaggaacagttatatcaacaaatgggggacatgaatagggaggggacacacctcatcaaatgtacttcagcggcagaggattttagagactacaaattgctttctcttcatcactttacccttgtgtttagagtttgtttaggtcacagtcattatatttcttattcatgaaacggtacagatagtcctagttagagattgagaattatgcattggatcttggctatgtaaaattctttggcacctttggttatgaatatgcggggcggatttatgtttgttaagtcttacaattgcttttgcctatggctatgcctgcataagtggtctgtttagattaaaaatcacgttgtctcgcaatttccaccggaattgccatatgtactcctaaactaggataccaacgaaacacctggggtgtttagtagagggggtttccttttaagtttctcttaggttgttaatgttaaatttctatatttgctatgacaattttaaaaattattctcag

SEQ ID NO: 33404 - DNA, 445 bp, Glycine max
agcaaaacaagataagtgctatattgttgaaactctcatcaagccaagtggagaagctgaagaagaaggctaatgaacaaccttcaaaagaaggggtaagaccttatagcagatttgaagctatttcttctcatatatggagatgtgcatctaaggctcatcacgctcatgcatctgatgagaatccccaaccacctgtagttatgtttagtgttgatattcccagtagattgaatccccctctccctcataattattttgggaatgctttggcaaaaacagtgacccctaagtgtagtgtgggagatatcttatcaaacccattaagctatggggctcaaaagataagggatgcggtttatgcggttacatatgagtttataaggtcccccttaagtgttgttttagggcaagaccaattggataacataagggcttttttctc

SEQ ID NO: 33405 - DNA, 601 bp, Glycine max
actcccttagggcatttcttttgtataataagcttttgttgaaaatctatctatccttgataatgttatgatggcatcctaagttatccaccacattatgtaaaaacataaaaataaaaggcaacattgggggggttcattgctgatttgatactaagcaaaattccaattaaaaatatttaatatggggccaaaacatttttttgtacgtgggtacatcttggctacgggatatccacattccacactcattcggatccatcatttcttgggacaataacattggcttctgaggcagattccctcctgaacactgatcctagttgaattccagcacctgcacgagaactttcttggccagagaggctattatcacctctttgtccttttttctttgccttttgtgcccaacctacaaggcgtgcttgcacttgttcatcaaatatggccttcttaaagtgagttcccatctgtgtaacgattgcataaagtggcagggtactatagctacatagtaactgaataaataccccaataatgagccttggaacaatgtaacgaacccgccccattatacaggagtcaaagcaggacgagtggg

SEQ ID NO: 33406 - DNA, 649 bp, Glycine max
taagcttatggctaatcagcggggtttggagcttgaaagtcactggggtagggtggacaacgatgcagttattccagcagataaaattgccgaattgaatgttcatgcaatgccttatgaagaaaaggaaattgagatccaaccatgcttggctcctttgaggaaaggaggattatgtcagagaagagatctgaaagtttgtccatttcatggatctatcattcctcgagatgatgaagggaggccactcaatgagaattcttcagatggcatgaatattgatttaaggactgatttagtagagcagttagcaaaacaagcggtgaaaaatgttcgtgaaagagatcaagaggtggcaaggaagagggaaattgatgaacagtcactgaaacgtgcaaaactagctaaagttcgggaacacaatgaagctgttttacgggatgctgctttggcttctacatcaagatcagccatgcttggagaagatggggaggcaactaatgaagataaactgtctgccagagacaagaagcaaagtctcgcttccatgctgcgaaagaaagtaacatcaaaagatagaatagctcagaaacttttaagttcacgggcaagggttactgcagataggcagcatgtgtcatgtgaagat

SEQ ID NO: 33407 - DNA, 531 bp, Glycine max
ttttttttttttttttttcagtgaaattgaaacaaccttgctgggtcatttcctctggtgttgccgacataatggagttcaattcaaataattatttcacatccataaaaaaaagagtgaaaaaaaatgttattagagatttgatttgattagataggagtagcatagccacatgaactcctctctatgaaatttgtatatatacaagcaattgaaaaaggcatgtaatgatgtaactcctgattaagtacttccaatggagtcaagtaaagacattgaaaaggagctgtcatattcatattccagatcctcaaaaccccagaactcctcttcttgctctttttcttcctctggcattttccacttctctatatccgtctctccttcctccattatctctaatacctcactcatggtaggtcgccaagttgaagatgcccgaatacaaagagaggcagcgcaggcaaaactttttaactgagtcacatcataagccccctcaagccttggatccaccaactcttctatctc

SEQ ID NO: 33408 - DNA, 482 bp, Glycine max
cgacgaggaattgtacaagatcgagacggtgcccgcgcgcaacagcatgtcggtttccgtcttggggcgggaagagcccaccgtgacggatctcgagacgaccgagcgcgagtggcgctactatggggattcctacgtcttgacacacaaaaccgagggcttgtctcatcgcgtcgacgaacccctactcaagcggaatctgggcgatttagagggcgctcacctcgagcgctctgatggtctggcctgtcgcattgcattcggcacatacaagatgtttgcagtggaagacagcgaagactactttcaccgccggcgtgcgccgtcgcccgaggcagacaaggaggcgcaaagaaagaggttggacgaggtgacggcgcgtttgatggcccgagttgtatgatgtcattgtactcttcatgtatcgagttgtccgttctctaaaaaaaaaaaaaaaaaaaaaaaaaaaaagggcggccgcc

SEQ ID NO: 33409 - DNA, 614 bp, Glycine max
gcaagagggacgactgtaatggtcgatgagaacaccatgggtgaaggaggtcagctggatgaagccgctcttaggaacctgcaatgtttgatagagacgttgcactcacagactctgcgatacgaatacccgtacatggacgatctgaaaatggactgcgaacttcggcttctcgtgttcagcgaagcaaagagcttgatacccgtggacctgaacgtagcgatagttggtgggctgaaacccttcgatgatgtagacttggaaaagctcgcatcttaccgatcttatctggcgtttcacggacgcgttggttcgaaggtcagcatcccagatgagacggcagaatacattcagacggagttcgcccactataggcagaaagctggacagaacgatattcagcaagccacaaatcagttaaagtgtcggctcaaaatcgccagactccttgcgcagagtcacacggaacacgttgtcaccgttgacatctggcaaagggctgtatgcatacacgaggatattgagagccgttctctaccacgtccgagtttcgagaatcatagatgtatatagctttaagcatctataagattctaaaaaaaaaaaaaaacaaa

SEQ ID NO: 33410 - DNA, 519 bp, Glycine max
cttaactttgtacttgttgtgggaaaggctaaaaatttagctgatcacgatgggggttatttggttctgcttattctcctacatgacctcaacttgcacttcactagacagtttagcagtgagtcaatccattcgagacggcgagactttggtttcagcaggtggaattactgaacttggtttcttcatccctggaaattcagcaagacgatacttgggtatatggtgcagaaatgtatcccctttcacagtggtgtgggtggctaaccgaaatacacctcttgacaataaatcaggagttctcaaactcaatgaaaatggggtccttgtgcttctcgatgctgcaaacagcaccatttggtcgtcatccagcataccaagcaaagcagggaatgatccaattgctcgtctcttggattcggcaaattttgtagtgaaaaatggacgcgaaaccaacagtgttttgtggcagagttgtgattatccaagtgatacattgatcccaggaatgaagattgg

SEQ ID NO: 33411 - DNA, 315 bp, Glycine max
aacaagaagaagaaaaaaaaatcatccactaactaaaattaactacaaatatttataagtttcgattacaagtcccattttcctaatatattgggacacatcatggatgggtatacattaatagctaaaacaccacaagtaaaacataaatattcaccatgacttaaaacaatggattgattttatcttcccccttaagcatttttttctaggtttttttcttcattttttttcccatggtggcacaggggaagagggtttaaggactgaagtcccacatcagtaattgttccacatgtggggcatccccacttc

SEQ ID NO: 33412 - DNA, 500 bp, Glycine max
aaggaagaaacaaatttaccatgcacttttaatcaacttatgttaatgggaccaaaggtacatcaagccaacatcatcaagtatgacatgatcgaccagcccattttacacgataataatctattttaatgtggcaacctggctaacttgccctgttgaaagggaagaagagtgaaagaagagacaaatagctgaaatgtcatccacggcaatgccccgtctcttgcgtttccatgcatgcaccccacactccaccaaacgtttagctgccttaagctttatctgctgctgaagatacaatatccactgcttctttattagagattacatcccaaaccccatcagtggctagcacaacaaactggtctctactagttatatttctgtgtgttacctcaggcacagaaataagaccatgccctttgatgcagtagtcaccaaaggccctagacatggctagtcccggagactcttcatccggtaaccacaccctatgcacc

SEQ ID NO: 33413 - DNA, 705 bp, Glycine max
cggctcgagtcgcaaaggacccaaagaacgtcatctacgtcatcagtggacgcgacagaaccgcactgaatgagtggttcaagggagtgccagtggggttcagctgtgagcatggctgcttcttcaagatgtacccaggagcggaggggaaggatcactgggaagacgtcggcagcgaattggatctctcctggaaggccactgtcggcagcatattcgacgattacaccgatcgagtcccagggtctcatgttgaggccaaagagatttgtctgacgtggcactaccgcaacgctgaccccgagtttggagagaatcagaaaaatgaattggtgctgcacttgcagtcactggcaggactgcccattgatattctgttggggaagaaggcagtggaggctcgtcctcagggaattcacaagggcagtgtggtgaagagagtcatgtccatgctcagtgatgctgattttgtattgtgcattggtgatgatgtcaccgatgaagacatgttcgaagaactgttggaacacgagaagccagattctgaaggaaagtttacgataactgttggcaaaaagcccacatttgctggctattatttcgatgagcaggaatcagtgttggatctgttgggagatttagcgaaagcatctcagtgacacttgttaggtttttcttgtttgtgaaaataaacaattcttcatt

SEQ ID NO: 33414 - DNA, 518 bp, Glycine max
ggttcatccaatccaactttaagctactttcgtgaaaatatggaatatgaaacagtagtagctgttaagaattgtttgaaagatggagcaaaacaaatcatcagaaatagataatcttccaattccgagagctgaatgcattaactacttctgcaggcaaaaagccttaggctactactagaaattaaagaaaaataaatggaaattcccagagttaactttcaataagtgataactttaattagtctgtaaatgcattcagcctccttcccattaattatacagtttccttccagaaccgaactgacctatcagttccacaggaaataaaagcagactctattggtgagtgttcaagccagcggggtgcaccaacatgattagaaggccactttgctactttttctgttgtcatcgcatcccagataacgatctcattgctcagttcatctatggatagaataaattcttctgtctcattaaaaatagcctggcaccttagctgggtatgtatagca

SEQ ID NO: 33415 - DNA, 699 bp, Glycine max
cctcctatggaattatctatatgcattgcattgcgtaaaagccaagtatgaacaaagctagctactcttgtttacaaggcatatatacaatttttacattcagagttggccccgttggcatttatgtatatttacaaatttacaattctcaagtgatatgtttgtcccaacagcagcatgatagaacaggttaatattgagatagaaggggtaaaactagcgaccattagccaagttaacaccttctctggaaaagatgttagccactgaagatgtccatgtagggctagcattctggttatctgtataatgactttcactatccattgcattagcattcatgttcctcccaagtttctttccaattgacattcctagtttcacagcagtaagaaagccaaatgcaatcagaacaggtctaactgcccagtggtgatcctctacatgttgatacttctctatcatcttcggacaattcttaaagttaacgacatcaacctcggagggatcagccaagacagttcttggtgcatcccaaaagttcaacatgcctggaaacttgacaactagacatccatttggtaggatccaagaaatcttaccagtagcccaggcacctccccttttacgtggccattcaaatcgaggactcaaaacattggctttcagcctaataaactggcccacgcagtaaggttc

SEQ ID NO: 33416 - DNA, 529 bp, Glycine max
tggtcggcggccgccctttttttttttttttttaaaaaacaatgtaaattcaaaattcataacataataagatgtatatagttaaatatacaaaataaatgggtactattacaccatttaataactcttaactgaatcatatttttttaaaaattcacagtcaggttaaaagttatttccacatggatagaagctaattctcaaactttaaccgtagatgccgtactatatgaatcacgtgtgcaacaaacataaatacttcggataaacaagcttggtagataattagatatacaccatcaggaaaaagaaaaattcaatttctcaaagaagctcatcaaagatcaaacagatgtgtccaggcaaaagggctcatcatatgaaacgtaaactcaatcaaatcaaaggaagttcctctgaaaatttccagaagaaaaccttgaagataagttcttagtcatgctttctgaatcaaaatttacagttttccttccagctgcagatccttttcacctcgtgccgaattcgg

SEQ ID NO: 33417 - DNA, 535 bp, Glycine max
aggaagggtccaaatggtaccccaaacatgcacttactcttcatgtaagtggattccttgccatggtattctaaaagtggcatctacaaatatttgaatgtaggaatatctaaacaattaagagggatgagtttcaccttgaacattacattattacaatcatatcctccaagttcaatgcagtcctatatcacagcttgtatgagaaaccacttaaaacgcgcattagttacacaacaacaacaacgggcccgttaggcccgtcatgaataaaaaaaaaagttgcaacaacaacgtactcattttcaaccccatgatgtgcgaagtggtattgacaacgaatttatgattcaccgtactcatttccaaggtagtgtatattttgtactgtagctgcagtgacaatcaagcataactatttcagcagaaaggaccgggtaactgagcttcagtgcagcatcgcaggctttaatttcacgatccaaaaaccaagtcacgtaaagaagccgaaggtgagctgtaaccatggacaacg

SEQ ID NO: 33418 - DNA, 231 bp, Glycine max
tagcaaatggttaatcgaaacaaccttttgcgcttaaaactcatcgtataattctgttactgagtgatgtatacttagatacgacatctgattgcacttcttggtttaacagaccattatgcacaaatgatgtatgaaggaaaaagctctttttgagtgctccagttctcttaggattattttttcatcaaaattagtatcaagttgtcagaattcgtgtattcacccacc

SEQ ID NO: 33419 - DNA, 321 bp, Glycine max
agtgaaagcagcaaacataaagcctttgagaagatgcaaaaacatgtcagtaaagacggggctaataagtgggtcagcgtacttcataaatttacaggaaagtcacaagcaacaacggattgcacaagattccattggcagtcactctgagcctagcagagtgaatgatgattcatcagatgtatgggacatagaacctatgaggcatggtccacaaggcgttccaaaggatatgtttgccatgcttcatcttttctgtgcaacctattctcacctgcttttagttcttgatgacatagagttctatgagaacaggttcca

SEQ ID NO: 33420 - DNA, 474 bp, Glycine max
aaaatcaagcaacattttgcaagttatatccatttctttatccattacaaatatttcagtacttcaggattacaacactagtaaaagctgatactatacgtcacttgtatccaaatttagatggtatcaactaatacaaagtgaatgccccgatcaagacatactacatacagaaatatacaaataagccaccttacatggaatctggtggatcaaatgatgcgatacacaagcaatttggacgtgatccctatactatacaaataggatgcaacattattcatagacaaattgagctcaatacagcactattaatatctatagggtaatggaaaggtgatttggcaacaagcgatctccatgtcttcttttttgggtcgtatatttgaatgaacagagttcctgccctcttatgttgtctggaccttcgtgtttctgtaaaatcaacgacacataaatgtgtcactacataaa

SEQ ID NO: 33421 - DNA, 460 bp, Glycine max
gcgtccggaaagaggggggtgttttaacttccatctccaatcacaacgcagagcgcaacacgcgccgaggcggagcgtctcctggggatcgcggagaagctcctccagaaccgcgatctggtggggtctcgagagttcgccttcctcgcccaggaaaccgagcctctccttcgaaggctccgaccagatcctggccatagttgacgtcctcctcgccgccgacaagcgcgtcaacaaccaccccgactggtacgccgtcctccaggtggaccgccgctccgacgacctggacctgatcaagaaacagtaccgccgccttgccctcctcctccaccccgacaagtcccgcttccacttcgccgaccacgccttcctgctcgtcgccgatgcgtgggccctactctgcgaccctattaagaaatctgtttatgacaaggagctctctttcttctcccgcgtc

SEQ ID NO: 33422 - DNA, 530 bp, Glycine max
ggaattcggctcgaggttttgaaggaaatattgatctttgtggtgaacaacttaacaaaacttgtcctggggatggagatcaaacaacagaagagggtcaagaaccaccagtcaaaggtgatgattctgttttctatgagggattatacatgagcttggggattggatacttcactggattttggggcttattagggccattactactgtggcgtccttggagaattgcttacatcaggtttctgaacagattaacagactatgtatatgtatgcttatggtgaatgtgggaagtgttgctaatcgctccaaggcaaaaagatgtgccgcacgcttctgatcagagaagaaagcattgttggctgctacaagtgcgaaatatttctttagtataggagtttacaatgttttgtatttaagtaatgaactgcaaaatcttgtctccggaaacttggtatgatattgttgtattttattgtataatatatttgtaatgctgtttatttttcattaatgtgcttacatctgtg

SEQ ID NO: 33423 - DNA, 451 bp, Glycine max
acttgagcaaataaaattccagatgcaatgttaagtagtttttttcacattttccatcattatatatatgagatgaataattttttttatacagacaacagacatacggatatatgaggtaatccgatacaaacaagaaaaggaacataatttaactcgagttctgaatgcatctatatcatatatacaataatctaagtatgtgatcactgcaacctgaatagttgatcttagccagaaggatgcacgacctgtgtaaggtgtaagtgtatatatcctgtatgggaagcagatcaaaacctcatgtccctaaggccgtttaattggaccttcaactgatagattcttcaaatctttgctgaggttgattttgcaactgccatgaacctagatagttttttctcctctcctcgtttcgtttattccttggaattttcgcttgaagtggatg

SEQ ID NO: 33424 - DNA, 358 bp, Glycine max
aatcataaatttgtctatcaaaattccataacgtatttttttataaagaggggaaatggataaaaagccattaagtttgcaatatcttgaactttgtgaaagttcaaatgaaaggatcaggaattaggaatatttaacacaacaagcatccttcattctatagttctgttgtaatcagccttttttttttttgtcgtcgtcgttaagaagttacattatcccatgttatatcatctgaatttttgttaatacaaccgcacagtaaatctcctaaaattgaatggatgtgtaatgcttttgtcaattgacatcttatagtaaaaataatgtacttttaattatgacttttactttaatg

SEQ ID NO: 33425 - DNA, 728 bp, Glycine max
gttcgagctctccggcatcccccctgccccccgtggtgttccccagatcgaggtcaccttcgaccttgacgccaacggaatcatgaacgtctccgctctcgagaagggcaccggcaagaccaacaagatcgtcatcaccaacgacaagggccgtctttccaaggaggagatcgagcgcatgctcgctgacgccgagaagtacaaggaggaggacgaggccgaggctggccgcatccaggccaagaacggcctcgagtcctacgcctactccctcaagaacacagtctccgaccccaaggttgaggagaagctgtcctctgaggacaaggagagcctgacctccgccatcgacaagactgttgcgtggatcgacgagaaccaaaccgccaccaaggaagaatacgaatccgagcagaagaccctcgaaggtgttgccaacccgatcatgactaagatctactctcagaagggcggtgctcccggcggcatgcccggtgccggtggtcctccccaggacccgcaggacggtcccactgttgaggaggtcgactaagcgtctcgcttcacgactctcaacttgcatcgacaacacggcgttccgactagatttgggatttttcttctgctcaaaattcatgatgctatgacttggaggaaaaaaaagcatccttctgtaatgtagccaacctcgcttgaggttttcgagaaatgaacgttttctaatcatc

SEQ ID NO: 33426 - DNA, 604 bp, Glycine max
  unsure (1)..(604): unsure at all n locations
caacgccgccgcttacaacgtaatgcttcggtttctcagcagaaggcaagactgggaaggcgcggagaagctcatctacgaaatgaagggttccgaattgataagttgcaacgccttcaacacccttatctacgcgtgctgcaagcagagcctcgtgcaattgggaacaaagtggttccgaatgatgttggattgcggcgtcgtgcccaatgtggccaccattgggatgctcatggggctctaccggaagggttggaacctcgaggaggcggaatttgccttttcccgaatgagagggtttcgtattgtgtgtgaatccgcgtattcgtccatgattaccatttacacgcgtctcaggttgtatgagaaggccgaaggcgtgatcgagttgatgaggaaggacgaggtggtgcccaatttggagaattggttggtgatgttgaatgcttatagccagcaagggaaactgggtgatgctgagagagtcttggaggcaatgcaagaggcagggttttctgataatattgttgctttcaatactatgataactggttntggaaaggctaggagaatggatgctgcacagaggttgtttatgaggata

SEQ ID NO: 33427 - DNA, 480 bp, Glycine max
gacacataaaataaatgaagcatttatatataaaacgttgatgtaccagagtccaatcacattcaatgtatgaatgctttattttctcttcaaggattcattgtacaattcatttgtttgatgtgcttccgacctcagccaaattggcttaacaaagagacacaaagaggaaacaaaaggggaaaaactaaaaaataagtcccaagtcctagatctcaatctacaagaatagaaaaagctaaaaaaaatgtctcaagaaaatttacaacttacaagggcatagagacaaaactaacaaaagttgaggcaacgaagcgaagagaagaaatgttttgaagtaaaaagagaaaaatgtataacaatcatgtaaatagaaaattgaggaagtaaagagaaaaaaaaataagatatgtgaaaatatgttatactctgttggtcaagattgagagatgatacgtgtgtaaagaaattcattccatg

SEQ ID NO: 33428 - DNA, 411 bp, Glycine max
ggaaaaaatgggtgccaacttacatgggggatgcctttttagctggaatgtctacaccgcagcgctctgaaagtatgaactttttctttgacaaatatattcataagaaaattacccttaaagagtttgtgaaacaatatgggataattcttcagaatagcgtatgacgaggaagccattgcagattttgatacattgcacaaacagccagcacttaaatctccttcaccttgggaaaaacaaatgtcaacagtttatacacatgcaatatttaagaaatttcaagttgaagttttgggtgtagctggctgtcaatctaggatagaggctggagatggcactattgcaaaatttatagttcaagattacgagaaggatgaagagtttttggtaacttggaatgagttgagc

SEQ ID NO: 33429 - DNA, 536 bp, Glycine max
ctctctctctctcttgctgcctgtctgatctatctctcttcttcccttctttgacccaccctcctccttctccttcaatgtcttttgcactcctcaatccattcccacactctttcccctgagattctcccccaattcccaccactccaaacaaaccctctccctctttttcccttcctagggtgcagaaaagatgaagtcctccctcagcaagttgaagaaaattgcacttcacaagaccgtctccaaggacaaaaaggactttccccccaccgttaaattcgacgaactcgccctcgctgccaaggacatgcaagacatgagagattgctacgatagcctgcttgctgcagcggctgctacgcaaaacagtgctcacgaatttgctgagtcactgcaggacatgggtacttgcctactggagaaaactgccttaaatgatgatgaagaaaatggtaaagttttggggatgctcggaagtgtgcagcttgaacttcagaagcttgttgatagctatcgttcttacatagtactga

SEQ ID NO: 33430 - DNA, 445 bp, Glycine max
aaattacatgattctcatggtactctcaaaacaagtcaaaggtaacgaggtgatgcacacagaaatgcaccgcaacatctgataattaagcaccacctctattgatgtctaaaccactttgttactttcaacacccctctcattaaaaggcccccacaatccaatacaaatacaaataaccaaaacttcccacctgaatggcataataactaacattcaaggggaaccaactgatctatgcttgcaaaacaaactagtttaagtctcaatggcttttacttgaaaaagacgcacccaaaacgttaagattactttatctgaaaccacagaagcaaatgttctgtagtaaatacccacaccaagcacagatttcgctaattgtataagcccttgaatggtatccctgtgcatgcttttgccacattttcctcatcgtgaaccacgc

SEQ ID NO: 33431 - DNA, 565 bp, Glycine max
agagatgtaaatggaagaacatcagcaacacagaaggagacattgaatgttttggctacaaacggaaaagaatccatgttccccaatcttttatcttcgctactacaggctcaattctttcggcgctggtggccattgttgtctttaagatagcactctattttagacagaaagaagacgaccaagcaagagtggccaagtttttagaggattacagggcagaaaagcctgcaagatttacctatgctgatttgaaaagaatcaccggtggctttaaagaaaagttaggggaaggagctcacggggctgtattcagaggaaaactttcaaatgagattctagtggctggtgaagatcctcaataatacagagggagaagggaaggagttcattaatgaagtgggaatcatgggaaaaattcatcacatcaacgtggttcgtttgcttggcttctgtgcagaaggatttcatcgtgctcttgtctacaatttgtttccaaacggatccttacaacgaattatagttccaccggacgaacaggaccatttccttggctgggagaagc

SEQ ID NO: 33432 - DNA, 741 bp, Glycine max
gacgagttgttgccgcaagccaaagatctgatcaaaccacgtgatgtcggttacgcgacactgtttgcagtgctgcacgaacaactcggtcacgtgacagcagtggaccccttgcagaagtggccgatgcattccgcgtgaatcacactggtgagcgcgtgttcaagtggcgtcccaacattgcgcaggatgagatctccgtgcacgtggcctatcacgccgatcactcgctcactctcaccgtgcagcacgacaagcacactgaactcgtcatgaagcacgtgcgcggcactgtgcagcgtggcaaagaaaagaattcctatcacgtgactgctgacttgggcaatactttgcagaaattcgacgtgatggtcggtactcacggcgagatcaccgtgcattcagtgaacggcttgatcaccctggagcccgtgctgcccaaattagaacccacatcacgtgacgccaagacgagtgccgcgtcactgcagtctccgatgccgggcaaagtgatcaaggtgaatgtgaacaagggcgatcaagtgactgccaatcagagtctactcatcttagaggccatgaagatggagcacactattcgcagtccatttgctggtaccgtcactgcagtcaattacaaggtcggagatctggtcgaagagaacaaggtcttggttaccatcgaacccctgcgcagttaactctagtccgctagtgcacaataaacgagtattcatatgt

SEQ ID NO: 33433 - DNA, 603 bp, Glycine max
actttctctactcctccacgtaacaccattaaaccttaccacacaattatcaaagttgttgatgagcgaaaatcatcaaagcaatccaaaagttcaccttaccacatcctcaaaaccccaccttgttgttcgtcatccccaccccaagctttccccaactctggtatacaccttgttgttcctctcacatccacccccaattttgcgatcccaaacccccactgccatttccctcaaaccctaaccttaaacctattgaagatgcagatccacgaacctgtgtgacggccacggattgcacaggaaaggatggaaaactccatatctgtaattcgttgcccgttgcgcttcgcgaacgcccatgctgatgagatctggatcgataccgccaccgacgagatctgaatcgaccccccccaacaacgagattgggggtttttggctttgaccctagacctagatttattatgaatgtgttttgtgtttttaataatttttttattttttttgttggttcaagttgaaactgagttttattttggatgaatttgtggtggctttatgcataggttatgcaatgaaaacaagtgggacgatgatgtt

SEQ ID NO: 33434 - DNA, 424 bp, Glycine max
ctggttttcagttcacagttcaaggcttacagaaggcaaatgtcaataaaaagcttttattggctgccccagaatattccttttactttgtaccaaagggaattaggcttttttatcttatcgcttttattcaccaaattcaagcggatacggcgatgtgggacaggagagttgatcttcctgccaattttaagcaaataataaagtttgtatgcaacaagtaaaaagcgccgatactgtaaaggttcattatcatggccgtttaaccgatggaacaacgttcgattcctctgcaggtcgtgaaccgctgcaattcgaagtaggaagcggaatggttattcctggtttcgacaatggtgttatgggaatgatagttggtcataaaagaaccattaatataccagttgccgaagcttatggtcct

SEQ ID NO: 33435 - DNA, 462 bp, Glycine max
aaatactagaaaaaacataatattataaaaactaaagtactgagaaaataacataaccgatgaaagcacaaagctacaacggagcaaagaaaccaaaacctttgaacatacaagaaggattcacattcacactttttaacttaagcaacacattaacctatgatcttccgctcctttttatcacacacatagcaaaacgcaaagtaaccaaccaaaacgacagagaaaccattactattcccatttggcggttataactataagttattagcgaaaccgttaaccagcgccaaggcattgctggtgaacttcttgaccctagtgacgcgatcgcatacgctcgtcttcacgggaccttcctctacaccctcgaatccgtcagtacacgtttcctcgtcagtgagcgcggcgctcatccacgtcagcacgttgctgagcccaaaccggacggagctggagtca

SEQ ID NO: 33436 - DNA, 405 bp, Glycine max
actgcagaacttcttttcattctccaaaggtaatacatatacataatacatgtgcgaaacaagaggctagagtctagaactaaaaatttagtcgagcaacaacaaacacaaagcataagttgcacattccaaaaaaaaaaaacattagacaactcaacatcatcattaacatcagacgaaactaggtctccactacctttgccgaggcaatactaatgatatactcaatctcttctgccacctctttcattgaggggcgagtctggctcttttcctccaagcaacccaatgccaaaaacgccactgccttaatcgtctctagctatataggggaagctgcattcttcaacactggatcaatgacatacatgaacttttcctcggccaccatctgatgcacgtaaa

SEQ ID NO: 33437 - DNA, 296 bp, Glycine max
gccctaaggactgccatatcatatcctagtgaagttaattggaagtgatcgcccccacacaaaggcactgcttctccaacttgttgctccctcaaacaaattggactagagcaagatagtcattcaaataagctaaaaggtaataataatataggtgggtatcctctttggttattactatgatggatgagcagtttcatttccaatggagggacttgaaatctttattggtgcagcaatggcacaatgctgctggagatcagtcaaggaaaatgatctccagggagagaaattcc

SEQ ID NO: 33438 - DNA, 554 bp, Glycine max
ataatattctcacaaccacacttcccacagcctcaggtgtccctctacaaaagttcaccattttggaagtgtctgaagatatcaacgctgctaaatgggtagcttgtcatcccctaccatatccctatgccatttactattgccacttcatagcaacagggagcaaggtgttcaaggtctcactaggtagcgagaatggagatgaccaaaattgaagctcttggcatttgccatttggacacatctgattggagcccaaatcatattatatttaggcagcttggaatcaagcctgggaaggatgcagtgtgccacttcttccctataaaacatcttatgtgggttcccaagcctttacaagccaccatgtgaatggaatgagttccctgggtttctgtaataaaggtcaatctcaacaatgatgaccatgtaccctttgtggacttcctctttgtttgtatgtcttgggccttgttttatgttaaaaaatgtgtttggcagaaaagacttcatgtatgcttgattttcaggtaagaaaatatttctattggcag

SEQ ID NO: 33439 - DNA, 620 bp, Glycine max
aacatcaatctaacttcaaattcgtttcatcacgcccgaatgaattggattctcggctgcaaacaatgagtcacaaaaaagaatttacattgcatggtagcaagataccgagtgcaaagagaataaaagaatcacaacagagccccatctacttccaaaagaagaatctgtaaaacatcaatggtcaagttcgaatccgctaatagattctcacatgcttatgcttgtacattctaattccacttatgcaacccctaattatgtatgtccacgaaacgtatgggttagtgggggaaaatatcacacacatgcatcctaaattctaaccagttagcagtgcagcatttaacagaagaaaacaccaatccaaaattccaatagtaccccttcagcgtttccaagcgtaaacgagcagagagaaaccaacaggaacgaccaactcattctcctccacactggaccattccaagacggaggagcttccaccgaaagacccaccggaagacgacagcgaagaataggaacaagtcttgccccattccgaagcccccaaattccacagcgcagccaggttgttcctatcccccccgaccgcctcaacctcgtcctcctcgaatttg

SEQ ID NO: 33440 - DNA, 591 bp, Glycine max
gggaaatgggaacaggccccccctaaagttttctattttatttattttttgttttttaattaagcatttaaaagtaattccatcacatgatagaaagaagtaggcatggacacatagttgattaactacaagtcaatctgcttttcaattgttgcaaagatgaattatcacaatacaactttggaaaatttcacaataataataactacaatcgtatgtcaaacaagtcatggcaacacaaccccataacaaggtgcggaaaaatcaaatcattcatgcagcacgcgattttaatttcttcaggcgtttgacaggagcaacacccttaattgccttcctggccctcttcagttttggctttttggtaggaagaggcatctccctgataggacctggaggcacaccctttttgagtgcacttcctctgggtgttgcagagggaggcaacctcaaactctgaggaggtaaaggattgtgtggcttccacaccaagttatttttcatcgaaaatcttaccttctttgtacttttctccccaccctttgcgactgcactctcctcgccatccaattcagcagaatcctgagacac

SEQ ID NO: 33441 - DNA, 264 bp, Glycine max
gagcatttgaggaagaaaatatataaattggggttctcattttggggtcactagtatataaatagaaagtttaggaaccgtgggttttataggagtttctcgtatttggtttcgttaccccctttttttcttcgcactcaacattccccttaatcaggactcttcttcaactttattatcagggaaagtttgctagtttcatccccttgtgtgcttagtgtatcaattaatgttattcttataataaaaagttcacttcacatc

SEQ ID NO: 33442 - DNA, 518 bp, Glycine max
acgagggcaagtcccacatggatgttccaaacagcccggaaatctcggttgatgttcctccttaccttcgagtgcacaaagacagcacggtcgagagaattgccggcacccaagtcgttcccgcaggcctcgattccgacaccaacgttgtctccaaagacatcctcgtcgtccccgaaaccggcgtcactggcaggctctaccgtcccaattccaccccgccaaccgccaataagctccctttacttgtctacttccacggcggcgccttctgcatctcctccgcctccgatcctctctaccacacctctctcaacaacctcgtcgccgaggccaacgttgtcgctctctccgtcaattacaggctcgcgccagaacaccctcttcccaccgcgtaccaagactcttggtccgcgattcaatgggtcgctgacgcctctcgtgctaaacaacaccaccaagaagattggatcagggacaacgttgactttgacagagtcttcctagcaggggacagc

SEQ ID NO: 33443 - DNA, 298 bp, Glycine max
cttggttattagtagttagtagtaacatgtcaatgattttagtataatgaaaattctctttttccaagggcagtttaatcgtgggattaaattattctattcaccaatgaagattgaaaaatattcgccctcacattgagcttgtttcagtttgaatttacatagaaaagatatcccgttatgtaaacgcagtttcgtttatagttaacgtaagggcagtggtggggtttttgcattgtgtatgattttgagcgtttggcacatttattggccgtcattatacgcagtggatggattg

SEQ ID NO: 33444 - DNA, 440 bp, Glycine max
gccgatatgactggatgtgcaaggcattggaggtgtttttaagagttatggcagaggaaagaaagctaaagaaggaggaaaataatgttgattcttcttcaagttcagtgctagatgtgtcagaaaatcaaaatatgtcatccaaatactataaaagaacaactaccacacaacaccatagtatgtcatccagaaccaatatcctggcccatgcttcccaggagatagctatccattttggttattgacactactcttgcagtgtgcttctttatgtggcacagtaacttccattttgaaaaaaaatatatatttgcaatcacactgtcacagttggtttgcttgaacacttgcaaacttaatttagggtaattttaattatgaaaaagtgattttggctcaaaaaaaaaaaaaaaagggcggccgctcgcgatctaaac

SEQ ID NO: 33445 - DNA, 435 bp, Glycine max
tgaaaccattcaaagatgcagctcatatattggcagagaagaaggattggcccccattatatgacgttcaggttctgaataacaataaggtacctgttgctgcagctgtttactatgaagacttgtacgtgaattttaagctggccatggaaacagcttctcaaatagcagggattaggccatggataactaatgagttcatgcattctggcttgcgtgatgatgggagcaaagctattgatcatttgttggggatgctaaatggaaggaaacctctattttgatcaccattacacgcatgtttggaaataccgttgagaaataagaaattgcgtctagggtgtggatgctataacttttaggttctccctaaacgtgaaaaattatatttgccatgtggaatcaaatacactatacatctcttctttgcctccc

SEQ ID NO: 33446 - DNA, 436 bp, Glycine max
atctttaccttgttagtcaatttgaagaatagtttgaagagattaatggtgttgatgttgcacccaaacttccatccagtccagatggtactaaacatcaatcaacagtggtcccggaggatagagggaaggacatagaagtgcagggacaagaagctcctgggcctagttcagattttactacctcccaggattttgtgagtgggatcatgaagattgttccttctgctgttgctagtgaagctgattattggctttgatcagatgccgccggtagtataactgacatgtggagaacagagcctggagctgaatggaatgaactggaaccactccaagaagattattgcatgactcgcgagaacactgcgaccccaagtcatccttcaaatgtagatgaagtgtcttctgcacctaaatctactggaggttgaag

SEQ ID NO: 33447 - DNA, 467 bp, Glycine max
  unsure (1)..(467): unsure at all n locations
nnnnnnnnnnnnnnnnnnnnnnnnnnnnnnnnnnnnnnnnnnnnnnnnnnnnnnnnnnngaaaaaataacataatctgttatacaaagccaaggggggtttattccttagtcaagagaataatacagcaaggggcatttatccctcgggacatgccctgtattagaacagggttactgttttggaaagaccaagtcaagaggggattacggaacgaaaggagttgcacatagcaagttgcttctgcttgggttcttgcaagagtcccccccaacacaaaatgttctcatgaaaggataagttgaaagctagtagtcacattaacaaaacatgtcttgcatggacatgttataaacaaccactactacattacaataaacaaccaaactgttgaaagaaatagagaatttatgtccccgggggtctgaataaatgtatttttcccgtttttgggttttgttttggggg

SEQ ID NO: 33448 - DNA, 498 bp, Glycine max
ttcgtccgctttcgcgtgggcggacgcgtgcgttctgaatagcaataagcttgttgaagagtttaggagttttctttgccctttaattcaactcaatggaagcaacgaaagaacttgtatctccaattccatgcgatgatggacaccttgttaccgttcttagtattgatgggggtggcattcggggaatcattccaggaattatacttggcttcctcgaatcagaacttcagaagctagatggagaccatgtaagattggcagattactttgatgtgattgcgggaacaagtactggaggattagtgactgcaatgctcactgctccaaatgaaaataaccgacccttgtatgcagccaaggatattaagaatttctaccttgagcataccccaaaaatcttcccacaaaataagtgctggaatttattctcatctatggtgaagttcacaagaactctgtttggaccacaatacaacggcaagtacttacacaggc

SEQ ID NO: 33449 - DNA, 573 bp, Glycine max
gaaaaataggtaccaaagcaccaaaggtggtacaaagctagttccattccattatgtggatgtagagctgcttttgtttcccttcttggagttgtgtatagaaaaggatgacgtaactcggattttatccaaaatgatggctcagttaacttattttggtgtgtatgtgtcttggtgttggtaactagttactatcattaatttattagaaaaaaaaagtgaaaatatactgctgctggtgtttgatcatatgaaagcctggttttatgtgctgttctccacttggatccagggtgaaggtggtggtatctggtgcatgaggaagacacctaaatggaaagttgatctcctttagaacaaccctcatattgttcacgttcaagtagaagttgcatttttgctaagtacttcaaaatgagaaatattcaagagtcaaaacaggtgtaaagtacttgatgtgtcaacgcttggtcatgaatatttgcagttgctatctaaccttttaattgcaattgcatttcagctatttgtgattcacctaataactttggtatgacatgattcaaacatacg

SEQ ID NO: 33450 - DNA, 493 bp, Glycine max
ttccacacaacctacgaaagcaacgaatcatcaaacttgtacggagcaatgagctctcatgctttaaacaccaatgtgaatgctcttgatcactttgagatacccgtaacgacgccgtttcaggacgtttctgcatcggtgccgtccatagcagcgttctgccggagttctagcttccggaacattttcttgacagagaattgggcggagctgccgttgaaggagaacgacaccaatgacatggtcatctacggtgctttgcgtgatgctgctgccaccggatggttccccgccaatggaaatgaggtgagtaatgctagtgtagctgcgaaaatggaaaatgagggtcaaaatagtaaaactacagccgcgcgtggcactcgcacgcctccaaagaaggggttgagctaccgaagcgtgcggaggaggccgtgggggaagtatgcggcggagattagggacactaacaggaatggtgtgagagtgtggcttg

SEQ ID NO: 33451 - DNA, 402 bp, Glycine max
aattacaaaatttaaatataatttatttaaaataacccacaaacagttcaaaacctacatattaatttgacctgaaaataaaaacaatcccacttctcattagttttgtctacttgaagtttaaatccccactagacagttgttgcatacatttttttctcttgacaatcgattatgggccttaaagggttccatttttgggctcgtcaattttggtatccactgcatcatatgcagcatcatgaataccaagtgcggcacgaccagaaggatcaagattttttgaccatgctgcatcccattccacagcttttgcagtactgcatgccacactaggacctcctggcactgttgcctttgctgcaatctttggaaagaacttctcaaaaattgtcctgtaga

SEQ ID NO: 33452 - DNA, 477 bp, Glycine max
aggagccgcaatgtttgacatggaatatgcaagatggttagaagaagatcacagactaatgggggagctgaggaacgggttgcaagcaccgttatcagacagtgatatgagagtgatggtggatggatatctttctcactatgatgagattttcaggctcaagggtgtggctgctaaatctgatgtcttccaccttatcaatggcatgtggacttcccaagctgaacgttgtttcctctggattggtggttttagaccctctgatctcatcatgatgctgattcagcagttggagccactagctgagcaacagataatggggatgtatggcctgaagcattcctcacagcacgcacatgaagcactctctcagggacttgagcagttgcagcagtcacttgtggacaccatatctggaggcccagtggttgatggtgttcaacaaatggtcgatgacatgagcaagcttgccaatct

SEQ ID NO: 33453 - DNA, 387 bp, Glycine max
ctatatctcttcagctaacgtaggagcttgctcatcatgcacataaaaactagatttacatttacaataaaacataaagacacaagggagcatacaagattgacgagacaaaattaaataaatatttttcttttaggaagacgctgacattcatttgtaaagcagcccaacgaaatcccctgaattatggcgagcaaacttctttcaggctaatgggttttaattacatctctcagaaacttgagaaataattctgagaatgttggactatttgcatttccgtagttgtttggcatgagttatcgttcgtgatcaaggactctcgtggtcttgatgcccaaagagaactaagggcacgaagacgtccatagtactctccaataacaa

SEQ ID NO: 33454 - DNA, 476 bp, Glycine max
atcaataaattcttatcatgaagttattatatgaataagtcatctaaagatttctatgtcgaacaatttgaacaaactctacattaattgtagacatttactataaatgtgagcccctgctttgtttaaaggggattggttacatgaaactatggtgcttaattgaagataagccatgcattgcatacaccgaattacatcacacaggtacaaagttacaacgtcattcactcattcaaggcttaattctccactgtgttggagtcttatatgtgggcagggtgtttcaggttctccacttgtccacaaaaccctcaaatctcctcgcttccgccccaatgtcatcagggtcccaagggtaaatggaacgatgtatagtagtgccggttggccatgcccgtccatcaagtttagtgccacgtacgtaattaaaaggccaaagccatatgcaaccattgcccacaagaaatattcac

SEQ ID NO: 33455 - DNA, 471 bp, Glycine max
cccacgcgtccgcggacgcgtgggacacaacacaaaccattcaatttctccttcatggctctcctcacatcccaacctaaaaaccccattctccatcgcttcaccacccttcactgccctcttccacgcttacatagaaccgttcttggtcttggctccttctctcacaacagtgctctctccactaaaaaacttaactttaacccaacgcaaaccaaaatttcccttcaaaacaacccctttacctataatttggcagtgacagccaaagccaatgccaatgctgcatttggagaaggtttcaaggaggaaggggcatcgagacacagaaagattttgttgtcagaggttgaggtgaagagagagaggagagttttctttggcagaaaatggaactctttggattttggcactgctggaattgtgttggcaatgcatctcctttgcgtctttgctccattccatttcaat

SEQ ID NO: 33456 - DNA, 676 bp, Glycine max
tagttactgagcttggattctcagatattggatccaatgcgaattcacctgatgtgggacagcttatgggcagaaagttcgccggatctgaggagatttatgttgtacctaaaacaaaggaagacttgctgaacagcattagtgagattcattatgttgatgttggtctcaactctgctggggcatacttaactaaccatgatgtgtttgagagaatctccaagaggctcatgcaaggagcttctgaactccgttttatcctacatggaactccgagacaatggagtgacaagcggcgagattggatacgaaacgaaaaggacagaatgctgcgtctgcttgaatctgaagccccaaagagtgggggaaaattcaaagtattagataggttttattttactgatcagcctccaagcatgcagatgcactttgaaattatagaaagtttagatgcaagttagtagttcattcttgataggtctactggagtctttgctataaaagcttttgagggatggggggctgaagaccctgctagcccccgcataaatccgtccctgatcattaaccagtcaatattctgcaagaatatgtcatatctgagaattatcaaaagaatagtaaaattggaccattgcatcttttgttatctcctctacgtgtcagactatctatg

SEQ ID NO: 33457 - DNA, 388 bp, Glycine max
gcaatataagaacattattcatcacatggaatacagatcacatgtaaattaaaaaaacacacatcacattatcaacatctaaaaacaaggaaacagactttaaaatagaactgcaaacatagtagaagccctcaattacacagtagtcatggggttaaatctctgatccacgactgaaattgtgatgcgtaacgccaaggtattttgacacttcacaggcatattatgaccggaattgatatggcatcagtcatatttttccgtaatgatccataatggaaagattttgactcatcacgatcctgattgcaaccacagtttaaaaccatgatagtagctaacagaatatttcatagctccatatgtgctataatgaggatacatacaa

SEQ ID NO: 33458 - DNA, 465 bp, Glycine max
caagtacattacaaatacttaattaaaaaaatcaattatttttttagtttactactgcatataatacatgaaaaaagtatatataattatgactttccagaaaaaaaaaagatagttaaaaataaaataaatactgaagtaaaaaatgtaaatagtaaaattattttacccacaatacatgaaaattaaactcctgaatatatacattgcacaaactacacagatgttcatttatgttaacaagatagaatagaaatagacttgaagcagacaagattcatggcttccacaacttcattgtgcagtcttcactaaaagttgcaacaagattcctatggggatgatgagtgacacctataacttccttctcgtggaccttcattagatgctccaatttgccagatagatagctgaagcagtatatattcctatcttcaccaacacaggaaatccattctcctttag

SEQ ID NO: 33459 - DNA, 381 bp, Glycine max
gacttatataattgatcaattccatgtgattatcattgacacggattcatgtgcatcaacatggtgggcaacccataacccacaatattttatggttgaatgtcaatttcaataataagtataaacaacaaatgaaaaaacaaaatacttgcaaaataataataccacttgcaagcttcatatcacatggagatggagccaacccaagaagcattattatcattatacaaaccacaaagctccataacgggcatccccaacacctcatccaccacacggtcatgccacgtgtccctcatggcttcattcaaccgttggatgaaccccttcttgaatttctcacaataatgcaacaaacgtgccacatggctagggtcctta

SEQ ID NO: 33460 - DNA, 452 bp, Glycine max
gttctaacagccttgatcaatctattgatagttacaacgtaacagaaaattatctatttatgcagtctctgtatacgacacacccaagcatgttacagcgcgtctccaataggccagtgaacctttgtgtgaatgatgtttccaagtagtagctagttccacagtaggaatcatggttagcagcattaagatcatctaattcagaggaagcttcaaacacttcatcatgagaatgcaaccacctatttcgatacagtttgcctttgctgctgcctcttttggagtaactgaccttttggccctttccatttttcttttgactcttcttgatcctgggtttctgctgtttcttgttttttacagtatgtgataacaatgtaggtaccggatcacacacaccaggggcccatgtcgcagtcaatttcatttgagatccaccctctttctcacca

SEQ ID NO: 33461 - DNA, 424 bp, Glycine max
gattagaattttgaatatataaactttgagcacaatcaaaattcatgtgaactcgatactcgatcttactgtttagtattactataataaattgatacacttgtcaaggagttaacaactaatggtgaccactagctccccacgatcatgcacaatgcctaaagaatcaattagtcaatgtaatcttactcaaggttgaacgtgtacatatagacccaaagaaaacacaacaagatacgtttttttatcatcccatacacaaatacacaaacaccttgggctcaactgacttgatcgtcagagtcctttttgtaagtacctccccaacactggagtaggagatcaaagattctacgaagactaggaactcgatcacaactcatcggaacttaaccacaacttgccagaatagaatctaagaaac

SEQ ID NO: 33462 - DNA, 355 bp, Glycine max
attcagagaggggttcttgatgttaggaacaattgtattcctgatcttccgtttcagagatcagtgatggagtgtgctgagttctttgcaacaccaaggatgtgtcccttcatgtggtttcatggtctcatcccttgtaagcttccttttcaacattccattcacaattagatgcccaaggcatttgggttgcaattctttgtttttcttttctttaacttcctgtgtaatgtataattggaactgagctttgtgatgatccgtctatccatgttctgagataatttttcaagtcaatgtgtgcagcccctggattatttcgtcgtagcctaagtattgtggaaaaaaagaagaa

SEQ ID NO: 33463 - DNA, 409 bp, Glycine max
ataggaaatatattgatgattaaggattacatcttgaaagtgttaatacacccaacggatacaaaatagagctaggtactagttaagcatacacatttatacatatactatgcatgcaatgtacttttaactagtgtttggagtttgccttaaagctaaaaccatcacaaaccctcaattgattcagtttattttgcggcaattttctcttacttcaccgttggaattgtctttgacatcaagcaggcccatcttgaccatagcttggtggaaatcaaagaagaacatggcttggttgaatgcataagcattcacaaagttcctggttctggggctattgtagagtgtttggtctgatgtaagaaccccatttctcctcaacaaagcgttgaagtaaacgttgtcaaaa

SEQ ID NO: 33464 - DNA, 410 bp, Glycine max
gtttggagaactctgctagcattttgtttggtctattggcaggagtgttttttgctagagccaaaatccgagagagatctcaatcctgaagaacagtaaatggaatttgatttctgggttcagttggacattcagtccaagtctctgaggtgttgtcaagagatggcatcagctaaactaaactgactctcccattcttcatatatccaacttggtgatggttcatgattccttctccaagggacaatttttggtccatgttcgtttggatcttttgaggaaggggctgcttggattgattgcattggctcagactgggagggaaaattgccactaattttgcatcatgtgacttcattattcccatgtatcatcacattatgatttgcttgatatgaaaattctaattg

SEQ ID NO: 33465 - DNA, 461 bp, Glycine max
  unsure (1)..(461): unsure at all n locations
nnnnnnnnnnnnnnnnnnnnnnnnnnnnnnnnnnnnnnnnnnnnnnnnnnnnnnnggtcacaatatacaaatctatgttattaaaattaaactcaagaagaacaaaaaaagtaacaataacaattgttttgccaagcccaaattacaaggggctgtgcacaaaatgatattaaaacaacgagagcaaatacacgctctccccctacccagagaaagaagggtcagttttctataacagaaattttacattcaaagatcaggaaaagaaaagagaaaaaaagaaaaggaaaaaactattaagattgcccaaaatgaacctaattttgcaggcctaagtgggcacaaccatcccagaattgtgcgataactgtgacatgtaaagccaaaagatcaaaactaaaaacataaactgtatgaaaagataaaatgacatcttacatacccttctctgcagcacaaaa

SEQ ID NO: 33466 - DNA, 425 bp, Glycine max
gaagcaacaactgtcggaaacatttttagaggagggactcactcattctctatggcaacacaattgtgcagtctcattgttagttattattctgtcactaatgaataataactgaaatcacagtcaaagtaaatattgcttttgagcaagcattaattgtccaaaacaagtaatacacaagcatatatcatcatacacaacacaaataactctgattttctgcgccagatgacagaactcatcactcatcagcccacaaaaggaccatcaacatggtcatcactgcagtagagtcctggccgtcgtttgaaacctcccctcttcagcttctcccttgccttcaaaacaatctcttgatttgtgacagcaccatcactctcctcaatcacagcctgtattgcattgctaaaagctccataagcact

SEQ ID NO: 33467 - DNA, 730 bp, Glycine max
cccaagttcattgttgttggtggggtctagttcattgggaaccttgttgacatagaggaccgtttggatgttgaaatctatgaccctcttctggggtcttgggaccttggccctcctctccctcctgatttcagatcaggaaactcttcctcttccctctcctctgctctcttccgagagaaattctatgtctttgggatatactcttgctttgtttcgtcctttgacttgcataaaagggtttggagtgaggtccacacccttaggcctcatcatgggattgtgttctccttcttggtggcttgtaaggagatgcttgtgcttgctggggtgtgcaatttccctcatggatcttcttcctttgtgctgtggaaggttgatgagaggaccactggggtttagccagattgctgtgatgccacatgatttgctctgtagcctttttgatggggatgaggatgataaatttgctagcttgaagtgtgttgggttgggggatttgatatatgttttcaatgaggattaccacaggatgtaccctgcttgtgtgtgtgagattgatggggagagtgggaggtgtgcgtggaggagagtgccccagttgccatcactgatgaacaggtttcacaaagttgttagcttctgttcaactgtttcactgcatagtattctcggtgaacgtcaaccttgtggtcttcaatactagaaaacgaagggaatactcaatcgc

SEQ ID NO: 33468 - DNA, 428 bp, Glycine max
gatagaagagctaattttattacattgtaagtataacttattacaaactatataccataataatgagcagggattttcagtaaaggcacacatgggtaatcgaccaattttcaacacttggacttgaaacttggccaacgttgaaccataccataccttgcgctttagccccatcagtgtcatcaccataaccataaggcaaatgaaaacgacccgcttatcctatcttattacaacaacttataatattactataaaaagggtaaaaaaaggaaaaagaagccttgcctaaaactactatcctctcactatttccttccactaaaaccaggtcccaaaagctgcaatgcaacctttttttctccctagaaaaactagatgttttatttgaacctaaacactagcccaaacacattcttcaatttcat

SEQ ID NO: 33469 - DNA, 500 bp, Glycine max
atgacattgagccatggatgatgtggggctattatctatctcctatgatgtatgggcagaatgccatagtaatgaatgaattcttagataaaagatggagtaaaccaaatacagaccctagaattaatgcacctacagctggaaaggtgcttctcaaatctagaggcttctatacagaagagtattggttgtggatctgcattggagccttgcttgggtcttctcttctcttcaatctcttattcattgtcgctttaacttatttgaatcctttgggttattcaaaagcagtcattgccgatgaaggtgacaaaaagaataacaagtcatcctctagccaacatattcttgaaggaacagacatggcagtgaaagaatcttcagaaatggctagttctttgaaccaagaaccaagaaggggaatggttctaccatttcaacctctttcacttgcattcaatcatattagctactatgtagatatgcctgcagtaagtctc

SEQ ID NO: 33470 - DNA, 445 bp, Glycine max
gaaataaattctctcatgacatcatgccatgtattaattgtaagcttgtcacattatcttaaaggttgtgacttctgttctttcacaggtaacaacttgctcaacaatctatatactcatttcctaatccatattggtaggacttactcaaagtggagattcctgaagcactatgagcacatgaactcctacatactaataaataaaaaatttacacgtaatcctaaaagttatatatatataactttgctgagactatctcctttggaaattcaagaatttgatgccataggcaaaaacgaacatgaagaggataacccagcctacatgagcagcagcaacaacgggaaggaaatcatagtcaaaacccaagttttgtttaaggaattccttcaatcccatgcttccagcacctggtatctccaattctgcatttttgtcaccc

SEQ ID NO: 33471 - DNA, 558 bp, Glycine max
tttttattcgatcgtataattgagttggtgcagagaaatggcggatacaattgtggttttcctgatagaaaagttgacgaggttgttagcagaagaagccaaactacttggtagcgcgcacgacaaagtaacatcgttgcgcaacgagctgaggttcatgaacctcttcctcaacaactcccaaggcaagcgcaaagatcacaacatggtcgcggaactcgttgaccaaatcagagacatcgcccacgaagccgaagacgtcatcgacaactacatcagcgacatgatcaagcagagaaggagaaacatgctggagaagtttggccgcggcgtagaccacgcgctcatgcttcgcaacttgaccgtcaaaatagacaggatcaagaccaccatcaacgatatcttcgacaataaggtcaagtacggcatcgaagctggaaggagagacagcgaggaagaagcagagcgtatacggaagcaaagaagagacgtggaggaacaagaggttgtaggatttgcgcatgactccaaggttgtaattgagaaactcatggcatc

SEQ ID NO: 33472 - DNA, 451 bp, Glycine max
caaatacgataaattaataacttagatacattatttaacttaaacaaataaacccaaatacaagctaaattgggaaattctaatgtattatggccatctatatattcttaaaaatcaacttcgccacccttgaacaagtaagcttcttccttttacacattattgtgtctatatatattaaagaaaaaatagatcactaactaaagattgaattaattctttttgcgtgcagaattttcctttttcaacatttcaaacaagcttccatcataaacacttcggattgtttccttctgtagtaagccattcttgtctttggcaagtttgtaaaggactttccattcaaccaagccaccaatccttcctttgaaatctttgggctctctatttgcttttagcatctcctttagctcatcatatgttaaagcatttggatgagtatgtgaatgtt

SEQ ID NO: 33473 - DNA, 464 bp, Glycine max
catctcattttcctcttgtgtaagaggaggtaacatttctgcgtgttagggacaagatgaagcagagcattcttccttcagtttttcttggaattttggcttgttggggtgttctcccggttactgcagaagaccgatatcagtacttcacatgggaaattactaatggaacaatttatcccctaggtgttcctcaacagggaattcttatcaatggtcaattcccgggccctacagttgaagccatcaccaatgacaatatcctcgtgaatgtcattaacaagctagacgaaaaattcctcattacatggagtggtatcaaacaaagaaggacatcatggcaagatggagttttaggaaccaactgtccaatccctcccaaaagcaactggacatacaagttccaagtaaaagatcaaattggaacttacacttatttcccatcaaccaaaatccataaagct

SEQ ID NO: 33474 - DNA, 434 bp, Glycine max
acttggcacttgacagtcacaccctcgttactgaaacttgtaaactaaataatgatacgtatgaaggaaaaatccaaattacaacttatgccaataatcacatcagattataaacccccttccgagtctatgacttgggtaggtgtttagccttgccacaaatcagtgcattgggcggaagaagagtctccgcgtatacgctctgctcattgttccacaccctcagatacaatgcttggcctaaatacctttggggccagattgcagatctcaagttccacatacccttattgtccaaagataccaatatggcactccaagaatttggatacacctgaacagtgtgtctagtcatcccatcaaccaagttgtaagtctttctcgaatcagggatccacaagccattgtcatatccaacaacatagaagctagat

SEQ ID NO: 33475 - DNA, 456 bp, Glycine max
cttggttttgtccttgtggacctgtgtattgatttagttttattattgaaaaaataaataataattggtgtgcaaaaacaggtgaatgggagcttgttgccttctgctgtgatttctctttactgtgcttatgtgtgctctacacggggctttctagtgaacctcgtgactatgagtgcaatggtctcaacaagtccagagcggtcagtacaagtacactcgttcttggcatgctaacaacagtgctatcggtgttgtattctgctcttcgggctggatagtcgaccacattcttatcaccacaatcttcacctagaatggttgggagcaaacctctccttgaagaagcagaagaaggaaaggcaaaggaggaaaaggaagcacaacccgttatctattcgtattcattcttccaccaaatatttgccctggctagcatgtattcagccatgcttc

SEQ ID NO: 33476 - DNA, 475 bp, Glycine max
ggtctcttggtggatctactcttttaaaccaaagaaacagaaatgttggagtcaaaaggcctcgacgatgaagctcttcgggaagacgatccctgcgccggagatctccgccggagctccggcattgtcttctggcgatgctgatgctgttggtgttgtccagaaccatggttcttcaagtgtcaatggggatggtgaagagcacgagattgagcaggacataatgggagaggaaacaactgagagtgagaaggaagatgaagtgaccaatcttgatactgtctcaagaccaggggaagtgtctattaacccctctaccaagaaggaggatcttacattgaaaacttcaaaaaagaccgaacaagaacaaggtgaaaattcccaagataaaacactgagaaagccggacaaaatactgccttgcccccgctgcaatagcatggataccaagttctgctactacaataattacaat

SEQ ID NO: 33477 - DNA, 515 bp, Glycine max
tgtttatggtcctgttggagaacaacattgtctttctcttccctttctcctctcattgatgttccttcttccccttctcttccccttcagaaaaaaaaaaaccaacacacttcacatccgttcttagagctcacaatttctcactgaataacaagaatcaccattagccttcatcacccttctgttccaaaactgcagatctcacacctatagttcctcttatatattatctctatgcaaaatgaacatgtcagatatgatatcttgtttcaacgagaacgcagcgaatgtgtcacactcctcatgttctagctactcaaacaacgcttgcatatctccaactagtgtcacaccttcatctcaaaattcagtgtcttctgtctacaaaaccaccctctcaaaccaaaagcagcttctgatcacagtcacgtggtgcaagagccactccaaccaaggactcaccataaccttcggcgaagagaacaacaaccctttggcaccatctttcagactca

SEQ ID NO: 33478 - DNA, 567 bp, Glycine max
aattcgcaaaaccctcacagttctcaatcaccttcatagcctttccacaatcttaacacccacacacaccttttctctctcaatcaatgcttcaattcaagctgcaatccacttccgtctatcattcttttcccataattggccatctcagattcttttcactcttttccttcactttctaactcttttttcttcgggcagaaattcaagtcagagataccaacctaattctcagacccagtgtaggattgtcttttgggtgctggatcttgctacattcggggcattttcttttcttacatatcaaagcctggatctaattgagcacttgaaacactgcaattgttggggtttgagacagttggtgattgattgtgatcctattgtatttacccttctaattttggaagttaggtttaatctttgttaggactaaaattggctatgatggggggtcaatccagtaagatacctagcagtagtgatgttccaacacccatcaaaatgggtacccattctctgtatgcggctgatttgagttcttatgaggcggcatgtgttgaagat

SEQ ID NO: 33479 - DNA, 589 bp, Glycine max
ttcacgcgtccgggatttttcagtgctattggagtaaaatcgacactaatcataatggaggtcataccttttctggttttagctgttggtgttgataacatgtgtataatcgtagatgctgtgaaacggcaaccctcaggtttaccagtagaggaacaaataagcaatgcaatgggtgaagttggaccttcgataacactagccagcttatcagagattctagcatttgctgtaggatcatttgtttctatgccagcatgccgtgttttctccatgattgcagctccggcggttctactggacttccttctacagattactgcttttgtagctttggttacattagactttatgagggccaaggatcataggattgactgctttccatgtgtgaagctgaatccgccctctgcggagcagaatgaatgtattaggctagaaagagatggattactgacaccatatatgaaggaggttcatgctccatttcttggactatggggagttaaaatcttgggcattgccgtatttgctgcatttaccttagcaagcattgcattatgcacaagaattgaagctggtcttgagc

SEQ ID NO: 33480 - DNA, 499 bp, Glycine max
ttaaatggtgtattaaaacccatgaacatttgaatttccaaggtcataatagtcagtaaagggtataattgatacaaaacctcaatgatagaaataaatgcaaaccaaaaaagcaatagaaactaatagcatggcaaaaggatccgtaaagaactgcggggggcaaaagtaatcgcagaagattgtgagagcttaagtatgcatgaaaggcagagttatgtagaagactgctcctcagggggtggtggagcttctttctggggtaaatctgcagtaccgttattagtggtggcatcctttggttgtgatccaggtgcggcgtctggtgcagatccattggctttagatgctgtttcttttccgtcttttccatctttcccatctttggcgtctttagcaggtgcaggaggagggggaatcatgtgagctggtggtgtatgtttcagcttcaacaatatctgcctcaacctagaaagatctgtgggtttgccaggctttg

SEQ ID NO: 33481 - DNA, 728 bp, Glycine max
ctcgagccgattcggctcgagtgctgagtgatctttgtaaatcttgccaggtaagtctgttgcttgagtcatcctacttccaatcactcctctttttaagtcatatctgaactcttgctgctatgcatgataagctagagctagagtgaggaaccatcatccatctaatttaaatgtcagctatgtcattttttctcccttgtgtatgtacactacttcctttttccctcatatattttcttgtgtcaatgaagagatgcatcctatgagcttggtttcaagtgattggacttattggggctcatggtatttgttacggctaaggagtatatgagtggcaactgtgtagtattttacaggctagtttctgccattttatggggaattcccaagccttgatgatctgaagcatatatttcctcctccccttcagaaataattgccagtggcgattctcctcatttggccaaattgtattgtggctggtagtcatgcttctctttttttgcatgcctgttcatggtgttctaattcacctgggctgtggccttcatctatcatgcaattttggtggtaattggaacactaacatagatagtatagctcattctgcagctggacatggagtttcaagctaggtggtcttctgtaggcctagatccttttgccctgtaaaggattgaatggaaaatgatgtaaactgatgaataatatatcaatagtctaag

SEQ ID NO: 33482 - DNA, 471 bp, Glycine max
gactacaaaatcgtgttttaagatatgcaacgaatgatttctaatatagccctcttatcgccaccatcagcaattaatgacttaataaagtatcatcagcataattgcttcagcaataaaaataataatcaagctcaaccctgtggtatggtctatccagtgaacgaattttactaacaatgtgaattttcacaactctgcaagtaccttgtgcggttgtgcctagaactaagcatacttgaaacgacttctttgttgtctggaacatcttgtgattgtacggtagataaaaactctaatccagatccagagtcttcttcaaactttcatagaccacataagtaatgcttgcagctggcacaactttgaggagatttggaaagagtcccttgtagaaacctataaagccttcaagctgaaaagttctccgaaaggcatcaaacattcccttgtaagcatcggaagtgttgg

SEQ ID NO: 33483 - DNA, 750 bp, Glycine max
gagactagtcagacatggcatgcagcaccactttacatgcttctattctaaaacttctcatcattttcttattcgctggttgggtttctctttggcttctgaagccaacccaaatatggacaagaaaatggaaacaggcagaagatagcgccaatgatacaatttttggatactatggtcttagctttgctgtgtacgcgtttcctataattgctattgctataattggacttcttttattggatttgaaagctggatatcaaagaagcagaagcgcaaggagtactccatcaaaatcaaacttcttctcaaatccactggtggtgaatactacactgggaatcttatctagtattgaaatactgatagctttccttttcattgtcttcttagcatggacctactactctcgtatttatacagacttcaaaaagttgatgccatacaaatcactgaagttgaatacgtggcaactcaagtatcacagaatagcaacccggttcgggttgctagcagaagcttgcatggctttgttgcttcttcctattctaagggggttggccgtgtttcgcatacttggcattcaatttgaagcttcagttagataccacacatggattggaactgcaatgatactttttgctacaatacatggcgcaagcactttgttggtctggggggtcagccaccatattgaggatgagatttggaagtggcaaaagactggacgcatatacctcgctggggaga

SEQ ID NO: 33484 - DNA, 451 bp, Glycine max
caacaacaacatcaactctctctgttttcggttatcacaaagcacatttgacatcactcactcactttctctcttctcttttcttcatccgttctactctcacttccgatccttcaattaatcatgttcataaagaagctcgtggagaaagcatccataaagatgcctcttggaaattcattggatgggctaaaaggtagtgatgtagatccacgtttggtatttcatcaaggggtaccatctggtggtgccaagtttgcctatgacaatattcagaagatactggccctatctaccaaggatggacggattaaactatttggagaggataatgcccaagtcctacttgaatctaaagagcctgtgcctagcaagctcttactgttcattcagaaccaaggcatccttataaatgtcactttcaataaccatattgaggtttgggacatag

SEQ ID NO: 33485 - DNA, 359 bp, Glycine max
cgaccgaagaccactccgagggttgcataaattgaaacactttcataatagcaatattcaaggcaatcaccctattaatcagaacaaagccaatttggcaaacataaaaacctctctagcagcttgatcaagtaaaatcctgcctactttagccaccgcatatttagaagaatccaaagcatttacatgtaagggaaaaaataaacatttacgtttgcgatggatagataaaaatagctaaaacatatccaagttgattggaacactaaatttttggtaaggggtctcaagcaacatggttaattggtatgcactggttcaagaaggctcaacttagtattgataaacataatggggtg

SEQ ID NO: 33486 - DNA, 503 bp, Glycine max
aacagattcagattaagataattatttcggaaggtggagtataactcctagacagtacatccattttcgatccaggtgttcttcctgggtgcattagctaaggggcagaaaaccatgtttgtcagacagctaggttatcctacgtatcctaattattgtttgtattaaggcaaggaaaaataaaatactagcttggatcactaaggcgaccagattggaagaaacgccaaattgaagaattctaatgctgcaaaatgactccaaggcattaaatccataatcgaaactttacagtaaaaaggtttttgtttcctcctcaaagttgaggcagatgtggtctcttttccaacatttcataatgtagaacaaaattatccttgcggacggtttcaaatatgcttggatcgaaacagtgataagatcctctctcatatgtgtttgttttaaccagcggctccatgttgggaactcttattaaccataaacgatgttctttgtgataa

SEQ ID NO: 33487 - DNA, 357 bp, Glycine max
aaatattcaatttaatagtgttccaatatcattactcaatgggttttataaaaaaactacgaggaatattacatctttttttatttacaatatcttctcaattttattcatgccctaaaatgaaaagatacaacctgttctaaccaaaatcatgcccaagatttaattttaatttgtttcatatacaacaataaaacttcgacgacataataagaatttaaccagctgactaatctgcatttacatttaatgaaaacctttattatgcagattattattgacatgaaactacataaacattaatgccaattagagaacaataccacaagcactcacttacgaagctgcgtctaagtt

SEQ ID NO: 33488 - DNA, 499 bp, Glycine max
gtcgataaagtctttagaagaggaaaagaaatggtcgaaagaacagaaatgggaaatgataagtcgtgtttgggtggagatgttgtgtcatgcagcaagccagtgtagagggtttcatcatgccaagcagcttagcagaggtggcgaattgcttacccatgtctggtttttaatggctcatttaggtataactgaacagtttcagatttcacaaggtcacgcaagggcaaagttgatacacagctaaaattgttttgtgtccaaggttttaaagaacggtcttcgaccaccattttatctacaacattaaggtttatgtgtgtccatgcattgctgttgcaattgtgactgtattgatcatatttaattttccacaatgtcaagaaagtggccacaatttaaaaaaccttttaaccgtatcacactatatatgttgtgttctaatatagtaacttgtaatttgtgtgttgtatccaataataatgatattttgtaatgt

SEQ ID NO: 33489 - DNA, 612 bp, Glycine max
  unsure (1)..(612): unsure at all n locations
gacatataatcaagtgttattaatgatcttaaattaaatttaaaaacttaaatacatgtcttgtaaatattgatcaagaccatagacagcagaacaaccaaataatttctctaccaggtgacccaaggaggggaaggagaaagataacacaatgctatatgaaaatgttgaaccctgtccgaaactaacatgcaaatgttccaaccaagcaagttaaattcacagggcaaatttatcagcttacaagagttaactttggttaagtgggcggctcaagattgtattatacaacttcaaaataaattatctaatgtatcttgcatatataataataacaagaaacttgtagacagactgatctagaaacttctgaaaggagggaatacacagaagttggacattaattaccaaaaactgcaggtcaaatgctgctttaatcagttctgatgagcagatagagcgaaattggagacattagtgtctattgcccaatagaattctcatgtagtaatacatattctcgactactgttaccaaatttaatggtgtccttttccttaagttcgtaatatcgttgaggttcaatgggactatcanttatgaaagttttgt

SEQ ID NO: 33490 - DNA, 460 bp, Glycine max
aatcaggtcaactaaatcaagatattttataaacaataagttcaccaaataaattaagctcaaggccttatgtttccaagtttgagaggggagggggactatgacgatatcaatattcatgcaatcaatggccatatcttacagaaaaacaccaacgaatatcaatttaacccatttacaaaacacctctctaacagcaaaggatttatcggatgttattttccagcctccaatcttcaaccaagcagaagtttcaaaggaacaatcttcatgtatcatttggaaatacacaattttcttacaataatgtataaataatgaggggcaccacactctcaaactatatctcaggattaagattttgtgaggccaccaggctttttgtaagccatattgctgtttctctggatgatacagatacagcatcttctccaaatggtctcagcacagcagcaagctc

SEQ ID NO: 33491 - DNA, 524 bp, Glycine max
gataatgtgaatcaataatatattgctcctgtccatgtatgcaatgacataattaccaccgacttttggtgaacatctgaccataacttttccagaatctcaactactattaattaccaaaagcctctacatttgaaagaatgtgatcaaatttccttgactatggcaccatgttacaccaatagacaccaacccgtaaacagagatcaaaattaattaccaaagaaaaaagacgaacacataattaattacctaactacaatggtacataataatgacggaagtacagttacaaagaattttgagcagccaaaacccgaaaaatcatctataacaatcttgctggcgtcttaaccaatagcatactcgagtgtctccaattctttaggccgccacatggacttctggacacataaaaagcccaccttatctttagagtaagtcatgcgaacctcccactgcatggacttcaccatactttccatctcgttaatgatttcaacagtgtcccggacaataagctt

SEQ ID NO: 33492 - DNA, 571 bp, Glycine max
caatgctacaatttaccaaattttcttccacaaacccttttacaatgtatcctcttcaacaaaaaagaatgaagaaaaagaaaaagatggctacaaactatgaattgttagaaaggacaaacaaaactatttctgactgtattacaattacaaccctaagcatagaatgaaaacccaattcacgtataaaatcctagattctcttcactttttataatacagtaagagaattatgacggctaaataacctcagattcaactatagttatgacagcttctttgcaccattgggctgaagtgtaggactttgtgcatgaattattgccacagcaatggagaaagactgtagtgcagatagaggtggatggaaatgaatataatataaaccatcgtgaacatttaccatcctcaaggtggggccgtaatcacttgaaccctgaataaccaaatcaactgacttgcacccgtctcctgtatctattttagacataacctcagctttgttagatcttctctctagtacagtcagagggcacccctcatcccaaccaccacagtcacagtggccacc

SEQ ID NO: 33493 - DNA, 592 bp, Glycine max
ccatcataagtaccgttttttattttatacaaaggaagttagaaaatacaaatcgtttcaacattttcttattaaaataataaaaaaaagcattgagctttattcataaaattggagaaggaaagaatgctactatggttgtgcagtgggttttgcgatgttaggacggaacttgcagctagttttgaggtcttctcctggcttgttcccggcaaatccagcatccacccacgcagagtagcctcccccccatggctacaatattcttaaatcctgaatcaagcagatcaacggaggctcggagtgatcttcctccactattgcaagccacaatcaaatgatcctcagtcttgcatattgctgccacctggtcaacaaaatctggatttttcacccgtcctgcttctgtgatgaagacataggggacattatgagcattctcaacatggcttttgttgaattcctcaactgacctaacatccagataacgataaccagatgaattgagcagatctttggcagcatggacatctatggttacaacattttgatgatccttgggggaatccattcctttctctatggaacaaag

SEQ ID NO: 33494 - DNA, 510 bp, Glycine max
ccactgtgctcatttattcactcacttagaaattaaggtcaagtgatatttgcttcttccttcggttaaattgccggatactgctttacatcaatgagcaatagttaaatctgatccctagcaagccgaagcatcaatccaagattgcagagacaaagaaggacccagaaattgtttgaattaatggcaaattcatcttccggagcttctcaaatgaaatttgttcttgttctttttctcctgtttatttccggattgatggatgtagcatcagagcaaatgccagcagatagcgttcctcagataaagtatgatgtctttgtaaactttaggggcgaggacatccgtcacagttttcttggttatttgactgaggctttttatcaaaagcaaataaatgcctttgtagatgataaacttgagaagggagatgaaatatggacttcacttgatggagcaattcacggatcatcgatttcattgaccatattctccgaaaactatacttct

SEQ ID NO: 33495 - DNA, 451 bp, Glycine max
aaaattataaatagtgatgtcatcaaggtttcatatttcagcagaatgatcttgacataaaagttaacatggctaatctgaatattcctcctggggtaccgccaacacctacaatgatgatggacttgacataatatacagaaggatagcatttatgctccaagtgacttacattggcttcctcaattacattgttgaggttttgctaagtagttgaaaatacaagcacttaatagtttacagagccacatttccttctaatttgcccttgtattcctgtaagtactccaacattactaagcttcaccatggatgcagcaaaatcattatagaaggaatattggtcggtgctgtaaaaataagccatagaagaagtccttcgatccgaaagtagtgccatgtcagattctagaagccctttgttggataagagatttctataatactcatt

SEQ ID NO: 33496 - DNA, 452 bp, Glycine max
ggcaaagtacattaatttattacaaattttcatctgtttaggggacaaacttagcgacacatggatacaaagattattttttgagctttgacatcaagggttcatatttctacataaagatcttgacataaaatctaacatggctaatcttcactcttctggaatactaccaccccctaccatgatgatgatcactccacataatatacaaaggatagcattcatactccaagggacttattggcttcctcaattacattggtgagggttttctaagaagctgaaaaatacaagcactcaatagtttacagagccacatttatatctaatttgcccttctgctcctgtaagtactcctacattactaagcttcaccatggatttggcaaaatcattgtagaaggaaaaccggttgttgctgtaataataaaccgtaggagcagtccttcgat

SEQ ID NO: 33497 - DNA, 688 bp, Glycine max
  unsure (1)..(688): unsure at all n locations
gttctactttttctttgaatcacggaacaataaggatgatcctgtagtgatatggttgactggaggaccagggtgtggaagtgaattagctttgttttatgagaatggtccttttcatattgccaataacttgtctcttacatggaatgattacggctgggaccaggcatcaaatattttatttgttgaccaacccactgggacagggtttagttactcttctgatgatagtgacattcgtcatgatgaagccagcattagcaacgatttatatgacttcttgcaggagtttttcaaggctcatcctaagttcgttaagaatgacttttatattaccggagaatcatacgctggacactatattccggctcttgcatcccggataatccaaggaaataaagaaaatcaaggaatttatataaatctcaagggtttagccattggtaatggggcaacaaatcctgcaattcaataccaagcatatccagattttgcattagacaacaaaataattacaaaggctaattacgatgaaatcaacaagttaatcccagattgtgaacaagccgctaanacttgtgaaactcaaggtggacanagttgcgcgatcgcatttaatacttgccanannatattctaccatatcctggactttgctcccggcattaactactatgacatcaggaaa

SEQ ID NO: 33498 - DNA, 528 bp, Glycine max
caacacaacatcgtacatagacagtttgatttttgtgttggcctttcgtttgtttgtttatttaggatattgtaagagttagtatgataaataacagcacgtgcatcggaattttcattaagttttttttttttttttcagttgatagtttattgcctcagatccgccatggacgcagctccgaaggcctttgtctgatttcctctttctttcacttgtcatgggactgaatcgaactccaagacataaccctgttcttccaaccaaatctccaattctcagtcgttcacattctcgttctcagaccatgaaaacaacacagatctttggtgtgtctctctcactcattcttatcaacctggctgctataatggagcgtgcagatgaaaaccttcttccatctgtctacaaagaagttagtgaaacatttaatgctggaccatcagatttgggttacctaacattcgtaaggaactttgttcagggattatcatctcctctagctggtatacttgttatcaactatga

SEQ ID NO: 33499 - DNA, 502 bp, Glycine max
aacaattgctttattaaattcataaatatacatgagtgctcatatatcagattttaaatattgatcaccgtcgcggagcgttgattaaaacctcagtacaagtgacacgcatatataactaaattaacttgccaccacagtattatccaaagagctgtacttccatgcagaaagggttaacactcatcataacctcccagtacagaaagactataaggtctcagactctcagtaactatcagcgatactcatcagagaggaatatgttccaaggattccacaaatgactccgaatgcagcaattgcaacactgagtacaacctgtgtccttgtagcttttttcccaataattttcagaaaacataaacttggcattatcgctgacacaagtatactaaagagagaaccaattaaagccatcacaagcccaaaaaagggaaccaaaaaggcaacacaaacggtagatgcaacaagtgttgtcctaagaagaatgaagcaccaa

SEQ ID NO: 33500 - DNA, 510 bp, Glycine max
atctcatctcatggaagtgactctgatgagcttgcaggatcaccactgtgcatgatcaccaagtggaagttgttcgttcttccgtttttggcagacaaattgagaaaaagaatacaatttcagctcttcttttggtctctgaaacgtttttttccccttcatgggtgaacacgcaattcctcaatgttttcagcatctaatggcgaaaaaattgctctttttgttgacccttttggaaattctcctttgtgggcaatccaagtttatggtgtacaacacttcccaaggcatagtccctgggaagctcaatgttcatctggtagctcacacccacgatgatgttggttggttgaagaccgttgatcagtactatgttggttccaacaattcaattcagggggcttgtgtgcaaaatgtcttggactccatggtgcatgctcttctggctgacaagaacagaaaatttatctatgttgagatggcctttttcaagcgatggtggagagatca

SEQ ID NO: 33501 - DNA, 331 bp, Glycine max
atataaagaaggcacaatcacaataatttattattctcataattggtgcagaagcattcagcagtcacatcacatcccaaactaacaaatctcaatatgaagaaaataatggctatgaccaaaagctagcaggaaaaaattgcaagggcaagaaagaattgcgtctatatgtatttgtgtaaaatataaatatgtaacggtaactcttccccgacaaacgccttgtgattgcttccgagtgtcctcagtaaccaaagccttcaagcgaagatctcaaagagctgctattgcccacataaaacaaggcaacaacaaccacaactgcaattag

SEQ ID NO: 33502 - DNA, 629 bp, Glycine max
ggaacaaatcaaaccaaaactttcttatgaatcataaacaattaatattatatatatagcattctactatatactatatataatttctctttccctctctaacatctaaaatccaatatcttctatattttcccttcatccacccccgcttgagcgtgaccttgggtttacgttgtacgtacagttagagcaacatatccttctttttctatatattgcttttgtctcccaagacatattagactccaagcagcacgtagtagagtatggttatgggcaatgcaattagcatcccaaatataaccgcagtactaagtatatctgcatggagattgtattctttggcgaacacaaagggaacgataccttggggaagtgcagcctggacaattgcaacatgcaaaagaactccacggagtccaatgcctattgaagttgcagcaatcacagctggacctgtcaagaacctaacagccatagaaaatgctgccacagattttccacaggcaatgatcttgggttgtaatgccatgaacagacctagactgaacatggccattcccagaccagcatcagacagtattgagatggaaccttttacaatagttggcatttcaatgtgccctcgt

SEQ ID NO: 33503 - DNA, 466 bp, Glycine max
ctggaatacagaaacatgagtttcaaactctactctttcattcataccatggaactcagaccttccttcctggttcttacttcattcctcttgttgctgctttggcttgcaagaatttacaagcagaaaatcaaagtaaggagtgtggttcataagcttcccccagggccatggaagttgcctctaatagggaacctgcatcaactggcaggggcaggcacacttccacaccacacccttcaaaatctatcacgcaaatatgggcctctgatgcaccttcaacttggtgaaatttctgcagtggttgtgtcatcctctgacatggccaaggagataatgaagactcatgatcttaattttgtgcagaggccagaactcctttgtcctaaaatcatggcctatgattcaacggatatttgcctttgctccatacggtgattactggagacagatgaggaaaatatgt

SEQ ID NO: 33504 - DNA, 466 bp, Glycine max
aatacttgaaattttttacgataatatcttataattgaataaagcaatactacagggtaaaaagtcagatcctatttggtgcgaagcacatacatacagcaccgctaaacaatcaccacaatcttcctgatgacatcaaggccaatacataatttaatgctccaacaaagcctcgtaaccttagctgaattgattgtacaccaatcagctaagtctaaccttactctctccacacgatcaaaaaatgaaaagggaaacaaaaaaacttaggctccaccacagaaaataaaatggagcatatgccactgtttaagttaataacaatacattcctttttcatggatatctttcttaaatattatcttctctgatccactgtcttcatcatctaattagatcacgtaacttgccttttgacaaacttgattgtgcaagctgagccaggaaaccttcattcatatactcg

SEQ ID NO: 33505 - DNA, 731 bp, Glycine max
gttgcaagaaaatattgtttctattaaagcagatcttaacttccattcaatttacggattcttacagtacatttctaacctacatacaagtttccttataacctccatgtttcccatgttctggcatgctaagatatgacactcacgacattagagaacaaataaagaaacaaaacaaccaagtcggggcaaggttactaccaaggctttcttgcctcacgattgacaatgaatgctactgcctttttgctcattttattgcaacacaacttggccttcataagatccagaaccagccaagaactgaaccaccaactaagccaaacccaaggaaccctgtcatgacaatagcagataactcagattctgacaagggcactgacttgggtgttaaaatcataaggacactagtaagataaccattgctaaatcctagcagaaaagtcagaaccaccattggtacttctgttttcagccactttggtccatgaagacacactacaaagagtggatagaatagtagtcttgctgtggctgcccatattgcccttgtcatagattgcataacatagaaggcagttaaagactttcccattagatcagctaagttataaactgttatcagtaaaataggataccaatcccttagaatcttggattcaagatcttcggctataaatccagggaaaatagacaaagtcactatgtagattatgaaaattccaaacgct

SEQ ID NO: 33506 - DNA, 477 bp, Glycine max
gaatcttacaaggttgatgaaagaggattgaggtggttctacactggtgacatagggagatgccataaagatggttgccttgagatcattgataggaaaaaggacatagttaatctacagcatggagaatatgtgtccttgggaaacgtttgaggcagctgtttctgccagtcccttcgtagacaatatcatgttccatgctgatccttttcatagctactgtgtggcactcgctgtagtttctcattctgctttggagcaatgggcttcaaagcaagggattgcttattctgatctttcagaattgtgcagcaaagaagaaactgtgaaggaggtgcatgcatcacttgtaaaggaagcaaagacggctcgtctggagaaatttgagattcctgcaaaagttaagttgctttctgaaccatggactcctgaatctggcctagtcactgcagctcttaagctcaagagagagatact

SEQ ID NO: 33507 - DNA, 505 bp, Glycine max
gggttgctctcactcgccacattcgcctctgtcttcagcagctatgttgcagctgagggaatccgggaagcaattatggcatccgtgattatggacaattattgtgttgtgagggatgttgctgctttgaattcgcttgttgagtgctatttgtagcaatggtaggactcttgatgcttgtgattacttgcaggttgccaagaaattggtccggccggataccgatacttatgcgattttaatggaggggtgggaaggggagaatggttgtagttggtgctaaggagacatttgctgagatggtgattgagattggatgggatcctttgaatgtgccggcttatgattcgttcttgtgtacacttgttagaggacctgatggattgcttgaggctattaagtttgttgattcgatgagggataggaggtgttttcctggtgtgaggtttctgaaggctgcattggatgagtgtcttaagagtcatgatgttaggactgctgagtt

SEQ ID NO: 33508 - DNA, 519 bp, Glycine max
cagaggctttcgttctacgtagcagaaagatggcttctactcttgcgcttcagtttcttcctcttttccttttgttccttatgagtggccacgtcattggtgctagagatatgaaggtagaactgcgagatcaagaagctagtggtattggtccaagcccacatcagtgtccaatgacgagtcttatggccaagggtacataacctcttcagaatccgctgaacctaattacctagcttcatatactgctgcttagcgcaaccataaccatgaaaagctccatcaaccttacatagctgggtacacaacaagcaatgctgcaaacaaagccaatcaacacatagcagggtatagaaccaaaacctatgattccaatacaccatacatagctggttacagaacaactagtgcttcccataaagcccaagaatccaatacaccttacattgcagggtataggaccaacacttatgattctaatgcaccttacatagctgggtacacaactagtgcacatat

SEQ ID NO: 33509 - DNA, 392 bp, Glycine max
agtaagaaatttacctttgtattgcatccactatttagtggtaaatctatacaggttacgttttaagtttaaagaagcactgtgaaggaactttccagatataataaccaacaaacttctagcattagttaatttaaccaaaaagggtttcctctaatagtagcctgtggaaatcatatgcagtaatactcagtaagagacattcctgtaaaaattagagccaattagaaggtgacattgtaacttattgccatcacgggtgagcactgagcaatcatgctgccgaaactgattgagacttttgttgaggtggtatgccaagccaagacttcaccatgtcgtatgtggtgaaactaattgcagctgaaggaacaatccttatatagtctcgt

SEQ ID NO: 33510 - DNA, 452 bp, Glycine max
aaaaaacttggaggccagagctgaagcatatctaagggacacagtgctccctaacatatcaagcacagtacatgttcttcactgttgtgaggctcttcgtcccatatctgaacaaataaaccttgtcaacaagctaatcaacgcaattgcgaacaacgcgtgcaaagaacagcttacaactggtctactaaaactagatcacactttcccttctaaaaccacaccaaccatggagccagaaacaccctcagattggtgggggaagtctttcaatgttcttagtcttgagttcttccaacgagttgtgtctgttgtgaagtcaaagggactaaaacaagacatgatcagcaagattttgatgaactatgcccatggttctcttcaagggattggtgttagagaccctcaagtggtgaagggaagtcttcatgacttggaatttcaaaagaaac

SEQ ID NO: 33511 - DNA, 371 bp, Glycine max
gaccaatgatatgggggtcccctttcttggtaatgttcctttagatccacagctttgtaaggcacctgaagaaggttcatcctgctttgctaagaaagattgtgttgttagtgctccagccctaaccaagattatagaccagttgattgaaactaatgggtggtcaatgttagtaagtaatggagtgtaggagttcttgctttatgatgatctttgtaaatcaaaatctaattttatctatgaacgctttgcacagaatttttctttaataacccattttgggccctgacttattggtattctgggcctctatgttatacgtattttgacgacgtagttactgataaatcttccaccaaaataagtttccc

SEQ ID NO: 33512 - DNA, 678 bp, Glycine max
accatccttaggtgctttgagctgtcatcagggcttaaaatcaattttgcgaagagtcaatttgggacaatttgcaaatctgatatttggaggaaagaagctgcggattatttaaatagtagtgtgctgtccatgccttttgtatatcttggtatcccaattggggcaaactcaagacatagtgacgtttgggagcctgtcgttaggaagtgtgaaagaaaattagctagctggaaacaaaaatatgtttcctttggagggagagtcaccttgataaattcagtattaacagcgcttcctatatacttgttatcttttttcaggattccggacaaagttgtagacaaagctgactataattcagcgtagatttttatggggtggagatttggaatagcgtaagattgcctgggtcaatttgaagaccgtgtgtcttccaaaagacaaaggtggtcttggcatcaaagatctacgggcttttaacacagcgctgctaggaaagtggagctgggagctatttcagaatcagggagacatgtgggccagagttctaatttcgaaatatgaagggtggcagatccattgctgaagaaagaatgagtagtcattttccctcttggtggaaggacttgctgcagattaatcagcagcagaatgcaattctaattagaaaccaga

SEQ ID NO: 33513 - DNA, 406 bp, Glycine max
cggacgcgtggggaaagggacgaccttgcagctttcctatctgccagtccttttcaacagaaagacaaagtggtcacaattccttcagcaggtgacattgaagtgggcagcaatgcagcaaggatgaaaaatgatatatcaactgacagctccaaggattcagctggttccacggatttgatatcaggcagagcaaaggaagatttgcatcgtgggcacagaagagcagctagtgccagtgctgatataggctcatggagcatgtcaacccctaacgaatgtgaagcaactgcccgaccgctatctgatggctcagacaaattgcctttgcgtaagatagtgaaaacatgtgctttgacaagtaccttgcaatctaagactagaacgaagtggaaaaatggagctg

SEQ ID NO: 33514 - DNA, 512 bp, Glycine max
cttccatttcgggtatggaggttagttcgttgattataggtaataaaaccttgcttcattttgaagtaagctgttacaagcttaggaataatgggaaggttcagttagcctataattcttcagagaacagtggcaaggcagctgagatgttgtttttattgacctttggtgaagaatatctgcatcatgggaaacttaatgcatatgaagttgctcttggtggaagactcaataacatcaatattggggacttgaagctttttgaaaggatgaaattgtgtgatcctgtgtctattcattctatagaagagagagcctccgaagaccacattagttcaaatgtatcttcccttggttggatggagaaagctgcagatgatgttatcaacaggatgttgatattgctatgttctgcatctggtttgtggtttggctcacacaacttaccactccccggacatgttctgatatatggaccttctggctctgggaaaactatattagcaagaact

SEQ ID NO: 33515 - DNA, 556 bp, Glycine max
cttcccatctacacagactaatcttgtcatgaccccccccccccccaaagaaaataaaaatgaaaaacatgaaccattggattgggccctgctagtctatccttgcataatcttttcttgcgcgggatgttggaggcatgcttgagacaggaggattcattcttcgcccccatgtcatactgttggtgaatgagttattcctgggagaacgagggcccacactgctgaaaccagaagaagtagcctgaatcttaatttgattccactcgggcaccctgggggggtctaccatcgtgtgaatctttgaacagattggctgtccaaaacggcctggagaattttgtaaaatatgaggcatgagatgaaaatgcttagacatagagggtacatatgttgtttgaagatcatgagttggaaggctacccatctcaacattagtaaatgcttgacttggtgcatttagtctttgcatgattattggagtgcttgtgctggaaacatgattgaaccttccaaatccagcccatgtttcagtagaaccaagattcatacttct

SEQ ID NO: 33516 - DNA, 434 bp, Glycine max
cctcataaacaaaatcatgtgatccaaattaaatagtaaatacaagacaaggattaaattaaatacataaaaaagagggcattaaatagaaagaatgaggctcaataaaacccaacacagttccttttgcccgtagaagaaaagaaagattaggaaatgaagaagtgagagtaaaagaaaaaagataagacgacacattgacaatgaagtattttctggtgatcaagagagagctcccatgcaaatgaagccaagtccaagaacaagtccgaaacccacattcatcccattggcagcattagtatccttaggagaatccgaaggagcagaaccagccttaccaacgctgggaatctcaggagtgctcttagaacccttaggagaaggagccgcagaagaagcacgagtcttggtggttccgaagagttccaacg

SEQ ID NO: 33517 - DNA, 285 bp, Glycine max
caaaactgctctagaactaaattcctatcaggctatggattataaaccaacctctcttgatttagtttgtcgagtctgttgcaatttacgggtttcatttgttaagaatttcgaaagtggattgtcaaagaatatatcttcatcaatcatttccataagatagctcatactcctcatagcagaacttctacttaccactatgtacgtgtacattgttcttccttggacaagaaagtattacttttttcttcagttattctcaaattaatgttgaaatttttcttt

SEQ ID NO: 33518 - DNA, 415 bp, Glycine max
atgtgagcaccaagtttctcacagtattaatatatgcatgatatattatgcaaatcctacaacttcatccaatgacattgatcagagcaattatttaaacaccaccttattcatctaatacttaactgccttgcttacctcaatgttcaagaacaatacagagtaaatatccgcagacattgaactaggtgaccaattccattattgcctcaaaactttttcagacgaactaactcaccttgcctagctccagattcaagcattgcctctaacacagcaacatctcttgcaccttcgacataagagaggcgaggctcagtcacaaactgattccgcttcttgagggtgatttcagatacatgattaataaaagcttttaattcttcagttactccactgaatgggaaaaaagagc

SEQ ID NO: 33519 - DNA, 496 bp, Glycine max
gacgacttttgggattattttgattttccatttacgaattgcgttagggtttcgtgattttgcacccttccaaacaatcgttgaggtgctattttgatcaaatttcctgcaaagttttcttctttttcgatttctgagttttgggtcgttgaattgagaatcaatttgggtgttcctttgaagaaggttgagtaagaaagagagaagggggaaaatatgatggctgcttcttcttcttcagctaccgtcgcagtggagaaggcgaccagcgaccttcttatgggccctgattggaccatgaacattgaaatttgtgattccatcaattctaatcattggcagccaaaagatgtggtaaaagctgtgaagaagagattacaacataggagctctagagttcaattactagctctcacgcttctggagacaatggttaagaactgtggtgattatgtgcactttcaaattgctgagaggaacatactggaggagatga

SEQ ID NO: 33520 - DNA, 685 bp, Glycine max
aaaaatcaaattaaatgattatttataccattttcacttgatttgtaatgcaatcacagaaaagttattggcaaacacaagttagggtgatacattaatcatctataagtgtaactttgatctcacccaagaaaaatgaaaatcaatcaatattatatacaccagaaaatgaacaaatctacaaaggcaaaatgtaccttttttccatcgtgtctcctgaataaggcaaaaggtaaaaacaaaagagcactgcagtgtgcagtttttcgtgagaacctgaaatactaatatgaacaaatgaacatctcattccaacgatcatcacttttgtcaaaattcaactacaaagttgactacacaattgctggatctgggaactggttggattttccatgaagtatgtactgaatttaccagtgcttgagcatgttacgttcagctggttgccaagttggtttgactcgcaatatgctgcctctgtatggcagctccattttgaagttggaacgcaagacagataatggcaccaggagcagtgatcatttgcatcaacaccacggagaagggcaaccagcccaacagaaagcccaacaactagaatgatcagggagaggacccacaagatgcactgatatttcttgaatttaggcttggatcgtcctggagaataatttaggggagcata

SEQ ID NO: 33521 - DNA, 430 bp, Glycine max
ctctaagcatgtatgtactgagaatgtaaagaagtgtatgtaatttatatcaaagggctacaacatgctataataaatacatcgtatgaattctatttgctgcctgaattctgaaaggtggtcattgtcagactcttcttggctctgcagtggccaaggccaactaactctaatgaattgtaattattttttttttaccttttctcatttcctttttccagatgtttgagaattgatgcattaaaataattcaaggaaactggtaatttaacttatgtgtcctatatatacttaaattacatccttcttaaagaacttcttgtatttgactgcaagttgaggcctagttgaagatctagggctttacttttatggctctgatttgaagcagggaagtggcaaggcttgaagatgaaaggactattattac

SEQ ID NO: 33522 - DNA, 329 bp, Glycine max
gtttcaaagatccttgattcaggtaatgaacagttccgacgaaaagctattaaaataatgtataatttttcatccaatggtcaaatttgtccctacatggtgtctctcgggtgcatccctaaattactgccattttttgaagacagaacccttttgagagacagtatacatatcttgaaaaacctttgtgatactgaagagggtagggttactgttgttgaaacaaaaggatgcatatcttctgttgttgaaatacttgagactggcagtgatgaggaaaaagaacctgcgctggttattcttctctccttatgctctcaacgtgtgga

SEQ ID NO: 33523 - DNA, 368 bp, Glycine max
gccgccctttttttttttttttattgttataaaaaaaccctttaaaattcataaatggtttggaattaattaacaacgaaactatcactactctattttttatgaaccggggcatggaacccataacaatttataggaataaacaataatatcttatgagagcacaagccagcctggcccaaccaacactatgataatatgattattattattattattattataatataaagtaaaagagttgaccctaagcaacaccgtgctcgggggcgcgttgagcgcgtgtaccaagccactccaacatgtccccaaacactagctccacgttcttttcgggttccccaaccatttgatgccacatcccggga

SEQ ID NO: 33524 - DNA, 270 bp, Glycine max
ctcgagccgctgatgaagggattgaggtcaaaaggcaagctaagttttttttgttcatttaaaggcaaggtaagttgaaaccgtggaataattttgaaaaacatactatacattatactccctagacgattagacactccttaattagtggactcgtcaatttatttagtggtcttcgaaccagaattagtggtcaatttatctacacgcgtgttcgcaactcttgtttatttatagttgaaatatgattttggctttggcaagtctttt

SEQ ID NO: 33525 - DNA, 484 bp, Glycine max
aagagggaaagtgaaggataccaaacacaattacaattggcaaatacaatgtcccagtgtgaaggttattgaagtatacaaaataattcagacgtgtcaggtactagtaatactacaaccccacaatctaagtattttaagagaagctcacagcagtgaatcattttacctataaacaacgtgcaatgacttgttatatttaattatgagtttcattccataaataatgaaagggttctatttccattgcttagggactcttttaatcttgaagagtttatacattggtgcagtgtcaatgaaaagtcttcttccatcccttgatgtggattcatgtttccatgccggtccaataaaccatgatgcagcaacgccaccaaccaaccctcctaaatgtccccagttgtcaatcccagtggataatagcccaataaccatattgagggcaattacttgtgctatgtgctgtaaatcttttttacca

SEQ ID NO: 33526 - DNA, 528 bp, Glycine max
tcggcttactcgggcgaaggagggacgcgcgagagcagcgaggtgcagagctccgcgagcttaatgcgtaagaggaaatcagaaccgttggttggggttttggagttgatcaaggggcacgaacacagctcattgttcgagcgccgtcttgatagccaggatacggatagatacaaagacctagtgaaacagcccatggacttggaaaccatacaattgagactccaaaagggtcactattcctcatgcaccagtgcattcttccgcgacctcctcctcctcttcaccaacgccaccgtgttcttctcccatgactccctggaatcgcaggcggggcggcagctgcaccgccttgccaccgcggagatgaagaaccacggccaagcacaatcggatcctatcccccggaagaacgattcactccctccaaatgcaccattagctaaaccagattctctcctttccaagaacaaagcctctggtcctatattggtttgccgcaaacgcagttcaatgtcatccaaacct

SEQ ID NO: 33527 - DNA, 469 bp, Glycine max
gcagcataaagacacgaagatattactaatatgatgatgactagtacaatcatgtcgaacaagatttcaagtattacaaattgaaatccatttacctggtttggatgacaataataatatatataaaaagtatattaaaaaaaaaacttacaaacagcttaaatagccagaacatttggatttactccaagcaattaaggtcaacaacacaaaggtgaattggatcatcacatcttctatgacacagtatcaatcgcacccctttacaaccttcatacaagtgagctcaataaaaaaacaccggttaaagtcccccgtaactggaaaaggttcattcatcattgccagcataaccacaaagtgcaacatcattccaatccctcttctaacttttggataattcatgaaagcacaacagaaacatggttagtgttatatcaccccaatcaaattaaaactccatgcaaag

SEQ ID NO: 33528 - DNA, 495 bp, Glycine max
  unsure (1)..(495): unsure at all n locations
aacaaattacaaataggaaaaaaatgaaagtaacagttgtgtgttgtgtattggttgtgcttgggtgcactaccattctcttcggatgcacaactagacccctccttttatagggacacatgtcccaaagtgcattctattgtacgtgaagttgttagaaacgtttcaaaatcagaccctcgaatgcttgctagtctcataaggctccactttcatgactgctttgttcaaggctgtgatgcatcaattttgttgaacaacacagccacaatagaaagtgagcaacaagctttcccaaacaacaactcaataagaggtttggatgttgtgaaccagatcaagactgcggtggaaaatgcttgtcctggtgtagtttcttgtgctgatattcttgcccttgcagctgagatatcttctgttctgggtcatggtcctgattggaaagttccattgngtagaagggacagtttaacagcaaacagaacacttgcaaat

SEQ ID NO: 33529 - DNA, 642 bp, Glycine max
ctacctgcactttattcaccacaaaaaatgccttccattccccacaagctagtggttgtcacaacaacctctgaacaaactatccaactccacagaattgcaggtgaaaagggggggaatagacggtatgtatgatatacttctcctgaaaatgtgggggaaaacaaaatgtccaaaagaaagaaaaagaattcaaacttcaagtagtttagtcgtgtaatggctctgcggaagccgggaaggaattcaatgtagtatcatcttgtttggatgaatcttctgtagcagcttttgcatcagaatgctgaagcttcttgtcacttaatttagaaggagatgtctcaggtggttgtacatttgataaccccctggtgagaggagtatcaagtacattcatagcaggtgaggtcaagccatagttctgagggatagtcaaaactggatgatcaaatttgcatgttgggccaaacttacacattccgtagattctgtaataagagcatacagcttgcccaggtcgcacaggaaggccgagtggatttatcaatgattgagacattctttcctttgggtggtggaacttgcaatcagatccatatttgcaggtcccagtgctcataaagtatctgcattctggctcgt

SEQ ID NO: 33530 - DNA, 406 bp, Glycine max
  unsure (1)..(406): unsure at all n locations
tttattcaagcttctcgaacgtttactggtacctagacatgcttctctgtgttcttacctgttggtcagaaactgtgcacaagaatcatagctgattgtttatgcaatgaagtgcttttactatttcagagacaaatctaggagcagtaagcaaaggtcagcacctgaactgaaagagcaagagaaactcgagttttcagggcctgaaagggtcaccaagtcttcatgctcatctacatctcctcgcggtataccagaactgtatgaggagaagggtcacaatttgagggacttctccttcacagagctcaagcgtgcaacgagtgatttcagcaggcttcttaagatagganaagtgggattggaagntgtgtttaaaggtacaatcaagcctgctgatgggaat

SEQ ID NO: 33531 - DNA, 540 bp, Glycine max
aaagacacagcgataaatgatagtgagaatgatctataaacatcgaacataatatccaattgttcaaacttcaaagcttaaacataaatagtcaatttagaggaaatgaaattgctgaatgccccataaatgaagaccttcaactggagcttgaatcatcagtttttgctgctgcagatgcataactaacactactatccctgttacttttgcactgactggattgctcatagcgaagaaatttgatttttatctttgttgagcagttccttagcatatgaagaaaaacactaattggatggcgtccacagattgtattgtcatactccaacagatattgcttgaatgaatctggatctcctgtttctatgatatccatgcccatcttgtctaaggcctcaatagatttgtatataggcccatgtttcttgtcatagtgcatgtaattgaatcgagatccccagtgacaaaagtctgatgaaatagagaagaagttattggaatcatcaacatatttggcaagaatctgcccatacatag

SEQ ID NO: 33532 - DNA, 418 bp, Glycine max
caaattctgtgtgtacagaatttatttattcaatcatctaattcagaacatacaaaagatgccattatttaatttttgcccattcaaggacaaatgaagtggccgtaaggggcaacgcacttgtttaggcatacatacatatatatagtaaaaaagaaacacactttgaattcaagttcatgtttctccaaaacaagcctggttgaatgactcaagctttaggttgcggttgtggacctcgatttaatagcatggtcagcaacattaccaccatgacagcacttgtaattaacagatgtgacctccatcacacgtccacaagaggcatttgggcatgttatggttgctaggacatccaaagtgttaaattcacatggttgaggagcaggtagatcacgttgtgtgtcataatattctt

SEQ ID NO: 33533 - DNA, 496 bp, Glycine max
attgtacaacacgatagagcaggattagagagaagaaaaagaagaagcaaaagcaaccgaaacacacacagagagagaacaaaacgaagaagaagaagaacacagagagagagagagtgtgtgaaggtgatgacgatggacagagagaaggagagagagatagagctggagagtgcaatgtacacgaattgcttgttgttgggtctggatccggcgattatcggagtcggagcctccaacgcgactcctcgggtcgggcatttccgtcactcgaaccctaaattgggggaacagcttctctacttcatcctttcctctctcagaggtccaattcaatccgcgaaagatttcgataaggtctggccgattttcgattccgcgcagtcgcgtgattttcgtaaggttgtgcaagggattattagcgagcttgagtcgcagggcgcgcttccgaggagcaattcgagggtttcttcacttgctacatgctgtggaccta

SEQ ID NO: 33534 - DNA, 496 bp, Glycine max
ggtgtgcatgaaatagagataatatcaaaggatgcaactactagattattgaaatttaatatatacaaaaaagttattgaaagtaataactcaaacaagaattgctcctattcccaccctatacatatatataagatgaaagcagtaccaccagagtgagaacatcctaccattctttgacaatgtaacaaaagtcttacaatctattcgaaaaatcatatcgccagctgttttcgcttgtagtatccagctatcactttaaaacattctaattgataaaactataaacagagaatatttcctttaatttcctgtatgctgcaacgcaggggactgagtaaaaaatggaataaacccagaaaactcggaaaacgaaacaatcaaaatacagccataagctcgggttgctatcatatcaaactcatgactttgtaaccttgcttctcaaacactacgcagtatatttgaactcccacgttgatgtcttattcaatgg

SEQ ID NO: 33535 - DNA, 549 bp, Glycine max
aaaaagtaaacgctgaagaagcagatatctttaaaaatggcaaatcacttggaagcaagtataggataagtactggaaagtatcttccagagtaaaagataacatgaagctaactatgcattttaacatgcaatcccttatattacaaaaagaacaagacctaccctacataacaaatattgtctgtaaaacctacttcctttcatgttacaccccattcttccatcttacagctcctgtccaaccatccaattgagttcctgatcttcaatataacgcctaatgtgtaaaactagtaaaagtaaaaaggattgcagccattatggtcatcagcaaaagaaaaattaagcaagggaacaggaaatgaagagaatgaacagcaaaaaatacaccttacaatcttacaacttgcttgtactttacatgataatgcacaaagctttagtgagaagaaagatcagtttagttagaagggaccatgatcaccacctaggacttgtcatggggaaaaaacctgaaagagacaaaggaaacagccctggcgaaagt

SEQ ID NO: 33536 - DNA, 446 bp, Glycine max
cattgaatgccacagaatgaatggggggaatcaccatatacaagttgaaacgaaaaaaattataaaaataaaagttaggtaaataattaacactgaatacaaattggttcttggggatgacgctaacttatagagaaacacagactccatcttcagtaatgacaatccaccaaagaagactgcttagagaagacaataacgtttttttctctttgctgaaacgaaaacttggattctctatgatcatcctctgccagtgctggaagattcaagtccaacttcaagggtttcttggcttcttgaaattcattgttaccaccaacaccaacaacatttccaccactcatagaagttgctaaagaagcattcacaagagttctgtggcgcctcatgtggccccccaaagcttgccctgatgagaattcagcaccacagatagaacactc

SEQ ID NO: 33537 - DNA, 705 bp, Glycine max
ggtagaagaaaagacttaaaagtttgggattatgatttatttctctcttgggggcaacaacttgaaagctagaagactgcgagaccagatagcaaagtgatgcataagattaaaagctaaggaaatctgaaactagttagagaaaagcccataacatgcaattaactctgccactcaactgggggcatttacaacttgattgcctacaaacataccatctttttttttaggaaaacctggagggtccatgggggaggccctaaatttcagctccgaggctgcacgaaaatctggatcaactgaagctggcctagcattgtgatctgcagacgcaccaccaagcctataggaagttgcagccccaccgggataccttgaaggagagccataccttctcggtggagctctgagatttccacctctaagatccataacttcagaacttctcgaagaagagtctgcaaaagatctgtctccagagccagatgccaatggcgcactggtggtagctgacgtggaactaaatggatcatctggtccccatgatgtaagtgcttccttcttcttggcgaaaaagtgccaagccccaaataggaaaagtatgaagaacaacacaggactagtccatagcatggtattgaattcccctttgaagataggtagattagaatgatacattccaacatacccacctccaagaccaac

SEQ ID NO: 33538 - DNA, 439 bp, Glycine max
agcattctaattttgcacatgagaccattctttccatgtgctacggtatctatacatctgatctgaatcacaagaccaactgctttggtaataactcacaattataaaaaatggaaccaagtcatctaagagttcactaatatgatatcagtagaaaatgccaacacagtatacattatgttgaccggcacagaaggaaacattcaaaattacaacgcaggaatccatatttatcttgacatgatttccactacctagtacctcttacacactctttcaaaatgagttcagatatgagatgtaaaacagttagacaaagtcaagaccacctgaaatcttagattggatttgatgtcagtcatcgcaagcgcataccggacttgctctcaacacatcctgataagaaaacatgtaacaggtgggttcactgcaaactact

SEQ ID NO: 33539 - DNA, 411 bp, Glycine max
gaaagattccttcaacgatctgcgatcttcgcgtgttgcatctccaaatgccactccgaaaaaagtcacaatctatcgaaagcaaacagagagcgaatcggaagaacaaaaacaagaagcagaagaaaaaatggggttgggtttgttagcttcgaaggccataagacccacctcaaggctcctcctcggttcccaaaaccctaccacttttctcctccgaaccatcgtctccaagcctgagcttcggaatcccgaagccagcgccgcacagccggagcagccgccggcgcccgatctcccgccgcggactccgctcgccggcgcccgcgtccacttctcgaaccccgaggacgccatcgaggtgttcgtggatggctaccccgtgaaaatcccgaaaggaatgaccgttct

SEQ ID NO: 33540 - DNA, 415 bp, Glycine max
aattgagaaattactgacaaataatattagaaatatgctcatggtacaaatttagattactccggacagcgtatatcatccacgaagaggattcttattgactaaacgtgcataaagtcaaagaactatagtaaacttcaaagatcaagaggctgattattatttacaaaacacgatgtacctgatggagaaaaataactttatgaccattatctcaggaagttgcgggttcagccccatcgtgtcgggcacagcaaattgtagctttatgatgcccttggtaaactttaatatcttcaccagttgacatagaccagagcctcgcaggtgtatcagaggaagctgtaataaggtaggcgccatccacggagaagacacagtgccacacccagcgttggtgacctataagagtttt

SEQ ID NO: 33541 - DNA, 416 bp, Glycine max
aatacaaatgtatctctcattcaatgatagcaatacatagagtataaaccaaggcaaactggctgagtcaatgaaaagcattaaggttacattctgaaagaaagaaaccaagaacaaggagttcaatttgaactcccattcttattcttatttatatacatacgatatctaggaaaacaaactcaccatgtctcactatgaacttatatatatttatgtacatgaactaagaaaaccatctgaatgaaagggaagagggtaaaactgcctagatgtcacctaagataggggagatactcagtaaacacaagaatgttccttcaccttagaagaaaatgcatgaagaaccatcctgctctttcttcaggtggctgacaacagaacaaagtcttctaacaaacaaggctagtgaacca

SEQ ID NO: 33542 - DNA, 386 bp, Glycine max
aacatgaaataaatagggtaattttttttaactaagaatagggtcaatataattttattacgttttaaagaatatcaatgcaattaaccattcaaaatatcaacgatcaatagatttgttgcccaaacaaacaacacaaggggcaatgacccaatcatatctaactttgaattaatatataacttaatctaggaaagaaactattaaagaatgaccgcgtaaaatccaaagcacgaatcatcatcaatttatcatcatgcatgtattttcctccttcttggtcttggataataatgttgcctcctcacccacaacaagctgacttttgtgcaacttccccagccgttgcatgatctaattggttgttgattttaattcctgctggc

SEQ ID NO: 33543 - DNA, 506 bp, Glycine max
  unsure (1)..(506): unsure at all n locations
gaaacatacacaatctaatttataatttattataatattttacatcaggtatgaattgaacttccgttatatggatacacatagaaataaataaagaagtaacctaaatttatgatttagagattgctttatttgtagccaatatattggtacattaaagaaccaaaaaaagtaaaatcaaatcaaataagggtgacataaggaagaaaggaaaaatcttctcatactcctttggagaccttcttcagaaagcagaaaactacacaagtgaaaatagaaggttccatgctggtcaaaattttcaagccctaagatctggagctaccactgctatctggtaaagtgcgtcaagttggtgaaaggagaaaactaactactgtcaactgaantatgatcctcaatataactagtagtgtgagtattaccaccagatgctgaggtgaatgtatgtgtcattgaactctggctctggtttccactcaaactctgttttgattgatattgat

SEQ ID NO: 33544 - DNA, 333 bp, Glycine max
attagcaagggtctgagaccgcaagagctagtacacaaacattatcttatcccccaagtcacatgttgctacattacatatctcacaaagacattactttttgttataaaagagaaatgaacctttctcaaaccaacattaaagataataataataatcaagcaatgataataatgttgggtagcaatagtacactgcaagaagttgaagtccttctcttactcttactccacacaacagcgatacatgaagtacttctccatttggcgtccacactcagcacaaacaaccttctgcggtatgccaccagtgctaccaggaaggatcaagcga

SEQ ID NO: 33545 - DNA, 430 bp, Glycine max
ccaataaattccttgtggtttatagctattatactttggatcatcatactttactgttttcttagaatacgagactgacacattacataaccttcttgagtggtcatgatactaatatcttcttacatataactactttgagtggtcattttgttctcacattacataccctccactgggatttttgtggtagctaaaattattgtttatttttctccaattgcttttgacacaatctatacaattgtacattagtggaaaaggtaaaacgaaatatatttatttttctttatttgcacagaactggattaacatcttggtttttccactctgtcaaatgttgaaatttgactaaaaaaggatttcagaaattttctaagtgctggctttggctcgctttactggggcctgaagggaatatagataaatg

SEQ ID NO: 33546 - DNA, 882 bp, Glycine max
ttttttgtaaaaaaatagccttcaatttttaaaaaattgtcttctgcacacttacggatcaacttgatccgcaagtgtgcgaggaactaggggcatttttggcatattttaggaatgctgggtgcaccagcaatactgctgggtgcacctagcaactccccaaaattttgtggcactaaagctgccagttagaatttcaaaacggtccttggcaaattcttcggtatgagctacaggagaagaagataagtatctcgttgtgtcaattgagtgagagcctaactcgttgtacgagttattcaacactttaagtgacttgagcaatctgagaggccccaaagcagtaaaactaccaaaatttattatgactcagatttaagcaagatagaagttgcatggcatccaacccttcaatgggtcgaagttcattgtggctaaggtctagcatttgcacccacaataaattctgaatggatcctatccgtgacaatgatagattttgtaatcgtagacagacattaccagaaactgtttctgttgcatctttatagtagtggcagtatggtattaaagagtccctagttgaagttatccgctttagtgatatcaaactacactcatccttatagtatatagaatgtgtcggatccaacttcatcatatcggtataaagttggagaacttcttcagtattagattttcttccatcatgttgagatgataacatatcaagagcagtcagaagtcttgcaagtgtaagccttccaattttacagtcatactctgacaataagtcctgaaatttagtaatttcttgaacaatttcctcagtgcaccagttggaagttggaatatggtgattttgatctgcagtaacctcgt

SEQ ID NO: 33547 - DNA, 267 bp, Glycine max
gccacaggcgatgctattgcccttttgggtgcacttgtcatgccgcacaatcttttcctccattctgctctggtgctgtctagaaaagtacccagttccgtgcgtggcatcaatgatgcatgtagatactttctcatggaaagtggattcgcactgttggtggcatttctgatcaatgttgcaatgatttctgtggctggaactgtatgctctgccgacaatctttctgcagaaaatgctgatcaatgcagcgatcttacccttaac

SEQ ID NO: 33548 - DNA, 485 bp, Glycine max
attctattcaattcaataccagtggtggtgactcacttgttgttggagcaaagctgctcgtgatcaattttcgtgttccttcttcgttcccaccgaatgaggattaattatcaattatatatcatatattagcaaatatgttctacgcgttggattggcggagcatggttaacgttttggaccttgaagattttgttgctccggaagatatgaggagccattgccacctgttcatttgttggtaaaagagaggttgatcttccgccatgtcttcccttcaactgttccaactaactcagcatggccggagttttctggcttcaaggagaaaaactttgctacttgcaactggtatcttagttgctggtggaactgcagcatatgtgcaatcgaggtttagaggtaatagagatgatttattaggtgattcctatgagcgcaataatgataaagaactcacaaaggaggaggtcatgaaaggaact

SEQ ID NO: 33549 - DNA, 515 bp, Glycine max
cagaatcatcctatgcagaaaagctatttttccttagtttcctttacctgattatgagttggatttttattaaaaaaaatggaagataattgaattaagatgtttatagacttgttatgtaatttggcatcacagcaacgatattcatttgtttcagatatactgtgctgatttacctcaaagaggagaatataattttgtggttttttctaatagacttggtgaaattacaactaaaatctcagattttgaaaaaaaaaaatggctattgttaaagcattggtgttttacattagaatcaacattatctcagtcatcaatcttagaagtatgttgattaaaaaatgtgtaaatatttcttttatttactataatgaaaaatagaaatcagttgaagcactggtgctaatgtcggcatcacaattgctttgttagtaaaattttttagtagtttcttttttcttttcaatttagtatgcaagcaataaatagtttttggtgatgatatgattcat

SEQ ID NO: 33550 - DNA, 488 bp, Glycine max
aaacaacattcacatgatctgcctcaatcattcttagtcataacctgcgtttttctcatcttcttccccgaaaaaggacaccgccccagccatggtcgaaaccagacgcagcagctcctcctcttccaagcgctctctctcttcgccctctccccccaacaacaccaaacggtgcaaggtgtccgaggattcctcatccaccaccgtgccttcggttgctccggtcaacgaatctggaaccgctaatgaatccgcggaaccggagctgatgctctctgatctgcctgaaacggcgtcgttgaaggccgtcgatggctgtgttgcgatgtcgcccgataagtctccctctgtgcccgttgaaggtgaggccttggtgtcccctcagtgtcaaggtgagaccgcggagaaatcgaagggggtgctgatggcggcggcgacgacgacgggtggtcgatcgaagaaacaacgcccttcgaaattgagcccca

SEQ ID NO: 33551 - DNA, 597 bp, Glycine max
acaaggaagaagaaaagtcctctgttttcccttttttttttttctttctctcaaaagcttctctttcacgagattcatctatgatctatggcggaaggtgctggaaggaagctcatggtggaggtttgcaacgcgaagaacctgatgccgaaggatggtcaaggaaccgcgagtgcttacgcgatcgttgacttcgatggccagcgacggcgaaccaagacgaaatcgagagatctcaatcctcaatgggacgagaaactcgagttcatcgtccacgacaaagactccatgccttccgaaacgctggaggtgaatatctacaacgacaagaggacagggaaacgaagcacttttctcggcaaagtcaagatttccggaagcgcgtttgtgaaatccggttccgaagcgagtgtctactatccgttacagaagaggagcgtgttctctcagatcaaaggagagctgggtttcaaggtttggtacgtcgaggacgatccaccggaaacagaaaacgccggtgaggagaaagcagagtcagcaccatcggcggagcagaatccgctggaaaaggaaaagaaagaagatgagaatgaactt

SEQ ID NO: 33552 - DNA, 220 bp, Glycine max
caagaattgattcgcttcagacatctgctgttgttagtttgcatggtcgactatttgtacgcgttccttttgagcagggagctgtgtgaatgttcctcccttgaatcattgatttatgaaatctcctccttaatattattagtttaaactaccagcaattttaacatttttttaggaaaaaatacgtaatttcactaatattatatgctagaatttttcc

SEQ ID NO: 33553 - DNA, 430 bp, Glycine max
gtttttgaacttgaacattaacaacccctctctaattttttccctctgtagtactcaatagtgagtaacaatgctttaatgggtgcggatcaagtttctgtcttttccatcttatagcacaccctttttcttcagaaaaaaaaaaaaaaaacaccatgttaggggaagcgggtaagaaggacaaagccccccccggtggtgttgcatggaaaacttattctcgttctgtttcatggactgataggtctcccaatagccgcaagccaccgacaaacagcaaaacaagaccacttttgccaccccttcagcctctctcaatcaacaaacgcaacgtggaggaatggcctagtgctggatctgatgatcttggagtttggccacttcctcagactccaagaggctcctcaacctcctcaagtcaacaacaacc

SEQ ID NO: 33554 - DNA, 356 bp, Glycine max
atacacatgtgatttcttttatagtacttcaaaatggaaaagtgttttggtgttcaggatcagaaaaatgctaaaaggaagtaaaatcatgtgaaaaacactcaattatatatattgctagcaatgggttacaattgaaaccaaacttcacctgtaattcatttgggagtagggggagcggccgaggccattatcattggcataatactatatattgaagctgcttgagttcttttccaggtgctgaagtagcagttgcttcaaaattacaattctgtcagactcgtattttgaattatatcagactgttgaccccactttatgatacctttcgagaaaggttcttcatgcctcgt

SEQ ID NO: 33555 - DNA, 361 bp, Glycine max
gggaatcgaagaaacagggcactcagaatttagaagtagtacatttttcttggtttctaatataaaaaatagattaagcagtgtaaaaatagaataacaaaataacatagtaaaagaaagaaaaaaagtaaacgccgatcaggccaatgcagcagcagcagctaaagccattattattctcacattaccacctacgaccgagaatatccataaacctacaaaacagttcaaaaaaagaaagaaagaaacaattccattccaaaaaaaaaaaacaatctcagacctctcagtacttataatccttaacatgaagggactcagaagccccttccccaagcgtgggatcccccttataagttcc

SEQ ID NO: 33556 - DNA, 440 bp, Glycine max
gggataagaaagagcttactgtcatttattcaggtacaccattacccggggtctggtctgtacaatcattctgtactaattttcaaaggagtacagcaaagagaaacataacatcagtgccccttttgctgcaccaaaagcagaataaaaacaaagagatacaattattcatgaagacgagcacgtttgcttgcaacaggtaattcaaagttagggcttttaaaaatcagagtctaagtccagctgaaagcaatgggactagtaaccttatgtttcccatccgaccattccagataagcaaagctgtttgttccagaaggctttgacgaagacgtgaacgtaactgtgtagttcttcttctcattaagtcccccgaaactaagtgtttgtggttgaaccataatcttcaccgagggagactgcgacaccgaaactttata

SEQ ID NO: 33557 - DNA, 556 bp, Glycine max
tttttttttagagttgcaacagtatacaagtccatgaatccctctaaagaagaatcattttcagtacatggcattcagtatgctaagaaattatgacaattaggcgttattataatgccaaataatacaattgcagactaacaaactcatatgttgttagcaatacatcaaaaataaactgatggtgaggtaggggaatttataagaaattatgtaaaacagaaaataaaagatgaatcattattgacattattttgccatgtatacatgtaagttaatagaagcagactcaaaggctagaagagccccagctggcatcaacagcatcaatgatctttgcatgtagtgtggctccagaacaagcaactatgccacgatcaaggccttctaaatataagccttttgagaagtctaggggaagtcctccagcatctgttaccatcccaccagcttcttgtatgatgataacgcctgcagcatgatcccatattttctccttgtaaccggcccttgcaaacttcatgaaaacctcagcatccccacgagctattggtgc

SEQ ID NO: 33558 - DNA, 380 bp, Glycine max
tgattgaacaagtattagaagtataatgaacaatggatattaaacgaaaataatttcaatttataaaaccaacagtagtaagacagactatcaaaattgaactttttttttccacttctaaggaattaatttattagttccttgcatttgggtggatggccgagatggcaagagtgatgaaatctgctattttttcagccatttttcctatgttttagaaaacaaagatcatagcatttcactagaaaggccgagatggtataaccaatgactttctgctgctatttttcaagcccttcagcttgagaggagtccacactaagggtttgcgtctttgatgcctagggctgccgcccaccttactgctgctcctcatcaaa

SEQ ID NO: 33559 - DNA, 459 bp, Glycine max
tgaacataaagagctgagaagagaagcatgttcgtcaatggcgattaagctctccgcatcagaaaaccgtgaaaaccaacctccaaatgaatggccagagtctccaagctccaacgcctgccaatccaaaacacctttctcacgcgccccatcgccatcaccaccaacacttcaccccctgaaggtaaacgaagactctcctccctcttctcacactccgaagcgcttctccaaaactcatgccaaaacgctcgccacctccttcaaatccaagcccttctcgtcacttccagcctcttccgcaacccctacttggcacgcaccattttgagccgcgcctcacacctatgcgacgtcgcttacacccgtgtgatctttcgaagcatcaattccctcgacacgttctgcgtcaacatcgtgatccaggcctattctaacagccacgctccccgcgaagcg

SEQ ID NO: 33560 - DNA, 384 bp, Glycine max
aacgcaggaacactattttcttttatttggtacattgaaacttgaaagcatgatctctaatctgttagccttgcaaattattctaacacctcatcgcttagcatactactgacttcactctctgactttattttctttattcgcttacatcgacattttactcaaatcacagagcctagatattaattaagcttacaaattagtcggcactttgttattttttatcaattaaacaaattgtcgactcattctcttccaataaactagatggacattgccaactttttctcaaaaacacgattaagaattgcagccaatcgaactcctgcttgagctaaccgcatattgactattggcaaacgtgacaggaagtaatcatcattt

SEQ ID NO: 33561 - DNA, 1164 bp, Glycine max
gacctgcatacttctgttatatacttcattgaaagattatctagattctgatttatatacagaaaaaaagagagtagagtttgggtatatcatgcagcagcgccaccaatagtgaacttcaaactatctattgctctagttttatgctcataagaagtggcattcaagatgataatgaaccgctatgtttgctaggcaatggtgtgtttttccgggactggcgctttgtttgtacaagtacaggttcttgctcctcccagttttcgctcattacatcactgtcactgtcatcatcacccttaaacaccggatggatatatgcattctgaaggaactctttcaaattgaagtttggctctcttgcgcgctccaatgtgtccttcatcagtgcttcctgtaatggatgcttaacgaaagcaggttcatatcgtcccttgcaatacagatggaatgatattgtcagaattgggagagtaatgagcaatggagttgagttagcagcttcttttgtactcaataaccccattagcagcagctgtgagatcactaacgcaaatataatacgtccatggacatcaggccagaatgctgcagcactctcatactcttggttgtagacattaataatctgatgccggtaggcgacatatgccaagccaaagaacactatgatgtatggaagtagaaatggtgtgactacagcatacacaaggccaagtaagaaatacagttgtatttaaggttcgcctgtattgaaaccagatgtccctggatccattgcttcttcacggtccttttcagtcttcactaagaagaagtttttcaagtgataaaatatcaatggcttcaaccttaaaatctcaccagcacatccagcccacccatccaccattatgtaagttatgaagaaagttgccttcattggaattgagacaccaattgtttttggaatttcatttgctgactgatggataaatttatctagctgttggaatgcagtcccagtgattatgctcccaagaaatacattaatgaactggaagatgtaatatcttgtggctgctctcctttctagagcagacgtgcttatgaacccttcgaacttggacattatcatcaatattgctggcagaagtatgaggaatatcttaaaggacgcgaagg

SEQ ID NO: 33562 - DNA, 155 bp, Glycine max
tagttgagcaactagagaggttgtatagcgcacggtgtgagcctgtcaggacaaatttagagatgtaaatttgaagttcaaacgagtaatgagacaattttacagatgtaaattaaaagttcaaacgagtaattaagagtgttaatctatttgtt

SEQ ID NO: 33563 - DNA, 280 bp, Glycine max
gcttgcaaatttcccgcatcctcaggaagctcaatctctttcgtaaatgggattcatcaatatttacatgttacagcaaaatttggattgaaatacatatagcacaaatgggaaagaaggaaaggtaggagatctaatacatgagaaaaggacgggggaaaaatgaagattcaatccaccttatgacacaggcttgacattcgggacatcatcgagaatgaaaggtccaagcttaccggtcctgaatagagtgaggaactttttggataccattaaccgc

SEQ ID NO: 33564 - DNA, 414 bp, Glycine max
ggggttggaattggaaaactttaatgagactaggtatgcatcaggacatcatcatctcacaaatatcaaaagcaacacaagacaaaagcaacataacacaaatatcaaatagctataaacttaaactaggtaaatatcaggacatcatcatctcacaaatatcaaaagcaacagaacacaaatttcaaatagttataaaattaaactaggtatgtatcaggacatcatcatctcacaaatctgaagctgggtaagctactttagatcatattttgcaccatagacacagacttcaagaggcaacactgaataacttgatgcatacccatagtaattgtgggaaggactaataaattaatctgtttcaacacctgcaggtctttgggagagggcctggagacatattctattgac

SEQ ID NO: 33565 - DNA, 604 bp, Glycine max
caagatagtagtatggaattatctgtgttggtggaccgctcagttggaggttccagcttggaagatggccaagtagagctgatgctccacaggaggttgcttcatgatgatgcaagaggtgtaggtgaggtactcaatgaaacagtttgcgttgctgataagtgtgagggcctaacaattcaaggaaaactgtatcttagaattgaccataaaggtgaagctgctaagtggcgtcgcacagttggccaggaattatattcaccattgctgttggccttcacagaacaggatggggataattggttgcatttcagtccatccacattttctggcatagattcttcctacagtttacccgacaacactgctcttttaaccctccaggaatttaaaaatggaaaagtgctcctaagattggctcacctttatgagatcggagaggacaaaaattactcactaacggcaagtgtggaattgaaaaagttgtttcctaataagaagatcaataaagtgacagagatgagtttgtctgctaatcaagaaagagctcaaatggaaaagaggaagctagattggaaggtagaaggctccactgaagaaccga

SEQ ID NO: 33566 - DNA, 563 bp, Glycine max
gaaggatctgaaaaggacttcgatgtgctggttgaagatatcatgatctgtaaacatgtcataagatttgtgggatatgaagccaagtattatttgtggggtgtcttcagaaagaaagcaaacttaagaagagacaaatgatgcagtgtgcagagtttgacaaggctcttaggttggcataaccatagacgtagtctccatctaaaaatttgagcaatagtggttgtgtagctatgactctagtgcatagtactcctgtgtttatagtccctgatatgttaattaaacatatatatgctgtagtgcatagtaccctttttgtgacttcattgtccaagagagatgcttccataaatgttccagaaaccctttgaaactgtgaccacagggttagccttgtctcaccgaaatctttgatggtggtaaagcattggggtgtttgttctacagtcaccgtgttaatgtgctataaccttggtctactgacgatgtttttcatcagttacttatatttcaggaagtattgggcgtgtaacgtttaattcttcatttgttcaatgcat

SEQ ID NO: 33567 - DNA, 334 bp, Glycine max
  unsure (1)..(334): unsure at all n locations
cggctgcgtgggcggacgcgngggaagggaanntttgggngntttcagaggcaaaagacccttaaagcccgtcttgatttagcaaaacttatttttagtaaaagacatgcaatttagtgtggccacaaaaatacctagttcgaactgtaaatatccataatacaagcctgtaaaggaaaaaaattgatcaaacaaggtcatactttgaagctagagagtcagaccagccatttccccaagcaataacttaagggaatctagcttctcctggttcttttctcgaatatttggcaaaaccttttttttataacctttagcattcataatcttctct

SEQ ID NO: 33568 - DNA, 496 bp, Glycine max
catcaaacagagttttacatggtaaaaacagaaccaacctgtacggcctcaaaactttaacaacaagaaaacacaaacagatcttgtgactagcaatagtctcccgatttcaacggccttcctcccccaaaaaaccaagacatgaagttgtagcaataccagggcaaggctcatctcacttatcgagccaggttctaaccccccaaaaccaacgtctaacattggaaacacacacacacacacacacacacacacaaactgacaaaagcgtcgacgcgtgcttcttccaaaaaaaataaaaatgacatgcatggtaaatacgaggcacaaattaatgcgcacattacattgcatacctaggacgacgagatcatatgggattgatctaaatcatataccgtccatggtcggaaaccattacatgtgtgtgacgtggagattagttagagaaaacacaattacctttgtgatcgaatcatgtaattatttctcctga

SEQ ID NO: 33569 - DNA, 326 bp, Glycine max
aaaaccctgattggggagggtaaaataaaaaaaaaattcattaaaaagtatcattgatctactttattgggatttctaaggcatcctcgttacgtttttatatgcatttaccgatttagcccaaacaaacccatattttgaaatatctctctctatctgatttttgtaaacttccttaggtttcacataatttttcgactaatataaactttgaaacctggactatgaggaatttattactactatttcctgagagattaggactaaagttaatcatgcatcgaaaccgataactggattgattaaatgtcatttttgattgaaat

SEQ ID NO: 33570 - DNA, 625 bp, Glycine max
gaagaaaatcaatcagagtttattaattatttgggcaaacaagagcatattcaagactgaaatgaatcatccaggatgttggtagggttgactattccaggtaacttcgttgccaattctgttacttattgatactaatggccttttgtggtttgtttcctatactaatacttggatttgaatactataaagcaccagcaggctaaattataagaatgattacatctcctttgaaccaacggtactataaggatacaatgatacacgaacaagcggctcagcaatgtaaggttaaacattgcactgtttttggataacatttcatgcaattccttatcttaaaaatgggttacatcatgataaataacgattcttataaaaactgggaaattgctaaagagaagcaccctgttcgaaagtggaccgtatccacgatagcaactttacacggattccaaactggcccaatcataattcctgaggacttgcaccacggcaacattctttatattagtcatctatgttcttcatgtattcctttgaaagtttagtttccattatcacaccgtgttctttgattagagaataacccgattcaagtaaagcatccaccgtttgctctgga

SEQ ID NO: 33571 - DNA, 415 bp, Glycine max
atataaaagttgcttcactagttacacagttcttgctagcagggcagcacttgtcacctgtaatcttgtcacacacacacatccacaaagatagcaatgattaagcacttccaacagtgttttacaacattgaaatgaccaaaaaaaacatagcaaaatccaaacgtatcctttattcatctaaattagctaatcaaccccataacaaaaccaccccaatggctccagcaacacagtgcctcattcccatgtcttgcacttcttgtcttttagcctcatacttgaaactgggagtggtggaatgctctgctcatgcctgaacacattatcaggatccaccttgggctttattttcaccaacctgttgaaattatccttgaaatacatattgccccaagcagttgcctgtatgtaa

SEQ ID NO: 33572 - DNA, 539 bp, Glycine max
aaaaaaaaaacattatttctattaagccagtgatgttttgaatcttaagacattgacactagaactcgaagagagtccaagcaaaaggaagatacaaatattggagaaaacatcaaagatccactgtccgatccagactcgcgtggggtaataatgcgaacaacctatgtcatcagatgtcgtttaaatttctttgtcgtgggtagtaaaccatgattggggcggaccagtcatattgtttccaccaaaaccataactttctgatagactaagaatcccatgtatttacagtgtgaggggggggcgggaagatatatattgttatgaatcagatgatgagtattgaatagaggagcagattcggtaaacattcatgtgcatcttcacctatatcaagattgcgagaatatagacacatttgagcgaccaatttcagatgcccactagattcggatcctagtctatgacagactcgcacaatgtttataatatagtgagcaaacaactcattgctcttgtttttttacccttcacaagcc

SEQ ID NO: 33573 - DNA, 398 bp, Glycine max
tttaacggtgtgctcgtgagtcccagaaccctcccatggccgccgcggatcctccgcggcgcaagcctcgctcttacgccaaggcatccgtagttctctccgcttttctcgttgtctccgtcatcgctcccttggtcctttcttcgaacaagtttcgcgcgttccaacgccgggtttcgtacgagacgatcaccgtcgtcaacgtgttccctcacgacccagaagccttcacccagggccttgtttacaatggaaatgacaccttatttgagtcaactggtctttatgggaagtcctctgtccataaagttgctcttcatactgggaagcttgaggatgtgcagaagatggatagttcattatttggggaaggtttaactctcctcaataataggctg

SEQ ID NO: 33574 - DNA, 561 bp, Glycine max
aagggtggcaaagttatctgtttatcagcgatctatttacggaaaatgggatccattcatcaattggtaaaaacagtcagtattatattgctataaattgcaacccttgctcgaatattttcgtatacatacttctatttgggtcgatattagacacttttgattatctagagaatgatagattccctcttgttcattttgaaatggaagtgcactcagaatgatgggaaaaatctgttgaggttcaaaggaagtgaatagaagtcttcagctctagtatcctggttgaaggtcctgaatttttcccaccagtgtctcccactgtctcggcgagttgagccctctccacgactcatagttaaatccaagaagtaagcaactatgattgccactgttgctggggatgagaaaatcacttgcactatattgttgaacgcggtggtgccagtatgaacagggccatgtccggatagcaatacatattcgttgaaatattgtggaacagataaacccatgaagagagaaaagccaacgatgaacattgacctataactgtttaga

SEQ ID NO: 33575 - DNA, 294 bp, Glycine max
aaatcaaaacgctcttagatattccaatcgagtgataccggaagtcaagctgatactagttaccgattctagaaatcaacacaatgatatttatttatctatttacctatcttgctattctaccctatttgtcagtcaacatctgcaggagcaggagtacttctttgaggcaattgcatgcttactatgtcttctcttggaagagaatagattgaaccattgcctagttcatttgacatttgttgattttctggtgctgttagagccaaaaggtgtgaagcctctttgtttttg

SEQ ID NO: 33576 - DNA, 571 bp, Glycine max
aaaaataaaaatttaaattttattaaaattaaattactggatccagaaattaaaatacaagaaattgaattacttcattcaataaaatatttacaaaataaaagaaatttaaatcaagacaattaaaatgtgtatttaaatttcctagaaaattttaaaaccttcatccatacacaagcaagtttgaaaagactgaaaaagggattaggctatatacaatacaacatcacttctacaaaagaaagagttacagctacacataacacaaactactcttctttcaggtctagggacttcacttcagccaaaagccgtttatactcatcttgagcttcttgtatttcacttttaagcatcgtcaccttgagattaagttcttctcctgtcttttcaaattctaaacattttgcatgcagtttcttgttttgttgcaccaagtgcatagtctttcggtcgaacacctggtcagctggagtagcaatgatctgtttattctgactgaaaccaacacaggttacattctctgtccttgcatgtttttccgtattctgaaggtctaccagttcatgtg

SEQ ID NO: 33577 - DNA, 362 bp, Glycine max
  unsure (1)..(362): unsure at all n locations
aaaaatatattttaatctttctaatattcacatgtcatgtatcctcacacaactctttgcttgactacaatgtgccgtataatttaatcatccctttcacaaataaacaagcgaatgaggcgatcatgatactgtgactcaactaataatgaggtgaaagttgatatggcaaaaactaaaaacgggttgtcgacaattaataatagaccaaatgatctaccactgatattaggcgtagtacatttactttcccatttatcagtgacagtgtttggggatgtaggctttatattcctcaacaatctaacttcttcccactcangtgaggctggtggtggtgaatgtgcagaactatgtgaaac

SEQ ID NO: 33578 - DNA, 369 bp, Glycine max
ccatgatcttccttccaaagatggcatgtgaagaagaaagtatgcagcagcatctcttgacattttgttaacagaatatgaatttttttttttctgctcatttttcctttccacaggagaaaataggagatgattcttgtacattctttcactccattatgtcactagacttaactgttttaccttatagcattctttattattaatttcacgtctctgtattttctttttgaattcagtatatatattacagtagctttattgtacagttgagaattgccatgagatgtgtatcatggaggttatatggtaaagggaagggatattaaatatttgagttgttcatataacatgctgcaagtttcatgg

SEQ ID NO: 33579 - DNA, 215 bp, Glycine max
agtacgtatatagcgtagttaagttgctcacgcctttttgaaatgacatttgtcaagtaaggaagatgtaacttgacatgaagaaatgttttatctgaccaaaaaagatctttctgcttttgttttgaattcagaaggcattatttatagttattgaatttgggttaattatccatttaactgacacaaaaaatataataaagataaaaagtaaa

SEQ ID NO: 33580 - DNA, 388 bp, Glycine max
ttcggctcgagaagttctctgaaattaagcttgcgttttgttagatacttagggtgtgtttagtgtcggaaactgtttttggttctcaaataaaacttaatgaggttgcttagactgttggcggagggtagggtggtacaagacacagagcagagtgtagaattgaggaagatgttgaacaagatgagataatattattttcaaaacttattagattttggatgagaaattaattgttgatcagtagtataaaattgatttacaaaacaatttttttaaaaaagaaaagtgagaatggaattaagcattccctttttattatctaggttttttttttttctcttgatatgcatttcctatacattttatgttatactgtgttatgctt

SEQ ID NO: 33581 - DNA, 396 bp, Glycine max
attataatggtcaacttggggtaactggaagtcatccacaacaaactccaccacctccaggaaagcaatttaatggcactatgcatttagcacctgattcatcaggtgaggctcagattcgcaatgggcggcctcgagcagattcccgaggaagaaaccagttattgccacggtactggccaaggtgtacagatctggagctacagcaaatttctatagattcaaattctgtaattactcccttgtttcagaaaactttgagtgctagtgatgctgggcgaattgggcgtttagtgctacccaagaagtgtgctgagacctacttcccaccaatttctcagcctgaaggattgcctcttaaaatccttgatgcaaaaggcaaggaatggatatttc

SEQ ID NO: 33582 - DNA, 414 bp, Glycine max
aagagcaatgattttatgcaaatatcatagatctaagtcctggagggtaagataaatgcgaactaaaaaccaattagcattacaccaagatacacaatgcttaaagtttgaactttgaaataaatttgggacatgggacactttctggcgtctattatgaaaggaagaacgttcaaatgcattgcataggcataactaaaccacatatgacattaaacaagaagctaagcagtgtctgttgccggttgggtcaccccaaacttcaccaacagcttagtcaggttttctggggagcaaacttgatacttgacttttccagcgggtgacagaaatacctctgcaagctcaagcttttccgaggtaagacttgtgctggccatagttttacttagcaccttcagtgcaagttgaact

SEQ ID NO: 33583 - DNA, 467 bp, Glycine max
tcaaggcttattaagttgtttcacagccagcaagcaaacttcagctcaacaccctcgttccctttcggctccaaaacatgtcatccacaaccacggattcagattgttcatatttggaacaaattcaacaatatctccttcacaatgattcaacaattctaacaccacctcaagcttttccaagccctagccatgatagtagttcggatgcaagtgtccactttgagcacccttcggaagcgcatgacgtgaacgcgccacccaaatggaggcgctaccggggtgtgaggcgtaggccatgggggaagttcgcagcagagataagagatccaaagaaaaatggttctagggtttggctcggaacttatgttaacgaggaggaagcagctttggcttacgacaaagctgctttcaacatgcgtggccaaaaggctaagctgaattttcctcacctcattggcttctgt

SEQ ID NO: 33584 - DNA, 471 bp, Glycine max
gtagaaatatcaaattgagttgtataaaagcttcaagccttcaactaagtaaaatacatgctagatgcatcaaactccaactattgtgttgtaagtgccataaaatgcgaaaaataatccagacaataatacaatagaatccaaggctttttgccagatgggtagggaagagccaaataactttaggtgaaatgtggctggcataacaaatgagagcattgcacataaggtactccccacaaatgaggcatatacaccaaattctggcacaaatgaagctaagactgccagtccaaccaccacaatcgctcggctgatgtacatgcaaatattttctagtcctgttgaatcattattgtttctgaggatgattttgagtttcccttcgaaaatctcattaattgggtgtaacatgattgggagtgtgaatgcaagccccacacataatcctacctgtactgcaagagatga

SEQ ID NO: 33585 - DNA, 504 bp, Glycine max
atttctaaccatcatttggtcgcaaaagctaaaaccttctttttcgttcttatcatctttgccgaattcgccaataagatgaaaaaacaaaggagggcacccagaacgaatcgaatcggaaagtttcaaatcttcgtgctttcattttcaaattgatgggccgacatcgaagaaattggagctgatgtctgttcggatatagaagttgatgatattagatgccccaatatagcagagaaagatgtcagcgatgaagagattgaagcagaagaattggagcggcggatgtggaaggatcgaatcaaactcaaaaggctgaaggaaaaacagaagctagaagcgcagcaagctgcagaaaagcaaaagccaaggcagtccagtgatcaagctcgtaggaagaaaatgtctagagcacaagatgggattcttaagtatatgctgaagctcatggaagtctgcaaagctcgtggatttgtgtatggtatcattcctgagaagggaaag

SEQ ID NO: 33586 - DNA, 368 bp, Glycine max
aaatcaactcttactccgatagcttccattcaaattaaagttcatttcaattttactccctcagatgaaacatgaaaggttcagcagatactattgggggcccttcttgttcaaacattaaacacaccataaactgaaaacaaatttaaaaaagaaagccaagtaacttttgacaagggttttacacatccggcgtgtctctacttctgcatatggtgctaagtttcatggctacaaggtatgtgaaatattataaaatgaaaattgcataaacttacaaccaacagctaagaacaaatcctagaaccataaatataagccatttctgcattgatacctgatacgaagaagaagaagcaccattgcac

SEQ ID NO: 33587 - DNA, 485 bp, Glycine max
gaaggaggataattttccttaaagataaaatcatcaagcagtaattttaaaactcgtcttgctaattgtagatagggcttccggaaattatactatgaaagagcccataagaaaaggaaatgtaaatcagtaaatacatacggatgatggtcatttgaaatcaagctgggggatgattttatcacaccatctgttctgttatgaaaaactattctaatttcttgcgattaaacgattttgatctaatgatgagaatgatattgcctccttgtttccccatcatcaacaactgacagacacctgcagcatacaacaaaaccatatgtatatatggacatcacagacatcttgggagaaatgatgtcatatgaaacactactatactacacaagtttgacattattctcgcttatcttcctcaagatcttctccgaaggcgtgatcaatggccttccgatcaagcttggctgccacatccccactta

SEQ ID NO: 33588 - DNA, 443 bp, Glycine max
aagaatagatgctccaattcaaatgatctgcttataattggtataattggttggagagtcgtaaattattgtaaattttctgaaattatcttcgattcctcctattaaaaaaaaaaaaaagaatagatgcttgagcacttaacaagttaaattagagtcaaataaagcaacaaagtgcttcgattgattctataacgtgaaaataacgaatttatgagtagtagtagatagtgtagggtgtttgtttatatatcgcaattcgcacatcattgtcagggtatcgattcgctcgggttgtgcgcgggctgcgtgttttttcttttattaatttattaatataaggattggatttgggattgaaggtgaaagacaccactctcctctgcctctgcattgatttgtgataacagataagtcagggaaggttgatgttgattgtcaaa

SEQ ID NO: 33589 - DNA, 455 bp, Glycine max
acaattcatgctattaacttcagacttggaacaacagttaacaccaaaagtaattgatgttaaagcatccttggacaattaaagtattagtatgatactatttctactgtattacaagataatccgcatcactacggaaagcatcaccagcagtaggaggtaagttcttgggagaaatatttttccgcatttgagcatgagtttctgcttcatgctgaaacatcttcaccaattcttgcagctcaagtttccttacttcaacctgttcctcaacaacggggtttttcagacccaaggcaaaccatgcctactgctatcaccactactcccagaacgacgaggatggccgtgaaaacaccaaatgcataaggtgtctgttctgccccaggtatcccatcaacgttgatcccaaataacccagtaatgatggtgaggacaacgccaacaccaccaaa

SEQ ID NO: 33590 - DNA, 998 bp, Glycine max
  unsure (1)..(998): unsure at all n locations
accagggatgctggacttacacagtgtgatatgacacaacttagggtcatgaccgaaagcaaaaggagtgacagcagttcccacatgaggcatcataacagtaaaagcaacaacaatggtatatcaatgaatcagacagaagcaagttggctatcttctcctcaattatatcaggacacaaccgatgataacaagagcatcttagcttggcctatttcgaaacctcactcagaaagattgaacaatgatcatttccttgaccaggttgacaagaacatcaacaaagtagaggctgctacaagctatagattgtttgggattgaccttattgatcatgcaaggaacaactctctttctgtagagaatgcgtctggagtcgcctctgagtgcaaaactgatgtaaaccacgagtctgatctctcataggcttctatagaatggaaccaagaacaactactagtatctccaaaagagactcatagcaaacaagtttgtagcagaagttgcactaatgttcanatgcacgtggttgcggtccgtcgtgctgtggatatgaccacattggatggatatgatcaacttgtagatgaattggagaagatgtttgacataaagggacagcttcaacacaggaataagtgggaaactgtcttcactgatgatgaaggggatatgatgcttgttggtgatgatccatggcctgaattctgcaatatggtgaaaagaatcttcatttgttcaagccaggatgtgcacaaattgagctcagggagcaaactacctatctcttctatgggagagattgtaataagcttaaacacaaccgagacctgaaacttttacattcttgttcttactattttgatggatttttttcttttatttttctgatgcttttattgtgcttattcaaggtaagaatgttagtttgtttttggctaggcaagtttcatgctagttgtgaaacactggctaattgtagctcaatttagagattc

SEQ ID NO: 33591 - DNA, 299 bp, Glycine max
cactgttcaagctttccatccatttataatatgcctaacgtgtgttgtgtatcaaacacattgagaaacttgctcaatcttgctagactcagttcaacgtgaaccatgatcaattcaatcaaaatatacatggaactcgaccctatccgatgaaaattccttcctggacaagatagcaatgtaggaagggtggcataaaaagcaacgttgtgcaagggaaagaaatataaaaagtgaaagacagaaagacaagaatttttggtaaaccatgctttattttccaaaatttggcaacaggc

SEQ ID NO: 33592 - DNA, 473 bp, Glycine max
agagcctatcacaatggtgaaatgtcatcatggccttttatggctttagaggccattttcattgcctatttgttctcagttttcatcaccattgacacaattgtgagctgcatgttttacaaaagctgcaaggtgggattgaggggtgatcaggaagacaagcattttttgaggattgaattccctgaggaggaggacagttgtggttacttggtattgaagaattttgaagaactaccttaagtaacataaggtagcatattgttgtcttcaatcaatttggccatggcttttctgcttatgtttcccaaaagggaaggagctacaagttattcaaactatatactatgcatttgaaaaattccttcatgttactcgaaccaaatcgagcaactccccagggcattaaggttttcaacagagggacctcagctcagctatgtgctaaaactaggagattgattcaccatttt

SEQ ID NO: 33593 - DNA, 247 bp, Glycine max
ctacaagttattcaaactatatactatgaatttgaaaaattcattcatgttactcgaaccaaatcgagcaacttctgaggtccctctgttgaaacctttatgcagaaacaagaagctaaagattgatctaccattatattttaatgtctttcttttatgttgttcaaatgtcttctttttattccatctctctaccttgcatatcttattaatcttttacttgtgaataatacaaaagctcctgttt

SEQ ID NO: 33594 - DNA, 737 bp, Glycine max
ctcctatcttcttctcaatctttgatttcatcatccttttgaaatttaaaaaaaaaaaaaaaaaagaacacaggcattcacacaatgccttatagcctatagcgttgttagtagattaaatttaagtattgaataagcaagcaagcactctgagaggccacccttttcccggaaaactaagctttccgtggtgttttctgggaaaatatataaaagaagcatcatgagaagtgcaaaggaatgtgtcagctttttttctccatgtggggtgactgaaaaaaattgagctttgaaccagccttttccttttgaggtagctgatgatgctgatggacaattagagcttgcagaattcatatccagtggagtgtttttgaggtgattatcatcaatgtctggagctccaagattgaggtctatgaatgttgctgattcagaggcaaggcctgtgcttggaccagctggaaacaagactggctctttgagttcaaggaaaacagcttcaaagccactgaggaagaaggttgataagttgctggatgagattgcatcagtcaaagagaagaaaccccatcaagtgttgttgtcttcagttgccacttcctctccacagtcacattcagccagtgtttctttgctgctcccccggcatgagcagttactgcattctaatctgtccctgaatgcttcatgttcatctgatgcctctacagattcatttcatagcagagcatcta

SEQ ID NO: 33595 - DNA, 533 bp, Glycine max
ccggaacacgacgaatcggaggctctgacgccgcagaagaagcttctcgacaacatcgatcaggttgaggaagcggtgcgcgaagaactgaacaagctgaagagaactccgagcgcgaagagaacagagagggaaaagcgggttcgcacattgatgtccatgaggtaaacgaattgagattttgattttttttttcatccacagagccataggcagcagagcagggttattagagtcattttactctggactgagttgattcagcgggacggtgtttttcggttcgctttgcttgtgtcttcggcttgaagttgcaacatattattctctagtttcgttttttctaactttcttgttggaacttttttgattagtagtgttcgttgatagatatatccatcattttcttgtgatggttagtgattcccagctcctgttgtacatatttcccatacatttcgggttggtgattacttcttgtgtaccaattgcctcaacagttcaagataacaatcgattcgttttttggtgcc

SEQ ID NO: 33596 - DNA, 709 bp, Glycine max
gctgttttatgtcctctaatttatttttattttttatacccatggccttctgtccaatcgcaataaatccccgttacccttttatctcctcattctccctccggtcttcttactctcaacgatgtgggatcagagtgtgaaatgaaaccatgagtctcctctttccaactttgataatctcattggttattcttctcgtcactgttaaccaatgttgcgctctcagtagagacggtgttctgttactctccttcaagtacgctgtgttgaacgacccactctacgttcttgcaaactggaactacagtgatgagactccatgttcctggaacggagtttcttgttccaacgaaaaccgcgtcacgtcgttgttgcttcccaattctcagcttctaggttcggttccttccgatctgggttctattgaacaccttcaaattcttgacctttccaacaactcccttaacgggtctcttccttcgtctctctcccaagcctccgagcttcggttcctgaacctgtctaataaccttatcacaggtgaggttccggagtccttgtctcagcttcggaatcttgagtttcttaacctctccgacaatgccttggcgggaaaattgcctgaaagtttttccaacatgcaaaacctaactgttgcttcgttcaagaacaattacttgttcggctttcttcccagcgggttaagaac

SEQ ID NO: 33597 - DNA, 316 bp, Glycine max
  unsure (1)..(316): unsure at all n locations
nnnnnnnnnnnnnnnnnnnnnnnnnnnnnnnnnnnnnnnnnnnnnnnnttatgctaaagatgaaatttcataaccaaagcagctttatcatcaatatatacatctcaatcttaaaatttatcctcataagaagatgacaatatgcgggcagtaactgggtggatactggtaccaatgtgatgctaactaactctgcttacataaatttggataaggttaatttcatggaagtgagaaagaaggtcctcttaaccgctagcatttggtgttgtcaacttgctcaccgcattagaatcaggtgatggtggaggagggt

SEQ ID NO: 33598 - DNA, 709 bp, Glycine max
gccgtggttcttttccgggtttgttttgtgtcatgtgctgctgcaagccctcttaaaccctatcacgctgggtttcgattagaaatcacaaccaacgaaatttctgtcaattcagcgaccaataacttcttccacctctgcttcctctccgcgccacagttaagtttctcgtggaattggaaaatccaggaattgaagaacttatgtgatgaactgtttgtgttaaatggccaataattctcaaccctccagcatgcagtttcggccagtcactcaagctcagcaagggcaaccatttgttccaatgaattcacaacaatttgggcctgcaggacatgctattccttcttcaaatgcggggatgcctgtcattcaaggtcagcaattgcagtattctcaaccaatgcagcagttgactccgagaccaatgcagcctggtcatcctgctccttcatcacaagctatacctatgcaatatattcagacaaaccggccactgacatccattccaacacattcacagcaaactgttcccccttttagcaatcatatgcctggcttggctgtttcagtagcagctcctcattcttcatatttcacactatcttatggtcagcagcaagataatgcaaacgcattggctcaataccagcatccacctcaaatgtttgcttctcctgctggtcaatcttggccatcctctgcatct

SEQ ID NO: 33599 - DNA, 552 bp, Glycine max
ggtgaaattaccctctgggaactcagtttacgagaaaagttggtctcaaagccattcaagatatgggatgtgtctgcatgctcattaccatttcaggctgctgcagtcaaggatgcacctatttcggtcagtcgggtcacatggagccctgatggaagttttgtgggtattgcttttactaaacatttgattcacttgtatgcttgcactggaccaaatgagctaacccagcgtatagaggttgatgctcatgttgggggtgtgaatgacttggcatttgctcatccaaataaacagctgtgtattgtgacttgtggagatgataagttgataaaggtatgggatttaaatggacgaaaactattctcctttgagggccacgaagcacctgtgtattccatttgtccccatcacaaagagaacattcagttcatattttcaactgccattgatgggaaaataaaggcatggttatacgataacatgggttctagggttgactatgatgcccctggtcactggtgcactacaatgctttacagtgcagatgga

SEQ ID NO: 33600 - DNA, 465 bp, Glycine max
aaaatccccaaccaatctgtagatacagaagggcaaaaacaaaactattttttatgccctttcaagtacacatgcaaatattaaactatttcaatttcttaaccatttcttagccccacagacatacacaaatgcaaaataaaaacttatatacccattaagattctacaacttctcggggattggcttgctctctctttctctttaacttccattcactttcttacaatctggtctgatttctccttgagttccagtcaaagggctgatgttacccatgttgatcatcgactgagcaaatgctgcgaagaaggctgattggttgttggcaaagttgttaacaatggagattgtggaagagccattcgtagagaagagttcttgatctgtttgaagaagaccttggttgatgagaagattggtgaaatagttgttgtcaaaagtgtcaggggttaagaaataaca

SEQ ID NO: 33601 - DNA, 634 bp, Glycine max
aaaaaaactcaacaacccaactcaaacctacccccttcatagcaaccaagccaaaccttctcctgctccacaatcaaattccatcaattaaacatccctataggcttctcttccatggaaaattaccattcttctaaatccttgcatcttccatgcaaaaccttatctctagttctcctttttgtttacttgctacttattggttcttgtgatgcaataagaataggccaaactatgaagctgaatgaaagaagagagattctcaagggaaagcgcaataaccaacatggttttccatacaaaagcatggttttcaacttcttccccaaagggccggtgccaccttcaggtccttcaaagaggcataacgcagtggtggattcaacacctaataattgaagtacatgagaagtcctatttgttcaatttttccatttttttcttccctttttttcgtagaattttttggttttgtaatatttatgggagggttgcaaggattcttatcagatcaaatgtcaagccccaatagatcagatccttaaaagggtctgagattttttggctcttattctagatcacacatgtatagaaaagattgttgacatatacaggaatatgtatattattgttc

SEQ ID NO: 33602 - DNA, 456 bp, Glycine max
gcagagagattttatgtttcattgctctcttatttgtacaattaatcaacatggagctacacaggaaatggggtcactaacaagaaacccccatgattatgatgttttaagttgccttttaagactcaaattttgtgttgagcctgcaggttaacgtaaatgaataacctaatatacatggtgtcttgaaaaggggaaatgcttcaaattcgttgcttggacccagtcctttgggaagcaaggcatgtgtggtggtccattgcttttggagcttccgattcgtcatttgctaggctcgagcatttacactcattgcaatctgcaaagtattttccacttatcccttctgttttggggctcagtgctacataacacgtagttgatgcaccctgtgatgtcgttttgagtaactttgatgcaataaaaaatagggaatccgttattaagcccttatga

SEQ ID NO: 33603 - DNA, 498 bp, Glycine max
ttcccttgataaaaaaacaaaagctgaatacaaagagtgaccatggcacacaagttccatgttcgctcaaataggtttcccactggatctcatcctagcaccattacagttgaagaacagctgaacaagctcaaaacttgggaaaccacttccacatccacatcaaagtcaattttcactggcttgtccttgcttcaagatttgcatattcgcttagaagatcttctaaacatggcatcaacccaaaagatgatttccaaccatcaaggcgaggaatgcatagaagagcttcttgatgggtcagcgagaattttggatatctgcggcatcacaagggacaccatgctacaaactaaggaaaatgttcaagcccttcattctgctcttagaacgagaaagggggattcaaacattgaaaaaattggagccgaatataattgcttctcaaagaagatgaagatgaatgtcaagaagttgatgacatctttgaagcagatg

SEQ ID NO: 33604 - DNA, 719 bp, Glycine max
gaaagaaattaatcttaaattatatggagaaaaaaatattgcatacacaaatgtaaaaaggcttcattacatccatctgaaccatgactaatagctcaaaacctataatgaatacaacataaccctcactctagaatgatatacacaaaaaaaataaaatatagcactcaatcagcgcattgatttaggatatacattgtctcatggtacagcaccgaacaatggacggatgatggaccgaacaaagaatcaattgtgaaaaaaattaatatagaaaacaatatgctacaatcccaacatcttcgtcaaccgatctgaaagattagctattacaaaccctgcaaatacctgaactgagccaagaatgtatactgccgaataatgccgaccatgaattaccatgtcagccaccatagcgagaggaatggtgagtgacatacccaaagtggccacaagaggagtagtccatacaacacaaagtgcccagaagtagtctgaaagtacgcttccaataaatccatttgcaagaaccacttcgtccactttagcagagtggggaatggtaaatttgggttcaattcctaaggccatcaatggccagatgagccaccacaatgctacaagtgtaaacaatccaatatacccaaacagcttttgcacatcaaccctttctccttcatcaccagaaaacttcttaagaagaactgtaaataaacaga

SEQ ID NO: 33605 - DNA, 654 bp, Glycine max
aatggagagagttttcaagcgtatgaaagatagccagtgtcagccagatgacacaacatacacgatcatggtcgaggcatatagaaaagagggtatgaatgacaagatatactatttggagcaggaaaagcagacgatgatgactgatgataaaaaagttagccagtttgagaatgaaatcttgatttgatttttgatttatagttcagactgctaatgcatctgtattctatacctccattttccgggagcggctgttaatttttgttttgacatggagtgaccagttgctgagttgtgctatgaaacttcatttttcacgatgaatgacagctagtcctgcctaacttctgtatgttgttcaagttaaatttatgttttagcatccatttgattcgcagaaaagaacttaacatctgcagcttttggtgtacagatttaatgaactgatagtagagtttattagtttatttttgtcaatttagagctcatgttatattgaagtgctgcctttcattcctgctgcttaccagccttgtttaaaggaggctatgtttgatgacaggattagaaagtgttgctagtgctccaaactatacatgggttcatgcttttgtaatgtacttaattataagatatctagatttcagtatt

SEQ ID NO: 33606 - DNA, 355 bp, Glycine max
ctcaaagaaagtaaaagatgaaatgtggtttcatcgattgaactcataagtacaataatgtgtaatgagaagggaagagacagaaagcaaaacttaatcatttggattacaggccatggttcaaagttccagagacaggaactgaatgttcttgcaaaaaataattaaatgaaaactcaataagctcagccaatgttttacaagaatgaatattattatttatggcaataaactggttcagggctatattggagctagctttttttggcaatgtcttttccattttcagaacccaatcacatgttgcatgttggagcagaagaaaatttttgaaagaatgatgatacttgagcga

SEQ ID NO: 33607 - DNA, 486 bp, Glycine max
agaaaaaagtttcatagtttattgcattttaaataagttgcaactgaattataacatgagcatcacaatatggtctgttcttataccactttacacaagatttgtaatcaaactaaacattatgcaaactgacgttaaataaataataaaaaatgcattcatctgttactagctagagtggaacaatgtggtgttgcctatggatttcaggatcagctgctcaatcaaagagatcattcttatttggaagcattgaaatgctaatcaagctggtacctggtaattctgccggaacagttacagcctactatgtaagttcaccggatctcagagatctcaaagacaccaaaacacgctcttttgaacaaccaaatctatcaaactcccgttactaaatgaagtgtccatgtttttcactcaaaatccatacagttatcctctgcaggaagccaacatgacgagatagattttgagttcttaggcaac

SEQ ID NO: 33608 - DNA, 465 bp, Glycine max
ccaatggctttcttttatttgagatcagtagttccacagggtagcgaggtccattggtgcaactgcagctcctgaaccaattgggttgttttgattctcaaagtgccttttacccaatgaagagatttcagccttcacatcagtagaaagacttgttttctgtgagacactgaccatttccctctctggctcaaaaccattgttgctcatgttcgatccatttccttggttttcaagaaaggctctaaggtaatggttcgaagaactaggtaatggcaaagttggtggagcctgaagttgaaccccctgagtattgtaaaatgaatggtttgaagaaactccataaagggtgttgctgttgatgctgatattgatgttgttcaaggaatcaaagattcctctaggaacatcaattggattggagaagcagggcacgtaagcagaatcagtcacactcagtgcttt

SEQ ID NO: 33609 - DNA, 515 bp, Glycine max
ataaaagaaataattttattatggcacgcataacaaatttcatctttataaaattacaaaaataatattgccaatgatagtttacaagaaaaatatagttaaattaataatacttataaatttagcttattgcagatctcacgccctccatcttcaacatttctagcaagaaatcactccatgtgtctatgggtcctggcaggcaccaatgcacacaatcattatataatgttacgttctcttgtggccaatgtccatatctacttggatgaccatctggtctcaataacattgcttgtgtggtgtcaagtaacttcaatttcaaacccttctttctaccttccttttcagctttcttgaattcctccaattggatcatatatagctccaaattagtgccctctaaccttgtctcattgctcctagacggcttagttctcacacaattcccaccttgattccattttccattctcaaaatgagatggtgcaaatgttctaaggaatactattccc

SEQ ID NO: 33610 - DNA, 472 bp, Glycine max
atttcatcatggaaactttggcttcacaagctatgaagacggtaactttaggaagatcttcacattacgattcaagctcaactaaggtgaagattacaacaagaggttttggcgctaatgcagacaaagtagtgcagccagagataccatgtgtagagaagaatattccatgcaggaccagcattgatgagaaagtggtggtggtgggagatttacctcatgctccaaagaaaatgaagcctctgcgatcaatcttgaaagttggtgctaatctcaatgccaaatcaaactgaatatgttagttaatttcgtttggaatattgatgttatcaaactagtttttcttttatggtttggatacgtgtatacctcgttctatttttttaagtatacttaaatgagtggactcattcctgggtaagctagtagttttgttctaccaaacaaacacgctttaatgaatgaattcctt

SEQ ID NO: 33611 - DNA, 437 bp, Glycine max
agctctcaaagttgtgaaatgactttgtattttttttcatctttgggtgcatatttatggtgaaatacagtcatggtagaaagggaaccagaacaaatggcacatcactggccccatctaattccacaagttcgggctgcttgtcacaataccacgacaatggtggatttttcacaagctcgttgattctagttctacttttgtgtgcagttgtgtaaaactaggcttatcttctgttcagctttggaatataattaatggtggcattctcttccgtcttctggaagattgcgtcacagcatagcttatttagtgttcctcgctagaaattatttgagttgtccaattgatcaaaatgtatatcggcaattgtatcatgagttgtccattgaattttgtacaaacagaccagagtaattatttgacatcattgctgt

SEQ ID NO: 33612 - DNA, 651 bp, Glycine max
tgggacctctagtcatgcaacatgccatggtaagcatgaaggcactagtcagtcctgttcagctgattataaaagtatcggctataactttattaatgagtggagagcacaagaaccactttttcacagcattgctttacagcaatatattcctcttatgtgcacaggagcacgcggccggactgagagacaaaccgggtaaacgtagagatcactatcacacatgttactgtttaagtggactctcattgtgccagtatagctggtcaaagcacccagattctccaccgctgcctaacctagtattgggcccctactctaatctcttagaaccaatccatcccctctttaatgttgtcttggaacgatatcgtgaagctcatgtattcttctttactgagtcctgaccactgacctggttttagctgccaacatctttatgtatactgtaaaataaattcattggatttggaaaaatgcatataaatgtaaaacagcattggattgataggttttatgtctccgggttttgatgattattgataatttgacatggatatgtactgttccgaatggcaagatgtgatctgtaacttatctcatttagtgggataatactttgttgttgttgatatgaatatgtatattcgt

SEQ ID NO: 33613 - DNA, 347 bp, Glycine max
ggacttggcaaacgatatggccttttgcatttgacccaatttattactcataaaaatgaggctaagcaagagagattagtttcaagaggcatagagtggatgaaagtacaatcacaaaaacgagtagtattctctcctttactatttgatatgtattatgactaaagctgttaagaaaaacgaatgaaaagaattccattttcacccatttactatcttggctgtgggtgggacaaggcttgggttgtgatggttgattccgccctcgacgtcgtcgagggcagcacgccttttgtttacgacaatttagtttgggttggatccttcaaggctgtctattgacttca

SEQ ID NO: 33614 - DNA, 251 bp, Glycine max
aaggtttcccgtcatcactgtatgacgtcctccttctttggggggggggggaggggggggacaaaaactgaagcatgggggagcaggaaggtataggcgcgacgacgagaccgtagaagctcgttcggtacacaaccatcgacgcgtaaggcccgggtggggaataaccgatagatagaaggggtgtattttgaagcgggtgttagtgggctaaaagtgttagtatgaggaacaaggaaggtatagcggtt

SEQ ID NO: 33615 - DNA, 544 bp, Glycine max
ctcaacttaatggagctgtctcacgcaatgtttaacccattgattgaatccaaattgctgttatttgggactggtgtctcttcttccctatcttctttttcccttagatgtgggtgtgacagatgaaagcagcagtagcaccagtaatggccagaagcaagattgcgatcttgaagtggttgtcaaatgtgcagagaaataaaggttcttcatagtcatgggaaatggtgtgggtttcaaatagggtttggacttgaaacactcttggaccatcaattgagtgaaccaaaatttagttaactcacttggtgtctcttattctcctgcgtgaaccgaagcagaaaccagagtgtcattctattgttttgtctcctttgttgtggttgcaaaagggtattagatctgttatgttaactggtataaaacatgagtggttcaattccataggctcgaaggcaattatgctaatttggtgtggtggaatgttcgtcttggtttagtaaaagaaagaatgctgagagctcataaacgtcatgcctgccac

SEQ ID NO: 33616 - DNA, 300 bp, Glycine max
ccaaggaaaggtttcccgatcatcacgtgtatgacgtcctcctatctttggggggggggggggggcaaatgttaatcaggggcattgcttagggatagtctagagggatacctagaagagtttgtgaataccttgataaaaggtggaaggtcttcagccttatgattttttgcgtttagagtaacaaatatgggatgagtgtaaatacgaggaatgttcatttcaggattgtatttttgtgggggggcggtgttttagtggggttggggggcctgggttgggatcgggtggcgtttaggg

SEQ ID NO: 33617 - DNA, 387 bp, Glycine max
aactgattcaaccttttttccttttattagaagtgtatcccgatttgactctttgtgtagcaagcaaacaaaccctttgtgtccattctcttgttacaaatgctaatctaaagaatcacaaacaaaaagggagacaaaaaagaagaagaatgcaacatccattatggccaccattgttcttaagttctagttcttgcagctcttcatgtataagtgaacatgtgcgtgcaattgtaggcttgcttcctcattttcattgaactgctgagactgacagaaccccttcccattccagaataaagcatatagtgcatgaagatacaacttaagaaaggaatgactgagccgaggcagcttcagcaacggaatcaactatctctaagtctc

SEQ ID NO: 33618 - DNA, 608 bp, Glycine max
cttagattatcaaaacgacaaaattgcccagatccgaaatttttcattgaggaggtggataaatcatttgaattttggagatccccagaaggtgaatctgtccacacagctgatcgtatgcaacaattgcttgagcatgttaggcgctgtaaagtcaatatagatggcaatgtttgcgctgtgatagttaccacattggttctggagggttggcagcgaagacttgatccagaatatgatatgttgcacgctttgcaaacactgctatttaaagctgacttggcacaatctctatcttatgccattgaaggattggttgctccgtgaaatggccatttttttgctcaaaattttgaaaatgatggtgcagaagtattaatggtaaattgctaattgcttacctacgaatgatgatcttccaattttatatgccttttcttttccttctattcttattgtgtttctaataacacgctgggaagtgggaacctggcattgtgaaggtttttgaaataatttttttatattaactcatgatgtaaaatttaacatgcaatacagctgtgtaaattaatcggttaaatcaaatcaaatcccttctcatgtac

SEQ ID NO: 33619 - DNA, 439 bp, Glycine max
attcagctcaactggtctggttcaaagatgaaagcaaagttgtctgcatacctgttgttgtagctgttgtatcacctttcccaccgtctgataaaattgggattaactcagttcagagagagttcgaagagataattcccatgaaacaaatgaaaatggactggattccatatatcccccttgaggaccgagaaagccgagttgatagattaaagtctcaaatatttatcttaagttgcacccaaagaagggctgcattgaaacatctgaagttggatcgtgtaaagaaatacgagtattgcttgccttacttctaccatccgtttaaggaagatgaacttgaacagagcactgaagttcaaataatatttccagcagagccaaagccggttttctgtgaatttgattgggaattagatgagcttgaggagttcactga

SEQ ID NO: 33620 - DNA, 456 bp, Glycine max
aaagtaataaactatcacttcataggtcaggtatcatcatgataaaaacgcttttaacaggcccagaattggacggcaacaatgggtttgatctttaaaatagcacatggacacttcgaaggcatgctatgcctgcttttgtcccagaagttgaagaattgaaatcttgtgtgatgagacaatcgatcagtacttgactataaccctaaaattttagctaattccaattcctcccagtgtcagcctcaagcattacgcatccaaactagacactgttgatatttggggttcggatttcttgtttttctcttgcatcattaattctacaaagtccctaaaagcgtattcagaatcatggggtcctggggatgcctctgggtggtattgaagagacattattctttgagcagggaatgcaaggccagcacagcttccatcattaagattcctatgagt

SEQ ID NO: 33621 - DNA, 441 bp, Glycine max
aagaagggtcagaatctgaaatggggcatgagtcattacaatggaaataaattgaacttgttactacaaggttgctgactaaacttgaatcatctctgctacaatttcgtaggtcacgcgttccaaaaccgcttcagcaacctcaacgcaaatatgtctcacttgcggtttcaactcactccattcatccatcgaatccaaactcagtaactttgttattagatttgtctcatttccacccaactcccttgtcctttcccatattatcttccccagctcttcgggtcccctagtcaattgtttcaaacattgttgttgtctacaatcttttctcgaaagatttataggagtactaatctctctcacacaataaaataaaagttgctttgccttatgcaacaacgttttagacttcaacacgtggcaaacatctggatttgc

SEQ ID NO: 33622 - DNA, 680 bp, Glycine max
ggtacccagttcgacggcctcagcaatgctgtgaggaggaagaggagtcagacttcgcgcaggcctcggcctgattcacagcatgcttctgaaggtcaggaactgtctcccttgtcgtcgacgccttcggaggatgctggcaaggcctctagtgatgagaatgttggttacgatgcgaattccaagagaaaggaattcaatcttaaccattgtgtctctcaaacctcctctggtactggagctgaagacgaaaaatcccataaaaagagtaaaaaagatggagggttccatacattttatagtaatgagcctgtacggagcggttcaaataataaacgctgtagtgaaggggttcttgctccagcaaattggaaaggttctagcaaaacaaaggatagcttggattcagagttgagaaatgcagatttgtatggtggaaggaatcctgagagcatgagtctggcacagtttggtggctctcacgatggattggggaatgagaaccgggttaaaaaggttaaactcaaggttggtggagtgacacgtactattcaagccaattcggctaccaatggtgcttcgggaagtggaacaacaatgaagtcttgttcatcagatgcctccagaccacgctaaaagcaacagagtcattcagactataataactctccttcggataa

SEQ ID NO: 33623 - DNA, 508 bp, Glycine max
cttatcctcaagctcaccatcagaccctgactcgtcttcatcctcataatctgtgtcctcatacactctatcagatctagaccttttcttaccgtctttgcctgaccttggggcagcattttccaaattagagacactagatagctttcgatgtttcttgtttaattcttcttcatctctatagactgcagaaacttttgacgttttcagcttttccaagtaccgaatctcatcatcctcgtcatcgtcatcaccaaattccccatcaagtacacgtctctttggtactcgcttgctcttacgaactggttcagacttgtctcccagcttactagttgtgttctttccagaaatcttccccatcaatgattcctccttcccaagaccaaaaccacccctcgagaaatccttccacggaacaccttgtagacgactcctcttatccgaaggagagttattatcgtctgaattactctgttgcttttggcgtggtctggaagcatctgat

SEQ ID NO: 33624 - DNA, 586 bp, Glycine max
aaattctactttgattgaatcaaaactgtaataaagttcctaagactggtgctatacagaaaatttgagaaatgatgtacttcaacttggcaaacaaaattctgagacaagatatgctacaacaaggtgaaacagctaaaaatgaggagagaaaaaatgttacaatgaggtcatagtgtgatgagaagatattagaagaaaaaaaagaaagaaagaactgggattgccatgaaatgcagtaagcatgacatctcaaaattgagaacaggttatgactgtggttgttgttgctgctggtcatctgtatgttgatgttgctctgactgttgtgattgcagttgttggtcactttgccagacccaaacaatatcatgaagagaaggcctaatatcctctttcaatatcttttgatattccaatgtatctccatttgattttttcacctccaccatatggaaacaaggtataacctcgaagatctcagcatcaatggataaaactcccttcctaccttcattgaggctctctaatttcaacaaaccagcagcttttttttttattttcatcctcagttgcttagcaatgt

SEQ ID NO: 33625 - DNA, 569 bp, Glycine max
atattatattatttcgcaattaacgatatatccatggtacacgagtaaccgtaatttgacggtcaacaacagtagtacgcaactagtaactttcagcgatccaataagaattcctttcattattttatgcctcccttcatttctctcaaggaaaagatcgagaagccaaaaacgataacatggtttaagacagacagatgaaaacaacaacattaacaacaatttgggagaacatgcacgactcggggtgttcgatattcctcttttcgttcaacaagtgggggccccccactcacaacatgatcgagcaatctctcacagtggtgtaccctccaattcattcattctccctccatcaaacctttgaagtttgatgttttatcttacaagctcataaacgaaacgtgttcgttcattggttgctagtgaattggatcaaccccattggtgaatttatggaagcaaactttgcaagctcttggggaaggtactgaggtcctccaccactcacaccgagaaaatcccttgtcaaattgttctccacagcattagaatgaagcttcaacttc

SEQ ID NO: 33626 - DNA, 271 bp, Glycine max
cggaactagtgggccttctgacacatttggaaacaaatgtctagctcatagtccagagtttgagttgaagaatgttgagttgtggggttttgcacatccttccccttttcatggctaagatgcttttgtttggaagtccaaaagaagcgtctctttatttttcttctactctttggatgtcgtttagcggttgatcaatttgatgttccgttactgttagacatgtcccaaattcttgtagtatatgtatgcttgaaattccattttctag

SEQ ID NO: 33627 - DNA, 502 bp, Glycine max
ccaaaaaccaagtgaaaagaaagggcaaaatgatcatttttcctagatttcaggcatccattcgcccatgctagcaactagctcgtttgggctaatcaaatttcttcagacttaagcaaccaactcacttgggtgagttatagctcgcttgggagaatttatgccttcatcactaagtaacaaattttcttgggcgagctacagttcgcctggcgaatttgtctacacctcttgaatttttttctataaatagccatgcaaatgaagaagaaagggacatccaaaagcagaaagaaaatgtgagaagctaaggaagtgaagaagaaaatggaaaatgaagcccgggcgctacaaagttgtgaccatggatcgcatcctttgtcatttctcttgctagtcttgtgttctatgcaatgatcagttagtttttccaaaggattggatgcaatctttgtacccttatgtatctcttttgatattatatatatgtatgaatttttct

SEQ ID NO: 33628 - DNA, 662 bp, Glycine max
agaaacagaacagttttccaaaacgggctttacaagctacagactctgcctacgaatcaattagcttgcttacaaaagataaacagcaaattaattgaatcaagttaaggctgacacaatattatgtttgtcagcgtgatcaaacgtcaaaatacatttaagacaacaaaactgattgagcagatacaattgatgctgctactgttaaaaaagccaaagttagttaaatgaataacagaaaatacatttacaaaatacacagtatggccaaaaaatatttacacgttccgcaataacctgtgttaatgttagtcttctaccgtctggatctcacccatcatgatcctgttactcacgacattgaatcccaaaactgaagagctgaccttttttcctttcctgccgcctttcttctttccaacttttgagaaggatccatcagtgtaacctagctcctgtacatccgtatttgcagatatcatgcctccagcagctttctgatcattcccagtttgaaaagctatttccaaaacatctgatggtagcaagtccatgtaattgaggaatttatcaatgaattcacgatcagggtcatatgatcccaggttttctgtgagaaacatctctgcttcagatcttgtctgcttcaagcaaaactcaag

SEQ ID NO: 33629 - DNA, 463 bp, Glycine max
caacacacaaagctgggaagtgcatttatcgaattaattaccaatgatatgggggtggggtggtactggatggcatcgacagattgtatttctgctactccaccaagtaccaatttgagcacacaatctatagtttttcatcaattaaataagccagtcaatcaaattttatacattttctgagttccttcctcatgctgtattaaacgactgccacaaattcctgatttacacagattccagcctgtcacttgtgcagcacacctttccttgccattttcggtaccttttgaatgtgattcttctgttactccaatgcttcataatctgtcctctccctccacttactcttgcgtagttttataggacggtttccaacatacttaccattcatttctttaagagcaccagcaaggtcagaaggattggcaaagctcacaaatccataaccttttgttttacc

SEQ ID NO: 33630 - DNA, 563 bp, Glycine max
aaatctgaaatccacatcttttttaaagtacctgttacagttattgtacacggattggatgggctgaataacgcccaacaatttctcatttctggaggaccctttgaatgtaaaaatactataaaaaaaatgactatctaatctacataactgagtatcacgctgcttctggttgcaaagcatggaccaagggctgcttagattgtgccacaggaagagacctgctcataacttcctctgggacttataacaaaatttatagttctatcatcatacatacacattggcctccctgataggaaactgcactccctgctctcaaccataatgggaagcttcagtaatcattgtcttcatctttcattattgtgtttggaccatcatcgaaacccgtgctaggggcaagctcattcaaatcaaggaagcgtctctttcctgtgctgctctcaacttcctcctgaccaggactgcttaatttttcaggaggctggttttgttcattctcttctactgctggatatggaacaggctcatctactttcttttcttgttcttcattatca

SEQ ID NO: 33631 - DNA, 335 bp, Glycine max
tccaggaaggtttcccgtcatcactgtatgacgtcctccttctttggggggggggggggggggaactataaaagatggtcagaatgggagaggaggggatagctagctagactagacagaccttgctgtgtaaaggacgtactaccaataaacagacacacagttaatcagtgggaaagggtatagggcttagaaagagagaatacaaaacacccgagcccagagcacggaacggggcagtgtaggtaatgatacgagtttaaattaggatgtggaacatgggcaatggtatggcgatgttaccagtagcggcggtgtaccagtgaagttaatat

SEQ ID NO: 33632 - DNA, 452 bp, Glycine max
gaacctgaattgatcaatataattaaacagcagctggacatccaccctttctagggtcacttactgctgttagagtgccatgctttgtaagtgatttggtgttttcaccaactttcctattgaagttcataggcgttttgagagtttgcacaataagctgagtcacagctagtgcttcagaacctctcagttgatgacctctctcttctaggaaaagcctactttcttttgaaagctcaatgtgatcgccattatgagcagtcaagttctcataacgaactacatttggtattagcttgtgatagatccttgggctcacaactgcatccaagggtttcattcccaagatgaaatgattaagaaagacttgaactacagctgcaataatgttcattccaccgctccctccaagtaccccaaccaactgatcatcctttgtgacaataagagga

SEQ ID NO: 33633 - DNA, 225 bp, Glycine max
catgcgtctagctatctcgatcgaactgtccaaggtcctgtcaccgaatctacgtggaggccatgccaagacctatacacaccgtcacttaaggttaagtttaattcaataaatgacaaaggacccggtagagtttagggttgtacagggtagtgtacagggtctaggccgggctcggcatcgccggccggggctccgagtcaacaacaacagccccaaataccg

SEQ ID NO: 33634 - DNA, 570 bp, Glycine max
gaagacaataaagattttgattatattgaaaacagcatcataatgacaatgataatgataataataatcccactataattgtataacatctaatttgtttttgcatatccccaaacagcagagagcatgaaccaatgcaaaattgtaccctttttgatgtctttgatatcccatttacagaattaaactaagcagcagcggactacttggagtccaaccaccgcaaattgaattccccctagcaccagcaccatgtacaggtaacacaacaacaacccaaaaataaaaaccctaaaaaagctgagctaaatggacatgtctgtgcccaaactcacctcaccctctcaaattcccttccagcgagggctaggaaccggcacggtcggcgaaagcggaagctgcggaaaccctaactgaccagaagttggggaaaacagaagccccggcgacagaagagggtaggacgccagctgcgaattcagacacccaaacggcacaggcgaagacggcagctgaaacgacgacggtgcttgcgacggaagcatcgcttgctgctgctgttgctcttga

SEQ ID NO: 33635 - DNA, 472 bp, Glycine max
tcgtccttttttttttttttttacgagtgtataaatattgctgatcttttcttttttacgtgcccaaaattgcgttgagttgaatattacagaaatgtgaatgcaagttttatattcctaaacttaagttgtccttgcctttaaccccatcttctcaagtttaacacattggccactccttccaaataccctacggaagcctgccaatgttgcaaggatagccacccaatttcagttcacacgcaatttctctggcacaaaagcataaattggaaggttaacagcttacacagtatcccccgttttccttctcaagcaaatgtaaacaactattttttgccacattcactagagtatgtgttcagctgcaaaagggtccaaatatttttccttgaccctttattattccttccctagtaacagaatatctaactaggccacagagtcatagatcatatgccctacaaattga

SEQ ID NO: 33636 - DNA, 508 bp, Glycine max
cacgcctaacgcgttatttgtttgttccaaatcctccccccataaataagtcattggcaagcatcaagttgcaatcaaagtcagatgccataattcttccttttttgcctttctttcagcttttgtcaatacagggtttcgatatcaatgccttggaaaagacaagcaaacccctatatcatgtcttgccgtatttcaagtagagaggaagacattgtcaaaagttcaattgatatgcgcttcttttctagtgtcaaatgggtgggggtagtggaccatgatgtacgcgcttttatagtggggcttagtttttgtagtgggctgtgggaccttctaaaaggttagagtgtggtgtgtgtatatttttaatagtagtgaagctgaaatggccaatagttgctttaacaatgctgggctttgccgagtcctgcaaaaaatgatgatgctttttgtttgtttagggcgtgcgtgagttgtttactcaaaagtaattggacgacttttccct

SEQ ID NO: 33637 - DNA, 315 bp, Glycine max
ctttcgcgttcgggagcacaaaccatctgtttggaccattggctgggacatgaaccttcttgctgcagcctatgctggaataatatcatcaggtatcacctactatgttcaagggattgtcatgcagaaaaaagggcctgttttcgttactgctttcagccctttgatgatgattatcgtagccatcatgggtgccttcatccttgcagaaaaaatatatctcggaggggtcgttggtgctattctcatagtaatgggactttactcggttctgtggggcaagcacaaggagaacaaagagaaagaggcagagat

SEQ ID NO: 33638 - DNA, 573 bp, Glycine max
caacaaacactaacaacatacatactacttctcactttcttcggacttgtggcctctgcaactgtcatttggcacctggccgagatatctatatgtataggggggacacggcattttgcagtttggagtgtagggagaagcagatgaagcaggaccagaggaaagagaagtggaaggcggggtctaataaggagcaccaccgtgcatcgccaccgggcgccaccgcgaaggcttcttgtaattgaagggtaatttgaaaggtcattgcccaattataaggtgaaatagtccaatatatttgaggagaaatttaagaaagaaaaaggccaagcaagctaattaactggtgcctcatgtcatgtgcacttaccccaaggctagctatatcatctcatatcttccgccgtccctcttaatttcatctatatatggttcttgatttcacccctacgctacttgttcgttcttattgacataattctgctaggaattaaattgtccaaaattaaggtgtggtaccctgttgctgtattgcttatgccaattttaatctttcaatttaaaattccccct

SEQ ID NO: 33639 - DNA, 400 bp, Glycine max
tcgcgagcggccgccctttttttttttttttttggaaaagaaaaggtcacaaacctggtcaaaaacaaattcaatcagatgattacatggctttcttaactgatgtaattcactttaatgaagcaatagattgctttcctttatcacatgcctacaacaactacacataacgtgttaccctagagtaatatagaaaactcggatcatgggcttgcattcaaatgcccaactgctgatacttgtgactctgacttgagtaattatttgctgccatgttctgtgcatcaattataatcttggatagcataatagataatcccatccatatatccctcagacaattacagaaacatttttaagcatatttatccaagacttctcacagcaagtgtacagcatt

SEQ ID NO: 33640 - DNA, 543 bp, Glycine max
ggtgctgaaagtcaccctctctatttgcatggctttaacttctttgctgttggtcaaggttttggtaactttgatccaaataaggaccctgcaaacttcaatcttcttgacccaattgagagaaacacagtgggagtcccatctggtggatgggttgctatcagattcctagcagataatccaggggtatggttcatgcattgtcacttggaagtgcacacaagctggggtcttaagatggcatgggttgtgttggatggaaaactcccaaatcagaagctgtttccaccgccagctgatcttcccaagtgttaacaaagcctcgaattccttcagtttgtttcaacaatgagcaattgcttctaaccagttgcttcaatttttttattttttatttccgttttcgggtgaaaaagaagttgaggcttgaattgagattgaggttggactttttcctttctttggctgagaattttatttatagaaggcgtctttgtctacaaaattgtaatcaattaatttgaatgaaaaatcttcatgaat

SEQ ID NO: 33641 - DNA, 476 bp, Glycine max
agctcatctgtgcttacacattctttaataataatgtctaacatccacactgcaacgggcagcatgaaaaggttgtcaagttatttgcattccctatcccaaacccctcacaggctcagaaagagaatgctagccacttggaccccagaacaggaattcaaccaagtgaggcacagatctggtgctgacatgaagaggaagctcaagtggcatgatcttgtggctcttggtgttggaggaatgcttggtgttggagtctttgtcactactggctctgttgcccttcaccactctggtccttcagtcttcatttcctacatcatagcaggaatttcagcccttctctcctctttgtgttacactgaatttgctgttcaagtaccagttgctggaggagctttcagttatttaagattaactcttgcggaattcttgggatattttgctggggcaaatatactaatggagtatgtgtt

SEQ ID NO: 33642 - DNA, 388 bp, Glycine max
acaacaacaataatactagtactaataattaataagaggaatacaaggctgatatatatacacttttatgccccatgtaaggaattttataggttggcatatatatagcttggtccttaattcaacccatcttttccaaagatactgaagagattgctaaactaattcaacctcatgattttgacccaccacatttcacttttgacgtgctaccgaaatgacataacatcgatacaattcaacaagtgatttcttcagtagtagtactattcaaaagactgcagattgcgcccggccagattggacttgaactcaattcaatgtttcccactactactaaaaagaatcattgttgcttgaagagttcatcaccaatatattgcaacat

SEQ ID NO: 33643 - DNA, 365 bp, Glycine max
tttcgattgtagttctgttgcatcgatgatggaaaatcattgtagaaaatcaattgcgttgtgtggtcgtcaggatggccaaaggttacaccggagagtaatctgtcatcgatgttatttctttgggggggggggaccgatgcttaatgaatgcaatatgttttgttgcaaaatactagtatctttttgtcgacatctgtcaattcaattcattatttcagtccagtgagagctcctgagcagtctttttttttggttttgtttattcattgatattacttgtgatatagtgttagtctcctgaatatatattattccataatgttgaatgaagtcaaaatgtgggacgttccacagacctcctt

SEQ ID NO: 33644 - DNA, 533 bp, Glycine max
  unsure (1)..(533): unsure at all n locations
ctagctatgtcgatcgaactgtccaaggtcctgtcactatgtaggaaggctaacaagcctatggcggctggccgcagcgtttgggtgcggtgtggtatgtggctcgtgccgcccacggtcctggctcacacatcaacagggggcctagctgcgggccttaaatatgggtttaggtctaacgggctaggcaccaccacgtgcgtgaaacgttgccgtttgcgtaacgcggcaaagtcagcagtatttgacctaaaggcaacaaatatacgatttcaaaaattggtggtgagaaacaacattggtagttacntaaaataagcaaacgataaggtactaacttgtttgggtaataattagccccgcggccgatagccggaaaccaaaggaaacatatgatgaaacaaccagagacggggcaacagtgagcatagtaacaaacaacttaggcacccacaagacaacggggcgctaaaagttgcccaatacgaaggccggggcttagggaaactgcccaaacaataggtaacgatggg

SEQ ID NO: 33645 - DNA, 418 bp, Glycine max
atagaaatgactataattaatcataaattgaaagattgcaaatgcttttgttatttttatattagagggggtcctgagttagccccagttgttggtaattcatgtagtcaatgccgttttaatctaatacaacataacacatgctctggtagctcctcctgtttgttcccctgaattgtgaggccaacatctagagtgcaaacctttaatctgtccaagaaagcttcaaaccctttcctggagatataactgaatctatgcatatccaaatcaatctcaaagtaattttcccccatgtaaaactcatgttggggacgcgaaagaacaggtttctcattgtaagcctgcataagcttcctttctgcagcactcaaatgaagatcttccaggttgatgacacggcctaatattttcaacc

SEQ ID NO: 33646 - DNA, 508 bp, Glycine max
ttttttttttgctaggaaaagactgatggattaatagataactaaaggatcgatgccgtcatctttacaattatcaataacaaaaaaaaaatacatctgtgcttaaaagaactatatgcctcaatcaactaagtattgaaaactttgaggcacagcacctactgcatctaataatcagttcaacaagttaggattccccaaagactaaaattcacactgactagaagtctgggtagtaccacacacaggattactcccataatatacatacatgccacaattcccatttgggggatgttcatttgaagaagaatggctgacccttttggaatgatcaatcctctgtacttgcttaacatgacccttttcagggaagaccctggtaactggcctactatgtgaaaacttcaagtaggacttttctggggggtagttgaagatagatgaaattggatccatgttggatgaatcaccatagtctacagtgctgaaagagtccctggtgctc

SEQ ID NO: 33647 - DNA, 450 bp, Glycine max
ggaccaaataaaggaggacagggtaacggatatttataaactggggatcctttcaaaatatgaatcaattctgtgtgaaagatttacaagtgatctgaacaatcatttttaagtacagaaagctacataactttacccccaacttctttttctggcctctttttcaggaaggggcaggcaacaaatcacaatctttacaaatcttcaacgacatgaattcaggagtttaagttgttaggatatctggaattgtcgtggagtgagcccccagtatcttacccccggcatcggggaaattttcacagtcaggtagggatctaatcttcccatcggaatctacctgtgcaggatacttaagaagatgtccctgcaaaagtgagaaatcttcagaagcgaataatttccaattgttggcggcaatctcattcactttttccacacactccaatc

SEQ ID NO: 33648 - DNA, 440 bp, Glycine max
ggaaaccaacaaaactaaactcttaattgatacgcaaaaacatccttataatttacaaggccttttcctgcggtttgttgtttgaaatttaagggaattcatgaagcaatcaagatctggggatgttatgcttcttacatttaggaacttgatagttttgaactctaccaacattatatagctggcttaaggatttcctgacagggtataaaacctaacagattgggggacatctatttttaaacttggtatataataaaatacactgtagcttatttcatttgcataactcaggtctcatgtacacttgagaccttaaaagtgcaagcaacagacctgtttaacaaactgtgctagtagattatatggcctgcttgaaaccttcattggccaaagctgagtctgttgcacctttagtttgaattctctcatactccaac

SEQ ID NO: 33649 - DNA, 500 bp, Glycine max
ctgtaacaaatgtcataattgtgctaccatagaagggaaacgaggaagaaatttggaatttctaaacacgacacaagaaatttgtgattctacatattatatacataacacccaccatgacgggaaatcatcccctgggaacagccataacaaaaaccatcacgttgacagaatagactaaacacagtagaatgaaactggaactacatgtcttacaacaacatatagacgaggggccaaaacaccataacctgttcactccaaatcaggtcaaacttgattctggatagtttttttcaagaattccctttcactttatactacgatagtctttcgcatgaatctcctgagtaaagcatgctcgttactcatcttcgtgcttgattgaaacttggggggcacctatccaggtccatttggagcaacagaataccattctgcttttaaatatttcacaaccttttcatctaattcttctttatttctccacttctacttct

SEQ ID NO: 33650 - DNA, 444 bp, Glycine max
cttagttttttcttcgtgtccgcgccccggccccaagaacaataacaacaaggggcattgtaatggcaacttgtgttcctgctgtaagtggcgcactgcattatggagtgacaaactgcaagggacacagctacagaaggagtgcttccttttctgatgtgcctaacacgggattcttacaaaaagatctttcatggtctaaagtggtatccaaggtcctgcagatacacagatgtgggttttctgcacctccacttcataaggatcagaaactcttcaaagtcatttcctcatggaagaaagatagtcccacaaaatactttgactttatcgtcattgggagtggaattgctggcctccgatatgcgcttgaagttgcaaaatatggatctgttgcagtgataaccaaggctgagtctcatgaatgcaatactaattatgctc

SEQ ID NO: 33651 - DNA, 374 bp, Glycine max
ctcaactcaaacgcctgtttcgcctaaccaaaggaagctccactgcggtttccgtttcctctctgccttcaccactctcttttttttctcaacaggaacaaagaaaaatggaagttgcggcagcgaaagccctgaaaccaagccttcggacagagttcattttccctcaagcaatttacgacgagattttgtgttttaacgccaacaacgttgttgccggcgaagatttctccgtggacgacctactcgacttctccaacggcgaattccaagttgggaaagatttcgatgactacgaggaagacgaagacgaagaaaaaggcagcacctccggttccttgcagtcgcaggacagaaccgaagacgacagcaac

SEQ ID NO: 33652 - DNA, 537 bp, Glycine max
gcaaaatcatgagccgcgtcaaatcacatcactgccaattcgaaatttccaatttcacagaacttttgttgcattgatctccgattttgttttccaacgcttcttcgtattctcaccaatctcaaatggcttctatctcccttcttctcgccctgttcgtgttcttcctaattgccacttctcttaccgaaagtaggaaggaattaaggaacaagcaggaaactgcattacagatgttagagcgctcaattcatttttccaacagaattaatccatcacgtgttgtccaaatctcttggcaaccaagggtttttctatacaaagggtttttgtcggacaaggagtgtgactaccttgtttctttggcatatgctgtgaaagaaaaatcctcagggaacggcggcctttcagagggggtcgaaacttccttggatatggaagatgatattcttgcaaggattgaagaaagactttcagtttgggctttacttcctaaagagtacagcaagcctttgcaggtcatgcattatgggcctg

SEQ ID NO: 33653 - DNA, 774 bp, Glycine max
agataacaaagatatagaattttgatatgatatcttgatcatatgaaactagtctaaacataatatgtgccattaaacaaagatatatagataacaaagtaacctaatgtccaatatatagaaatactaaccaagaattacacacctaaattaagctctaaccgcaggccaaaacttcataagtcaaccccaatgcatttactaagaaataactagggggtgggggtaactaaaactgcactctagtgtgacacgcatatgttttactattattatatttcaacaagccatttcaatttaatagaagaaaataacaaccttggtttataaagtatatgatattcgcaaattctagcaagcaaaattgagtgacgattttcactagatatgccatagtatttcacctttagctcgagtcaggagaaccatctttataagatacagggcctttctttccatctaggcttccagatgaggaccttctgctcgcttttggtggagactgtgattctgcccgggatcgtgatgaactcctgctttgggacgatgacctgctcctctccacatgaggtctatatgtatcaccaggtgaccgactgcagaccaggctacgacttcggctatattgtcgagctcagtaacgtgggctgcgtgatataaagggtgtcctgctcctcctacttcggaacctcggtgagtttcttctgcatggcagtgggctcctgtacgctagggagtctttgtactgattctgtccgcctgtccctaagccaa

SEQ ID NO: 33654 - DNA, 425 bp, Glycine max
gttcatgaagctcatcctcatcagaagattgagatggtctcaacgacagcagcttctctggaccgtaaataacacgacgttccctaacatcgggactagtattaggctccctgcctgaatgaggaaggtaaggtccagtctcatccatccttggaccaacagcacctctgcctcgtttggtccttgagtgtagaaactcctcaagctcggcatcctttaaaccttccagaccatgctcatgggctctttcacttgagcttgaagtataggcaatagggcttttatccactacagcatgtcttcctgggcttcttgatgagtttccatccctatggcttctttcactactgctgttatcttttgatgtgtctttaacccatctctccagctcatattctcttttacttgaacatgaagcagaggag

SEQ ID NO: 33655 - DNA, 422 bp, Glycine max
tttttttttttagtgaatctcttgatataatgtttaagttattccccaaatgaatatgttgaaatacacaattttctcgtcaagagaaggaagttctaaaatgaaaaaaaaaataaaaacacatatacacaatcactcgcggaacttgagtgccaaagttcaaagcacagaataagataaacccataatttaaatagccctctagctagttgccaaaggtcagtagtaagtcatcaccaaaacagcccctttattgcgactcttcttaacttcaagggtgtgtgatccgatagaacaatggggtatctaggtcattcaactctatgaagtccaagttatcagagttcccaatatcacctgtattctggccagcggagaaaccagccagagcagcccagtagtctttcaagccctcaaaaaat

SEQ ID NO: 33656 - DNA, 476 bp, Glycine max
tcactgtatgacgtcctccttctttggggggggggggggggggggggggggggaggtaaagttggagtaagaaacattaggaaccttaaaggaaaagagggtgacgatatatttaaaaaggtggtaaaacaaatggttccaagtgactatcgggggggggaggggggaagcaaaggtgaatttagtcagaaggaaagggcagccccaaggagcagcgactacgactatatcgtgtattaggaaaagtaaaagattaccgtaaacgggtaacgaatggaccgatacaatcgaaaaaaaaatgacagaaaagcacgacagagtgtccgataggaacgtatggagtatgcgattgttgggaacgtagagcgtaaacgatacgaagcggccagtagtactcttcgttggcgacgacgtaacgattaagtacgtagtagtatttagcgtgtgtattaataaaaaaggccaaagtgggaagt

SEQ ID NO: 33657 - DNA, 324 bp, Glycine max
gtatgacgtcctccttctttgggggggggggggggggaggctaaagggtagcccttaatcggataggaggatgaaagataaagacaagacaattcggggttggtgcggttaaactcacaggcaggcgccatgacgcgaagaagaggctttatgggcaataaaaggagggacccgaacgacccgcagggaagagccaatgttggcggatagcgggagagtaacaaaggttcgtacgtatagtaggaaggtaaatggaatgcgtattacttggcgtaacggtggttaacctgcgtttataaggggcaagttgtagaagttggaagt

SEQ ID NO: 33658 - DNA, 405 bp, Glycine max
aaagatattgatagggataaatatatgtctccaattgaagcagtggaatacggaattattgatggtgtaatcgatagagatagcattattcctctcatgccagtgccagaaagagtgaaatcaacactaaactatgaagaaataagtaaagaccccaggaaattcctaaccccagatattcctgatgatgagatatactagctttaaatggttgataatgttatatccttgaattttatgttacggtgataacagaattcaacatttttgggtaaagcttgaggatgctggaacaaaccctgaaagatgtaggattgtcttatatttgtcttgcattttttaattttatttcgtgtgggtgagtgaaaaattatggttcagctatggagaattttgttggttatc

SEQ ID NO: 33659 - DNA, 449 bp, Glycine max
ggggactaatgatctgtgtaaatagggatcatatttaataccataaacttgtacacaaacatattttacagtgtacttacactccagcaaatctaaaccaagagtctttgatatgtgcatggaagatattataagtagaaacgaaataaatcacaccagccacattttccataagttcaattgcatgtccaagaacataagttttgaactgataaattatataaattaataagataggtagaaattttgtagtggcagcagaaataggaacatctttgttgtgagtacccagttttaggctaaaccgggcactagttttcagcctttgcttcaatttttcattattttgacttgaaaggaatggccctgagcactatctgatggtataaagctgcaagtgctgccccaataaaaggccctacccagaagatccaatggttatcccaagc

SEQ ID NO: 33660 - DNA, 297 bp, Glycine max
atcactgtatgacgtcctccttctttgggggggggggggggaaagaatacgattgtagtatctgtaatgcgacgacaatgagaaaattggctaggaatggagcgaatgcataaaaaagcttaaaacaaaaatagccggagtttatatgcaaggagggtgtagcatagcatagcatggcaatggcgcatactgcggcgagaagtgtggtgttggggttgcttatgatgcggcccatgtgccaagcacataggttacttgttacacccaaaggtaatatcatgggcgcattttgtaggt

SEQ ID NO: 33661 - DNA, 689 bp, Glycine max
cgaagcctctgacagattcttgtttagacctgatactgttgggccagctgggttgactcctcttcatgttgcagcaagtatgagtggcttggaggatgtgttggatgcattaaccgatgatccacgaatgttaggaattgaggcatggaaaaggttccctggacagtacaggtttgacccctaacgactatgcatgccttaggggctattactcctacattcaactagtccagaagaagaccaacaaaaaaggtgaaagacagcatgtggttgatatcactggcattgttgtagatagttacacgacgcagaagcaatcaaatggacataggacatgtagagtttcaagcttgcagactgagaagattgaaacaacaacaatgccacgtcaatgtcgggcatgagaacagcaatggtttattggccagttatgctcaccatggtgaccatagcagctgtgtgtgtctgtgtggctttgctcttcaaaagctcacctagagtttactatgtgttccagcccttcaactgggaatcattggagtatggggcaatgtaatgctgtatataaggtgttttaatttctgctgtatagagtataatggtgaggtcaccataatgatattgatgtataaatatttgtacaatatgagacgaatgggctttcaaatcttaaatagtaaataatttat

SEQ ID NO: 33662 - DNA, 464 bp, Glycine max
ctaatcatatcgtgacttgatgatcacttgtaccagccctcccctcttaaacttgttctagtgcttgatagatagaacattgaccatgatgtcagtgaaagatcttcctgaagaatgctgggaattggtcttcagattcattggccatggccgtcatttggagtctctatctttggtttgcaagcagttcctttccatcacaaaccggcttcaattgtctctcacaatacatgatccaaccattccactccttcctcggctactcctgaggtttccaaggctcagaatcttagacctcagtcacttgaatggccaccatgaagccttgcttcgtcaaatttcacaatccaggttggaccttgatttgcttaatctatccaaccagaaaacactttctgttgatggcttgcgagaacttggctcaaacatgaaaaatttgagggtgctgatctgctctaacattg

SEQ ID NO: 33663 - DNA, 164 bp, Glycine max
gtcaattctaaaatgctaactgcatttttgagactgactttagaacagtctatcttaaggttaaagttcttcagttgattattagtttttttttccttctccttttaattataatcgtaacatttctagtgatgatagccaaagatacggggcccatttatccg

SEQ ID NO: 33664 - DNA, 698 bp, Glycine max
acctcctccaccacccccagctggtgccaaacctggttctcgtccaccaccacctcctcctatgagtggtgtggctcctcctcgacctccgcccccgtttggttcaaaggtgcaacgtcccttagctagtggatcaaaagctacagttgaagctggagtagaaggtgaagctgatgctcccaaagccaagctaaagcccttcttctgggataaggttcaagcaaacccagatcaatcaatggtttggaatcaaatcaaatcaggatcattccagtttaacgaagagatgatagagacgctttttggctataatgccgtggataagaacaatggtcaaaaacagaaacagtcttcctcccaagatccttcaccactgtttatccagatcattgacaaaaagaaagcacaaaatttattgattctgttgcgagcattgaatgtgacaatggaagaagtttgtgatgcactttatgaaggacatgagcttcccccggaattccttcaaaccttgctgaagatggcaccgacatcagatgaagaacttaagcttagactttttagtggtgatctatctcaacttggacctgctgaccgtttcctgaaagccatggttgacattccatttgcatttaagcgaatggaatttctgcttttcatgggctcacttaaagaggagcttgcaaccattatggagtctt

SEQ ID NO: 33665 - DNA, 274 bp, Glycine max
ctttggttcaagcctaagaaacccaaacaaccagctatgcaaatgggtccccagcagaggaaaagtgttgaaggctgaatagtttttaggatttcggaatgttatcatggttttattgctttgtagataggctgttatgtgtatgcatacgaagaatgggttgattttgggttttttttcgtgtgatattataataatgtttgggttggcttctttgtacgcataagcatgtaacatagtttctggtctttcaagtctgttacacttttctcaa

SEQ ID NO: 33666 - DNA, 644 bp, Glycine max
tttgtccgtgtctcgcgtgggcggacgcgtggggtcgaatggccgctgtatgccggtccttgagggagaggtgtgtgagtgatcacctttgggagaggcacatgaggcagaagtggggtagagttattggccctgctgcttatagggagaggaaatggcatgttgcttccaaaaggaatgttgggggtcttaagcatggcaggcaaaagggtttgatgagatttatgtgtcttcgctggccttcccaatggattagaccaaaggctgatgcaaattataatagccccaagctggggagctctctgcctgttgactcagtcatgaactggtatcttgctcttgagtctggcaattttttggttccctgctcaagtctataaccgtgagaatggtcatgttggattcatgctatcttgctatgatgctgaacttagctatgatccgcgaactgatacctttcaagccagatatcctccacatggaagaagggcagatgctagagagtgtggcatcccatgggaaaggctaagagcacctcctattgatacttctccgcatgatcttcatgtctccgactgtttaaatgatttgtatccgggtgatcacatagagattcaatggaggagaaacaaagaatttcctta

SEQ ID NO: 33667 - DNA, 765 bp, Glycine max
gttgactgtaatggttgaaaaggggaatcacagtgggatagtgcttcatcttcacgtgagaactgagaagactgttaaagtggatgataggagggggagatcgcttaaaaagcatgcggttgaacaaggcaacaacatgatggttatcaaggtgattgtcagtttaagactgagaatgagaatgaagaaaacgtggaaacacagagagggagggaagaaacctgaagaaggaagacactgtgacgggccaggccggaaatggaaagagtgtggtgtgggctttatggcaaaaggtatgcagtaaacaaaaggagggtgtggtggggtttatcaacttgaaatgatgtgggtgatggaactatggaaagagcttgacagggcataatatcagttggagagggttcagactttactggtgtcccaagaaaattctggcagtaaatgacacttcacacatgagcgcttcagacttggcatccatgtgcttcagacttgcaattgttgagattgaaaaaatgctatcagccaagaagaagtcactatattgtaccagtgaacctggaaggtaaccaatcaggttttgctgtctgaggctggatcctccattatagtatcccaaactgttgaagttccacgcacattgaagtttgatatatagtttttaaatacatcttgtatttgcttttctggtaagagacatgggtaaaaagagttaaagtttaatttagtcatcaattcaattttaataaaaatagagttgtatgt

SEQ ID NO: 33668 - DNA, 399 bp, Glycine max
tggaggacaaaggtaacctacatgtcacaaaaagaggagaggttgatagacgaattcaagaaagagtggcttcacaagcttcctcagccacttcatgtcagcagcaagattcttcaagtacaaggggtgctttagttggtaataatcatttagatgatgttgacattggtaatatgcaggttggaagatccaaccaatcttctgttgctggcccaaataactgggccggttttgctggtgctaatgaggcttcaaagggacctcctcaggtctctgctattcaacatgagttgcctatagaaagaagagagaatattcctagtcagcttcaaaatgttggtaacaattgtggttcacggaatcaaaattctgttcatcacttgtctttttctttaaaag

SEQ ID NO: 33669 - DNA, 671 bp, Glycine max
gttttgttcacatccagtggcattgctagtgcactatatcatgcatgtgacgttggcacctggtgtgcattgaactttaatgttttacagttcatggacttctggctctctttcatggctgtggctagcacttttgtatacctagctacaattgacgaagtatataagagggcaatccacacagctgttgctatcctcactgcccttttggctgcaaccaaggcaactaggtcttccaatgttgttcttgtcattgtgattggggctcttggtcttcttattgcatggctgatcgagatctcaaaaaagtataggtccatctccttttcatttggattatcgctaagtttccttcaaagcttgcaaactataaagcaatggttctgtaatctggtcaagacacttttgagacggtttcgctggggatttttattggttggtttcattacattggccatggcaggactaagctggacgctcgaaaccagtgcaaactactggttttggcatagcttttggcatgttacaatatatacatcttcattcttcttcctttgctcaaaagcaaacattgttgatgctgaagattcatcatcaccctcaagtggaaactatgcactgactcatcaggattcatttccaagaggtaattagaagaacatacatgggat

SEQ ID NO: 33670 - DNA, 496 bp, Glycine max
caaccgtcatgtgctgcatcgtgatataaaggggtcgaaccttcttattgacaatgatggaattctcaagattggtgattttggattagcttccttctttgatcctaatcacaagcaccctatgaccagtagagtggttactttatggtatcgacctccagaacttcttcttggggccactgaatatagtgtaggagtggatctctggagtgctggctgcattcttgctgaattgttggctggaaagcctattatgcctggtcgaacagaggtggagcagctacacaagatattcaaactatgtggttctccttctgatgaatattggaaaaagtcaaagttgcctcatgctaccatttttaagccccaacaatcatacaagcgatgcattgcagagacatataaagattttcctccatcatctctgccacttatggatacccttctcgcaatcaatccagatgaacgtttgactgccactgctgcattgcatagt

SEQ ID NO: 33671 - DNA, 294 bp, Glycine max
agtttggatgagagactaagaaatgtttgtcaacacattgctgctgtaaatcatctggaaacaaatgttgcaagtgtgaagatcgagttacattacatgaaacttgggaaatcaaatgttgcatgagtaaagccatgttccatattgaaatcaagtcatattttgagaaaccacacaatcaaatcatcttactttggccgaatcaactctagcgggaatgtttccattgccagccagagtctcggagttttggggtcggattttttgggcaatttacttagctttgactgaaag

SEQ ID NO: 33672 - DNA, 395 bp, Glycine max
  unsure (1)..(395): unsure at all n locations
gcacgggcatcaccaaatgaacagcttgatcaagcagggttgagtggacatcacattgctgccacggcattgagtttactaggccgtacccgtgaagctctcctatttatgtgttcctgacttatatttccagataccatgaatggaagctggatagctccataggaagaaggagaaccaacaaagcaaagatgtaaagaatgccattttctctgtatagaactgatgttaagtagcacaacggaaactaacgggagttttgttttttggacatctaacagtgtatattgttgagaaagtgacttaattgtgaaaatacttgaatggagaactttgctgtcatttttttagtggataagtagttttattttatttcatgtttcattgtcggcnna

SEQ ID NO: 33673 - DNA, 479 bp, Glycine max
aaccctatacatgctgcagcagcatcagctcttgcattttcagttggtgcattggtgcctctccttgcagcctcttttataagggactataaggtgaggcttggtgtgattttgggagcagtgagtttagctcttgtggtgtttggttggttgggggcagtgttgggtaaggctccaacatttaggtcttgtgtgagagtcttgcttggggggtggctagccatggctattacttttgggctaaccaagttgattgggtcaagtggtctttagcttgattatgatccatatatatatatgtgtgtgcacgcttttatatatcatttaggtcttgtgaaagagagttttgctaactatgtcaattaagtatattctatgtatgtgcttttatcatttctctctctctttacagagtcccctcattttgctttcacaataaatggtgaggtgagacgtgaatagaagaaagttggcttggt

SEQ ID NO: 33674 - DNA, 344 bp, Glycine max
gactagttctagatccgcgagcggctggaagagtttcgtgtggggcgtggtgatgtatcattttggtttgatttgtggtttcatgaaaaattcagtgcgacgaggttatgtttgtgcatattactatacctagttgaaactcattgatatgtatgtaaatgattcttggaactcatctactctctatattatggttccttcggaggtttaggaattagttcagaaattagtcttataagctcatttttttaaattttattttactcttagtttgttttattttttgttattcacttcatgaatttattttgataaataattttcttgttgctgtgttctaaaaa

SEQ ID NO: 33675 - DNA, 396 bp, Glycine max
gaaaagaataatttttaaggaatctggaattgcaggttacagaactaccactttggggagaaatggattcaacccagataaaggacaacgccagggagctcagcagaatgaattatccttcatggctcaaggtaggaacatacatgattcacagagaatgtcagagaagaatattcaagttacaaataagaaggttcaagagattaaggatcaagttattttagccaaagcatacttgaaaattgcaccaccaagcagcaatttacgcttgagggatttggagcagctaacgagagagatggaattagcagttggagaagccacccacgattcggatctgtcaacgagtgctttgcagaaaatgagacacatggaggcttccctgtctaaagtcta

SEQ ID NO: 33676 - DNA, 447 bp, Glycine max
aaatgcaaggaaacagttctatactgctggcagtaaaagcaaacaaaatcttgcaaatgcatgctaacagattggctgaagtggtttaaaaattacagagtggagctctgggtactctaacaagtcagcacttaagcacaattgccaaaatcatggcccatacaacaaggcatacatattttgttaggaaacaaatcactgttctagagctaaagctgtttaatcatagatatttactattactactactaatactatcatgtgaatccaaataggcatgtcaagtattcccagatactttccagagtgcttctttgatcatcctcgttggtgctgttgctgctcctcgacacttagatttaagtgccaatgtgagaacaccatcacttgttgatgattcaactgtttgagcatctaaatgtacgttgttaatggtgtccatgatgt

SEQ ID NO: 33677 - DNA, 501 bp, Glycine max
acaaaaatagaatataaatgttattcaatgtaaaaaatagaatacagggatccaaaatcgaactcaagatacatgagcttgggtggcttgctatttgactactctattcgccctattcttgatcaagtcctctgcttcaatataagtaaaccttggtgcagaggagctgatttatcctcttaaaccttactgctacatatctattgcggggaaatcctttgaaattctctattaccattctatattttatatttatcttcatttaatttccctcaaagaaaataaacaattcacttcaaaattccaactgaaaaatgactaactttatattgagagggtgtcccattaaaacaacattttggctcacccttttattctaggaatgcaggcatcaagtacatttagccaaatacgcattccatccttgaagacggtattcacgagctgcctcttctggatttactgctttgatgatgccacgccccacaatgatgatgtcac

SEQ ID NO: 33678 - DNA, 234 bp, Glycine max
ctcgagccgaatcggctcgagggttgcagtcgctagtgcagtcaaataggtcctcaggataacatagatcttctcgtgtttatcttcacatctatcttaatgtttattagaaaagaaatagacacagaatttagacatgatttgtcatttatacaagaggatccatttccctgtctcaatggtagattttcatatgaaacaaaagaaggaaattaatgcatactactctatatt

SEQ ID NO: 33679 - DNA, 518 bp, Glycine max
agtaatctaatacaatttaatcgctggagcgacttcgtaatcactacaagtggaagatccacttgcatattattgcataaaaaaggcacccctggattaaactctgcaaatgtgtgactgactctataaccttggttaggaacctagtacacatatgggcttaattaccacttgtttccatcaaatgaaagatttctacgacttcagcgaagctttactctatcagaatgaagcatttttggggctcaaattcagtatagcctacatcaactagacataaaccatcagggggtgctggaggagcagtagcacgcctacatgtggcatccatgagctttatcaatgcatcatcttcagcaccagcagcagcttctctaattgaggtcgccacaagcactcgaaccatcttacgcaaaaagcgattagctaccagctcaacgcacataacatttgtttcttctccatgatcagttgcaggcagtttgacttccatagctcgagcatggtaaacaaaacac

SEQ ID NO: 33680 - DNA, 288 bp, Glycine max
ggtttcccgtcatcactgtatgacgtcctccttctttgggggggggggggggttgctacgggaatcaagagagagagccgcaccgaagcaaagcgtattcatggaaacggatacaaaatggaggaaataaagggcagggatatgtaggataaggggttgacaaaggcaaacaaatttaaaagagagcaaagtgcaaaaccaaagcccacttgcgttgggtaaagaatacaagttgcatggaagggaggacgtgtagcaggggttgtaggggcaggatttacggggggt

SEQ ID NO: 33681 - DNA, 263 bp, Glycine max
aaggtttcccgtcatcactgtatgacgtcctcgctgtctttgggggggggggggggaaccggggaaaaaatgggttctacggcgcagtctaaggcccattagagtaatacccagggcgggcgcagagtaatacccggggaaaattggccagatcgcatgatgactactaaagggacgaaggaaaataaccgacgcagcaataagggatcccgttgtcaacctaggtgtttttgttgtaattgtagtagtcgatgtagttgtag

SEQ ID NO: 33682 - DNA, 363 bp, Glycine max
aaggtttcccgtcatcactgtatgacgtcctccttctttgggggggggggggggcaaaataaacgcggtaatgcaaggcgtaaaagcgcagtagcgttccgatttaagtgtgacggagaatgcaatagtaaggaatcggaatatggatcctaaaagagtgtaggtgaccacgtgaggacaaaagattcagcctaaaacaattggaaaagtaccataccagcgggcaaaatgtagggtggggggtttcttggcgtactagtacaccttggccgtggtggaatgttatcaagtggtggactgtgaggtgggtgtgttggtaggcgtggttggcagggtgtgatgggccgagtaacgttaggttgc

SEQ ID NO: 33683 - DNA, 471 bp, Glycine max
gaaattatatataattattttaaaatcgtcagattacaacacatactaaaaaaggaatgtaccatacagcctaaaatggagttacttatggaccacagcaaatagcttggggactgccagactacgaccatggataagaactcaaatggattaccaatttaccatccaccaaagtattaactgttcttataaacctaagaataaaaagtatagactaaaattgatgaaatataaaatgctaaaacaaacagcatttctttacttttcccagaaatgatgggtatttatgagaaaagctatttacacaatcaatcccagcacaactgctaatgtgtctgcgtcagagtttaagcaagaaaaaaaaagggtgagagcctttggtagaaatcataactcatatgcagtcacattagcagttatgcggtggtgtaagtagcattactagcgattcctataagtagcacacatata

SEQ ID NO: 33684 - DNA, 505 bp, Glycine max
aaactgaaatatactctttgctttttaatctccattaaccaaaagcaaatacatacttgtacacattggatgtacaaaaaaaagttatttacatcatagtggttatcactgaaatactatgtttggtcaggcattaaaagaaactcattattgggattgagcaggagatgctgatgtttctccagtcttctcttgaagcaacggcatggtgtttgacctttcaacgtttgatacttgatgttcactgtcttcatcaaatctatccacactatgcaaaaatattcctgacataatatacaagaatcacgacacatgttcaaaaaacttctcaaacgtttctgagaattagacatttatgatttgattatgattatagaaattcaatactacatcttgaagataactagatagtagacaagctaattttcatgtagccgagtaacatccatcacaggtataatttgcttttgttttaatctttaagttgggttggacattatttaaa

SEQ ID NO: 33685 - DNA, 555 bp, Glycine max
gatgaaaagaaagtactacatttttatcagaataatgtgaagtgagcattcatgttcaaaatgaccaatgaggttatacagaaaaacttgcaatttggagtatcgaaaatttctcgaaaatatcataattttaactgttaaaaaagacaacaaattacaatgcgaagtatacaagattcacgcctctcccatgtactgttgtactaagatttacacttgatacctccaaaataggagctccacaaaagggaagcatctcagaaaataatagtagaaaaaaactatgaaataaataacaacagattgaagatatagaggtgccatcgggagaacaagcacacaaaattcccatgatgtattcatcatcacaaacatccgaagcattacggtgagatgtacggactatacaaagattctcttttttcacctttccagcttaagcaaggttatctgcctaaggaataagctagagtcacaggggttcttatattccagtttaggcaccagcatgttccaaaaaatttcacattcatatgttagtttgtaagagcttgc

SEQ ID NO: 33686 - DNA, 370 bp, Glycine max
aacccctccggcaaaaagggcctaccgggtgggggactggaatataatttaccgcatggaacatgcaaacactgcttccagaggacataaatacaacaggggcctgcaaaagttacaggggactttacaaaaaaaaaatgggcctcccgcaaaacacccaaaattcatcatgttctctcagtttctgggccttagcaattattaaagggtcagtctaatttcactgatgctataacaataccaaacaaggccctaacacaggttcctgagtgacaaggagctcaaaatcacatggcttggggaaattaacccccaaagataacaagaatctaatttgggggcttcaatttgggaaaatgacattggggtt

SEQ ID NO: 33687 - DNA, 302 bp, Glycine max
attctcttactctttttttccccgggcccaattaggagaaaatgggcgattcttcggcccaagtaaatcctaaaaatatgggatttctttgaacactatctggcttctgaatatgccaagccaatgcccttccagaagctcgacccaatggcaagcactatcctcaacttacgagcatgggatgattcatgagtaccattttttcaagatttggaccaaaccccgaatgggagaaatatgccccgtcatatgtgaagaagggacaacacacaatccttggtccaagacctacttttggggtt

SEQ ID NO: 33688 - DNA, 354 bp, Glycine max
gtggagaggcgagttgaagacgacgagtcaaggaaactaacaatcacagtgacataaatggatgtccgatttcaattgctgcaatgcatttacaagctctttgttcccccattataaaactatacccggtttcttaaaataaaattgaagacaacattttgatttactatatagttgtaactgatcaacaagttttgaaggaaccatttaatttattaagcaaagcaacaaaaagggaatagaagtgacaaagcaacttgtatcgtatggtagttataggtcatcgggaacaacaagaaaagtaggtttgattttgcttagatgttgcatcaccattgttgacgaggctgaccc

SEQ ID NO: 33689 - DNA, 558 bp, Glycine max
cattgacctcacaggtaaatcggctcgctgtgcaagattcgccccaagctcaagatattgataaaagaattcgtgctctcaaaaagaagattcgacttacagaagcattggagcagaaaagtgcagagcaagatctgaagccagagcagttggaaaagctagcaaaattagaagattggcgtagggagttaaagttattggaggatgagaagggtgaaacacccgtatcatgaacaaagtattcgaaatagcatgacaaagttgtgtagttttatccatgtcttcctgaaagatatattccatggaaacaggtttaccaaagattttcctgtaatcaccatcttttgtgtgcaacttgtcagataaagtcaggctgaatttggatgaacttttcaacaagttataggaaaggaaaatttagaagtaaaccaattctctcatctattttctccaaatgttgaaaaatatgtcttgattttaacttgtaaaaggattgatttatttaacctgtccccgtactagattatttaaactaaactttaaacatcatttgattac

SEQ ID NO: 33690 - DNA, 589 bp, Glycine max
gggaataggcatgtgccctgcattacatttggctgaatgagggtctatttctaagcaacatccaataattagacaatctaccagagttactgtgtctatgaccacaccaatgtaatgaggtaataagatttccaggataataatatcaatgtagaatagtagcaataaacccacagctgactaggtacaaaattgcttcatgaagtattctacacccgaagcattttattacctaggattggctatcctttacagcagcaagcatctcctctttctttaacatttcgaacagatcaaacacctgaatatggcacaagataaacattttttcaatatgaaaaatgaaccatttcaagcacccaagaaagatcaacaagaaaccatctttactcaatggtatcttaataaaccaatacagagtacatgcttgataggtccatgaatttgctatagtttacttcggtgttaatattcttgagaaacagttggtctcacttgataccaacaaaactaataaaatacaccaccatttctttggagaaggaggaagcaatgccaatttgtgccctggatgaatgagataagagac

SEQ ID NO: 33691 - DNA, 759 bp, Glycine max
attattactagacaaatcttacatttcacactgaccaccatgaggtagacactgaaactacctcaattattcgttttatatataagttttcacagtacaaacacaatattaggtattactaatagaggatgacagcttataaacagcacaatttcttctccgtctttcacagctctagaactaagtaatctgcatctgttttgatccagtactccctgttgacagatgaatcttcctctggatgcaccaggtcacttttgttgtagcctccatcattgattgttttcttcttcttctggttcttgtggtgtttagcagatttttgtgcagctgttgaactttcagggtgaactttcttgcggaacatatggagaatcttattcagttttgtctcagcagaagcagaatcaataggcccaccatttattgaagtagaattcttagaataagcatggagcattcttttcttcagcttttctttcatcaggttcatggcagacttgtccacttccttctcagctcttttgtcctccttttcacattttgcgctgaaattctcctcagctgatttgcttctctgaaacagctccccgagcgaagtcctatgttctttctttgctgctgctgcagtagtttcagacagttcaatagctgttccaaagagatatccctggagtggacaaattgcagcaccatttccatttggttctgtgccttctattggctttccactgagtgttattatgctgacatggctgc

SEQ ID NO: 33692 - DNA, 538 bp, Glycine max
atttccccagatgatcgaagctgaacatactgtgcgacttttctcttttgagaaaccaagccaaataaatctgatccacctatccaccttgcttgtatgcactttaggagggttcatatagattcttgaatgtcctatcatctatgttttatgcccaattatttaaaacagttcgaggattagtgtgaaattcagttctaggtattagatttatgaatacaaattcttaggatgattcaagttgggcgttttaatcatatttagttgtgatcgcaatttccaaataaagtttttcattttttagttatactttaaaaaataaacaaatgaaagtaggaagatgtaatgtgtttcattgcaagatggaattaatgattatttccccagtgagatcgatgatgaacaagagtttaatgcttgtgctgcatcacatgtagattgcaaggttggctcttttgttacacgtacttgtcatgacagtatttgtgttcatttgaaagtccataataagctatggttaattgagatttgtttattt

SEQ ID NO: 33693 - DNA, 397 bp, Glycine max
atccaaaactgtttttaaagatgtcttggccagaaaagatcttaatcataatgcacaaattacaatttcaattacatgctaatcaattattacggctcaggctcactggccactgagttggactctcttcagtcgagtccacccagccgaatcatcgcccagaaaaaccaaaacaattgtcttcaactaaccatcacttaccacctgctcaataataattattataataaacacaaaacttaaaatacagttttataagcatttttagtaccgttcatcggttaaaattggatttctattttgataacttatcataataaaaactttttattatgtgaattatcaaaataaaactccaatgataattgccaaacagaactaagattacatacaaaac

SEQ ID NO: 33694 - DNA, 398 bp, Glycine max
aaaaaaaagacaaaaatttattgcattaggtttcagagctacaccagtatatcaaaatggcaaaacacatccaagaaacgaaacccaacacagcacccacaaacactcgcacacgtttttgtttttggttttgtttttttaaaaaaaaattcaaatactaaattgaagtggtaacgtggtattctaaaagaatactataggaatacacaattcgatatcatattcttgtcttcaacagggacctaaaccctccctgaggggaccaaaagttgaaccctgatccacacaagctgctttcccctttcgctttcggagggttcttcattcgctcgcacccaaacaaatcaaaatcattcgctcgtcgagaccgtgctatcaaattaaacgatcaagaaaga

SEQ ID NO: 33695 - DNA, 514 bp, Glycine max
caggaatgaaacgccacaaatgtggttctatcaaagattaacaattttgatcctgaaaatgcctcataaatcatgggttatcttctcatgaaccttgaagagtctgaacttattcgtctggcttgcagtcccgaccctgtgcttcacactcttcgttctgagggttcagaaccacttgagtggtctcactctctcctccacgaccccttcgtctccttcgcttcctccttctccccttaaccccacagcgagactcactgctattgcctcaaacccattttcaagaggaggaggacccaccaatgggtttgacttcactagagaccacccgtcttcgccttcctctcactctcatgcttggaacttcccaaacaacaaccccattagtccaaagtccactcctttattctcttacgataacatccgagccctctcaccccgtgtagtcaacgatgattgtggtgattttgttgacgagcagcatgtgaatgagtactttcccttcctcaatgac

SEQ ID NO: 33696 - DNA, 419 bp, Glycine max
agaaggtccagaggctattctttgaagctgtggtgccttgttgaacctaacaaactcctctcgctgttccatcccctcaagctgcttactaggggagccaacaatggcatccagtgaatcagtgaaagcaccatgaagaaacttacaattggtgccatttttacaaaaccctctggcaaagtaaaggcatggcttgtgtccaagtccaggggctgctgctgctgcttcatcacacccaaaaccaacgtcactggcggagtagctccttctgtgttgcaaatgtgagtccccagagtgccatttttgagccccaacgccaaattcgagtcgcggatcgaccaaatcttcgttcttagaggagtcattgaggaagggaaagtactcattcacttgctgctcgtcaacaaaatcaccacaat

SEQ ID NO: 33697 - DNA, 438 bp, Glycine max
ggggcagtagtttctgcttccttggctaacaatttttctgccttggtttctttctcttcaaaatcaccctcctccttatctttcataggctttcttgactcacaagattcctctttaactttccttatttgagatcctttccttctttgcctcttcagcacttgtttcctctgtcttcttttcctccaattgctccttaactgatggcttccttgtaacatttgctattgaaggtcttgactcttcttcctctacacccttgtggggtctttcagcagttttgactttggtcagcattgttggtgtttgttttgcttcaaattcctcttcacccttttgtggcctttcagctgttttggctttggtcaacattgctggtgttgattttgcttcaaattcctcttcacccttttggggtctttcagctgttttgacttt

SEQ ID NO: 33698 - DNA, 682 bp, Glycine max
ggcaaatgctttcaagtgtgggcctttaaaatatagatactgtacattaccgaaaagcttggatatcaaagcaatctgacttgaaatttttacaaaagtcaaaattcaaagacagtaaaagggggcagcactagagagaagagacattgtcaaagatagaatctacaaactacttgtctagaaaaaaaaaagattatactaatttggtctctactctacaatgagtctctcagttacatcttgagagactgcttatcttagttgtcatatgctccctcttaccctttctttaagctactcaaatcattataattataattcatatggtttctttattacggtgacatttgatacatcattggttgacaacttgcaagaatcggaaccgcgtggctctgcctcaatcagaagctgaacaacctccttcatggttggtctacttgttggggctttgtaggtgcagcgaatagcaatccgcaacactttgatcatgtcttccttaaatgaacatgacaactttggatctaatacctcacttggtctagccccttccttgccttcgactttgttggaacccagaaaacaatgtttctgttctctccaaattctgcctcaacgggcttcttcccagttaacagttccatcaaaatcaccccataactgtagacatcgcacttggtgg

SEQ ID NO: 33699 - DNA, 470 bp, Glycine max
tcgagtgactgttgtgatcaatttggtaatatgggacaagcattcaacatgggtgggtacagtgggtcttctgatttgtatgctaggtgggatcatgtatcagcaatcaactagcaagccgaaggctgcaaaacaggtgagtgcacaggaaaatgaggaggaagaacagaaattacttgagatgcatgtcaattctgagaccaacatcaataataatgaagttaataaaccaagggaggaaagctgaaactattttctataggacacttccatatttcctttcaagtgtatgtttttttattgtatcattttttataactgtcaattcacaattcttaacaatgctatctccttgaatggcaagctcattggcattctggtatgtagggttttatttactttagtggctgtaatgtaaaatctattatttaagtacttgatagataaaatgtcattcaatttggttcttt

SEQ ID NO: 33700 - DNA, 310 bp, Glycine max
gtttccgtcatcactgtatgacgtcctccttctttgggggggggggggggggggggcgcgagccaatgcgtaatgaccaataatagagaggccccatctgagagaggagtacaatagataacagaggggaaggtgcagctagaatatacaaaactacaaaacaaacgcggggccggggtggcgcgccccacaccccccagaacaatattgaaaggtataacgatgatgacgaaggcccggaataggtagcgataaaatgatatttctagggcgcgtagatttacccttgagaagtagccaaagcattaat

SEQ ID NO: 33701 - DNA, 850 bp, Glycine max
gctgtgatacaagtgattctgagagtgtctctctagagcttcatgatatacctggaggagaagacgcttttgaactctgtgccaagttttgttacggaattgcaatcaacataagtgcccataactttgtatccgctctctgtgctgccaagttccttagaatgaatgattccattgagaagggaaactttgtaggcaaacttgagtctttcttcaactcatgcattcttgaaggttggaaggattccattgccacgcttcaaactactgctacgttgccagagtggtctgagaatcttggtattgttagaaagtgcattgattcaattattgagaaaattctcacgcccccaccacaggtcaaatggtcctacacctacaccaggccaggttacacaaaaaaacagcaccactctgtgccaaaggattggtggacggaggatgtttctgatcttgacatagatcttttcaggtgcataatcatggctattagatcaacctatgtgctccctccgcagcttattggagaagctttgcatgtctatgcctgccggtggctaccgggcctcacgaagataaaaagttctggcagttcagcatctcaaacagaagaatctaaggagaaaaaccggaaaattcttgaaacaattgtgagcatgattcctgccgatagagggtctgtttcggttggcttcttgtttaggcttctcagcatttcaattcaccttggtgtctcatcggtcacaaaaacagaactaataagaagagccagcctacagtttgaagaggcaacagtgagtgacctactttacccttcaacatgctcttctgaccagaattattatgatac

SEQ ID NO: 33702 - DNA, 462 bp, Glycine max
gaaggtttcccgtcatcactgtatgacgtcctccttctttgggggggggggggggggggggggggggatgcatgattcggaggtcgagttgggccagaaaggaagctgccgagagcggataacactatagaacaaaaagcgaaaaaaatgagtataaaaggggaaagaacgggtgggggtgtcaacaaccgtggtaacgcttagacgggtagtttgcgtgatccagaaatacataaccactcaacctaaatgtaattacaataggtgctgcgcccggcggtgcggcacggttgcgtagggtggtggtgtgggtatcaacagaaaatagtgttgtagcaagccaccaaatacgagttgcgtaatggtgggaatgtgactgttaggatagtaatggccttggggggagtaataggacattaagttggcctgctaatatttcggggttaagtaaaagttatacgt

SEQ ID NO: 33703 - DNA, 438 bp, Glycine max
acagaaatgtttggcattctttattacatggccctcataattgtctaaactgatttttaacttgtaaatcacagtaagtcggtgcatatagagcaaataaaagtgtttataaccgtataacgattatataatattacaaaatgatttgacaagccactcagataccagaaatgggattcacatatttctgctcatgtaagttatcactcatttcaaatccagatcaatagcacttagcacgtccatgaactgaaaaggggaacactttgtccaagctattatgcgacatgcgagagtgcccaatattacaggtgatatttcatttaaattatttctgtaacgtgcggaagtttataaacctggaggatgcactcgctataatttcatctgcccagaaagtcctttaaatgaaccataaagagcctgtgatcttctaaa

SEQ ID NO: 33704 - DNA, 271 bp, Glycine max
gttctttttaagtttctttgagtgaacaattttttaagatataatgccctcctgcgatcaacatcacttatattctgtaaaaatatgcactcaaacagttaatagattttgtcatttttttagagttgacaaggtatatgttgcagatcacaacaggttgtaatagataattttttctcatttttgcattctagtatggaattgtattttttttgtcatattttcagtatttttctagtatatactaaaagcagttcttaatttcttgccc

SEQ ID NO: 33705 - DNA, 321 bp, Glycine max
gtccacgaccctaatgggtattggttaccctaatagcttcttggtcagctttgttcgttctttcagcataatgttccaaggtttgtggcttatggtcatggggtttctgctttggactccagggtttcaagccaaaggttgtgtcactcaccttcgtgaatatatggtcacatgcaatgatgatgatgcccttcatcgtgctaaatcctcggtgaacattctattcagctggctattgattttagtcaccattttcgtgatgtctttctacttggttcttgtcacaagatatggtattgaaaaagtggagtatgcttcact

SEQ ID NO: 33706 - DNA, 316 bp, Glycine max
aaaaatcactgcctacgttggcggcggcaatggcggcggtgggaaggtccgtccggcggctaatggaaccgacggtgacggccggtttgaccggtcgcgacacggaacggttttcagcgacggcggtgcttcgacgcaggcttataaaacaggggaaaaaacagagtcggtgtcagggcaagaagaggaggaagaggagaatctgtggaacgcgatggtggaagaagcttctagaatggaggtgagttggagagggaaggatttggatagtgatgttatgaaacggttcgtttcgccggtgatggcgagtattgaa

SEQ ID NO: 33707 - DNA, 622 bp, Glycine max
ttcacgcgtccggaggatttggacgtgtttatagtgggacattggaagatggggctgaaattgcagttaagatgctaacaagggataatcatcagaatggagaccgtgaatttattgcagaggttgaaatgctaagccgtctgcatcaccgtaacctagtgaaactgattggtatatgcattgaagggcgcaggcgttgcttggtgtatgagcttgttcgcaatggcagtgttgagtcccatctgcatggtgacgacaagataaagggaatgctagattgggaagcaaggatgaagattgccctaggagctgcaagaggactggcctatcttcacgaggattccaatccccgtgttattcaccgtgacttcaaagctagcaatgtgttactagaagatgactttactcccaaagtttctgattttggcttggcaagagaagcaactggaggaagtaatcatatttcaacgcgggtgatgggaacttttgggtatgttgccccagaatatgcgatgacaggccatttactcgtcaaaagtgatgtttatagttatggtggttgtgctgcttgaacttctcacaggcagaaagccagtggatatgtctcaacctcagggacagg

SEQ ID NO: 33708 - DNA, 441 bp, Glycine max
ggtgcatcatagggatgatcactcaagattaagccaatcactctctagttatcattctttcccaggtgatgacattcccttgagtgggtcatcttacagcaacagggattttgactctgaatctggacgttctctatttcatgctgatattacagctggagtattacaggaaattgcactgaagtgtggaactaaagtggaatttttgtcttcgttagtggctagcacagcactgcaattctccattgaggcatggcttgctggaaaaaaagttggtgaaggatttggtagaactagaagggaagcccaaaataaggctgctgagtgtgcaatcaaacaattggctgatatatatatgtctcatgctaaggatgactctggttccacttatggcgatgttagtgggtttcatggttcaaacaacaatggttttgtgagtag

SEQ ID NO: 33709 - DNA, 375 bp, Glycine max
agtaaaatcaattttgatcaaattattttctccattgctcctattttagacgaggaacagaggcaatataagcaagtataagctgtaagcatcatagcactaagagcttatacaataatatatacattggtaacaattggtatcatcatacagtttttctatgtttaactcagacatacaactttatttcactgcaagcaatcacagtcacagagctcaacacagcattggattaactcaaaacaggccagggctgcacatatctgagtgcaaacgatggtgcactggtcattcacaaaagtgcaagtctgcaacagacacatgccacaacaggtatcagccaatcgaccacaacaattggaagcagccttcccc

SEQ ID NO: 33710 - DNA, 141 bp, Glycine max
tgatctttgacttgcaatttttggtgttgagcttagagattgatgaagttctgtattttttgtcattcagtgttgggactgacaattccattaaggacagtttcggagcatgagaagggaaataagatgagatatactatc

SEQ ID NO: 33711 - DNA, 799 bp, Glycine max
tttctacgcgtccgcttccttaatctctttgttgcggtctctattttccttctaagtctctggttgctgtggttcccaaaacccacttattggttcctctgcaggaatcaaagcatagtatattattgttttgaaacttgatgtttggcattgatgactgaaatccctctttccgagtttattaggtttatgataaactcctccttcagacgcaggacccacttggttcaatctttctccgttgtcttcctctactggttctatgttttctcattgatctccactttcccgtcacatgttctgatagtatagataaggtgtaaactattagtgtctctgggtcctgcggattatttgttcttcattttttttatatgtccatggcctcatcaagtggaaactcctccattagcacaaaatctcagagctctggctccgagggtgatttgcaggttgtggtagacgagagaaagaagaagagaaaacaatcgaatcgcgaatcggcgagaagatctcggatgcgaaagcgtaagcacttggacgaactgacgaagcaggtttcacagctcgcaaagggcaacggcgaaatcctcggcaccatagacataaccacacagcattatctgaacgttgaggcagagaattcgattctgagggcccaaatggaggagcttagccaacggctccaatcgttaaacgacatcgtcgacggtatcatcaacctcaccaacgcaaccaccgcctacgaaagggactgttatctaacatgcgcacaaaatatcaccaccaagaacaacac

SEQ ID NO: 33712 - DNA, 500 bp, Glycine max
ctcgagccgccaaaactggatatttaacttgcacttcaccccaaccctagaatagaaaacgtgcggaagacctcgactaattacaagaaaatatgtatggactgtggaagtgactcaatctgtgctcagtgccccttatccactggcacttctaccctctggtgtaccctatgttgatgcatgtgcttaacatatgacaatcctcaaaaaacatgcccctccccttcaatggagcgttagcgtcaatgaccctggcattgacgaaaaatgcattgttcgaccttggtatcagtttttggcagacaatgacttcatccatggagatgaaatttcattttacttcaggccttttgataaagtctgggaaatggttatcagaagacaccaagattgggaagacactgactcagattaaatttgcttatagtttgtttcatttacaaacaatattttgtatgttttatcataatattattatacccattcagttctttttttgt

SEQ ID NO: 33713 - DNA, 503 bp, Glycine max
aggatatgcggtcatcttccccacccccactatcattccttcctcctccacccccaccttctattccacaccacatgccatctacctctgatccatataacaccgtagttaattcaaaaggttgtactgtttcacagactctgaaagaaaaccaccacccacttcactctgtggctcagctcatggctgcaccaaggcatagccaacctatctgtgatgcagtgcaccatcaagtccctgaatacagagaaatgcagatgcacatgccagaatctacttgctctttcaacagttttcctgtaccacctccagagaattttcgacatactgatggtgttactacacataataaaggatactctatacgaccacctcaacatgtgccttccaatcagttttcttttgttaatggggaacagcatgtgaaacatcgaagggaggttccaccaccccctccttactccagtagtcaacactttgtgcagaacatggagagagagaac

SEQ ID NO: 33714 - DNA, 559 bp, Glycine max
gcaaactatgacatacggatattgtattcattggcggtttcaaagaaagacaataaaactaagcattgctgattaaaatgggaaagacaactgaaacacttaaaagaacataatttttttaaggagacataacatcccatccccaatggcaccattgataaattccatggatcaatgttgctttttcttggtgtccatgttgctctccagcccttgaacatgattcatgtgtccttcattttcaatcactggtatcaccacttcttggatttggagcatggcgatcttcttttctatttcattgagggtctgatcaatcaaccatgagagatcattcaaatccaccaagctaggattgccaacaacctttccagcggtcaggtattgaagcataagattggtcatctctttcttcctgttttcattcctttgtcttgtcaactgctgttggcctttggtgatcatttgcctcaaaaagctctcctgattcaacatctttctgctttgtctcacttcaggcatttccatgaaccttgaaagcaccctttggactccagag

SEQ ID NO: 33715 - DNA, 461 bp, Glycine max
ttgcgttctcgtgggcggacgcgtgggttctagatcgcgagcggccgcccttttttttttttttttttttttttttttttataaaatgtaaaaggcaatttacttataacatccctcggcagcaaaggagcaaaactaaaaccctgtggctgcttgtgcaaaaagagttctcatacagcttataaaatagaaaagtcaccaccgcccatcaagaacccagttttgaaaggtaggtggctgcaatgaaatggctgatacataaaagtaaaactattacaagtaaaagcacctattctctcaaaaaataaaatactaataaggaaccactgttgtgtgtaactataaatgtaactatgatcgcatgtacttgaagaaacacaaaaatgtattcacttcttcttctgtgcagccttggtgaccttggctccagttgggtccttcttcttcacactcttgatgac

SEQ ID NO: 33716 - DNA, 735 bp, Glycine max
tcgacagcttagcggttacatcacactgctgcagtgctggatttacgagcattttccctcagttgcggagtccaccgctgattaggactacgacgaggcttctccgcgtgcgtgcaggtggattgcgacgaagaagaccgtgaagagcattcgcacgccgtcgtatagggagcgcctgaaccgactccgaatttcagatgtctgttggatcctgtatggggagcatcgggaagtccaggacttccacgtcagatcatgctactccggtctcttgcactgggggcttgttgctgtgtattaccgaccggagaaggtcgtgcggcagtttggttacacgccagccattcctgctccacctgtcgattcatgggtctcgtatgatgatatacacgacaggtggatgcactacgagggtcatatcgtacctgtaggtgaggtgtgcgtggtgctaggggcgtgttccagtgactacatcgaatggttctttcgcatctctcatcctttcatgacaccaggccacgcagtagatcctttgcctcatggtcacgccccgcaaccccgagtcgtccctcaggccccgcagacggatatccctcgcgtgacggagccaggagcatcgtcgacatctgcggaggagcccagacatgcagtgataagaagtttgtgataacattgttgagcggttggagtgccatctgagtctaggggtggtcacgcctggctcatcgacacatg

SEQ ID NO: 33717 - DNA, 530 bp, Glycine max
ttttttttcgtaaaactataaatacaccacccttttttgaatagacgctcaaaagttgcagcaaatggatttgtggtacaaaatactcaaatatcaacatttgctccttcgtgaccatgtggctagaaagtcaatccttattagtgatgacatgctagtatgtgcatactagaaagtatggacaaaaccactacttaaatgagctatttaatgggtccatacaaggataacacattgtttaaccatgaacctgctgtcttttactgtaaggggtggttggggcatgcaccggaaaacatcaacaatcatggattcgttggaaggaacaattaactcccgaggacaaaagaagcatgcaccataatattttgcttgttttcaactccctatgatgttaaactcatacagaactactacaaatttatgttacaacccagtctgcataagttgaatagtcacccaaataaatcatcatcatctccatcaacaggtgactttccgtttcccgaaccatcctccttatctggaga

SEQ ID NO: 33718 - DNA, 636 bp, Glycine max
atgatttggcgccttggatccagattccacgagattgggtccagtattttactccaatactctctattcgtcctcctccttctgttgatccggcacatgttgttgctaagatgaatgaagggttgaattcgggaaaagttgagaatggggccaaattgaaggtttatttgaaggaggatttgcctgagaggcttcattactcggacagtgatcggattccgcccataattggtttggcggatgagggttttaaggttgagcagaacagaactggtaagaaggaatgtggcggtgcacatggctatgacaacgcctttttctcaatgaggactatatttattggacatggtcctaggtttgcaaaagggaagaagataccctcctttgagaatgttcagatttataatttggttacttccattcttgacatcaagggtgcgcctaataatggctttgactagtttccggattctgttattctgcctcctgcatgaataataaaaggagatgtagtagttgttgttatgtaggagttttttggtgaattttattttttattattaaaacaggagttttatttcagtaatccttgatgatcttttaatgcaaacttttattacgcgaattgttgagatg

SEQ ID NO: 33719 - DNA, 456 bp, Glycine max
aacttggaaaagggttcattccaaaacagttgaaggaatgaaacattatttatgttcgtaacataaaacaagtacccttggtgtatgtttttcataacatgatcaaagtgggcattacagtgcatgaataccaaaaatagcttccttgttgaagtctctagaagctgtcctgaaacccgtatttttaagcttggcataagtctcatgaaaagcacattcatagaaatcctgcccttgcaacttgagggtcttggaagagatgccagatgaattaggtgacacgaacatatcataatttgacccgccattgttgtggtgattaatccgccattcaagttgtacttttggcatgctagttagcttctgttgctcagaagtcatgtgagactcatcattgaataaaagaagcttctcttgatctgatgtaagattaacaatggtgatatcatggatact

SEQ ID NO: 33720 - DNA, 245 bp, Glycine max
aagtaataattgaaatatggtatgattttttatctttagaattttattaaggaaataatacaaataataaattgccccttacattatttcttaacaaaatttcttagggcttcgttctggttcaattgtgggaaattatacctgtctttgattaaacctaggacttcgttctggttcaattgtgagaaattatacccgtctgttttaagaatatcataatatattctctgttgtacttttcgttt

SEQ ID NO: 33721 - DNA, 398 bp, Glycine max
ctcgagccgaatcggctcgagcagcagtgcaacagttggctgctgagcttctttcacatctacttgtagaagaacgccttcagaaggatccagtgacacagcaagccattggccctctcgttcgagttcttggttctggtatacacatattgcagcaaagagctgtaaaagccctagttagtattgcactaacatggcctaatgaaattgctaaagagggtggtgttattgaaatttccaaagtgatattgcaagctgacccttcccttcctcatgctttatgggaatctgctgcctcggttttgtcaagtattctgcagtttagctctgaattctacttggaagttcctattgctgtattggtaaggttgcttcgatcaggctcagatagcacagtt

SEQ ID NO: 33722 - DNA, 549 bp, Glycine max
gcgatatatatacttctgattcaaaaagggataggaaagaatataatacaattaataaatgtatagtccttcccttcccaaaaataaaataaaataatcatcctcacgatcaggtacaccgaccaataaccatcctttaaaacccatccatcgtcttaaagaatcaataaagaacgccaaactaaaagatccaggtttagttcagatgaggagattttaagaacaccataaaaatgacattttgaacaataataaataattacaaagaaattggcgatgctaatagatcaaaacagctttacaacctctggttttcttgggtattctcaactaaaccttccactatcatatggactaagatgcccttggatagttgtctcgtttatcaattcggttaacggcaatccattgaatcaaaggagtctgcaaaccctgcaggtttagaggagatgcttgattgggtttgtgagatggaaatgtcattaaatattgaggaagtgccttcgttggcttgccaccttcgtagagcttgaggaaggctcatatgaa

SEQ ID NO: 33723 - DNA, 628 bp, Glycine max
gaaggtcactatcataataataataataattgggaacaatgtatgatttcagttgtccaagaaaaatagcatcacacctatccaacaacaggaattgtttctgattgcttgtggtcatgatctgtctcctgttgtttttgaccaactagttgagaggaagataacgacaattgtgagagactacagcaattatcctcccgctcctgctgcttctgagattctgtctcgtacaaggcatactcctcaggcttatcccatctgctttcacaagttatacagttgtagtagtacttatcgccatcggggcagtagtgttcactccagtcacactctggaaaatcttcatcttggggacttgtaggcatatccggcagggtaatgccagtaactgtactagggttgctttcggtctgagaaggcagctgtgaactaagctgctgctctatattttgaactgatgaatctgctgaatgtgattgtcttggaacgtcagtaataaatggctgagaagacaatttgggagcttgaattgaccccaaaggcattgaagccacatgtggatgcacttgttgaggaggaaatggatgttgtaagacagtagcaccaggttcccagttttgcatatgag

SEQ ID NO: 33724 - DNA, 519 bp, Glycine max
ataatgagtgatgtacaaacatgggtgagtgccgctttgacggatgaaaccacctgcaacgatggcttccaagagatcactgctgccactgatattaaaagcaccgtcagaagactcgttattcaggtagctcaattgactagcaatgccttggctttgataaataagctagccaattcttaattaacttcaaactccaccactcttctcttgtactgttacatacacaacatggattatactcttcttgtctcaatttaattacgtgatcttcaactcctggagataggtagcaacgtacgcgtgttggtgtcaaatgttgtaaatatgtaattatcaattagttcagattgttgtcaccgctggctagtgttaatgtctcgggcctactagcgggtggacagattttagtgatgtgaattagacacttatattgtctattttctctttctttcttttttctctgggtgaatatatcacgtgtatcattcatataaagtgaagttgatatggccatat

SEQ ID NO: 33725 - DNA, 372 bp, Glycine max
gacggcaccgccacagaacaggtcaccagtccacctcggttctgttccaagggttattttgccctaaaacaatgtccttttgtggctgttaagaaaccctagctcgagaaggttacggttaccgttctacgttttttctctatcttgtttgtactcctacggaggatgacaaagaccttgaactagcatcatcaccagttcatcataaggaggatagacgctttgagaatcagtactagcgaagaaaaaaaacccgacctagtccaacaacaacttcaatcatccgaactggaggtaagaactcatactcttgaggacaccttagatacctcttgtgaatctaacctagatagatgatttgccaattgcctt

SEQ ID NO: 33726 - DNA, 317 bp, Glycine max
actgggaacccaaaattttaacttggtagcgacagaaaagtacacgagatctccatcatcaatcaattcaaacttaactcggaagaaaagaaaaaaaaaaaaaaaaaggacccaattcccgggcaaaagttgccattttaagacttacatccacaaacaagaaacaatgattgccacgggcatgataaaacctttaactgtctttctattcaaactcactgcattcgaagcatcaaccgatgaacccgatgacccagatgaagcatcagcagcccctgcccggacatttttttccggcttggatggcgcaggagcct

SEQ ID NO: 33727 - DNA, 1112 bp, Glycine max
aattcccgcaacttagcatcctttgatgacttaaaaacctcttgagaatacaaaattgatgcaaacgaaccttttcttccttttgcctctacacacaccactaattgaataatcgttcaactaaaaatacatatgttgatgttcaccagggccacactatgttcttttttgggggatatgggaaggggaaaaagtgggatggggggattacagtaataagcagagtctagtaatctgtccttagttttaatgccagtatataaaaatcaagcagctgggacctttctcccatcttctataaagaaaattgctgcttctggaacatcaggccatgtatctgtaatgaactccacgatgtcataagctatatccccttgaacatcaatttgttctttctcacttggtccctgacaccaatcaacccacaatagtataagacattatttctatatataaaacaactatacgtgggtgtttggatcatagctgtcaaacaaaaatagcaatgcagtggggatgaccctgaaaatgctatagtatgatagagggtagcaggatagccgctattgtaaccaattagaataaaagaaataaagggtaaaacttagaagagactagagagcacaagacagtgagatgaaagatttgtttcagagagatttaaaaaaaaaaacccagggacagaaaaaccagggcagaaaaggtcatggttagccagaaacagtgtcagggttaccagaaaacggccacagaggtctcagggtcagggatgatcagaaactatggatagcagaggctggggatggccaactgtcacagcaagcaagaaaatgccggaaatgttgctggagaaggatgggtgttagccggaagagagaacagtgggtgctacttcataacagagtgtgtgcaagtgactgagaaagaagggtttcagttcttattcaaaggagggaggggggaaatcccgaattgaccacctaaaacagctctaaacaatcctgtttcatggttaaaataagcttttttgtgacccactccaataacacctaaaccagccgcaactttccatgatttggtccactattgagcagtaacagctgctacttcaa

SEQ ID NO: 33728 - DNA, 442 bp, Glycine max
aagagcaagatatgggtagagatcgtttcttcacccacaaacaatttctgtattatgctaggcgtacataacggaattcaaatccttgttacagaagatacttcatgacagcctttattattttcaacccagtcacagtcatcaggacttcttttaatacactttgcctgatgccctaagaatgaagtatgaagcgaggacaaaaaaataaaaaatattaagccaaattttgcaaaatcactatagactaagcaacatacaacaaaacctttacaaagagtagccgtcccttaaaacatgttacctggcaagattttctgaaatctcccttcacaataaatgtctccaagcactcaacataggatgttgcataaaatgtacaatctcaacagtaactcaccctaatacgtgaacaataatagaagcaagctaccccaacaaa

SEQ ID NO: 33729 - DNA, 447 bp, Glycine max
acataaacacactcgttgcattacatactaacttttatgtgccttgtcatgtctaataaaaaccaagaaaagcctaattgaacatatgtaatcttcatatactcttgatcaacagtgccaacgcctaatttggtgataagctttcgggtcttcgtatgaaaggccagcaactactaacattcacttcatgcctgctattacttctgctactgctactactggtgttgctaccagaacttttcatgcttccactattaatgctcgacacaccactatcactctctccaccagaaccagaaaggctcttcttcttccaccactccttatcaaggctcttagatccatgatcagaaaccgaagttctaggagacaccttgttagaaccactattcactaaggactcatttttagtcttcttcttagatcccaaagaaattggaaagacca

SEQ ID NO: 33730 - DNA, 362 bp, Glycine max
  unsure (1)..(362): unsure at all n locations
attgcacttaatattttgatgtgtaatatccacattttgccttctaggatgaaaacaatcttgaaaacaagtaaccatggcacccctgcccggtttctaccaaaggcatagtttggcaagcttcctcaacaactcgattcatcctagaaggcaaaatgtggatattgcccttaatattttgatgtgtaaaaagtttgtttgtaatagtgatgggcttaagtttttgagttttctaacttcaatgatgccctctcttcattttgctgcagattatgtgatatgttttagcccgaactaattgggacattcattttgtgtactatttgttatagtgtttgcattgttggctaannaaaaaaaaa

SEQ ID NO: 33731 - DNA, 464 bp, Glycine max
ctccaaccagttaatatcatcaatttatatattcattactaattaattggtgtcatctgttaattagtaaaaaagacaatgaaaacttgtacaacatacattttggatattaaaagaaaaggggctaataataacaatgacaaccctcatttgcacaacatctggcaaacaaccaagcaataatttaaattttttagtagaaaaataaacaaaaggattagtcaaactaacaggaacaaagaaaatgaactaagccccttatcatagtagatgaccaaggagaaatagggagaggatggtggatacatcactcgtgggagattcttctcacatcatctttgtactttcttcaatcctgctttacctgttgttatacctgacaatgtaacaggtagcatatatgatacggttgtttgaaccacaaaatcaattctatttccaaatctttacagatttgtcatgac

SEQ ID NO: 33732 - DNA, 541 bp, Glycine max
acggagcgttgggttgcggcacgtcctttggaagttcgggttcgagttcagaccaccaaaacaaagaatctcaatggccaggtgcaaaaaaccaaattggacaagatgaaccacaacgaaagcaaagtagccttggctaaacctaccctatcaaacgggaaggaaactgggaaaggaaaggaaaacggtacttcagggctgtcaaagaacaatgtatccaaatagcccattctaatttgatggtttagggtttcttcttgctcttcttttggagtttattttccatatttggcttcgtgagaatctaccatttggtgtgtacgttacactaggagacttcacttattgtctgcttttgcatggtgtatatgattatgaacatgaatctcctagttttggttgagacatgagagatgagaatggtattttatcatccctttcattccaggggcagttaatctttaccccaagaaatttttatgctttacatatattggaagggcaaaaaagcaaggaaattaaatgaaatatcctctcctgt

SEQ ID NO: 33733 - DNA, 509 bp, Glycine max
ctcgagccgctcgagccgaatcggctcttgaacagcagaaaaatgtctggctgaatatggtgttgataggccaacaatgggtgctgtattgtggaatttggaatatgcacttcagctccaagaaagtgaacaagaaggggagtcatatgatgatagcagtgctcgggaaacagtgaatgtgacaactacaataattcctgggagtccttctagtaacgtaataagagagggagataatggtaatggttattcagacataagtgctaccgaagttttttctcaactaatgaacagtgaaggcagatagagatagaaatatcctgcaaatagaggctattcttgctgatgtataaaaagtttcacatggaaataaaggtatcaatctttacctgtgctttgatagttattttctttataattgttcttttgttaaagaaaattgaaccaaaaccaatattaacatttacatatggaaggcagtaataggcaaggctcatttgtggtttctt

SEQ ID NO: 33734 - DNA, 465 bp, Glycine max
gtcacgacgtttatctcttcttttttcccgtctatatttatctttcttagatctctttctcttccttcgcctgtcatcactggaagaactcatgtaagatgatgaggacatatctgactcggaatcactatcagtttccaaagattctgtatcagaatctgaagagctcccggattcagatgagtagtattttctccttttccttctgtcttttgaagattttttattctttcccatttttgatttatttaccttctttccatcctcgctatattcaccacaattaatgattttaacagttacagttggatgcccttcttcatcaccgaattcttcaattttcttcaatacattatgcccttgcacaagcttcccaaagactacatgtttcctatcaagatgatgatcagctttcaaagtgataatgaaatgggaaccgagtgtgtcacggtctgcaattagaca

SEQ ID NO: 33735 - DNA, 588 bp, Glycine max
tgcagaggcaatgcaattgaactgattgaattgtccatattttattttcttgctattggatctatgatgtttattagggacttggtgctggaacaccatgtgtttatgtatctttcacgctggcctactttttagggaaagagaatggatttcctgagtgaaaacatttagacttgccatatggagtttgggcttctgttgtctatttttgattttcctggggtatgaaatatggattacgaaacagaagtcagcatgtaatatgcagtcaagcttgccttcactggcattaatttgttttaacgagtggattatggaagtgggaaccatgatttcatctatcaatgtacaaagaaatgtttggctgccaaatgtgggaggctacagaattcacccccagctgctttgttgttttggttaaaccatatacccaacccagtggaatcttcaaataaaggtagattccctgcctcttcttttaacaccctcatccccagaaaagagtcatgtgatctcttttgtttttattatattatatgaccttgccctgtgctatacttgtttgatatatcatgagatgttggtact

SEQ ID NO: 33736 - DNA, 445 bp, Glycine max
ctcacaccatcttcacctcattttcattattctctgtcactgtcatagggacatacatacatgctgaccttcacacatcaaaccaacaagaactttctgtgccttaaaccatggtcgagcctgcagtagcagcaagctcagaattatcagactcaacacgaaacaccaacaccaacaccccttcaccctcttcctcatcgtcgttatctccgtcgccatcaccgtcatcatcaagctctaaaaagcgagcgagagacaacaacaatagtagaaacaacagcaacaagcattctgtgtatagaggtgtccgaatgcgcacgtggggcaaatgggtgtcggaaatccgcgagccgcgaaagaagaaccgaatctggctcggcaccttcgccaccgccgagatggcggcgcgtgcccacgacgtggcggcgctgacgataaaaggctc

SEQ ID NO: 33737 - DNA, 607 bp, Glycine max
aaagagaacaataatgtagttaaattcatggggcaaattggaatattaatatatatatatatatatatatatatatatataacaccctgatgattctacaataaaaagtacaaattagctgggggctaccattttacttaagccacttcagcgttccctagaaattcaaaatactacaactttacgccccccaagtttaattatcaaacccacccaatcagaaaaagtaaaacccaacaacatctaagtcacaattaaaaagttgtcactcactatccagtcaaacgaccatgtctagtaataagtaaataaatggcgggaaccaaaacaaaaaggatcatgataaaaaatatatataagtttgtcattgatgttgatgacatgggtgatgattatgattagggtttttttcagacccggaaattctttccggtgaaagtttgaccgaattgccaattgggtggagcgatgttccacgaggttgaggtgcggcggtcgctgccggtgacgcggaaggacagggcctggcccaccaaaaccgcgtttgactgccagttctgaccccagtttcggctcattggcatccacccggttcgggtgccctcgt

SEQ ID NO: 33738 - DNA, 480 bp, Glycine max
gaaatcatggatatgattaactcaatttaataacttttacacattagggctttatttaaccaatacgattgtccaagtgatcagcatagttcagtataattccctgcttcatcacccatactctgaagggtaataaacaccaaacaaattaagtacgcaaaaataaaagaaaaccatgtgagaacactaatgaaataaaccattttcacaaggccaacgaaaccctagacagaataatcctccccaccgtaacttccaaagcaaggatagacaaggaaggctaccctattctgccgccaaaatatttttgttttaccgttttctcagctaaataacctagccgaaatagctgtttcttacattaacacaacgtatcgatcacatccacatcacaagcaaacaacaaagttcccactccttttaaatccaggtaagtaaatatgttaaggtttatgagacaattcatagctctgaagatga

SEQ ID NO: 33739 - DNA, 518 bp, Glycine max
ggaggatgtcgcgaagtcgattgttatggttcacgttcgggttcgcgtccagcatacgtcgcgctttaccaaaccgttttgaaggacctcacgcttcagcgtcacgcgtttacctctcacacggaacgctattttcgcattctcgaagccagactctccaacatcgaacaatcctcttcttcttcttctgttcccgctcccaatcaggttgaaggctagataactctatcaggtccagtgaaatgatttctacttggttctatgggatttatgcttgattcaaaacgtttgttgaggaaatggccattataaaacagacgccaaggcaaaggataaaattcttacctgcttttttttttcgctccggagaaattaaccaactgtgtctgtgacgagaaaatgaaaagaatgtagtgaagttctctctgtcatgttattaaatgccatgcttttgttgtacagctccaaaagcttgaatttttaactctcttttatattattattagcaaattttgatg

SEQ ID NO: 33740 - DNA, 437 bp, Glycine max
gcaacagtactctttgggatgatctttcgactctcacgactctcatgcctgatgcacacacagcttcttgtgaagttgtgaaggatggtggtttcaccattgacgctgctcagtttggtaatttggggagattcatcaaccatagctgctcccctaatcttattgctcagaatgtcctttatgatcaccatgacaccaggatgcctcacataatgttctttgctgctgataacattcctcccttgcaagagctgacttatgattacaattatgaaatagatcaagttcgtgattctgatggcaatataaaaaagaagtattgctattgtggttctgtggattgtactggcaggatgtattgagggcaacaaggttaattaatgcaatagtgtttttctgcagtcttaatgcgaagttcatcaatatccttcttcttc

SEQ ID NO: 33741 - DNA, 435 bp, Glycine max
atgtgagttacaatactcacttgtcaatcatgtgtgactacggaggtgaatgcagatttgaagagcacatatcagtttttactttttatactagtggcatccacactatagtgtgtttgtctatgtctttcaatcttgatctgtcatgcaaaatccaatgtttgggattttgatcctctcgttctagtgtttaacatcacaggacgtgtggagagagacgcacagaccatacatgcgataaatgtgtagagacctatgcagtgtcttcgtatatctatcactccctgcacatatggtcatgagaaaattgatgagtaattgattatgtatgtatatatgaatctgtgtgtgcatgaatttattggagatttaattgtaagcaatgttcgatatttagttaagaaaaattaagatctatcatttattaggtggtgt

SEQ ID NO: 33742 - DNA, 457 bp, Glycine max
cttaattgtgtcatgattcaactaaggttttagaagtcactctgtaataatttgatcattttatcatctccatttctacagtatgtgtttattttaattttgcacctatattgttaggtagcaccttttctccatctattcttcattagataaagtttatgagtattgaatttctccattataaagatcaggatttaggaaataatttgaatccaattaattttgtgattaacacttctttgcccctctggtaatcaactattgttagatatttttcaagacttatttttggacactcttcatctgtttgtgtaatcattgggggcatttcccttaaggtgacttgtgatttgttggttagttacaccagtataatgccaatataactaccaagaatgtggatataaattttagtatgcatcatctgtgcaaattattatctgcaatattgtgtttc

SEQ ID NO: 33743 - DNA, 594 bp, Glycine max
cgtgatcttaccctcctttccttcttttttaaccatccaacccactttaatatctccaaaagataaaattatttgtatgttgatccatgtagcagacctcacctagtgggataaggctttgttgtagttgttacttgtttgtgtgttcattatatgctcattaattatactgtattcttttgtggtattctttcttgttggtttcattgaattagcatttgaaattggtgataagcctaatttgaatttcaatggtgattgttctaagaaaagaaattatgagatgttttgggcgaggttttaaaagactgtatgcaattgcgatttaggctgcaatgtcaaggtttttggtgtgtttgtgactgcaattgtagccgcattggtcacaatttcctgcaatatcaaggaatgtgataaaaatgtgaccgcaactgcaatttaaaaccttgccgagtaacatgttttgattgtgagatgttactatgtcttagaatttagataaagaatctgtgtttgtggctgaaatgttgagtcaggatatgagattgtcaggtgtttgctctgagagatgctggtgatttggcacaaagtgca

SEQ ID NO: 33744 - DNA, 817 bp, Glycine max
ggaaatgggatatgattgtattgttttttaatcttggtcaaggtgggcagcttatggtatcttgcatgatccaagcatgcggaatttggcattgcagtttgtaaaacagcttggagatgcactgcattctataagctcagagaaaattagtgggcagcagctgcagttggtctatgttataggttcaccttctgagaagttgcaagagcatgattttggtcctaaagatcttgagactttaagtgaagctgtggatggattctcgttaatgacatatgatttctctaatcctcataatcctggtcctaatgcacctttgaaatggattcaaattgttctacagctgcttctcggtacctctggcaatagagcccaaagccttgcccccaagatacttcttggtatcaacttctatggaaatgatttctccctttcaagggatgcagatgcagggggtgcagctattattgggagagattacctggcacttttggagaagcactggcctgaactgcagtgggataagaatagtggggagcattttttcttttacactgacgacaaggatatcaggcatgtggtattttatccatctttgaagtcaatttctttgcggttagaggaagctcgttcatgggaatgtggcatctcgatctgggaaattggccaaggtctggattatttttttgaccttctgtgatagcttgttatgtgtacttcttttgtggcccatgttaatgtttattcctacgtcgtaatgttgtgtattcagtataatcgaaacgtacttcagttaaattgggattttgtttttcag

SEQ ID NO: 33745 - DNA, 306 bp, Glycine max
ctgcttcttcacattcataaccaagagtgtatgtaatgcagtagcagcttcaatcatcaacaccatcatataacccttgcataagttcgagcggcgaagcccagattggaagatcaaacaaggcttgtttaagctgttcttctctcttaacgcacactgtttctgctatgtcgcataaatttgacacatcacgaattattgcttcctgcgcctccacctgcaataggaggtcgtggaggagggagctaccggcggaatcggaggacgaggaagtagaaggaagagatagggataggtttggttggg

SEQ ID NO: 33746 - DNA, 542 bp, Glycine max
gaattttattataaagtacattcaagctttatctcattttatgattttacaaataattggcaaaatatcacattattttactttattttctattttcataaatttgtatggtgaaaacagatgtcagttattttatatacatcaaacttcaaaaataagaaataaggtgatatttttataattatttgtgaaaataaaaattattttgtgaaacagaaactaacttctcatgaatttaatttttacatattatataatgtaaagaattttacatatttactctttttatataattaactatttcgtgtacttttctatatatattcattttacaggctgatgttctaaaagtgttcccggatgaagtgacaatagtcctcttttacaacgtgacttccacagtcatgtctacacttgtagctttatttgcagtgccaaacgcaaatgcttggaaagtaggactgaatatttcattaatctccattatttgcactgtaagatacctttctaagttaactgctgctgcactttgacatgggcta

SEQ ID NO: 33747 - DNA, 305 bp, Glycine max
agtggaattgagactcgaattatattagaattggtttggtttggtgtcgtcctccatatcaccagttttccttaatggtgaaaggagactagaaaataaaagataaacaaactttgttatgaggtacaaaagaacatgttcttaagatgctaaaagataaattaatggctgttgagttttcactagcttttagacatttccatctgttttcttttcacaagttttcggttccatagctttgcaataaaggaacattctcagtagctggtgattccgagtaatcaacttcttcctctatctcctct

SEQ ID NO: 33748 - DNA, 235 bp, Glycine max
gaccatatcaaattattaatttctcaaattattgtaatattctgatccacaacaatagattgggaaagaaagaaatgaaacgaaaaatgtcccgcagggcgtatccgaaacaacccactaggatccaatatggatacatggctaacatgtacatttgtccactgcctttgccctttgagtggtggttggaaaagaatatgtctaattatacattttcactttcaggatgaccatt

SEQ ID NO: 33749 - DNA, 663 bp, Glycine max
cagaaactcttagacatgctcctggggtgaaatctgttgagagggactggaaagtgaagaggctcacaacacacaccccacaatttttggggcttccaactggggtgtggccaacaggaggtggctatgagagggctggagaagacattgtgattggatttgtggactctgggatctaccctcaccatccaagttttactactcataatactgaaccgtatggtccagtttcgaggtatagaggaaaatgtgaagttgatcctgacactaaaagaagtttctgtaatgggaaaattattggagcacaacattttgctcaagctgcaatagctgctggggcattcaacccttcaattgattttgattcacctcttgatggagatgggcatgggagtcatacagcctctattgcagctggaagaaatggaattcctgtgaggatgcatggacatgaatttgggaaagcaagtggaatggctccccgtgccaggattgcagtgtacaaagcactctatagactctttggaggatttattgcagatgtagttgctgcaattgatcaggctgtgcatgatggggtggatatactcagcctttcagttggaccaaatagtgctgcatcaaacaccaaaactacatttttgaatgcttttgatgctacac

SEQ ID NO: 33750 - DNA, 481 bp, Glycine max
tttttttttaagccatgcaatttgccgaagcaactgagttcaattttaataaataggttacatccacataaatacaaaaaagaaacacttaagttatatagttttggttaaacagaacagccacaagaagcttatctgcaccttctatatttatgtaacaatatatgtacaagtagttgaaagttgtacctaactcctttaaccctaagtacttccaacagagtctggtagtgacattgaaaaggaactgtcatattcatattccagatcctcaaaaccccataattcctcctcttgctcttcttcctctggcatttcccacttccctttatccatcttccactcctccattacctgcagtacctcactcatgataggtctgcaagttgcagatgccctaatgcaaagggaggcagcataggctactctattaaactgtgtcacgtcataagcccctgcaagccttgaatctaccaaattt

SEQ ID NO: 33751 - DNA, 532 bp, Glycine max
tagttctagatcgcgagcggccgctcgcgatctagaactggggattagggattttcctgttcaattatggttgtctaaactgtttaccagttgattgattggttttgggtgcaagtgtcctgaaattgaagtttgaatttctcttcccggcaatcaaagttctgacttttcttgagtatttgtttgtttgcggtatacattcatggcatagctcattttacttttattagttttttgtttgaatgtctaaatatttgtcctgaatatcagcttaaaaatcgccccaaatttgtcgtttcctatgttttttttttctgtaattcacttgagtgttgtaggttctccaagttgctaaaccatcgaaccagatcccacttgttgggcctttgttgacacctcctgtcagtgttactgcggtggcaaaagttgctgttacagctgctactgctactgatcctgtatttcccccggggatcattgatgcctatggaatacgacgtttactgtcagaataaatcaaactagaattatc

SEQ ID NO: 33752 - DNA, 430 bp, Glycine max
gctccagatcaaatctgtagtatgtatgggagcaagctgaatttgatattattcaacggaagacaaggattagcctccattttcatatgaagaaggaacaaagaaaacttcgccatgcattttcatacagctgccggttgtggacattgcctgaaattagggattgcctagaagaggctggatttcggtctgttcacttttgggttcgagagatgccagacaccacagaaattatgagaacagaggggtttggtgcgggaaagaatgtaaaatatgaagaggctacaagttttcagcaacaagattcttggaatgcttacatagttggtgttgcgtaacttcatcttagaaagtgtatttctgttgcattaattttgtcataagactcataactggacaagcatcactgttaatcagctccattgcttgg

SEQ ID NO: 33753 - DNA, 462 bp, Glycine max
ctactgattcaatttgcatgatgcatttcctagaagtgtatccaaactattcacattacacaatcctttccttcgatataggtcaaactaccagtcaccagacatgaaagcttagtatcaacagaaaaataccagtagattttaatcttacttctggttccatttacatgatacatgcccaaatttgtcaccaaactacaaacactacacaatccttcaaacagactacaatgacaaaatctgatgaaataaattcctcaactacacacaaataaatgttcctctcacattcaagagctgcacaaactgctacaaatttcaaatctcatacagggttctcaccaggcagataagaaggagaaccaccctcaacctggttctttttcctttggaagatgccactaatatttggcaagagtgttttctttgaaactgaaaccttctccttttcaaactttttca

SEQ ID NO: 33754 - DNA, 763 bp, Glycine max
caccatctaaaatacacctctttcaaatctaataatggaacgtgagtttattccaggccatgaaatacaaggacagaactaaaagatttgatgaattacaatgatattgacagctgcgattgctatttataagaacgatgatgaaatagaagtattaacggcaacaatgctgtttaaattacacgtgcacaatcaccagattcacatatcaaaactgctgtgtctttgcttatttggcttgctaactctggctgtaccttgagatattcactcctgacaaatgatgcagcttcagttgcaaggtcagcctccacaaatgcaaggcaacaccctctaaacccagcaccactgaagcgcgctcccaatacaccgggagccctcagaaggatctcatacagttgaatcagtggttcacaaccacattcataattttgaatggaactccgaccagaagctgtaataagcattccaaaatcttttaacctgcccatcgcccaagcctcaactcctttcataactcgcatattctctgagaaataatgctccgctcttttggctagattgggttctaatttgtgcttgtgagtgtcatatacttctggatcaacgttagataggatgggctctgttgtgtaatctccagatgcttcaagaagaatttgtgcggcctctcgacactctacaactcgcttgttatatccagggttattcgtcaaagcttgcttcaaccccgaaagtgccaacaatattctggttgcctggt

SEQ ID NO: 33755 - DNA, 632 bp, Glycine max
ccaagatttaggtggcaatatgttatacatctcttcttcatatcctaggcattatgtctaacaccaaatctcatgctggcattcccattttggacctttctcagccattgcagccatgttctctatcctctctctataatgcaagcaaagattggggtcttttccacataatcaaccatggaatctccaaagatctttgcagccagatccagacactatccaaacacctcttcaacctcccttctaatactaaacttagacttggtcctttgtcatctttaaattcttacacccctcttttcattgcctctccattctttgagagcctccgagtcaatggacccaacttttatgtttctgctgataattctgctgagatcctctttgacaaaaagtactccaaattcagtgtgataatacaagaatattgcagtaagatggaagatttgtctaagaaaattctaaagcttgtattgatgagcataggggatggcattgagaagaagttctatgattctgagttcaagaagtgccacggttacttgagggtaaacaattactcagctccagaagttatagaagatcaagttgaggggcttgggatgcacactgatatgagttgtattactatc

SEQ ID NO: 33756 - DNA, 516 bp, Glycine max
gcagcatcgattgagatggttcctcgcccccaacgtaaaaccaagagcgcggatgccatcaagaaatgtgaccatgatccccatgttattgctgctgtggccaaattattctggcatgataggaaggtggacaaagccaggacttggttgagtagggctgtgacactagctcctgatattggggatttttgggcattgctatacaaatttgaactgcagcatggaactgaggagaaccagaaggatgtactgaagagatgtattgctgctgaaccaaaacatggagagaaatggcaagcaatctcaaaggctgttgagaattctcatcaaccaaccgaatccatcttgaagaaagtagtggttgcacttgggaaagaagagaatgcggctgagaataataaacattgatttgccaagtttcagctgtgtcataaatgattagttttgaagagaactttgaacattattgaatgtctcttgtagaatattgaaggaacttgtatattagtttgatcc

SEQ ID NO: 33757 - DNA, 750 bp, Glycine max
cttaacattagttctcctgattttggaggtgaacctgatgatgatcacgaagaattatataaagctgcaaatgctgctcataatgctagcaaccttgcttgttcgggtccattttggaagaaaatggagtctatttttgcttctatcagcttggatgatgcatcttacttgaagcaacagctcaatatttctgaggaatttgataaaagcttatctaatatgtttggcattgatcatgatgtgttgagtgttgttataaataacaagcccactcaaggttcagaggaaagaaagagaagtcactgtgatgaagaatcaactaagtttgatgctttaggtggtaagaaggacatggaaagactggacaaggttaccccactattccaaagacttctttgtgctctaatcgaagaagatgaaagtgaagaatcatatcaccaaagtgatgcaaagaatatatctcgacaatgtgctagtgatgattctcactgtggttcttgtaatcaaattgattttgaacccaaagatcgggatagaatggactctgaagttgagtcagaggtggatcttcaaattcagaagaactgcatgttggatagactatcttgtgataagagcaccacatccaacacatttagatacccaaacacatccagctctttacaaagcactggagtttggcagggagatgaagaattttctctttcagatatcacacataccggcgaaatatgttcaaatgatcttgat

SEQ ID NO: 33758 - DNA, 306 bp, Glycine max
tgggatgtgcaacgtctgttagaaattctgtatagatcatgatgcagataagctagtagtgcagtatagaaatgattatgcacatgcagattatgttatgggtgaaaatgctcaccgagatgtatatgaacctcttatatctttctttaggcttcagtgatatcagtgaagagtactccttatagaatattgtcattacctgtctctaaatcatagaattgaatagcacagaaataccagcatgtaattttacagaagatgatattattaaaggaaattcctgaaatcttacttcagtgtgttatc

SEQ ID NO: 33759 - DNA, 321 bp, Glycine max
gaaaaacaaatgtattatttttatttatgctagaggtgacaaaatatcttgatatcaatgtaaataaacctgaaagaaaaatgcgggtgatctccatccttgtctttggaggtgcaaccaggtctttacctacagactaggagcgggtgccaattgacagaaggtggattcttgcatccaattcaatttacataaccaaagatgggccttagacagattatttataagcattatcctgaaacggggaatgcctctcaatccaagggtttcaagaaccacttgttaaaagatgccttccttttaaagaattggaagccaaat

SEQ ID NO: 33760 - DNA, 416 bp, Glycine max
cggctcgagctatgataaatgcaaggtaaagagtgttcctcccaaatgtgtacatagggaattggccaattacccccctgccattctagctcacatgccatgtccaaataagtgtgcacatgacatgcaagtttcttctgttaaacacatgtgttgtcatggtcgtgaagccagtgacattgcctaagacaaatgcatgaaataactgctacatgctcagtggtttcttcatttcatgaatgagacttcttcttcaagtttggtttaaatttttgtgtgtagatggggcaatatatttttagtatatattgattcttatgcagtttgccttagatgagtattatattgagtgaattgttttgaaagaataaccagttctgtgctctgcttgattggcgcagaatcatattcaatcc

SEQ ID NO: 33761 - DNA, 408 bp, Glycine max
gtgccactaatccttttaagctagaataggcgcgcgccatacacgcatatttggcattgcatttttattccgccatttctatcatcagcatgacgtccgggcagtaacatgacagtgatgacacagactacatcttgccagctagctagctagttcctcgccgccaattcgagggaggctacaaaggctgatggataatcagagctccttctgaacggacttgacatttgtggtgaggttgagcgactagcccagcttgacaacgctgaaaatgcgctagaagtccccgaaggtgagggagcggtaccacggcgggttgtcgtcgctgaggaactcggcgggggggccgatgaggcagtccgaggtgggcatgaagaacgtggccaacgatgtccgcgccactcccag

SEQ ID NO: 33762 - DNA, 590 bp, Glycine max
atgcttcagtggctgattcaggttcggttaaccaaccgggtttcgtagtatgcgagcatcgttgttggtgggcccccccccccccccggctctcgtcaagccgccggtctcagccaaaactcaaagcacgaatcacagacctctggaccacaccccaccacccattagggcactctggcggcgagaacctaagcatacctccgcaacccttggccaaccaaaccaggaaagcccaaacatacactgcacagcttaaggggccccggatctagcggattgggctaaaacttgccgaacaagcgacaattgaccaccggatgcggactcgctccgccgaaaccagcacccggaccggcctatcgcacaacaggccgaacgcggccgaacgcggcaccaaaggcccgaaattgcaggcccacatccttaccgcgatgggactacttgcggactcacccgggaactcagctccgacgaatctaactacgctagaacaatccgaatagcaggacgagcaactcctgcctaaccctctactttaaagagcggaaaatatccctgcgattccctcccataaaacccggggaccgccg

SEQ ID NO: 33763 - DNA, 609 bp, Glycine max
atgcttcagtggctgattcaggttcggttaaccaaccgggtttcgtagtatgcgagcatcgttgttggtgggccccccccccccccctgaaaaacaactcctacaaaaccatccatggaaaaacagagtattgctacccgtcccttagtactataaaacaaactaacgatcgcaaatgacgcacgagctgacgaagaaggcgcctttcttctgcctcgggcggaattcggccctcggtacaccctggccggataacgagccccccaagttgatcccggaacgttcgatgaaactgattaaagcttatactcgcaatgacgacttggtagtatataattatctggagctttccgtgcccgctcctccgcagcagcccacgacctggaagacccggctgctaatgaggcctccgaaagagatgtctacgatggggaagaccaggcgggttgactagcggatctggcggatgaacaggctggtgctcaccctgaagaatacccggacaaatacctttttccagactagacgaaagctgcggttcccctaaagaatgctgactgatgatcctcgcagaacaacccgacctcagcctaccggattacaggcctc

SEQ ID NO: 33764 - DNA, 372 bp, Glycine max
cggttaatccaaccgggtttcgtagtgtgcgagcatcgttgttggtgggccccccccccccccccccatcctctcaacaagcccttgcaaccgaactggccattaactccggactaaatactcatccccccccgcatacaatagaccactaagactaagagcgattcatctttaaaagcagttggactgtttaccgccgaaatgatctagaagatgcccaagcctaattcatgccgcaattgctcataccggggccagcgcgggcctaggagcgacgccacacggaggaaaattcacctgctgacgaaatagacgacatgatcctacggacaggtccggatgcctgaactgcgtgacgaattctccttgatc

SEQ ID NO: 33765 - DNA, 503 bp, Glycine max
gatctcaaacccggaatgctataatgctgaaggaacataaagcttcaaatagatacacatacatatatgtaaattttacagttcacactagaatctagataccacaactaggattagcaccaactgattagtctagagaatattgaatactaagttgtgaggaggggcatggtggaatttggacttcaacaacaccttcaagcatctgtgtcacatttctcattgttggtctaagaccaggatcctcttgcacacaccaaagggcaatcatcaccaatttctccaaggtcttcatgtcatccaatgccgctttgtcattctcaaccaagtcatgaagaacaccttcagtgtagcagtcaaaagcccattcagttaggattgctttctcttcatctgccgcaaattctacactttttctgcatgaaactatctcaagtagcagcaccccataactatagacatccactttggccgtgattggcatgtttttgaaccattcaagt

SEQ ID NO: 33766 - DNA, 493 bp, Glycine max
cagaaccaaactgttattaaattacttatactttaacctacatcttttaaataaaataagaaataatatctacagcggatcacaaaacaaatataaaacacaacctttgggggagatgtttgtaatagttaattgtggaacaacgatcgaggtttgaggagctacaattttggtttcacattgaagacacatctctttctttcttacattttcggttgcttttctttcatattttctggttttctattttccaatttgttggatacaatgtcgtttgagatttgactccaactagacaaaaatctgagacgcagaaccgattaaccgaccccatgcatcacccatcgttatcatcgaaacagagtagtgaccacaacagcgtcttccctccccaatggtcccttctcttcacatatacaactcataaaaacacctaacatccatctttttttactcttcagtagaatagtagctattataatattataattac

SEQ ID NO: 33767 - DNA, 487 bp, Glycine max
aggttcggttaaccaaccgggtttcgtagtatgcgagcatcgttgttggtggtggaggtgagggaggagtaagtgcttgaatccaggaggcggaaacatatgacgggacttcggagccacgagatagaggaggacgctcttcactagaacctgaatacctatgagcgggatatagaaaggccttggctggggctattctgcttataacacctactgcatatgaaatttcactgctcaatcaacgtgtatctttaccggtattgtatataatatatggaagtgtggttgccctagttgttgtttattattgattttccggcgcgtatggtaaccggtatgccagtcagtgtctgactgtagtcgacatgcgccgcacatctcgaggcaaaccgaaccgagcttggtcgtccccagaagtcgtctagctttaaaagggcttgtccagggaagccaacgtggcctgatgagacgggggcccgtggatgct

SEQ ID NO: 33768 - DNA, 336 bp, Glycine max
ggctgattcaggttcggttaaccaaccgggtttcgtagtatgcgagcatcgttgttggtgggccccccccccccccctccaacaacacctcaaccaaccgatccaacgaaaccactaaaaggactcgcggacccgaccgacgctataatcttcaaggaataaacacgaactcctcgtcttaacccactcacagaaagcgcccacgccctccagacccactatgaaaggaaaccttctttgcaccgggacgaaaagcgtatggtaaccggtatgccagtcagtgtctgactgtagtcgacatgcgccgcacatctcgaggcaaaccgaaccgagctt

SEQ ID NO: 33769 - DNA, 376 bp, Glycine max
ggggaaaccaaaagaaatcccttggatttgataggaataaaaggataagggggaaaatcccagggtacaaacttgccagcagtaaaattgggcgatgctgtctcaaaaagggtttcatcttatacgaattgcccacaattcacaggggttgctttcaccagaaagaggcccccccaccaacaaaattagctggggctttgacatttttctctcttcttcagaaggaccaaaaattggccaaaactccaagcttcagcatttttcaatttatgctctatttcatagttttgggacttagatatatgacatcaagttcttgaaacagcatgccaccctttgcctttctttctccctccgaatcattctttttagcccc

SEQ ID NO: 33770 - DNA, 420 bp, Glycine max
tggctgattcaggttcggttaaccaaccgggtttcgtagtatgcgagcatcgttgttggtgggcccccccccccccccccctcgctggaataaagactcctaccaattaaaactcctataatgcaggcagaatcattcgagagggagaccagataacctcttttcaagagaacatctacttcgccagactgagctctcgcgatacttaggaattcagacagcagacagaggccaacattggagtggcaacaaagactacaaaaaaatgcaccgtaacggaactgttacaatctaaaacttctccagccttagtacatcgaggaaccgaggacggccaaataagacccacccgcccaccacacgtaacttgaaacacccctggacctgaccactgataacgacctcgcaaaatgcagctat

SEQ ID NO: 33771 - DNA, 486 bp, Glycine max
tttttttaaaacgctgaagcatgtagacatttatatgtattgaaattaatcagtgttcaattggaagctcacaattgttccatttcttgggacaaaaatgaaaccataattttcagtttcttgccctaatggttttttctcaatagcttgtaaggcagtgtgactgtgatccagtgaaagaaaaatgtatccaactttttattataattgtcaacaatgaaagttctcacttctttcccttgagattgattactgaaagctcttgttcaacatactctcctgcacacataggtggatatttgcttgcaaggggtgattctgcaaaatgtcccaatggcttcagaactgcatctgatgctatgtgtgcaaacaacgttgaagagactctccataagctacgattctgcgcttgtgctaaacttattgcatcaagtgtcctctttgtggcaacaacctcatgcatgccagctatgcagtcccctccag

SEQ ID NO: 33772 - DNA, 484 bp, Glycine max
gttcggttaaccaaccgggtttcgtagtatgcgagcatcgttgttggtgggcccccccccccccccccccccgaaatgaaatctagaccacaccaaaaatgtcttgctcgagaataatcttgacatacggagagactcatccagaaaaatacccacacagcacagcaacccacctaaataaaacccttgtctaaaacagtaccgagggaagagaccatcctaaatgaagaaaaagccctctaatctcctgctatatctttatgcgcccaaccaacccacctaaatgataatgaacttactcgaatgccgggatggggcaattagatcatgagtctgtagagttccaagctggatttctaattgcgggacagtaatacgagaccgactttcccctgagacccggccgagacgcactaaaggcccttcgactcattcgcccatgcgacctccgagcccgcggcgacgggagactaaaggccttact

SEQ ID NO: 33773 - DNA, 471 bp, Glycine max
atgcttcagtggctgattcaggttcggttaaccaaccgggtttcgtagtatgcgagcatcgttgttggtgggccccccccccccccccccccacaaacctctacaacaagcccacaaagatcgagagacggcggaaggggaggatagcgaccccgacacagatcgcacagatgggcattccaggaacacacagcacaagaagccaccaaacgcattcagagaactttgacggtgctatatcgagctcggacttcatcaagcatcaatggaaggaccagacacacaccaactgtcacgaaaactctttatctagcgggccacccaccatcccatcacatccactcttagagagcacctttgaggggcgctgactcaagtggattccgagatgcattgtgaatgaagcgacacttgaagaggggctgaggagaagttccggccatatcggtacgaattccggctgcacgaact

SEQ ID NO: 33774 - DNA, 388 bp, Glycine max
gttcggttaaccaaccgggtttcgtagtatgcgagcatcgttgttggtgggcccccccccccccccccccacacggagaacagaaacgacgcacccgacacaaaaccaaacaaaccaaaacagacccgggaccccgactaacccacatttagacacacctagcagaccactcggccccaaaatgcctaatgcataagaacaacaaacccggaaccacccccaagaaattctccacgacatctgagactaagaggaaaagcgagccaacgaaaacccagaattacgcgagccaaccccaaaactggaatagcaaatgaaacaaaccagaatagaggaaaagcgaagaagcgtatgaacgcatcacctaaccttaacaggaccccgcaac

SEQ ID NO: 33775 - DNA, 465 bp, Glycine max
gttcggttaaccaaccgggtttcgtagtatgcgagcatcgttgttggtgggccccccccccccccccaaccctatataaacccgaccgaccccagggccccaaccgacccaaccccgccgccgcacaagaacccaccaaaaatcccaccgaaagccaggcgccatcgaacacgaaccctataaaacgcatcccgcaccgcacggccgcggccctcgaacagccaaacggggacaaggcaaagaatcccacgaaccacggatccccaccgaccgggacccctatttgtatgggcttctgatgtacaaatcctctggccttctagcctccttcgactttccgtaacggtaaaagatggcgccctgacactgaatttcaattgctgtcagaacacgcgcggggcacaggccgtgacatttaatatggcggtttgaacttttcagtaaacccccccaccgaccgggacc

SEQ ID NO: 33776 - DNA, 483 bp, Glycine max
ttcggttaaccaaccgggtttcgtagtatgcgagcatcgttgttggtgggccccccccccccccccccccccccccccccaagcctcaatcatgacccgagcatacaacagtacaaaaagacgaatatcaatacagacaaaccaaaaaaaaaaaaaaattaacaaccaaaacaattttaaattaaaaaatactctccaaagaccccccgaacgagtgtgacggcgccttttgaaagggtagggtataagggtggaatcgaaagagtagggtaaagggcctgctgctaactccgggtacaacatagaagggagcgacgtccggttgtaagtgaaatgaaaatgcgggtgcaccacggaggttaagtatacaaccgtggtggttgaagtagagtcgatgtggggtaaaactgataaggagttcgttaaggccaaggcggtagaaggggtaaatacgacatgagtctcgaaaaatgtataagcgat

SEQ ID NO: 33777 - DNA, 363 bp, Glycine max
tcaggttcggttaaccaaccgggtttcgtagtatgcgagcatcgttgttggtgggccccccccccccccccccccccccccccccccccccccccccccccccccccccctttccggaggatgaaccaaaagaccaccttcgagaccacccagaataaaaccagagaatcaggaccgatactcccattctaactctcagcacccatgcaaaaacaggggcgagagagaatgctcggaccgacaatgatacagcaatccctaaagcaaaagcgtagtttaagcagacccgaccctatagttttttggactaaaccacgaccgtcgcccgctactgaaaagagcattgattgcaccaccaggacc

SEQ ID NO: 33778 - DNA, 484 bp, Glycine max
gttcggttaaccaaccgggtttcgtagtatgcgagcatcgttgttggtgggcccccccccccccccccctgttcgcttagaaaggtccgggacagggacaattgactcagatccaacaataagcctacctgcgaaatataaacgactatactgccgagaacacaaaccgtgatgaaacaagaacagcctatttggaccagagaccaccttaagagccaaaagtcagaccaataaaactaaagaagaaccggcgtgccttcaacgactatcaggaggaagatagaacaggcaagaagattgtattcatcgagaagcataactgagagaaaaagacataaaaagaaacctaggacgcaaagaagaactgcactgttaattgaggactctacctcccctagtcctgccacttcccggaaataacatcctcgcgatgaacgacttaatctaggagacaattgtggactccatattgatttgcggcacg

SEQ ID NO: 33779 - DNA, 489 bp, Glycine max
gttcggttaaccaaccgggtttcgtagtatgcgagcatcgttgttggtgggcccccccccccccccctggtcacaaaacagcccgaaccagccgccgacccatgaatcataataaccctcattaatacccaaaaccaccgagccgaaaacaaagcctactggagctgaaagaccccacaactgagtatcatctaagagctacaaaggcccccctcccccgaatactaatactaagagcgagaagaagactgccttgccccgacagaatccgagaccctttctcgccttacactccattgatttacctataggcctactttacgacacccccgagggatgacaggtgggccgctcccccttaaccttactcaggcgaactctggttcaaaaaattgacgctaatgcttaatatgctactgatatcgagcgctgacgcgttcgactacgaaccgcacaatgggccttacatcataagcatctacgctgttt

SEQ ID NO: 33780 - DNA, 386 bp, Glycine max
ttcggttaaccaaccgggtttcgtagtatgcgagcatcgttgttggtgggcccccccccccccccccagaccgacaaccaccgaccagcaccaaaattcagacccacacctaaactacgcaaatcactacggacaccgacgcgcccgcgaatattatatcacagaccgcaaaacaatatatattaacatttctcatattatcacaacccagcgcaacaaccacaagcagactctagcacctacaaattaacaaaaccagagcataccccccgctcaagaatcgtgcaccacgcctacaaactagcaaggatccctgaagcaaatcccagcaataaataatcgactcccgggtttttggacgaaactacctctcgcccgcgaaaccg

SEQ ID NO: 33781 - DNA, 399 bp, Glycine max
atcaaacggctgtaagacattgtattagggggtcactattaacattggtgggaagtacaaaaggcaaacaaaaatggcctatgacttgaaatatgattattcctgcatttttcgggactaaaccttagtgatttcagggcgtgggtatgggattaaatattaaattattaattaatcatggagagcatgagtgccgaagcagcttcttggagaccatatctgggcatatttggggaatgaaaatactttgcgagtattggaaacctgctgaccctcttgtacagttatttggtttctcatcttttcagccttcatctgcgcccttctcagcttgtttagaatcttatccattgatgacgattttttcttttccaatttcatctctagttttcgtatttc

SEQ ID NO: 33782 - DNA, 623 bp, Glycine max
caagaaaaaaaaatcatcgaatcttatctaattcaaacaaattattcattcaaacaaactaacaattaatattgtcgatagaaaaaaaagcacaatctcacaatctcgagtgccttagcataaatgattaagattgagagtgccttaatcatcaaacaactggcccagcctagtggtacaaaattatgtcccataagacattacacactttattttgcaatgagtttgtttatttctcatttttctatcataaataaagaaacacaccacacatacattggaatgatcaaacttaggccttgaagatatcgaggcaagtttctttggaaagtcccctgttccaaaaattctggtagtattcattgtacgtaaagttgttgtactgaggcggatggtgatgatgatgtatgagttgtggagcgggtcctatgattgcgtcatttgagggaaaatagaatgttggaatggaaatcctgtccttgttgcaattcaccactgctcgatgcagtacactcttatacttgtcattgcttatcacctgaatttgatcacccacgttcactacgaaggtgttggggatgggattcacagccacccacttgccatctttgagaacctgtaat

SEQ ID NO: 33783 - DNA, 652 bp, Glycine max
agcaagaaaatgatacattaccattctatttacaaatgctgtacaattatttcagttaatcattattaggttattaagcaaagggacaaaaaaatattgcaattagatgtcacactataaaggaacttggagaggaagccgcggcacccaggccaacctaccataggagtcagcatgtaaaattcacttttgcccactatgtaatgtgctgaggaaagtaaattctataatcccagcaagaatcgtcaagatagtggtataagtggtgtcagcctgtcagtaggtcaaaatgctttacagaggttgttaggcttcatgttagatgaaccttgttgaactatcgggcctgtgggaccacacaccctgctcctctttggttcagatatcctcacgtgtgaaattgcagaggcaagcacatcaatcaacacacattcatcctgatcatctgaatagcaactttcagaggacgaaccctcgctaagtgagtaattatctatcctatttcctcctaaccttggttcccttacagcaacaagctgttggcatgtggcaccaatttggttcttcaattttgttttgatgggcagcattttcaatgtatttgccgtgtagaacaatattcatggatgcctaagtacttcttcagctgata

SEQ ID NO: 33784 - DNA, 607 bp, Glycine max
ggaccaccaaaaacaaatataagatagaacataaacaaagcagcagacacaagaaagcccccggcctcaaaatggaaaaccccttccattaggctctttaattaaacagacaccttttttttagtatactatgctcgatatgtcccttaattattatttattggtaacaaactcattcacacatgacccttccaagtcctcaaaattgaaacaagcaattagcacctagctaccaaaataagcaggaactaaaaatccaggattgtggactgagaatgcattcagcatgcatcacctgtttcttcgagaaagcagcatcctaggtaagcatttacagtatgctacagatatacagtcttccatataacctgattaatccaattaaaaagtctgaactatccatctggatataacatcagctgtaactcctttagtcaagacacatgcaaagaatcttttttccctacgaatgttaagaaattaccgaggaagaaattggcttatagacatttgattgttcgagaatggtgtagaagtgttgattgattgattggaacttgattcattcgcaactggattttcatgcattctaccatgcaagaaaaat

SEQ ID NO: 33785 - DNA, 397 bp, Glycine max
gacgttctctaccacaactactacgaagcgtgtccttacttgaagtgcgcgcacttcaccgcgaaccaggcgatcttggaggccttcaacggccacgattgcgtccacgtcatcgacttcaacctcatgcaagggctccagtggccagcgctgatacaggcactggcgctccgtcccggcggaccgccgctgctgaggctcaccggtgtcgggcctccctcggcggaaaaccgcgacaatctccgcgagatcgggctgagactcgccgagctggcgcggtccgtgaacgtgcggttcgcgttccgcggcgtggcggcgtggaggctggaggacgtgaagccgtggatgttacaggtgagtctgaacgaggcggtggcggtgaactcgataatgcagc

SEQ ID NO: 33786 - DNA, 414 bp, Glycine max
ggtacaacctggacaatgactgcactgtttttttttttatcagcacaatgactgcactgtggattacagaagagaccaggaaatggacaaaaacaaaagaaagagaaggaactagaggagtgaaaaccttgaatgagaatgtaagttagcggaatcaatcacttttgtcaatcccaaatggtaaatactctacaacttgccctcacatttttagcagtaaaatgaaaacaaaatgttagttgtataattgtctcctatcctgcggggtcttcagcaactcgtgatgactgaacacttagtctatgcacttgagaagcagtaattggcttctgcaatggctttaaagcagccatgatttcagtaaacgtgggcctcaactttggatcagtctgccagcattgtctgataatatct

SEQ ID NO: 33787 - DNA, 438 bp, Glycine max
actggtattctcgtgtacaagtcgtctaatcatgctaattacatctccgtgttctccactccaacaaacgcgcttacgtcttgacatcgggctcggtgcggccaacgtactcttggagcttcaggaggtcagtcgcaagcttgacgttgtccttgaggtaatcctgagcgtccatgtcgtatgtcgactcgtcgctagtgtgcttctcaatgtaaagacgaatggtggcgccgctgctacctgtgccagacagacggacaacgatgcggctaccatcgtcaaacttgacaaagataccctggttcttgctgacgctaccgtccaggtcggtgtaggagaagtcgtctgcctcgacaaccttgcggccagcgacggtggagccgatgaactcgtccttcttggtggtgatgattccttcatgtgactggtgaccttgtt

SEQ ID NO: 33788 - DNA, 582 bp, Glycine max
agacaccctttcaagaactgtattttatggagaatttgctttttttgcatttccacatttgctaatcctttagattagacatgagtggaagatatgctgactcaggactgcaatcacatttagctgaaagtctgacctctatagtctataataagttaaagttttttgcttaatttcagtttcattcgttccctttgcaactaatatcttattggttatttcaggttccatccctggcttaagaggagattatttgggaacatccaaacgtgttcagtgtgtgaaggtcacaaaagaatccatcctcatgaaccaaaactagcatcatcaccccattagtatcccaaggcaacttttacattctttcttggcttaaatcaatgtttgattgaagcagtgactcaagttttccttggctccacaaacacagctgttgtccttcgaggcacaacaaaacagccagaagatgcctcatatcttgagctcttaacaaggtcgtcagatgatgatacctgtatgggatgcaactggagatttctcaattgcagggcagggctaacaaatgatacttcttttggactc

SEQ ID NO: 33789 - DNA, 517 bp, Glycine max
agggacaggaaaaccaaatacagaaacttattaatggaagtaagttatacagataaccatgaagcctcactattggcaggctgtcagaaatcatcaaagtagctctgcttagatcttacaatggccaaaagaaaatgactaggattaagaaagaaacaacatattcttatttcttcccccatcaattctgtctttcactaccaaggatcatttcattggtgaagaaatattttgaaccacaaagctgatcttttgcggtatcttttcagtccattcttgtaatccacatacacgagcccaaaccgaagactgtaccctgcattccattcaaaattgtccaacaatgaccatgcaaagtatcctttcaccctcactccattccttatggccctttgaagatacaaaagatggtgactgatataatcaatcctcgttctgtcattaagtaacattttcccatcattaacctcatcaattccattttctgttatgtagataattgggttgttaaatttct

SEQ ID NO: 33790 - DNA, 546 bp, Glycine max
  unsure (1)..(546): unsure at all n locations
nnnnnnnnnnnnnnnnnnnnnnnnnnnngactattcataacacataccatttcgagacaaaattagatggttataacccatcaagtaacatccaccatccatgtatatgcttttggcacagccccatttttacagctaaaaaaaggggtaatacaaacatgttaaaaggccaggctctgaacaactatgggacactaaggagacattaattcccacaatatgtcaaagttcaaacagttagcatgagcagactatatagaagagagatcttcataaatagtctggataccaggcctttcagaaatggaccgaatgcaccgcattgctattcccaggacctccttcattcccttttctacaactggattgctcatttccggcatcaagggagcctcaaaacattctgagcctcggccttctgctacacgcaaccttacccagtctgtcagatcaacacctccctcctcactagatataacatcaccagcacaccttccagttagaagttccaaaagtatcactccaaaagcataaacatctgacttg

SEQ ID NO: 33791 - DNA, 491 bp, Glycine max
ggttcggttaaccaaccgggtttcgtagtatgcgagcatcgttgttggtgggccccccccccccccctccaaaaatccgaaaggctgactacctgacccaccaccccttcccggaccagagaaagacttcccaccaactagaaacagaatcagaccgatggagcggaaacagacaagccaaagacagagaagctactaattaacgataccggccgcacccgagacccacccaaatggatttagatcagccgatgaaggacatatgggccatacatatacagctcctttaaccggcgctaaatcgaacgggcggcgagcataattacatatgaaatctcaattgacccaatggttgggacatgttcccgcgaactcgcgaccacctcagccgcgcacaatgacgccccgaacgcgccgaataccgcccggaaaggcgccaaattggcgcaacttgggttgacgataatcggatcatcgaggtggacgcgcgc

SEQ ID NO: 33792 - DNA, 322 bp, Glycine max
cctggggtctagaaaattactagtaaattttgggacacaatctttcaagtttcaagtgtggtttttggagaattaaaagtggaaaaaacagttttgctgttaaaaaaaaaagccagggcaaaccgtatttatacctcgatttggggggacatgcgtctatatgtcaaaccctctttaaattaaaagcatgtgtcccatattacttttttttttctctcttttctttccaatcaaatcacaaggtttcacgaatgatgaaactatcgtcttttgcttttggccttggagatccttgatttgcttgcttcatggggcggtttcc

SEQ ID NO: 33793 - DNA, 509 bp, Glycine max
caacacggacggctttaaatatcaattataacaattaaaaaaataaaaataagacctcaaattgaaaatctaaaacagtaattaagccttaagtatgaattaaaaaacactaggatgaagaatagcaacattaaatatgttgaattggctgcagttaacaataaataaacatctaatctatcggtttgttagtaaatttacaaaatttcaatattcaaacattatattcaggcccacaaaaaatcacggacttgggaagtcacaccaggccatcacttgaaatgtcagctaggcccatatcaaaatcgccgcatcatccgccccgctttacccaaagtaaaatatacgcatacgcccatttattttttcttcttccccgagctcaaatagtcatccatggttaactgcttccgcttcttcagagatggactctcagtctgtctaggcatggaacgcttcgacggggtcatgctcttagcagcaattttcttctctttacgagcttgccc

SEQ ID NO: 33794 - DNA, 358 bp, Glycine max
accttaaactacatcctttgaacgagttgtatgtcttgaaaactaaattgactacactgtctacacataaaatgtcgtcatgtgatctgaattctaattggatatacaaatttatttatttaaaaaaaaatcatcaaatcacagttctggtgctgcatgatgtgattgaataattgggccactaaaaagcaatttggtgagcatctgtttctcttttgttcttgcaaacctttctatatgaattttgtcaagatgctgaagtagaaggtcccttgagctcaaccaagttaaagttcttggcaaggagataaaagaggtggactattttcatataaacttctccaagccatataccaaa

SEQ ID NO: 33795 - DNA, 418 bp, Glycine max
ctgttaaacaatttttctttctgtaaatttcgaaccagtaaacgtttgttgcaatgatgaacatcaaaaaacttgacattttaaagcaaacacataattgacatgctcctgagattcactagttggtctcgcaagcaattaacttagactagcggttgtttaccaaattccagtgtaaacaggtggatgtacttcgctggatgaagtggaagagataacaccatcatcatctcctttctctagattctcagactcataagtcccattttgaaatttcttgagtgcttccagaacttcatccatagaaggccttaattcattggctccttgcacacaccgaaaggccaaccctgctactgaagttagcatccttttaactacttggtctgactcaaaccccaaggatgggtctacaagc

SEQ ID NO: 33796 - DNA, 305 bp, Glycine max
gaaaaaaaaacctaagaaattttttagataaaacgaaagaaaaaatgtcatcaaagtcctgttacagataaaaaaacaaccaaacaaagaatgtttaggtttcaacaagacttaaaccatacttgaaaccagttgttacagaacatattttcataaaaatatgggcattaactccttaaagtagagggaagccactgggggctctcaaagaatgaaataaactaaaaatctgtgcccaagaggaaagtccaacccaaaagactagtttattagatgggagagcctaggggcttaagtaccatatg

SEQ ID NO: 33797 - DNA, 403 bp, Glycine max
ataagaaccaaaatgaatgtcttaaactatagggactaaaacaaattatcacaactttaagggctaaaaggataattaaatcaaaataaaataaacttgagcaaaataatggtggggtggttaggcacttttaatcctaaatgtctccttggagacatatatacctctacatatgtgggcattttgcaaccaccaccattaggggaataaaattttaaatgcaaacccttctatgggatatatcctatataggcattgttagtagtaaataccaaccgtgaaccagaaaattggggattcaacctttttcgtcttccttcttcttcatggcagggctatttgcaactcatgttcttctcttgatattggccactggaacaacttttcactttagtgcaagcaa

SEQ ID NO: 33798 - DNA, 473 bp, Glycine max
agcacaagtcaatttttattgctacattacggaaaatataatacattttatttataaacttccaacagagaatgctttcttacaattgacaatttgggctctctttttctttcttgacaaattaattcttttacctttctatcatctcaacaatcactggttgagattgatcatttttccgaatggattaatatttctgacttctgagaagtaggccatattatatgttccaaactcacactcacatgatccttttgctacgacttggaagatcccacagtcattgataaactcctcactgcaaccttgactaccccaaccacattaagctgcctcttctcaggactcaaacaagggctatcatcgggtttattgctggcttctatttgaactcccacaaagtatgcaacctggaattttcatccttctagccacaacgaaaaggagagtgtggaaaaacctggtatcaatag

SEQ ID NO: 33799 - DNA, 478 bp, Glycine max
ggctgattcaggttcggttaaccaaccgggtttcgtagtatgcgagcatcgttgttggtgggccccccccccccccccccccccccccgaatataaaggaccacaccaatagcacacaaccatgagcgttgctcctgaaaccaccgatgacacgaaaacccatacaaataaagcgaaaccggagcgaacccgggacatgaaattgctgaaagaaggaaacgcagctccgttgcacggtcaatacagcttagaaataataaactaaactagctttataatgccgattacgcaaggaggccggagcctaactctccgactcaactagctccttatgttacgtaggatctaaccgccggacgccgtaaatcccgaagtgaagccggagaatattatgaatctgccgtccctaaatcgcgggaacgccctacttacggccgcgacacctgcgaactcacaacgtaacctcctgaggccgcta

SEQ ID NO: 33800 - DNA, 299 bp, Glycine max
aataataataataataataataatatattattttacggtatatatgtaaaagtagttttaaaatacaaataaaatccaaccattccccgtgcgaacacacagggtattatcctagtttacatacaacgttgaatcatcaagcctaaactagtacagaactagaatggatgcatgaaattatacaatcacatgacagggtgacaagtcggcacatcccatagatgcagacctatttgtgatttacaccattaataaccaaaaagtggggtttcacccactgcatttgaatcaggaacaac

SEQ ID NO: 33801 - DNA, 530 bp, Glycine max
gaagaagaagaagaattaccatttggttccgaccccccaaaaattggaccttccgatttccatattcttcgtgttgtaggacagggtgcctttgggaaggtctttctcgtcagaaaaaaaggtgattgcttcgacgacgctgatggcgtgttcgccatgaaggtgatgaggaaagacaccatcattaaaaaaaaccacgtcgattacatgaaagccgagagggatattctcaccaaagtccttcaccctttcatcgctcagctccgttactctttccagaccaaatctaagttgtatttggtgttggacttcataaatggagggcatctcttctttcaattgtatcgtcagggtatcttcagtgaggatcaggcaaggctttacactgctgagatagtgtctgctgtttcacaccttcacaaaaacggcatcgtgcatcgagatcttaagcccgaaaacattcttatggatgctgatgggcatgtcatgctaaatgattttggactgtcaaaagagattaatgaattggg

SEQ ID NO: 33802 - DNA, 398 bp, Glycine max
ttcggttaaccaccgggtttcgttgtatgcgagcagtcgttgttggtgggcccccccccccccccccaagaatctagtactggtagactccaaacccccaaacagactccgccggaaacaccctgatgacccaagaaataaaactccagacagctacgctcgctcaccagttttgataaccgaacctatatgaaaagaccctttcccaaaccaaactggcaacgcagggcgcgccaccaaaattaccagaaacgctgaaaacccaccccgatctaccaaacagccgaacgaaaaaccttcgatttacagaacaagaaaagggaaactttggacacataaacaggaattctaagaaaacgcgacggggctggcagaagtcgcctaaattaacccatcag

SEQ ID NO: 33803 - DNA, 302 bp, Glycine max
tggctgattcaggttcggttaaccaaccgggtttcgtagtatgcgagcatcgttgttggtgggcccccccccccccccacctatctaacccgccgaagacacacacacacacacacacaacccggatggaagatcatttttatcccaccagacacacactaatcaaaaatctagcaagaatcctttaatttaaggggagaatatgcatgaagggccgcttaaggattatatcctagacacttggcgatagcatttccccctattcaaggagatattgacttggccctccgggcgaggccgct

SEQ ID NO: 33804 - DNA, 555 bp, Glycine max
  unsure (1)..(555): unsure at all n locations
cgttgcgtatgcgtatggtgccgaacgaaacttgatgaaggcgaagacgggcgccgcggcgaaacgcggaccgcgcgaagcgagaaggcccgcgccggcgagcgcggccggtaaactcggaccggagggcgcgcccgggccgccgcaaagggcgggtcttgtcctcatggacttgcttgcgcttgaatccgccctccttcttaaccttaatctcaactttaggaaatagcggacgataaatgcctcgcgctagcctaagatctgaagacctgtgtcgctagctcctactcctcctcctgaggcgggccctctcagacgtacggttctaaaaagcgaaccagatacattacctaaacccgctgggataaccgcctttctttaaattcttttgcccgagtttnaaacgatctcttatgaagcaaaataggccttgctgaatctttccaccgccttagaccgctatgtaatagactcaaccttataaaactactatcccacatttaataattgctcgcactgccctatctatttcgcattctctacatgactcacctt

SEQ ID NO: 33805 - DNA, 431 bp, Glycine max
tggctgattcaggttcggttaaccaaccgggtttcgtagtatgcgagcatcgttgttggtgggcccccccccccccccccccccccccccccccccccaggataatactgataatgaacaggcaggatgcgctacgcaagctctaaaccagtcgaagactacaggaaagactgcaaaattgaattaaattaaagaaataaaagaagctaaacccccctagaccatacgacgataccgagccgtaaaatctaactgacggccaggaaggaataatgaacaggcccaatatatggacggcaacacacataggaccgccctggctggcaaatcaatgatgcgccttacgcgcacgaagccggagctctacgcgtcgaatcgccttaatctttctgacaggagatgactccccctgacgtgacgcataagacgcc

SEQ ID NO: 33806 - DNA, 370 bp, Glycine max
  unsure (1)..(370): unsure at all n locations
cgttgcgtnaaggcgccgccgccagcgcgccagttcaaccgccgtcctcgcacttacttgaccttacactacctactcctccgggattagtattacttaataataaaacacttgaacagaataatgatgccggtgcttttccaaatatgacttatgacgcgaccgtcgcggcccgcggccgccgccgcgccgagaagaaggccaacaacgcgaacgcgaaggaggcgtagctgcggtaaacgaggttgccgagctcgcggaatccgaaagaatcgacgaaggccgcgaaggtgaggttggagtgggtgccggtggtgcgcggaggggaatgggaatgggaatgggaaagcaacggcgaaggagaaggcga

SEQ ID NO: 33807 - DNA, 419 bp, Glycine max
tggctgattcaggttcggttaaccaaccgggtttcgtagtatgcgagcatcgttgttggtgggcccccccccccccccccccccccatatataaatatacaccctaacccctaatcaagaagagtgatctttagggagcgtggacaagaaggacctaggctccggccgggccggggggcagcccggaccagcgaactgcaaatccacgaccaccaccggaagcggagactgccgcgctcttttgggcgacagccctagccccctgggggaaagaggtcggcccgcccgaagaaaaataacgcaacgcccgaagccatacgcgggaacaccaacacccccccaccgccgcaggaataaaaccacctgatggggacggccgaaggaaccgaagcgcaagacgaaacaaacaaacaaacaaa

SEQ ID NO: 33808 - DNA, 347 bp, Glycine max
gctgattcaggttcggttaaccaaccgggtttcgtagtatgcgagcatcgttgttggtgggccccccccccccccctaatatggaaaaacaataacgccgcccacactaacgaaaaccttacaggcaatgaccccagaacactaacacggaaaaagagacgagacccgcaacgcggataagctcgctcgcgacaaggacctgcaggaaaactcgctctaggacgagccgcgagggccttataatacagaggccccgcatatgcccgctcgcgataagcagcagcactaggaccggcaacagcaagatccgtcccactagaacctgccgcctgcgcctcgcgataagg

SEQ ID NO: 33809 - DNA, 359 bp, Glycine max
gttcggttaaccaaccgggtttcgtagtatgcgagcatcgttgttggtgggcccccccccccccccccccccccccccccccccccccccccataaactcagactcgatctaaccgggtacaaaatgaactgggacaacggctccagaaacccatgctcagacaaagcaactcccaaaagaactcataacaatgactgacgcgggattacatgaatcatgcaacgctgacgcgaccaaggaggtctcaagtagagtgtcccaactctatgaacgcccttggatcgccgtggccgtttccgggttgaagtcctccctatgaagttagaacctcaatcggagaaatcctaaacttaccctt

SEQ ID NO: 33810 - DNA, 452 bp, Glycine max
tggctgacttcaggttcggttaaccaaccgggtttcgtagtatgcgagcatcgttgttggtgggcccccccccccccccccctaaattacccaaatctacccaccacctaacagcgctaacggagataataatccaaaaaccgcaaaagacccccacgactgaagccccagccaaaagctataacgcaaaaaaccaccctatgaaaatgcaaagtaagcaagaaatacttgccacactacaatccgcctggacctaccaacatcaaacccgcgagaggacccttgtgatatcacgaagaatctgacggcccaataaatttccctaatgctgcagcgtgctatactccactcgaaaacgctgaggttagttacgaaacagaagaggcggatgccgcgcaagaactagatgaggaggctgcagacgggaattaggaggaaatggaatccgaaat

SEQ ID NO: 33811 - DNA, 478 bp, Glycine max
gattcaggttcggttaaccaaccgggtttcgtagtatgcgagcatcgttgttggtgggccccccccccccccccccccccctctccaagcaaccaaccaaccaaataaagaaaaagtaaacccggactcgcactggtgaacagaactaacggccgacgggcccgcaccgctcccccccccccgagcccgctgccccagaaccaaccgggccccgacaccaagaggtcaagccaaaaaaaaaaaaagactaaagtaatgaacgggacgtttaggccgaaataaaggggaaaactcttgaggttgctacggttcccgggaggaggccgtgcagtcgtagtgtcaaagtagtggtcccctacgctacttgtataagtgtatgaagactatgtggtggactacgggtagttttaataatataataagcatcttgttgttgtttatgttgttgatgacgatgttgataaggaggacgtagtgg

SEQ ID NO: 33812 - DNA, 526 bp, Glycine max
ggctgattcaggttcggttaaccaaccgggtttcgtagtatgcgagcatcgttgttggtgggcccccccccccccccctaacaacctatggaaagctcaccatgatcagatcctgagaacgaacccagaaaagcgcagctcgctaaaaccgctacgacacacaacacaagacaggcaaaactcctttctcaaaacaccggcagccggcagaaatggacctgacgccggaaaaggtctgactagacaacacaaacggggcaacacattctgcgaccctcccgcatcgaagggaatgaaaaaggtataagggcccggcaaagacatctgactacttcgcagagacggcccatataccataatctctctggataagcgtatgccccgctttaacgacaatacgcgctagacccgttgactgcccgaaccgaagacgcgcttctaattaccggccggccctcctaaactcacgtcctattactaacttcgagaaaaggaaaaacaaaatcatgaccggagaacgcacatt

SEQ ID NO: 33813 - DNA, 449 bp, Glycine max
tggctgacttcaggttcggttaaccaaccgggtttcgtagtatgcgagcatcgttgttggtgggcccccccccccccccccccctcatctatgactgctccaaggcccaaactcaaaaagaaaggaagcaaagcatctcatttagacaattaacaagccgacccactcccaaccaactccctaaacagcagaaagagagtactgccaccaagacgagatcgcccacactgagatctggacgtagagcgcagacatcagacagagaaaaaataagatagcatggggatatggcaagggaagagagaaaaaccttggaccctctgaaccctattgggcctaaggactctctcccacatgccctaatccttgaaagggatttgcccctgaccaagaactgcctttgactgatgcttcttcgtatgaccgcgacctattaacttccgaggcca

SEQ ID NO: 33814 - DNA, 307 bp, Glycine max
gttcggttaaccaaccgggtttcgtagtatgcgagcatcgttgttggtgggccccccccccccccctcgggaaaaacaagaaatagtaaccccggaaccagcatcaaaaaacggatacacaacttccctgacacaaagatcagaactctacttcaaagacaaaatcatccggagaaagcctccacgaggaccaggaagcaccgctatctctaactcttgggaaagatcccgaataggaaaaataccagccgaaagcctcgctcctggctggacgatttacctgacacatgagtaccttcctctattt

SEQ ID NO: 33815 - DNA, 323 bp, Glycine max
ggctgacttcaggttcggttaaccaaccgggtttcgtagtatgcgagcatcgttgttggtgggccccccccccccccccgaataaaaaaaaacgacgtaacgccacgcaaccgaaagaaaccaccgaccgaaagaaagcaagaaccaacacctcgtacataaaaaaaatgagaacgcgagaacgcgtatctggccatgacaaactaccaatacctatatctggccaacgacgaaagaagcttgggatggcatcttcagaaaaccactcgggacaatagaccagagagcccacccctgaactatccctcccacccgcgaccccc

SEQ ID NO: 33816 - DNA, 597 bp, Glycine max
tggctgacttcaggttcggttaaccaaccgggtttcgtagtatgcgagcatcgttgttggtgggcccccccccccccccgaattcaataaccccacctgagaactataattgatataaaacctacttccgctcccgcgatcagaatccccataactaaaaactaatgaagaatctccctcatcttcatcatcatcatcatcaatgacagaaaagcagaacttgacttcagacagacacaacaacctaaccaggaaccgataaccctacttgcgcgagccggagcctccttgaagaactcgatggaaacggagaagggccctttatcatggggagcgacctcgacaggaatgaacgaggccaaggactcgacgcgggactaggacttcgaagtactatcgaagttcctattagagacgatctgaggctaatcgaagatagagaatcttgcgacgagagagatatattaccgggcttatgcgacctcgctgagcgcgcgctaactgctgaccgagccgccgctgaaattcgccgccctataggctaagaagtattcggaggagctatagtcccttctccttggagttatctgaactgac

SEQ ID NO: 33817 - DNA, 517 bp, Glycine max
ggctgattcaggttcggttaaccaaccgggtttcgtagtatgcgagcatcgttgttggtgggcccccccccccccccccaataacatccaggaggacacaaaaccggtacatcaatcaacttggtagaaacgatccacgcgagcaaccaaagaacctagtccagaaaaccacgcagttactagcagttaaaacacctgatgccgctcgaccaattccatgatggactacgaattgacttcaactcctgctgagaaaatggccaaaatcagaccctgcggacgggagacagagaagatttcactctattatgtatagctaacaacgaaataaaggaccacgccgaccaagccgcggaacgcgacgacatacacccataggaatgaggaacatgtttcatgaagctcccagcggatatgaatagcccttgcctctgaagctattgaccccactagcgatcattatgacgccgtggattgaatggtaacacggtaataccggttcggacctacgggagct

SEQ ID NO: 33818 - DNA, 332 bp, Glycine max
gttcggttaaccaaccgggtttcgtagtatgcgagcatcgttgttggtgggcccccccccccccccccccccccccccagtaggaaaaccccccaaccgggaaaaaccactaccgcttaaaagaaccctcgtgaggaaagagggggcaaatgcatacccgaaacaaagcattgacgattgacagacgcagctggccaccccgcgtgccgaaaaccggagtgggttaaaaggcacaccgcgctaatcatcatagaatcccacccccgtgaaaaaacagactcggcactgatcgacgaacataacgccacccaaactactgccatcaacgcctt

SEQ ID NO: 33819 - DNA, 477 bp, Glycine max
tggctgattcaggttcggttaaccaaccgggtttcgtagtatgcgagcatcgttgttggtgggcccccccccccccccacgcaaaaccactaaacccacacacacacacacacacgtctgaatgcagaaccttgattagtcatagaccctagctaccctatccacgaagccgagacccaaatttaaaagtcggacccacctcattatacccagcaacttttacgagcgggccgaaacaccctactcccgcgatcagagatttggcgtcaatataaaaccaacatctccagactctgactgggacctccgccccccctgctacgacccacacccgaccccctcacaaggccggaagcggacttctgaacacagcaactgacgagcgaacttgacgattaggccacatactaggaaaaaacttctaccaatgcgagcatcagccgagatcctacccaacctgacggaacacgccacccc

SEQ ID NO: 33820 - DNA, 560 bp, Glycine max
tggctgactcaggttcggttaaccaaccgggtttcgtagtatgcgagcatcgttgttggtgggccccccccccccccccaataaatacagcctagcagaacgcggaactaaaatgcagagtcagagaggactaaacctagacccacacacagccacaaaccgggagtaagcagccacaggtttgcaaaaccagagatagcaaccaaccaaggccaaccagacccgagcactatctcgcccgcagctcctaaccctccccccgattctgtctgtctggccgcaagcataatccctgaatgactaacgtcccaattacccttactaggcgccgctgaagccgctactataactaacgactgtctaaaaagggactgcgtgaggggcgaaagcgaagtcacccaactcggcctcgcaaccgccccaaggcctcatgacaacccccctgggcacggcctatgaaccgacctggaggcagcacgaggaaaacattacgaatgccgcgcctccgaataccctttgccggattcggtaagttaccgtggaactttcttcgcgttgcg

SEQ ID NO: 33821 - DNA, 401 bp, Glycine max
ggctgattcaggttcggttaaccaaccgggtttcgtagtatgcgagcatcgttgttggtgggccccccccccccccccccgaaagctaagagcaacgccccacccgaaacgcgaacacggaaacacccgcgaatcccttaagaatgacgaaagatttcccaacaatggaattagaacccgcggcccccgccttcaacaacaaatactggcaccgctcctctaaagcaaaaccctcggccgaaacacccccgccccgctatcgcaaaccccgccagacacccccagaattaaacactgcccttgaacagctcatgacgatgaactacccttagcaccgagctaactgatacccggaatgatctgcaaccttccaagacgatcacccttactgaccgaaaagc

SEQ ID NO: 33822 - DNA, 460 bp, Glycine max
ggctgattcaggttcggttaaccaaccgggtttcgtagtatgcgagcatcgttgttggtgggcccccccccccccccgaaaaccgaagaaccgacccgactactcccaacacctatagaacaacctctcagagccacttctacctcaagacggcacctaccacttcgcgctacacgcgcggaacggcagaaaacagataaaacttcttcacaaaaactatataagtctttaaaaacacccagacccaataattctaattttgaccaagctaaactaacatggctcccgccccgacagacgcgccccaacctaagactttatatcaaataacttctctgcatctacctacccgaccattgacctccttaatgccgccggcaaaaagtctgccggcagatgtccttaaaacagctcgacataccagtcgaaagctgagcggctgcgcgcgagtaccaacaac

SEQ ID NO: 33823 - DNA, 482 bp, Glycine max
ctgattcaggttcggttaaccaaccgggtttcgtagtatgcgagcatcgttgttggtgggcccccccccccccccaaaaaagcaagcccggattagtagcccgaaaccccaccccaacttaaacaaacgaggaatctgtagagacgcgaacccaaaaagatccgacacccaacaagacttcccgaaaagcacgataaaatcgtagaaacctcatcccctgcctccatatcgcaatgcgcgccctcgagtacgaggaccacgaggatgagctggaaaggcactaattccggcgggactgcaaccccagcacggactaaagcctgcccatctccgggacgatgacgtaaatagaccccgcgcgcgacatgacgattctcctttaacactccgctaattaaaggatagaaggcagccaggaaccgaacaagctcaatgccgagaccgctgataatagggactaaacgtcgaaagactccggggtt

SEQ ID NO: 33824 - DNA, 385 bp, Glycine max
tggctgattcaggttcggttaaccaaccgggtttcgtagtatgcgagcatcgttgttggtgggccccccccccccccctccccagataaaaaattggaggcacctcatcccagatcgaccctgctcctacgcacccataggcctgaaaacgagcagactcgaaggaccaactctcagaataactgctttggaacggacagacaataaaagcctcaagacaaaaccgctggaggacaacccgcgaagcaacacccggccagactttatatctcggcatcatctaaaatacgggacctactggactggacccgcgtaagccgcgaagcgcctcctagcgagacaaccacgagaatatccttgattatcataaatccctccaggcttt

SEQ ID NO: 33825 - DNA, 535 bp, Glycine max
ctgattcaggttcggttaaccaaccgggtttcgtagtagcacgcgcttcgttgttggtgggccccccccccccccccaaactacgcgaacgcattgacctgacactctcgttctgccactgagatagaataaaagaaactctccgggtccctagaaccttgactcatataaggcaagactgaaaaccacacgaccggcaggcagaaatccccgatgaatcttaattactatatgaaaaggacggcgggaaaaaccgaaaacagccaaacacaataaaaacttaaagaactcgctaagcccaaaataacaccacggaaggaatgcctatccggagcgaatgaagccgaccgatgatcggcgcacccacccacttcgggcaccgagcttgcccgcaatcccgtcagaagacctcctgcctcgacgaccttagaccgcactggccctgcatgcgataaggattatgcttatgatgctgattatgattaggaggatcttccttgaacggtagtaatagccctaactgacgacacaccgg

SEQ ID NO: 33826 - DNA, 447 bp, Glycine max
tggctgattcggttcggttaaccaaccgggtttcgtagtatgcgagcatcgttgttggtgggccccccccccccccccccccccccccccccccccccccccccccccccccccccccccccccccccccgggaaaaataacgcgctggagaccaagaaccgaatcaaagaaaagaatcacaatagaagctggataacacctaataatacaaaagacctttttaaaggaaaaacagaacgctttgacgttaccgatgtagaacgcataagctacataaggacactttactgccgggaaatctggaaataagaacagccgaccagcaccggcaggaacagcggtcaatgcaatacgatccggagaggcattttccctcctgggcttttcaaaccctgcttgcctgactttgatagaggacggctacctaaggggcatggacgaaccgc

SEQ ID NO: 33827 - DNA, 504 bp, Glycine max
gttcggttaaccaaccgggtttcgtagtatgcgagcatcgttgttggtgggccccccccccccccctctacagaatttaacgaccgcgcacacaccaaagctatatgaacaccctagactccttcccttatccctgaagctgagaaattaagactacgggctaaaactaccaaaaccagatgatttaaaaattatatattatgaaaacgagaccaaaattagaggacgaagaagcccgaaccgatctctttaaataatgcggatacagaaataattgacatccaaaaaagatccaactcccgctgctccgacgcgaaccacgagccgatgtacgaactggccgcacccctcgccggagccgctatcagaagctggctatgcctcgaactcctcgccgctaatcgcgggatcaaggtgtcggaccttgccggaataactcgctgaggatgccggcaaattatcccttaccctctccgaccatgccgccgaagacccggcgacgcc

SEQ ID NO: 33828 - DNA, 496 bp, Glycine max
gttcggttaaccaaccgggtttcgtagtatgcgagcatcgttgttggtgggcccccccccccccccgcccaaaccgcatcatcaccaaagactccgacccgcccagcacacagccacacaatccggccaaaagaccaggcaaaggccgaggaacggacaaaaagaacttcccagttcctccagggaaaagaaaaaagacatacaggaaaccacaccgcacataaacgaggtatataggttgcgccggaaccgagcctggaaccgaataatgatcttggtgatcccacgcccggaaaagctggggggaaaggggggcgggccccgagccgccccgacccgaaggaggaggatgcgacgttccaaccttcaaaggagaagaacaggaacgaaaccaggacggctgggccgcatgccctgcggaggaggaccgccgcgggccgcgaggaggagggccgggcggcggtcgacctggcggagcgcgcggacaaccccgcgc

SEQ ID NO: 33829 - DNA, 497 bp, Glycine max
tggctgattcaggttcggttaaccaaccgggtttcgtagtatgcgagcatcgttgttggtgggccccccccccccccccacctcaatccgatatactacacataataaatctcaattcccaataacaacgcggaactaattagaaacatcataaagttattccactcccccccggcgcggtatttacttacttactaataagccggaaaatgtgaatatcacaactgatgccccagaactaccccgccagaaggcctaacaaggcgcacgtcgccgtcacctgcggactaaccgacgacctaagccccctaaagcacggacaacacgattgactcgccggcgatgcttcaaaacatcctcggcgaaacttaagaggggccgcccgctaggaaacggctaaggattaagatcttacactggatcttgccggaaaatgcctattgatcatcaaagacgcttaaggcccggatggctcccatgatggcgcaaatgcgcct

SEQ ID NO: 33830 - DNA, 504 bp, Glycine max
ggctgattcaggttcggttaaccaaccgggtttcgtagtatgcgagcatcgttgttggtgggcccccccccccccccccccccgatcaaggcgataaccgacaccactgcgggctacccacccttcgtaaagactaataaacccagatctattagcgattctagctgaaaaaaagaaaacagcagaccgagcctgacactgaatgctactcagaagaaaaaacctcgacgagcgagagactgaatcactccaaaataaaaaacgaaatccaaaggccggatatctcagaaacccgaatagccgcgccctgatcaggataagcttaacgagcgcgcgcgcgcggcaactcgcgcaactatcatagacgggaagggggacgggcggaacattatacacaaagctgctttagactcctcagcgcggaacaacggcgaggcggacccttagtgatctgctcaacgaaccgccgattgacacgaaaaaagcgcacctaccccatcccct

SEQ ID NO: 33831 - DNA, 577 bp, Glycine max
gactgaaaaaaaaagttattttatttctgactgaaaaaaaaaagtgatttgattccgtgggaaagacaaagggaagcagggaactgaaaaacattttctgcattacaaatttacaactttacatttacatagttaattactacgtcacaagaggcttagctatgcctactatatatgctaatataggacttgagatcctaagttaacaaaaggaacacaaagcggagagggaaatatatacaacaacatatgaacaatttggacccggccaaacagaaacatggaaagtctcgcactctcgcttgatcatataaaaagctggggcgagcatctacgtcctacactttcaagactgataagtggtaatcgaagagccttataatatcaagttcttcatcttgtgttgcagcagagcatccacacaagcacactcttgcaaccattacaaggcactattccactagtgagattaattcaactagtttgttccaccaatccacttgcagatccaacagaccaatctgtaggcttagtaatcaaatcctctaattcaagatagatattggagtcattcaca

SEQ ID NO: 33832 - DNA, 453 bp, Glycine max
aacccgttccttgtgtctttgtttctattgcattctatctcatcgtatcacatctgttctgtgatatttgattttcaccgtcaatacctcggtgtaggttcgggataatcctttattctatagtcctggggctatttacaactagccaattcagaattttcagatgtactaacaagtgcatctttgatgcagtcatcgattctcccgagagttcacaattaccgcgagcaaacatatgaatttaatgacttaatgatgaggaacgcatttttgctatgctactaatacttgctccgctattctgcccaagcctggctgaggaagagttacggggcttcaaaaaatatgctgattcggccgtttaaaaatactatatgtaaaattaaaaaagcgatagatataatagatatatatctaaattcaaataaaaaagaaggtcactccactctattt

SEQ ID NO: 33833 - DNA, 359 bp, Glycine max
catgttcagaagaaagaacttataaccttcatatattgtaaggtgtaagaacaacttgaggagcagaactcctaattggtttatatttagtacaacagaattttatggggcaccttgcatgcaattactaaccagcttaatggtgcccatcactatcactcaagtatattacaaagtaaattgattgtggtggaaaaaatggattataaaagcagtaactaaataagaaatagccttcattcaccaatcagaccagaatagccgcttactttgatggcttttggccagaattgttgatacacaagagcttatcttccgcgaggatttaccaattgtgagaacactgcacttgtggcaac

SEQ ID NO: 33834 - DNA, 374 bp, Glycine max
caggttcggttaaccaaccgggtttcgtagtatgcgtgcatcgttgttggtgggcccccccccccccccgtccccgacacggaccctccaccacgtccaccacgggagattcacggattaaaatcgccttgttgacggaatgccttaaaacagtcgttccgtattaatacgctatcgaagtatcgatggtttcgtgaagcgaagggaagcgttccaggtccatggcgctaagccgggacgaggaggtggaagaggctgccacagtgtcataataacgcgccgacgtggtggcgaacgtggctgacgtggctgaagaatctaaggccgcgtaagcgtgcgccgtaaagtcatatgccgacgtggtggcgcctaac

SEQ ID NO: 33835 - DNA, 351 bp, Glycine max
ttcggttaaccaaccgggtttcgttgtatgcgagcatcgttgttggtgggcccccccccccccccccagagacacaaagccgccgaccgagcacacccaaaaccaaaccatggccagaacaacagaagacccttagaaatatacagatcatgacgcaacttgcgggatcgaatttatgaaaggcaaaaactggttaaaaccgcctatttaaaaataaatcaaaacccaagccagagagatggcaaaaacaagatatttttatacatcactcctcgacgccgctcgaccgcggcttcaggccaaccaactgaaatgaccgaccacgcccccccttccccggagactcccgac

SEQ ID NO: 33836 - DNA, 379 bp, Glycine max
cacaactgaatttaaatagttatatttttcttgcctctggatttacattattcccaaagtgaatatggtgaagtaatttattagttattgtcacttacaaatcattgatcatcaaggactctgaaattaagtctcctaagccacacagaatgaagtatcatatgaaacacatcatatcgcttgggtggagaatgtacctcaaagtgtctccgaatttgtctcactcttttttgcaattcttatgtaccttccttggagaaatattcatcaaaatgtccttcaagttgggaatttctttcatagaaacctcaactgagaacatcttccaattcaaaacatcactgaaaggagggacatagtgatccgaaatgagcacagg

SEQ ID NO: 33837 - DNA, 461 bp, Glycine max
atggatgcaaccatatgaatctccacatcattgatacaaatcgccactaacaccaaccgcagcgatgcaacgcgacacttcgatgcgcgaatgtgcgcacgtacgatcgcagcccgtctaaagctatccacccttttatcgagagacagcgtagactctcccatccgtctccactctctctcctatcacccactcagctcagctcagcttggagcttaagacaactcctccacactcgcatccttcttctcctcctccttctccttcttctcctcccccgcttcctctacatcgaaactctccaccaaatccggcacatcatcaccctcgccctcgtcctcctcgccgtccttccctgcggcgcctttgttacgttgagtcaaggtttgataagattctgctagttttcggagagaggcgagattgtcgggaccgagttggttcaggatgccggggatgag

SEQ ID NO: 33838 - DNA, 303 bp, Glycine max
ataagaaatgaggtcaattgcaattaaaatttcatgaaatagccaatctgaatcggttcattgaactcaccccccccccccccccccccctttaactccatgaacaattttcaaactcccatctgtaaaaatcattggaatttaataagaagaaaaaaaatgaaatgaaatccaatggggggggaaaatagacgggaagaaagcgggccccctaattcacagtataagagcgacccagcaccttttttttgaatttcattgaatggtgaagaagaagaagaagaagaagaagaagggctttta

SEQ ID NO: 33839 - DNA, 449 bp, Glycine max
tggctgattcaggttcggttaaccaaccgggtttcgtagtatgcgagcatcgttgttggtgggcccccccccccccccaaaagcataagaatcaagagcctaaaccggaccttaatcaaaacataaaactagcccgcggcacaggaacgggggagaacaatttaaacacggaaaacacaaaaaataataataataataaaaaagacccgaacgacacaaagagaccatgacctacggtgttccttgcccctcttgaaattaactcgagggggaggaggaggaaggagacctcggggatgagacgttgggagaacaagagcacgaatgaacccggcgcccttgccttggcgcctgatgacgaagagaagacgggcgacataattggcacggtgctttcccgcagcttctgaaatgaactgaacggcaatgaccctcacgacgcgccgcgc

SEQ ID NO: 33840 - DNA, 634 bp, Glycine max
atgctaaagcatgcaatcatatactattcattaaacatcattttacatacaggtgctgctaaaaaacgttatgcattattcattcattaaacagatacaactgcacgaggcagtgagaatcaccttattggagtactacttaaacctcatcaaatacgtggatattttacattgatttatatttcattgcatagttattaaaatctctgatggtttcacctatgaaacacgagacattaaatttaggaattgtgtatggcccatctaataaacctttggtcatccatctataagcagcctcggtcaaatgatagccatcccagctaacatattgtgaaggatcatcacaagcaaccactcctgcgtccccacacatggccgtttcattgtaattgtaaggacccccacctccacaacaaactttgagaacatttccaccaaacccaaattgttctggagaattgtaaaactccaatgcagcgttgaaataatctgcataaatgatattggtaagaggatatagcactcgaagccgatttatttcaatctggagcagctcattgtggtattcatagaacgtatttaaccatttcaaacagccagcttggtcatactcctctttatctatagtcgc

SEQ ID NO: 33841 - DNA, 378 bp, Glycine max
atgccatacacaaagtttacaaagtgggacatagttgggcggacgacgaagacatctgtattagatgtctacatcctcgcctcttccgagagcttgatggcggcgtcctcatcgataaaccagtagattactccatctgtaggattgacactggcagcgggaagcggaggcgtgcgcttctcaatgccgaccatgtgtgggaccagatcggccttgccagcaccagtggcgacgaacgcgacattcgcggcattgttcacgaccggataggtgagcgtgatacgctgcgggggcggcttaggcgagtcctcgatggacgccacgaacaatgtcttctcctccagaagcgggtggcctgggaagagcgagcatgtgtgg

SEQ ID NO: 33842 - DNA, 650 bp, Glycine max
agaataaattcttctatttaattcataccttcaagattatctaaatacatgctataaagcttctctcaagttttatgttgatatttgagaacccaaggtgcataattatttttctctagtctaaacggatacatttttcaaagaatacaatatgccatagttttcagttcttgaagccacatagccatgtaccaaattttagcaaaatgagataaaccacaacttgttctgaaaacatcaagtgttgcatgcaatttatcataatcacaacttgaataatgacagtgaagaagctccgatgctctttgcgtattgatgtgccaagtagtcttttaaagaagtttctctgtacactggtggattgtgttcagataacagttccttgatgggaccaaagactcttgagagtccctctggtgactgatcaccaattctaaaaaaggatgcaattgatgttcttgggccttgatggtttgctagaactctatgttgaacactgatgaatttttcattagtcactagctgcagaagatctccaatgttcactacaagagctccatgtgctgcaggcacatcaatccattgattttcatgaagaatttgaaggccacccatttggtcttgcaaaagtattgtcatgaagttacgct

SEQ ID NO: 33843 - DNA, 596 bp, Glycine max
atgggaaactgaagcaataaaagcgtccccttacaaaaaaaaaaaaaattataacaagcgggcaattcttcccactgcgtcttaaaaaacagttagcaaattcaacatgtttctaaactttgaattaaatagttagcgggattgaattataataacaacaaaacactaagtataatcacctgccaatgaattacacgctacattctctaggtatagagaacaaaatttccgacaaaaatctaagttatgacttacggggtcttcctctcttaccagatttcacctgaggggatttagaactgtttttattagctgcagtcccaccccgaccacggccagagaccgacccttttcccttagcacctgactttttgggtgtcttacctcggcctttaccagaaccacgtggccttttcgcctcagcctcaccattaatttgatcctcactatcctcctcactttcttcagcatcctcatctgagtcagatgaatcttttgattgtatcctctactttgaattgtcagctccttttgcaccctttttagcagcctgcttaggcactggagttgtgtttacggcctcattaccttcacca

SEQ ID NO: 33844 - DNA, 457 bp, Glycine max
gataaaaacatgtataaatcaaattatatttgagtaaacaaaaacaaaatatgaaaatttccttcagaaattcatgcacaaaataaacttaaagagtccaactccttaaacaagggcaaccgaatggtaaatggcacaaaagtttgcttgtgtgatcaccaatgaactcaacctgtgttcactatacccatgattttccccacgatcaccattttgttacttgtcacttttgcagacttcatgtgtaagtgtaagacacgccacagctttggcatttcaatatagcataacatggagtggcaaagaaggtatacttcaacatcaaatctatttttgcctggttcactttttatgcctaactcggagaattagatgcacttgctttttgaaaatggaccttagctcttcattggcttcaattcctattctcccaatttttgagccattcttccccaca

SEQ ID NO: 33845 - DNA, 504 bp, Glycine max
aattaaatgacttttgcatactttagttagattttttaccatgaaattcattttcatcatgaagatgggagcgaattgagaatgtggcactgtgccaccagtcgtgtagttacatagcccacgcaccattggacgttggagtcaccttgaagggagaggtaacaagagccacctgtcaatcaaatcaacgccaacaacaacgaccattactaccaagtacgcttcacccacagcttttctttccttccccattcgtatttaattgaaaatgtatatcacaatcaaaataattcaaacctttccgtgttaatttcattgaaccaaattatggctgcaaccaaaaaacattacaccggagtaaaatatcaatcaaaacgaaagaaaaaccggatgagcgcttcgtgatttaagaaaaaacagcatgaaactggtggttcctctgtcgcaaaaaaatagagacaatcataccgactacgtattcacatagtatttctttaccttccc

SEQ ID NO: 33846 - DNA, 538 bp, Glycine max
gaaactactaattacttaatctttaaataaaaagggactactgaaagtgtcaacattaaagaagacgaggacaaaatgcgacttagcagtgcccccgcgaaaaaaagaaagtaatatacttttgacaaattagaactatagtaaattgccacacaatgaccattagagataacacgagaagctgactatatcaaagaatcatcaaatcgactagcatacgaagacaccaccgccgttatccccagttggacctgattagttagttgaggcatcactagttggttgaactctatgatcctcatggtaacaatcaggtcatgcatatagaaaccatccacgcacagctggtcaaaatacggtttccagcaggggtggacacgggtctgttaggaccagatcagttctttccttctagtctaggctttaggtctgatagttcattctcgaggatcacagaacttggctaacttcttacttcatgccgtacttcgagttatcccgtcccgagttctctcgggatgagctcttagcgattagc

SEQ ID NO: 33847 - DNA, 572 bp, Glycine max
acagaaataaacttttatatattataattgatcaagaaatagaaaatccatggtgaaaagaaggaaaaaaaagcttctcttctcttctccacggccttctgatttctataaattgaattacactcctcaaattggttagtttccaagcttctaggtaacaattcatgctgctggttactgtgtctatgtgtacatgataatgttcattgttgctcaaagtcacagcagcaagtgagcttcgacaatgtagatggccctttcacaaggacatttgatttgatgtacgaggatctatatccttccatgaatgaatgttacagttgcagttacttacttcccttgcttcttacctctctgaaaccatgatcttctgacagtatgccggatatgacgctcgtgtctttctaagagttcatcaactgtgtgcatttgagatagcagaggccctgaaaactctaccttttcttcttgatcctggtaactcaggttacttctcttggatagcgaatcttgcctgttataaattgccagggacagttcttgtgaatggtactcatcacaagtatcaaatg

SEQ ID NO: 33848 - DNA, 576 bp, Glycine max
ttcttttttttttttttgcttaataaataaagtttattaatctaaaataggtggaattgggaacattaaaccttgaactataagcctactaactctgcattcataacaataagacatccatccattattatatctgtgagctatatgcctaccactagtcaactgatttactgtacactgttgacacaccatacaagtattgagcaaacccaatcctatcattaattctaccttgcatattttctagaattaaagcattacccaaaacaaaacaaaaaattccttaaatatgcagtgcaaccttgaaaaatccgacttcatctagcatttaagagcattcgtagaacactcttcatctttggtcttgattctggggatgtactaacacaaacacgagcaatctcgagaattgcaagcatctggtttctgactgcttgtgatgttctactgacattaaaatcaagaatgtaatcctggtttgttgaattacgcacaacccacttgaccaattccgttccctctgtcactgcaggtttttctgtcagcagttcaagcagaatgacaccaaagctgtac

SEQ ID NO: 33849 - DNA, 392 bp, Glycine max
ccgactaatgtatatataaaatgtatttaaattggtcaatgtttgagaaagaatgaatagcaatacaataatcacttgcaaagggacccaatttgatacgcaatcagctaaatctggtagcttaactactcagcaccaatttgtttttactaacttccaaggaccataagtccattagattggtttcatttctcctgttatgaatatgattgaattgattacatcttaacaactattgagcagaacaaaagaatctcattgttgaacagaggtagaagcgaatgtcaactgcacgagggggtttggtgtagaaacttctgatctagactcagtggatggtggatttggcgtatttactcgacgaatcttcctctatcattctcaccaagtca

SEQ ID NO: 33850 - DNA, 496 bp, Glycine max
ttcttttttttttttaacaggtttaacaaataaatatgatggaacagagttttcacacaatttgggaatgaaattcgatagtgagaaaaatgtagagaaatggcattatagcccatacaaagcttccaagtactgataaaggtggaattctgtgcttactttattttattccttgtatctggtatggaaagacacataatgaagaaagtaagctactcttctttacccttcttgttttcaccagctttcagaaaccgtgaaaaccaatatgcagaagacttggggtgcctgctgagcccatttttataatctacatagaccaatccaaagcgttttgtataaccttgagcccattcaaagttgtctagtaatgaccacgcaaagtatccccttacatctgctccatcctttatagcctgagcaactgacgcaagatatcctttgaaatagcgaactctcagtttgtcatctagcatctcatgtaacggcaagttat

SEQ ID NO: 33851 - DNA, 603 bp, Glycine max
agctatcaaatgtgggtatcttactttttatgtgggcgataactaaattttatattttcatctttcagaaatacatttggcaatgaattacatattcaaacacgaaattaactatttacccaaaaattaaaggaaagggtccaagacaaatttaagaaaaggtaatgaataggcttttctatgaatttgttgtacgcgtcccttgatcggctttataggatagcataccacaaaagaatatcaacccataggctgctcaaaatctcagcgttcagggcttctaatcaagttcaattgctataacaaatttctatcaaaagtaaatgtcatattggcctaacgttagacaggtaaccaaaaatagagacactcaacaaaatttctaaaacagtaataaatatacatttggctccataaaagaatcttccaggacttgtctgggattggattcgcaaactctggtcggaaaattgttcgaaattgccagtagcttaatggaatcaatctcaatcacgagaaaactctgaaaatatgctagagacaggccgaaaacttaaaacgcttcaataacttcaacttcaactttagatttgcctttttttg

SEQ ID NO: 33852 - DNA, 328 bp, Glycine max
gaaaagtcaagaggaaaattcaatcaaattctacttccaaatccaaattccctacatactcaaaatataacaccactaaaccagaaaaccaaattccctactcttctttcactagggagaaagaaagagaaagaaaaaagaaaaaccggttttgcttgtggaagattcccagaagcaaaattacatggaaaccccccacaatttttttcctagtccagtggtgccactgtaccttttagtttagaccctcattgctaaccaaagggttagaacaaaaaagagcaatagcaacttagtgtggttagtgggtttaaaactagctccattg

SEQ ID NO: 33853 - DNA, 740 bp, Glycine max
ccctgggtcgccgagctttccgcgccccttgactgcctcaaggcgctccacctgcgtcgcatgaccgtcaccgacgaggacatcgccgtgctcgtccacgcgcgcggccacatgctacaggcgctcaagctcgacaagtgctccggcttctcaacagacgccctccgcctcgtcgcgcgctcctgcaggtctctgagaaccttgttcctggaagaatgtataattgaggatgaagggagtgaatggctccatgaactcgctgtcaacaattctgttctggtgacactgaacttttacatgacagaactcaaagtggagcctgctgatctggagcttcttgcaaagaactgtaaatcattgatttctttgaagatgggtgactgtgatctttcagatctgattgggtttttccaaacctccaaagcattgcaagaattcgccggtggtgccttttttgaagttggagagtacaccaagtacgaaaaggtcattttcccacctaggctatgcttcttagggggtcttaccttcatgggtaaaaacgagatgccagttatctttccgtattccacaatgcttaagaaactggacttgcagttcactttcctcaccactgaagaccactgtcagcttattgctaaatgccccaacctaagtgttctcgaggtgaggaatgtgattggggatagaggactagaagttgttgctgctacatgcaagaaactacgaaggctcagaat

SEQ ID NO: 33854 - DNA, 1100 bp, Glycine max
gcttaaacgatgctcataaatatcaggagaataaagtaacagaattacgttttttctacttatattaagtatcacaacacccggtctccaccttctaagggtgttatagtagctagttataaataatacatttagaaatggtaaaattcctggtccaaactggcttcaacaaaaactggaagacgcgacgcgagtgttgcttcccagaagcccaaccgttcgagtcatttcttcagcaactgtttcaacacatcttctgcgtgccgctccatcttaggtagagcccagtcatgctgcatgatatccaggctgtctttctctgctcccaaactcattgttgggttaaatccaaatccaccacccatttgcatcatcttctgtgcatcatcagttgcgttttcttcaccaaggatcagactgaaaagacccctcaagccgaataaattgaggaaataccatgaccggctactaacatagctgacatcaacagtgctcaggtcaatcccattttgcagcattcccctgaatctctgagtcaatggaaaggggatttttgctgcaacgaaacctgaaaagaaaaagttcacccatgcaaatgtaagtgtctgaggaactatcatggataggttcttcttcatcatgtccatggccatgtttggatcagaaaacatggctgcctgagccttctgcgcgtcttcctttggaacatgaagtaatccattttcctcgttggtgtaataaaccttgcgtgccttgaaagccttggccgggatgaaataagcgaaggtcctcaggttcctcgccctgatgaccacctgcccttccttaacgagcttggggtcggaagacggagaggtcgccggggagcgcttgatcttggagacaaagtagcggagcacgccgatgaggaccataaccacggagagcgggatcaggacccagtctcggatcgccgtgtccaaaaccaagtcctccgccatcgtcgccgggagtgtagacactagctgcgcggaagacggcggcgtcgagcggagagcagcggacgggaacgggagcgagctcgccgacagggtgcggtctgcgggtcgtgtgcgtgcggg

SEQ ID NO: 33855 - DNA, 443 bp, Glycine max
gaattcctacatatatacttcttttcttttgttccatttatgtagatcaaaataataaggcaaattaaaatcagttagtgtgatagagcacgccagataatttacctatgacactaatggtgccccttatctgctttgattccattgaatttgaatcaaagctcacattatcatacaatgattgcattgttgtagcaggaataaatgaaaatagctacatgcccaactcaaatgatgtgaccataaacaatacattgttgttgttgcacatattatgtctatgaaacttccatgtccacaaacctatgtttttttagcaattgttggttttgtgattccaaactgttgcgatcattgcctaattttctcttgccataaggatcagcaaatcgaatatccttcatgctactttcctgtttgaatacatggattccgcattcttt

SEQ ID NO: 33856 - DNA, 404 bp, Glycine max
aattgtaatggtgaggtttttcttgtgtgcagaattgtagctaaaaattaaagagcaataataaccatagttaatatttactagcataatgacttgatagtcattcgataacctccaagttcgtacatgtattttcaaaggtcaagcttatttttatgacaatttattacagctgatggaagactcgtcccactagagccacatgtgaagtctggctcatccactgtgtgcaccacaagttcggggtctgaagattccaactctagtattaccaaaaagttatctccttgtttaaggagtggagcaggaacgtagaggttgcactgtggtcctctcaacggccaatatcttcctatattgaagtcattaacaaacacaatgccttttccccaattgttgaatga

SEQ ID NO: 33857 - DNA, 408 bp, Glycine max
aacttaaattgtgttggatatgtattttgattttatcataactagcaaccgttgttttcttggagcatccacattacagcaacttacaatacttttcccaatacaagtaactctaagtaataaatctctacaatggaacaactctcttttgttgttttccaatggaccccaccaaaaagcttttatcattatattttattaataacttctttagtaatccactattgtgtgtgcacggttttatttctaaagtgcattccgcaagaggagtcagattcaagctctagaagtgcccattcgacatggtccattcatgttcattccgtaatctgagtcactatcatcccgttttgactcatgtcactatcttcaaatggtgtacatagaaccgtttgttttgttttgtag

SEQ ID NO: 33858 - DNA, 845 bp, Glycine max
  unsure (1)..(845): unsure at all n locations
ggcatgcaaagctgtaatgatgaacaatatgctaaaatagcaaagggtccccatcagaatgcgtcttctagaactataaaattttctcgagacacattctcctacattatgctatgctaatgagagattgagaaatatctccaaagcatggaaaaaataggttgagggtaaggatactcgcttccactaaaaagagccacatccaatacacaaattgccgttaagaacacaaactttacaatgaaacaattttgacaagggtaaaaagaggtctatcaacatgttcaaaatcactgagcagccaatttcttcttggccatccatctccgtctggtggattccaatgccgccagcatcatttcattaagttcatcaatccaatgctgatagtgtgcctcaatttcatcaagtttaaactttagcccaagatcaatgtcctcttctgttgatgacacataagaacagctacttgccagattttcaacattaatggatgttccaagaactgaccccgagttctttgggaattcatttatcacaactccttccccaacacaatactctgtttgttgcaatttacagtcctcaaaatatacatccctaagttcagacatggaactactaaagcatttagaacttaaatcatcattggaatcatgacaattgtcatttttcatagaagtattttcaataatcatctcagaagctctagatccttgtgaatatcgatcttccaatttaaccagactagaagaattacaatcaccctcaaaagtagcattattagcaattttggaaacactgctattctcagacaccacanaatcttctttgggagttgtatc

SEQ ID NO: 33859 - DNA, 419 bp, Glycine max
aaaacccaacactgcatttttaatacgattgctagtaataataccgacaaaactcaaaaatccaacttactagaccgaacatagtgttgcaagtgtatacaccagcagaaggcctaaaaccaagtattgcaagtgcacgctaataatgctcagtctccaagattacttgccaagtacatgaagcattacagcattctgtgcatgcattcggttctcagcttgtgggaagactattgaatttggagcttcaataacttcgtcagtcacctccacccctctttccgcgggtaagcagtgcataaaaaatgcctttgaaccggccaaatccataagattttggttcacctgaaatcctttaaaaacttggcgacggtattcagcttgctccttttgccccatgctggcccagacatctgaat

SEQ ID NO: 33860 - DNA, 956 bp, Glycine max
cctccatctcccccaactcaatctactggtgcttctagcactggattaatagctggaggtgttgctgctggtgcagcattggtgtttgctgttcctgcaattgcatttgcaatgtggcgccgtcgtaaacctgaagagcatttcttcgatgttcctgccgaggaggatccagaagtccatcttggtcagctcaaaaagttttcattgcgggagcttcaagttgcaactgataatttcagtaacaagaacattttaggaagaggcggttttggaaaagtgtacaaaggaaggcttgctgatggctcattggtagcagtgaaaagactaaaagaggagcgtacacctggtggtgagcttcagttccaaacagaggttgagatgattagcatggcggtgcacaagaaccttctccgacttcgtggtttctgcatgacacctactgaaaggttgttagtctacccatacatggctaacgggagtgtggcatcacgtttacgagagcggcagccatctgagccacctcttagctgggaaccaagaagacggattgcactgggatctgcaagaggactttcttacttgcatgatcactgcgatcccaaaatcatccatcgggatgtcaaagctgcaaatattcttttggatgaggacttcgaggcagttgtgggtgatttcgggcttgccaagcttatggactacaaggatacccatgtcacaacagctgttcgtggaacaattgggcacattgctcccgagtacctatctaccggcaagtcttctgagaagactgatgtttttggctatgggatcatgcttctggagcttattactggccagagggcatttgatctagctcgtcttgcaaatgatgacgatgttatgctataatgactgggtgaaaggactgttgaaggagaagaaggtggagatgctggtggacccagatcacagaaagc

SEQ ID NO: 33861 - DNA, 519 bp, Glycine max
gctgattcaggttcggttaaccaaccgggtttcgtagtatgcgagcatcgttgttggtgggcccccccccccccccccccccccccccccccctaagaacaaagcagcatcactattcaacccgaacacacggaaggtgaccttggagcgatcccctcatgcaaagaattagaaaaaacacgcacacgatgaataaaaataacacgcacagctcacctaaacagtcggaacattcaaagtaaaactcctacgccacgaaaacaagcatgtccattaaccgaaaaccgtcggagaacagcagcaccactgacgaccagtgaacaaagtacgagacgggcaaacaccccaaaacagaggccagggatgagtgagaaagaaagagacacatcgatggtaacgcgggctcaaagcacgcgaacaaccttcacctagataagggcgcctacgaaacactgatctctgatgatgactgagcaaccgagattgaaaaccaagtacccaaaacgccaacaccagacc

SEQ ID NO: 33862 - DNA, 530 bp, Glycine max
gttcggttaaccaaccgggtttcgtagtatgcgagcatcgttgtgggtgggcccccccccccccccccccccgcccaaaaccttcccgacccgcactcaatgaatgaccagaaccatgaaccccgtcaccgcacccaagcacccccttaagggtaatacaataaagaaacaaataaaaaacacacacacgaagtaacaatcagacgacccactccgacgggaaaaggaccgcagtcgatcacgcgtgtggaggcaagcgagtgtggtgcgaggtggcagaccaaaacggataaagtcgagcaccagagaggtggagtgtggaagaagggaatcccccggtgccggaagaatctggagtcgatgagggtatcgaggtagcgagctatcgcggcgcgtgcgaggcgtgcggtgttgttatgcagaacgtggtggtggtgagtagtagttgtagagtccggggccgccccgggctggtatgacggcgtcaaagtagatgactgtagcgacgttgtaggtaaagtattattact

SEQ ID NO: 33863 - DNA, 515 bp, Glycine max
tggctgattcggttcggttaaccaaccgggtttcgtagtatgcgagcatcgttgttggtgggcccccccccccccccccccccccagctaaacctaacgaagacccgacccggaaaccccttgagagaacgaaacaaaacctcctatatgctaaccccggagggaaaaacaaccccaaaaaggataaagaaaagtaccatacaaataagcaacctaaactatcccgagaagataagattttaacgcagcaaaatgaatccggagcataaacaagatccgatagctcctaattgggggctagaataagtaagaggacacgagaagaatgaggatgaagcgaactctgagtatccgcagcagcccgctgacccgcaagcttacctaatcacttactttggacttgccgcccctgctctttagtccgccttctacgacatgtcaacaagcctcgaagaaatcgaagatggcgattaagatggactctactaccccgcagaccaactaagccctgggac

SEQ ID NO: 33864 - DNA, 494 bp, Glycine max
gctgattcaggttcggttaaccaaccgggtttcgtagtatgcgagcatcgttgttggtgggccccccccccccccccaagacttataatagccccccagacaccacaaatgaaaatacaaaaactcatataacgaaggagactttcatctcctgatcctcccagatttccgaaaaccaactaagaggccaattagggagaccatagggcctaactcgcaagaacgataaggagaagtataaaaaaaaaccacacacatgagaaaactcaagacttaaacaaatgaaagcacagacctgccagacaaagacttccgactggatggagaggcaaaggcggtaacccctccacactgcccagcagcctggtgacgagaaaaccgcgcgaaggtgttattatataatgataattcgcattacaatgataatggcccgcattttgacgctaaggaggacgtggaggaccttcagttggttttggttaacctgtcagact

SEQ ID NO: 33865 - DNA, 406 bp, Glycine max
ggctgattcaggttcggttaaccaaccgggtttcgtagtatgcgagcactcgcttgttggtgggcccccccccccccccccccacgaaaagaaaaatacatacgatcacaagccgagctgaataaactaaaaatacccgaccgcagagaatgcacgcacgcaaaaccgcgtccaccctaccagcatcagcaaccgaataagtatatggaccatgggagccacacataaataaacataaaactaattatcaaaataaaagggcgataaagccggaaccacacgggggcaaagctaaggccccagcatttggcaaaaagacggaatagacgggtccttctcggagagaataggcgaaaatgaagcccgccgatgccggacgaaacggcgatacctgcggatgctaaaa

SEQ ID NO: 33866 - DNA, 520 bp, Glycine max
gttcggttaaccaaccgggtttcgtagtatgcgagcatcgttgttggtgggcccccccccccccccataacaaaccgccgcacccaaccgacaggccgaataccacgcaaacagactgcacaaatgccgcgcgaatccccactcctacaccctataagggaattctgacaaccacccccgcgcatcgcaaagttacagacccccgaaataacagaacactggacatccccgatccgcctaatggagacatggactcaggaaaccccatgaaaactatacaaaggagaagcctccgctaaaagacgaatctcctgactgaacccacgacaacgagaagcctaacaactagatctaataatgcggtactgcgccctgtcacctactctggaatcatcgccccaaataatcccgcgctcagagcttcttacctctccgatacaagatccggcctactttaggaatagcgcctatatcgggcgcttctagctacgaggaaccgcaaaaaattactgaacctact

SEQ ID NO: 33867 - DNA, 434 bp, Glycine max
ggttcggttaaccaaccgggtttcgtagtatgcgagcatcgttgttggtgggcccccccccccccccaatttcaaactcaaacctccgacctgccaagctaggagccaaaagatataattgaacaaaaacaaaaatccccaatttaaaaaaaatttctgatacgccgcttgcccttcaaatacaccaatatataagaataaccactaaacttggaggagatcgggcacctcggttcggaaacggacctgaataaaatgctaaaaactgggcgccttttatcaggccatacccgctagcagctaacgagacgaactgcgattgcgataattcccttgccgccgatgccccactcctcggcgaggcggacggcgcttcaaacgttaatcggatatatcaattcctcgcgcgaagatgctgactacgaaatctgctc

SEQ ID NO: 33868 - DNA, 288 bp, Glycine max
tggctgattcaggttcggttaaccaaccgggtttcgtagtatgcgagcctcgttgttggtgggcccccccccccccccccccccccccaaataaaaaggccaagacccccgcgccgacgcgccgcgacccacccgcgacaaacatagataaaagatcctcctgagaatataggcggcatacgccggagcctagaaatctgaataaaaagaccgacctagagaagccgaccttggtggcggaggagctgagaatggaaggaatcgtacgatctcctgtcacaagaaacg

SEQ ID NO: 33869 - DNA, 508 bp, Glycine max
ggctgattcaggttcggttaaccaaccgggtttcgtagtatgcgagcatcgttgttggtgggccccccccccccccctactctaaagcccccccctccatctcaacccgacaaaggacaaggaaagtaatgaggggattaaaataaaataaaaaacgagaccgccccacgcgggccactcagactctaccctggagcgccgcacaaccaagagaatactcaccaacgcagattctaacagaccccgctctggccgaggtacttaaaaattactattacttcaataagcggacagccagaagggtaaccatgtacccgatgcctgacgcagataatgaacgcgaatgcgctgggaggaaatcttataaatgcccttaagatgctgacgattctccaccccctccacgcgcgccaacgcgagagaaagccgcccgacctccttcgccctgcccctacgattacttagagaatacccaacgaaatgacgtagcctccgtatgctccgccgc

SEQ ID NO: 33870 - DNA, 419 bp, Glycine max
ggctgattcaggttcggttaaccaaccgggtttcgtagtatgcgagcatcgttgttggtgggcccccccccccccccacatcccgcaacgagcctccagaccccaaccctaacaaaaatatacaagacaacctcagacaaaagaagacaaaagcagacaaaagaacacataaaagaacacataaaccccccccatcagacacccacacaccccgccaatccccactcctctcgccctttacttctagactatgccgccagaaggacccacacgaatgaacgcgaattacttcttaatgcggttcatatagactatcccggctgaaggacgcatggtaattctctcgatgacctaaattccccctacaccctgattgaatgcgcgaagaccatccggggccaatcacaagccccgcaaat

SEQ ID NO: 33871 - DNA, 494 bp, Glycine max
tggctgattcaggttcggttaaccaaccgggtttcgtagtatgcgagcatcgttgttggtgggccccccccccccccctatataagaccccccccctcccgacgacacaaaacacacactccgctaaataagagacagaatcagagaaaaaaaagtttttaaaccgacaaaaaaacagataaaaaaaaaaagataacctatcaatatttaattaaagacatataaaaccccatgaacgatacaacaataatggatcatcatctgaaaatcgggcctggaatatctccttaaggggccccatccaatgattcaggccgcgggggcctatcttgccgaggagccgggactctaatcgatttcgacgcgctggaaatctcggacactgatgatcgccgaataaggctggacccggaggggcgcctatacgaattcctacttatacgactggattggctaatcgaaaagcgcggccgagaactgctattacccggcct

SEQ ID NO: 33872 - DNA, 411 bp, Glycine max
gctgattcaggttcggttaaccaaccgggtttcgtagtatgcgagcatcgttgttggtgggccccccccccccccccccccccccccccccccgaaaacttgtaaggaaccccctaacacgttcaaatactggacttaactaaagaatcagcttgctttaccgcgtgcgggatggctaagcgaacgatatcacattacagatgccgaacaacattcagatcttttaaaacaaaggaacaagtactctaaaagaaaaacatagtagaacgaaaagtccccgccgcggaggcgagaaaaacttccgggaagagcctcgcgggccgggagacgcaaaccgtcgcgattcccccacatgctgcttctcccgcctctacgctcgcgccaagatctccgaagcgatccttttttgtt

SEQ ID NO: 33873 - DNA, 546 bp, Glycine max
tggctgattcaggttcggttaaccaaccgggtttcgtagtatgcgagcatcgttgttggtgggcccccccccccccccccacaacttaaacccgatctcgaccactaaaacattgatccgataaagtgtcaccaacttaattagaaagcaaaacatgggatcagacggagaaccgacaagtaataagactaactgggaaaacgcgatcaagacctataccatgaccgaagaggccgcgggccctaaaagaccagagaatttaatccgaacgagcaaccatgatatatcacttcactcccaacccctccggggtcgaggccctttctgttgccgcccaacccgacgctgaggacgtcggctgactcgatattcggatatttctattccacgagtcatgatcctgactacgaaatctgcacggcctcactaccggcgcgggaactcacggaaccgatgaacatggcgacgaaaatggctcccctgaattgctgactgagtacgattatatccaataacgcgacatcaaaagagatataaaccgatatg

SEQ ID NO: 33874 - DNA, 375 bp, Glycine max
tggctgattcaggttcggttaaccaaccgggtttcgtagtatgcgagcatcgttgttggtgggccccccccccccccccccccccccccccccgacaggaagcctgcaagcccgccgaccccgcgcccaacctctcccgagaaaactgaaaactgaaaacgaaaacagacgaggcaagcatacgtaccttgaagcaaactaaacaccctgcgcctcggaaagctcgggaaacatgaagaaaaagcaaaaaaaaaaaaacgaactacgcaatatgcccaccagcttagccctaaaccctactgccccacctgccctcactaccccgtctctctggcttcaggctcgccggaggatataatcaaggactgctgctac

SEQ ID NO: 33875 - DNA, 417 bp, Glycine max
tggctgattcaggttcggttaaccaaccgggtttcgtagtatgcgagcatcgttgttggtgggccccccccccccccccccccccccccacttcaaagctaatgaacaaaatgtcggggccagaaaaaaaaaaaaaaccacaagaatgtttgaaccgccgggagctgtcgccaaaaaagatccatgaaaccgaagactcccgcaaagccctaaccaaacatccatgtttacctaaccacaacaagaagaaaagagcaatcacaacgaggctggaactaaccagagtgcagaccgcgcattcacatataagaaaacccggtagaaaaacgcaatccactagccagttttcgccggcgcgccaggatacccgaggctattttacccataagctcccccaccatgctgatcgggaggggt

SEQ ID NO: 33876 - DNA, 378 bp, Glycine max
gttcggttaccaccgggtttcgtgtatgcggcatcgttgttggtgggccccccccccccccccccccccccccgtgaaccaaaagctaacaggccccaccctaccagaaacaccaaaggcattgaaccgtctaagcgatgctccagtgaacgggaaaagcctatttgaaaataaaagcataaccatcacaataaaacccgacatagaaaacccccaaccaaaaattaaaaataaccgatgacgaggcaatgcacatgccaagaaggaaccacaagaaaaacgctcgaacagctcccacaccagatgctgccgcatcaataacctgtatacatgccggccctcattcatctgattaacctgaggcgcgcgatccagatc

SEQ ID NO: 33877 - DNA, 439 bp, Glycine max
ctgattcaggttcggttaaccaaccgggtttcgtagtatgcgagcagtcgttgttggtgggccccccccccccccccaccccaaacgacaccgtctgaagatcctaatgaaaaaacctccagaaacggcagacgatccttggacaaagcctctcgaacccagtaatgacactatcatactggacgaggatcaataaacacagttgcgacttgccagaccatgcctgctgacaatcacccacaaaagctgaataccccccccgagatggccattgagctcgataccgacccggctaacgaacaccgactttcctcttaccgcctctatggagcaacgcgacggactcaagtccccccacgccgagtgtggccttggcgtcactttcggccgcgccggtgatagaagcccccggacccgcgcggaatcagcgccgggagac

SEQ ID NO: 33878 - DNA, 285 bp, Glycine max
ccgggtttcgagtatgcgagcatcgttgttggtgggccccccccccccccctaaaactggaatggtaacaccgcaccggggccgcctcagagccccccgatagtctgaaaaagcctaaagacaaaacaccgtcgagggggacttaaatccttaaagagacaaagataatgagaccactctgaactattttgcggaacacacacacacagatcctatactaaataaacttattcttactccaaccccttgtgttataatatttatcggatttctctacacgtacat

SEQ ID NO: 33879 - DNA, 450 bp, Glycine max
gttcggttaaccaaccgggtttcgtagtatgcgagcatcgttgttggtgggcccccccccccccccttaaacaattccgacaacaacccagaatcattgcccgagacggaagccaagaccagaaagaaccaaccaacccggggagagcagcagcaaaaaccttggacggcgagaggatctcgggcatgacatttatttttaggaccaccaccatgcccctaaaaagcaagacaacatatgcgctattccactggctctataagaactaattgatgcggatgcggaaagagcgggccggcgaattcgcttgactaattctgcgcgcgcgggactatacgagttcagccttctcttcagtgtccggcgagataagggtgcataattgagtaatgatgaactacaaactcgagggatgcatctactaagaatgaaacctaggactacgcctac

SEQ ID NO: 33880 - DNA, 420 bp, Glycine max
ggctgattcaggttcggttaaccaaccgggtttcgtagtatgcgagcatcgttgttggtgggcccccccccccccccggagagcgaaaaaaatcaacaccgacccacaaaatgagaaaaagaaaccgaccggcggagcacccagaaaaccatacctgcgcagcaatagaatatgctcccgccggacggagggagccgatccatgccgaaaagaataataacgcaaaagacaagcagtaaaagaaaaccaaaaaaacttgacgaaagcggaaaccgatatcatgctgcgataccaccacgggaaaatacacacccccgacccttatcgacttcccaagtcgcaaagccaatcgagcttagacaacccgcacccgctgggaggaaatattatactgcccgttatcctgcggtcggttgggga

SEQ ID NO: 33881 - DNA, 416 bp, Glycine max
gctgacttcaggttcggttaaccaaccgggtttcgtagtatgcgagcatcgttgttggtgggccccccccccccccccccccccctataagaaaaaacccgcccgaccgccacactcaggaaaacaccatgaaccacgaacatacgcagacgcgcacccggggcgcaatcggaacatttggcgtacataacaaaatcactaggaaacagaaacgaaacaaccacccagaaacacacacatgcacccctcaaagaaacccgacaacagcaccctgcataaggacacatcccttcccgcccgccgataaaaccgcgaaaggacaactgatataacccgcctcacgcgccgaaacgaccccctcaacgcagacaaacgaccggaaacgcctactcaaaaggttaataggaccgaaaacc

SEQ ID NO: 33882 - DNA, 466 bp, Glycine max
tggctgattcaggttcggttaaccaaccgggtttcgtagtatgcgagcatcgttgttggtgggcccccccccccccccctacaaaaagactcacaaacgaaaccacaccctatcaaagaaaaagaaaacactataacccggccgataaaccgactgagaaaacaaagccaaatatcggaagcggccaaagaatttgaaggtaacttcaaacttgagaaaatccctgcctctctacgaggaactaagcgaaggctctccgagcacagggactaccccggggagtacgaggacccctccagcctcgagcccctgatagccgactctcaatctcaatagagtggagatgcccttgacccgaacacatgacaagacttatcttgaaataattcacagccgaagacgaaacgcaccccctggcttccgagcccccactggcaagcgttataaccatactgagcctgccccc

SEQ ID NO: 33883 - DNA, 454 bp, Glycine max
tggctgattcaggttcggttaaccaaccgggtttcgtagtatgcgagcatcgttgttggtgggcccccccccccccccccccccccccccccccccccctactacaaaggattcctgcctagttccgtattacgaaaccaccgtagacaagcccttattatttaaacaaaacccacaccaaaaagacaccacagacgacgagcctgcaagtcccaacctagcccgggagaacctaccgctacgcttgggcttgccggctcaatattgcctactcctgcgacccctatgactgggccttgaaatcgccgaaataactgatgatgaccttcatgacaccccgccaggatacctcgatcataagctggacctaagatgcggctacgttaacttataatttggccgccagcgaggaaaccgctaaatcacataccacgaaaacttaccttatcccttc

SEQ ID NO: 33884 - DNA, 487 bp, Glycine max
gttcggttaaccaaccgggtttcgtagtatgcgagcttcgttgttggtgggccccccccccccccccccaaggaaacaaaaatcgcgaaacacaagcctattaagctccgaggcatctctagcgaaaagtccgacccttttgatgcctagaaaagcccgacgcgactaaaaccctcagacgatacgacaccacgatgaagcgattgaaacggcatctacagtcccctcctgaacgacaaacccgaaagacccctcctgaatcatggggctacagccaagccgatgaccaaatccgccgaaactcgaaccacctgaacccgcctagggcctgacgctatcccgcgaagaaacctaagcgaacgagcgaagaagcaaacagataacggcctaatctagcgcattatgcttccgccgaagcgacgctgaaagtgcggcgaccctgaatgatttaaagccccacaattcctgaatattatacggctgaccc

SEQ ID NO: 33885 - DNA, 431 bp, Glycine max
tggctgattcaggttcggttaaccaaccgggtttcgtagtatgcgagcatcgttgttggtgggccccccccccccccccgaactgcagaacccaggaaaccccgccggagaaagggccccagaactcacggcgccgaagaaaaaataactaataaaaataaaaatacttgcagaaagcactaacctccataaattagaaagaaaagcacccgctagctcaccagaaccagaagggcaatgacataactaaaagggaaccgagtcacaaaacggcataccgcgccgagcccccacaacagatcaatataaccactagttgcaaacaaggcgataccgaagcacatccactagatgccgccctgaggacctttgctaatctcattagccctctgactaaccacctggagatgaacttataaatagctcatctg

SEQ ID NO: 33886 - DNA, 487 bp, Glycine max
ggctgattcaggttcggttaaccaaccgggtttcgtagtatgcgagcatcgttgttggtgggccccccccccccccccccagtttgacaatccgctcctaacccgacatgacccccgcgggacttacatacctactcggatatcagactggatcccaaaaacggtccgagggatagtgtgagaagcgccgagctccggatttgacaacccacacagacataaagaccaagcccccatgcacaatgagatgctcccccgatacgccaacgcccacctgaaaggagtagtcaaactggagagtagcacccggaaatgacgctgcggcgaggactcgactcgtctataaatccaggcggaaacactatactgctattatatactgaccaagttaaaggaaaaaatatgcgaacccaaactctatccatgataagaatgatgcttatcacctcgacgactctaatatccgcggggcgcatgccgaagacct

SEQ ID NO: 33887 - DNA, 508 bp, Glycine max
tggctgattcaggttcggttaaccaaccgggtttcgtagtatgcgagcatcgttgttggtgggcccccccccccccccaaatgagaagagaaaacacagacaacatcagactgaaagacacgaatcacattaaagagcccgattgcccgatgctgcaaaaacagccgccgatggatcgaaacgacatgaaagaaacccagaaacaaaaaaagagcctaaataaacttattgtaggtctgagaagaataacatccctcacggtccactcaccggaataacccagaaggacgagcacctcaatggacgccactcctcatctgacgaggctccacgccgctgaggatagcttaacggccatctttgacagcgcgcgcctgtgccttagccgatatatccaaggtacctatatcctgctctggatcctgtcccggccctacctactaaggaaccacctaccctgccgatgctgaagggctcgcggcggagaatcccctggcctcgacgccga

SEQ ID NO: 33888 - DNA, 471 bp, Glycine max
tggctgattcaggttcggttaaccaaccgggtttcgtagtatgcgagcatcgttgttggtgggcccccccccccccccaaaaaaaaaaatcgagacgccccagagaatccaacgtaaggtaaacagacaaccaacggaaggaatatagacggcaaccgaagacgcggactcatagcgaggactatcggcagagagcagggaaaaaacagaaaaggccatgaaaaaaaagaagaaacaaaacgcagacgcagactccctagcgaatgggaacaatggagacagtaataaggcgaggcggcggcccgattttcggaactcttcaaccggcttgcaaaactgagatagagaagggcatatcggaacaagcggaccactttctctaaaccgagagacgccttgaggccacacctacccacttagtgaggcgcctatacctgacaacggacaatgcggcgaaattcgggaccggcg

SEQ ID NO: 33889 - DNA, 427 bp, Glycine max
tggctgattcaggttcggttaaccaaccgggtttcgtagtatgcgagcatcgttgttggtgggccccccccccccccccatgccgcctgcctgcgcgtgcgcgcgaccataaaccgacaataaaactcttaatagactaaaaaatttatcgagagacggcaccgcacgaccagacaagaaacgaagcaacactccaacgccctcgacgtctatctcaaaaaccaagcccagaaaccgcaaccagaaaatgaaaacctgctggaaaaaaggatgcaactaaaataacaactaaaccggttgagaataactattacgctaaggctactgatcgaaaccggaaaacgaaaaggaagatctgaggccatggacacgctgaaggaagaaaagcgaaggatttggcgcggccttgccatgccgagaatccgcc

SEQ ID NO: 33890 - DNA, 495 bp, Glycine max
gctgattcaggttcggttaaccaaccgggtttcgtagtatgcgagcatcgttgttggtgggccccccccccccccccccccccccccagcaaaacataaaaacaaaccaccatcacaaagattaaaagcgacggagcaatgataaccaaacccgcaattccggaacgagaaaccgagaacacgttgaaaaaccacggctaatacagaccaacgttcacccacaacacaagcgccaacagctgctacacgaaaacgaacaaaccttcgcacaacgcctgaccacaaaaaaaacacttcatgaaaaccagcgctaccctaaaagcaaatcggtgaaggacaaaattccgagccttcatgatgatgatgaggaccttgctagccttaataatgccgccgttactcttctgctccaatgcgacgggaatgccgatcggaatcgaggacttgacgctgaatgccttctaatcatttacgaagatggggtatgccgcgccc

SEQ ID NO: 33891 - DNA, 508 bp, Glycine max
tggctgattcaggttcggttaaccaaccgggtttcgtagtatgcgagcatcgttgttggtgggcccccccccccccccccctgaaagctaaaattccaaggactgctaccaacgcccgaatgaccgacaaaaaaacgtgatcccacgatactgaactcactgatgaataacaggagatgaatattgggagaccaactaaatgagagctaacctcaagatgctttataaacaaagcagcagataaagcttatacttatacatgaggttgaagccaaaacgagacccctgggatttgagaataccagcggtcgaactgccgaaaaaagaccgcgggagaaagggtacaaacaacgcctcactccccgacggtgacggcttctatagattacaacgcaagagtgggccggacgccggcacgccctataatttcagagatgaggatcctgggcttcgctgctcccataatgaaatgcctatagcatggccggaccctgctatggctataccc

SEQ ID NO: 33892 - DNA, 465 bp, Glycine max
tggctgattcaggttcggttaaccaaccgggtttcgtagtatgcgagcgtcgttgttggtgggccccccccccccccctaaagcagcaaccagccaacgcccaaacaaaaattcagcagataaatctcgaagaccaaataatagtattagaaaacttgtagccatgatctgggggtgtaaaaaaataaatcaacacagcccctagaaaccataagcacatcaaacctggagagaactaggaccatatacaagagtataatgctagcacacgaaataacgacgaaacgtagcatgacagtaatagaggaggtggtccacagggatccttaggctaccatccatcctattgacgagcatccttcctaagcgcactacggcgacttcaagaacgattcgactgacacataaaggacggagtgagatgcttcgaaaacagttcccggatgattttcttagagtttcgct

SEQ ID NO: 33893 - DNA, 451 bp, Glycine max
gttcggtaaccaccgggtttcgtagtatgcgagcatcgttgttggtgggcccccccccccccccccccccccccccccccccccccccccccccccccccccccccccctgtttaaccaaggtgagatgagccaccttacccgcaagactaaacaaaagaacacccccggcaactacgcgatttcccttcgcataacagtggaccccggcctgtcacagggacgaaaaccgcacgcgcccccgcgccgcaaaaaagcactactgccccaagccaagcatagatcacagagatctaggggcggagactactgcacagccaccgagagaatatgaaggcgcctatgcctgcgcctgctgccgctaaccggctctactctcggaagacaaatactatcgggagaataacgatacctattaatggccctcgcgcccggaggccgatagactgacc

SEQ ID NO: 33894 - DNA, 404 bp, Glycine max
tggctgattcggttcggtaaccaccgggtttcgtgtatgcgagcatcgttgttggtgggccccccccccccccccccccccccccccccccccctaatgattaggtcccattcccggccacgccactgaaaagagaacggaggccaaaaccctcgagcgtttcagcgaatcgcggaggcggcaaaccctgacgagcagcagttcaggcaaactagctgtcgcatctaagacgtaagcatagtacgactgatgaaaacaccgggaaaagacaaagacaatcgtacgactcctagaggagagtatcccaggaacaaacagagacgtagcaaatgacaacgcaccgcgcatctaaaaagagaaggagccttgcaacgcggtccgcaacacaccctgatcatccgggt

SEQ ID NO: 33895 - DNA, 449 bp, Glycine max
tggctgattcaggttcggttaaccaaccgggtttcgtagtatgcgagcatcgttgttggtgggcccccccccccccccccccccccctaaagtgaaaatgggacgacctcatcctaagaccatgaaataaacagctcgggacaagcaaacacgaaaaaaataaaaagacaggatcagatacaaaggctgcagtttgggaaattggcgcgaaactagaccacacctcaagctgcattaacctctcggagacacttaggagataggataggataagaaagaccaatggagttaatagagcaacacagaagttagtatgaaactaataatcggaccgtaactaaatttttaaatacaacggacggaagcatttttcttttaacgcatatccccgccgctgagcgtataaacccccgagcctgacgaagggattattatcgattagtgatgat

SEQ ID NO: 33896 - DNA, 433 bp, Glycine max
tggctattaggttcggttaccaccgggtttcgtagtatgcgagcatcgttgttggtgggcccccccccccccccagataaacaaagccccacacaccacaacctacgaaaaacataaaacggacttctaaaataattaaaaaaaatgccgcgccgcgccgcggagttggccgctacccgcacaaacctaaccagagcggcgaaaccttccatcccggaatgccgcattcaagaaccgactgctgcttccagctctcgcactctcagactacaactccgacctcctgcgaaatcgagatgatgaatctatgccgtagaactcatacttgggcccgagaattagaccctaccctactcagtattacgcacacggccggactaactaactccagatcctgatccagccagccgggcctgccgccaggcgcgctaaa

SEQ ID NO: 33897 - DNA, 481 bp, Glycine max
tggctgattcaggttcggttaaccaaccgggtttcgtagtatgcgagcatcgttgttggtgggcccccccccccccccccccccccccccccttagagataaacaatccggaccggtaactcatgatgatgagaacacacccaacctgatcccactcagatggcgaggccgaaaattctgaaaagggcacgcccggaaaaaacgattgatttaacaaatagtaaatgtagaaagggaaatgaaaataaataaaatcgtccataagaccaggtcccgcataagggcgcggtcttagctcgagtgcaaccacaaccaaccaacccacacagtcagcaggaagaagaaggctgccactagagcggcgaggtctagattgtttaagtccatgatgagagtcttgacggggcctggagtcggaaagaactcggccgatgtgtttggcgagtcggcggcgagataagccgtgtcaccggaagtctcg

SEQ ID NO: 33898 - DNA, 452 bp, Glycine max
tggctgattcaggttcggttaaccaaccgggtttcgtagtatgcgagcatcgttgttggtgggccccccccccccccccccccccccccccccaacatgcacaaccctcctcccgagcgcaaaaaccacacccaatccaagaagtcttcaacaaaagaaatcaacgacaacaacagaatatagaaccgagagaccacaattaaccaaatctcaacccaccggaaactaaaatagcgagaccctctgcgagtcattatagaccgaagcaccgaaatggaattataaccactaacattctccagaagatacccaagcctcaatcagcctctaatttggctcaacgggaaacgcgccggaaacggtgcgacgccacagggcggaaaattaagacgagcgggcagttcaaaacatgatcctacggaaagaactggctgagtaacttaggcctagac

SEQ ID NO: 33899 - DNA, 387 bp, Glycine max
ctgattcaggttcggttaaccaaccgggtttcgtagtatgcgagcttcgttgttggtgggcccccccccccccccataagaaaaactaccggacatcgaagcatctaaataccctaaaatcctaatgattaccgccaagacgagcctgaaaagcaatccgctaagaaaatctgcgaatcatggcagtccccgcaccgcaattcagcttccaacaccagaaagaaactagactcaaaacgagaatttgaaccagaacctatttccaactagacatatccatcacaagaaataaaaaaagcccacacggcaccgcgaaccaatataggcttggacctacaataaaaccgcatgctgataccgtcgccaaccaataacgcacgaaacccc

SEQ ID NO: 33900 - DNA, 481 bp, Glycine max
ggctgattcaggttcggttaaccaaccgggtttcgtagtatgcgagcatcgttgttggtgggccccccccccccccccccttacaaacaaaactccaacccgcgacaccgtatctcacttgacccgacctaccccggattaaaaaaaacaagcaaccaagccgaaaatcaaaagcacggagccgaccggaagcggccgaaccggaccccggtaatattaaccggacaacttaaagcctttatttattattacaggaaaagagcgactacgcctccgtaagcaagaaaacagggaccacattataagactcacaaggacgagatacccgcgacaccagaatgcatccatctcatgacaaagccgaatcccggctctgaaaaaggacatgaggagtaatccgaagcatctggagctgccgaccaacgtgacggacgagccgcttgcccggggagcgagctgccgacggaccttatcggcgcgt

SEQ ID NO: 33901 - DNA, 456 bp, Glycine max
tggctgattcaggttcggttaaccaaccgggtttcgtagtatgcgagcatcgttgttggtgggccccccccccccccccccccccccccgcaataaaataatgccgacactaagatgatgaatggaagcgctaactcaaccccagaaaaagaacggatgagatcccgtaactctcagataaacaacaacaacaaaaaaaaagaactaatttttttttatttttttacaaacgcggccctaaccatagacacagataagtaacccgagatcacaagcccgcacgcattggcagagccccttaactccagacaaataaagagttgagcgaaaataaaaatgataattgcgcgtctctacccagacaaaacgagatagatttcagatttcactgaatctcacacacacccaaccaacgtactataggaaaacaactggccgatagatgaacggcgcaag

SEQ ID NO: 33902 - DNA, 370 bp, Glycine max
tcgtagtatgcgagcatcgttgttggtgggccccccccccccccccctgacaaaaaacaaatcccaccaacgcaaaacaatccaaaactttatgaccaaaggcctaagcacaatcgcagcacgcgctgaccgacaatatcactagacggacggaccaccacacgctctatgcacactcgcaggagcatcatagctacccagctcagagctcctagagaggacatattcacctatgaaacggaacggcacgaccaaccgcaggcccgacaccccgcataaccaaatgaccagggaaaagaatagaaaaaaccggtcaaacactgatctgaaggcctaaaaacggtagccgacgcatgacccaatatgaccg

SEQ ID NO: 33903 - DNA, 467 bp, Glycine max
gttcggttacaaccgggtttcgtagtatgcgagcatcgttgttggtgggccccccccccccccccaaaagaaaactaagagcccacaccgagctacacaagcccaatacatccaagaaagggtcagacggaaagacgtataacaaaagacccataatcaaccaaaaagggtcgacggcccgcatcaactgcggcaaagggaacgaatggcgcagggcgcctaccccgcgaatactataaagacgccgttgtcacacgccccgacccagaaaaatactaaggcacaggccacttcaacctcccccaccacaccaagcaaatcctttaccatgatgaaaacactgcaaaaggggaagaagacttctgtccaactcactcttccttgcgttacccggcaaaacgaagcgtacgacggagacaacgacgaccccgtcgattcggcggaagaacttgaggaagaataagacc

SEQ ID NO: 33904 - DNA, 470 bp, Glycine max
tggctgattcaggttcggttaaccaaccgggtttcgtagtatgcgagcatcgttgttggtgggccccccccccccccctaggccacgagatacacccgacaccaacggcctaacaaaaccccagacgaccggagaaaaagcgacctttaagacgactccgccccgggatggaaggaaagaagcgaagcgcaccgcccgaggcaaagcggcgcaacagacttaatcactagcccgaatcaacggtcgctcccctactagaccaaaaggaaaaccgttaacgatcgcggagacggtcgcctcttattaccgaaacggcttcaagaagccgcggaagtgatttatttacaaatgctaacagactacacacgcagggcggggacagcgctcccctctaaatgacccgctgacctttcttgcgcgccccatcggcgccggagacgaatcggaggaacggctctggtcgcggcacg

SEQ ID NO: 33905 - DNA, 422 bp, Glycine max
tggctgattcaggttcggttaaccaaccgggtttcgtagtatgcgagcatcgttgttggtgggccccccccccccccccccccccccccccccccccccccccaatacataaccctaaccccgaagatgattgcaagaaaccaccgatgcttaagaatccactacacatccagaccggagaagaaaagcaagaaagcacaaccccaagataattgaaggactggagaccctatttctcaccacaaaagaacgggagacacactaaagcgattgctacttacggaactacccaatccagctctcggcgaccgctgcagcccgatgctgggccagcctatataaacacttactctggacctgccgcgcctgctccatggctcggcttctacgtcacgtaattatcccacgaataaaacgaacct

SEQ ID NO: 33906 - DNA, 470 bp, Glycine max
tggctgattcaggttcggttaaccaaccgggtttcgtagtatgcgagcatcgttgttggtgggccccccccccccccccccccccccccccccctcgaaaagacacacacccgagaaataacaaccccctagaccccgcctcgaccagcatcatctacatgagagatttaaaaaaaaacgaatgaaaggctggccatagaggatgatctgcagcgacggtttactacagcacgaaaccctaacgggaacctagaccacgccccatcgcatattcctaatgaactaacaggagcgcggagggccccaaaatcttcctgaactaacgaatctagaggaaacgcccgctgacgctgagaacttcgcgctgtaaagcgggactcggaagaacactcccccgcccaaaaaacttccttcccacaattacgatctaacgtaacacgacggactgcagcccccttgcctaccagact

SEQ ID NO: 33907 - DNA, 489 bp, Glycine max
tggctgattcaggttcggttaaccaaccgggtttcgtagtatgcgagcatcgttgttggtgggccccccccccccccccccccccctagatataatacctactactaacctactacgacgaagacgagtaagaataactacagcactatcattaccgcaatcgggagatacagaactaaccactccacgatacatgccagaagaaaagaagactgcgacgatccaaaatcgaggcccggcgatctccatagggtaggccttcttaaaacggccttgagctattctatcgctcgaaaaaggtgacccctaggaaaagaatcgacaaactaagacatttaaaaccgccctgcggggatccgacccgccccagagaaaaaagactcctaataagaacttcacacaacggagtatgactgaaattgccctgcaatgcatgccctgagcgcctctcatcgcagaattcatgcgcttcctacgcgtcgagaccct

SEQ ID NO: 33908 - DNA, 454 bp, Glycine max
ggctgattcaggttcggttaaccaaccgggtttcgtagtatgcgagcatcgttgttggtgggccccccccccccccccaccacgcaagcttccctgcgacccaccaaatcttttcagaaaccgaaagaaatcttttaccccccctcctccggctcccggaactcggggcaaatacctccgcgatccccgacctcctttaccttggcgcaagcgccctaaaaagcttctaaaggcctcatggaaagcgcgccccaaatgattttaaagattaacgcgcggtacgacatcgcggataagttggcggtatatcttccctcctcgcacgagctgactgcgactccgcttcacctcgcgacgcccgtataaagcaatggggaactccggatctttctacctccctcataaaagatcttatggcttctttaaacccctacggcctaaatgacccgcaaac

SEQ ID NO: 33909 - DNA, 477 bp, Glycine max
tggctgattcaggttcggttaaccaaccgggtttcgtagtatgcgagcatcgttgttggtgggcccccccccccccccccccataacacataatcagacagacctacagacagacaaataaaagcactaacaactgtcctgccccttccggcgagatcaattactacttgccggccttcctcacaccgaccgaccgagccggagcaggcgcccccattcagggggaggaagatcgccagcgcgatcaggagagctctccgcccaaaatgattccgactacacaccacacacgggagaagaagacgtacgcccaaggccccgcctcctgctggatataaaagattacaaaaagcagaatgaggatcatcgccagacttagcagcagcagccataaaacgcccgatgacaaaaacgactaaaatcctaaaagggcaacccaaacccaaaacacagcagccaaatcatatacgacaaaca

SEQ ID NO: 33910 - DNA, 483 bp, Glycine max
gttcggttaaccaaccgggtttcgtagtatgcgagcatcgttgttggtgggccccccccccccccccccgggatcagaaaccgccgggaaaacccgaccctgactgatgacctcaccctcacaaaaatactcctatcctatcgagatcctcccgaccgaccgaacggacgggcctactttcataaaagcggcaatccctgttaaagaaggatgagcgaacacccaaatcccaccgataaaaggaaccttgcgctaagcacaaccaaaccgcgagaacaccgaaactaaaaccggccgaaaccctatataggatactgacgatgcacggaaaagggccatacatccatacagacgaagccgccttacactggaggagaggggaactagtttacttaagcaccggaatcgtgtcacttgaataccgtcctcacgaaaacgatagttcaaagaactttaattactcgctctggaccggaacaccgc

SEQ ID NO: 33911 - DNA, 449 bp, Glycine max
tggctgattcaggttcggttaaccaaccgggtttcgtagtatgcgagcatcgttgttggtgggcccccccccccccccccccctccaatcgacacggaccgcaacttaacgcgccagacacccccgcctaacttgagtaaaccaccgtccagaagagaatgcaataatggcattactatagatactatgacactcgctgggataattcccgccaaccctaatgcctcctctctaataataaaaccaataaaacaaaattgacgataaacaagagaccagaatgaggcggactataacgattatatgacgtccaccccgcattcgccaacgctccgacccgagaaggctaaattgctgaattgatatccgggacgaatggggccatgaaaacttctctggactacgcgcggcacttcatctcgggcacatacctgctttccccgccgcta

SEQ ID NO: 33912 - DNA, 479 bp, Glycine max
gctgattcggttcggtaaccaccgggtttcgtgtatgcgagcatcgttgttggtgggccccccccccccccccccccccccccccccccccccccccccccccttaatcttcagaaatttcaaagctcaaccgtcccaagaacatatctaatccagaacctcagacacacaacaaggacatcagacaacgacgccgttcccgcgcccgcgggggagcacggtcgtcgcgctccctggctcctttcctctcagagccgcccgcagcccgaaatgatgaacataaacagaaactaaacaaacgtaaaaccgaaaccacagatttaaaaaaacgataaaacagctaagaataaacgcagaaccctctggtggaatcgaaatgaaaccacaagatggcagatattgctcgaaccgaccgcctgagtacggacacgcgctgacaccacctaggtgagagcaatatacacaccctcgcgcacccc

SEQ ID NO: 33913 - DNA, 500 bp, Glycine max
gctgattcaggttcggttaaccaaccgggctttcgtagtatgcgagcatcgttgttggtgggcccccccccccccccgcgaaactgactcccgggacaacacacacaagacttacacttgagaggaaaaccatctaactgaaccaccgctccgggcccaccgaaaacaaaaacttacagaaaatacgcattctaacaagagaattaacaccaaagacggccaatatctgccctcaccacctcatctccgggccgggccttcgaacttcgaccgcgctccccccgtagcgttgggaaaagcaacatctcttgccgaactctcccggaactcgaacgagaaacgtacacccaagtcgttgcccgcttatagtgcggacctgctctccgagacaacggacattaaccagccgaacccggttcgcaagacctctccgatgatgtaaaccaacgacccgcctctcgcggcctaccggcggaactcaagcagggtgcacagccccc

SEQ ID NO: 33914 - DNA, 469 bp, Glycine max
ggctgattcaggttcggttaaccaaccgggtttcgtagtatgcgagcatcgttgttggtgggccccccccccccccccagtttcacgaaacggaatccttctagacatataaaccctaccctagaccgacatacgataacacgatagccagacagtttctaagactacagtttctaagactacattatgagaacagcacagacaaaaagctagagaagagggcaccatacactaaaaagcatacatgacggaaccagaaaagccaatgacagacaataaaaccactgagagacaatccctgagtcccaccctcgaactatattcagtccttaattaaataaaaggagagaggagagaggagagagcgcgaccatacatatactgctcctttaaccggcgctaaatcaattggccggggagcttcattaataatgagatctcatttgacgctgtggttcggaccagttcc

SEQ ID NO: 33915 - DNA, 505 bp, Glycine max
gctgattcaggttcggttaaccaaccgggtttcgtagtatgcgagcatcgttgttggtgggccccccccccccccccccccataatgaaacactcacgaacaacctagaacccacgcacatatactatttcttaacaccacaactcaacctgacgctgacggcgaaaaacttgcgacattaaaaaagaccaagaacgaagaattcaaaatgaaaagcttcgctttacccaacccacgaaagctctagacaaacatatggctaaactgaatggaattcaggaaagcgccaaagaaaaaatcggaagaagtttgataaagataaaagactcatacaacgcttacgaaggcaattgaacccgaatacgaagcctattgacactacccagcgacatacggaatatctcctttatgccctggatccatgatttgggcgattttaggaagaactgaacccggcctccatgagcccgaagctgacgagccggacttttcaagaccggccgga

SEQ ID NO: 33916 - DNA, 493 bp, Glycine max
tggctgattcaggttcggttaaccaaccgggtttcgtagtatgcgagcatcgttgttggtgggcccccccccccccccccccctcaaaaatcatgacccgggccaccacgaccaacctactcaaatcgccaaagcaatagcgacggccaacgaggagaccggcgctaagagctaaagatagcaaaaccacacaatattaatttcgccggaataatccggaaggagctgaaccactcagaacgagaggaaagcgctgaaccagcactccgatctttctgcagaaaattccagaaactcatgagccttctttcgcaccagacaaccagagaggatgccgaaacgaaaatatagcacggaacccccggcgccccaccagctcccccccccccgcccgcaccaaatgattttagaaaagctaaagactgaaaagcggaccaagcatctaaatgggggctggacgactgcctaatggccttggcgacgatgcttgccc

SEQ ID NO: 33917 - DNA, 509 bp, Glycine max
tggctgattcaggttcggttaaccaaccgggtttcgtagtatgcgagcatcgttgttggtgggcccccccccccccccccccaagaatcaaccaaagccaaacgaaccaacgaaaagatcgcattagatcacaaactgaaccccaggtggacctgaaaagacgtaaatcgctgcacaaaactgataacagagaagacacagtgagcctctccgagaaaaaaccacccaagaagtgatagcgaacgtcctccggcccctggtttacgcgaaaagatgaaaaattactagaagcaactcgaacctggcgacctgccgacaatccctctgcgccgcggaaaccctacacatgcactcagaagaacgcaagattccaaagagcccgtaagataagcgttgtgcggaacatccgctacaaaagaggggcgacccctcgaagataaagattcccgaacacaattggacggacaggaagggcgacagatccgcgcccctccaggcccccttctccc

SEQ ID NO: 33918 - DNA, 383 bp, Glycine max
ggctgattcaggttcggttaaccaaccgggtttcgtagtatgcgagcatcgttgttggtgggccccccccccccccccccaagaggaaaagagacccaccaaagaaaaacaaataggacacacaaacgtaccttcccacccactggctcgttgaaacaaacacacaactcaaaaaaaaaaaaggagaaacaaatacgcaaaaaacctagagcaccacacagacgcgaacacgaacgacgagacacgagggctacgttcactacggaggttatcctcctcagttggggcggtcgtatacctggttcttctagctggtggaaacccgaaggccggttcgcggccaaaggccctcccgcgttatttcagaactagagagcgtttcc

SEQ ID NO: 33919 - DNA, 506 bp, Glycine max
tggctgattcggttcggttaaccaaccgggtttcgtagtatgcgagcatcgttgttggtgggcccccccccccccccgatgcagtaactactccaacaccaactgaaatccggcacccatcatcgtacttaggacgacacgcatcgaattgagtaaacaggactggaagaccgccgccggataagaacacagaaagcaaacaacccctatcagactaactgacaacgcgatatcgagatacaggagcaatggagacctagaggactagaactttgccccgcgcacgccggcccgcctggcgctaccacaaggcccaaacaaagactgcgatacccctgacccacgacttgccttaccatcatcatcaacaagaggatccctatataatcgagatcctaaacgacttgtgggaccttggcttcatcattgaccgcctggagccactggactgcgtatggtaaccggtatgccagtcagtgtctgactgtagtcgacatgcgccgcac

SEQ ID NO: 33920 - DNA, 385 bp, Glycine max
tggctgattcaggttcggttaaccaaccgggtttcgtagtatgcgagcttcgttgttggtgggccccccccccccccccccccccccccataaaaaagtactgaaaagacgtaatccgacccgaccaaaacagcgctggacataataaggccaaaccaacagacatcacaagacttccgtatacggggccttagttgcgccaagatgagtttaaaaagggaaaataccgcgcggggacgcgagctgcgcaagcgccagcaataagccaagaagcgggcgaaaaagaaactaaaacacaaaagtgacaaatcaagaccgagcgtgcgataaaccttcacctgaaaccggctatacgcgagaaacaacaaaccaaagaaaaaagaaa

SEQ ID NO: 33921 - DNA, 488 bp, Glycine max
gtggctgattcaggttcggttaaccaaccgggtttcgtagtatgcgagcatcgttgttggtgggcccccccccccccccccccccttgatcggaaaaccgagctcttaaacatgaccaatcgaaactccaaccctgagatcgcacacactcttcccccgagactgagagacagacaccgagaacgaaacagaaaaatatgatttaggataaaagcagaacagaaagaaccacctccttgggcctcacaagaacaacacacacgcccccttatgacaacctaactaaggtctctcttgaacgatacgaaacgctcctaccccgacccatactggcctcttgggctcggccctacgctagcatgttgctgatagacgagagtgaatgttgtatgaacccgttctaattacttggctagctgcttacctttctgggaagagctgcggaccatctccccggatcgaatacgagaacaagcttttacctcctt

SEQ ID NO: 33922 - DNA, 490 bp, Glycine max
tggctgattcaggttcggttaaccagccgggtttcgtagtatgcgagcatcgttgttggtgggccccccccccccccccccccccccccccccctaaagtccccgtcccgcccaccacggacataatcagcgcctcggcctggatcggaaagtgaccagcattcatcacagagacagaaagagaagagaaaacgaaatctagaaggacgtaccaacaacaaacactcattagaaaaaaaaaaaaataagaaaaacacgcccgcgcctccttcccctaattgagccccagagcggcatattttgaatattcctgctgtacgctacggctgcgcccgcgaaagtgcgttgtactactaaatgaatgcgaatatacctctaatgacctatggcctttcgagatctctctcttcaagtctatgcgaatcgacgaaactctaggtcggcctagggaggaactgagcgttcgagaccgctagggtcgacgcgcata

SEQ ID NO: 33923 - DNA, 495 bp, Glycine max
tggctgattcaggttcggttaaccaaccgggtttcgtagtatgcgagcatcgttgttggtgggcccccccccccccccccccccccccccccccccccccaagacaaactagaccccacaaaataacgaacacagcaggatcagactatactatatgaacttgaactaagacaaaggccaacgatgcagactccaaagggcgggaaacaggacccttgccgggacgacgacttcacccgcaccaggagcagagatcacccggcagcacgcactcccccatgaactggactgctaatgctacacgaaacccgctcggccggaggggaagaagacttgcggacggccgcggaggatctcacatctccgctaacatgagacgaaaattgccgccactagataaccgagacaataagcgaaattagagctagttaatggttggacgtccaaggcgtagccggagcctggtaagatccgactcgcgcgaagggcccggcc

SEQ ID NO: 33924 - DNA, 444 bp, Glycine max
tggctgattcaggttcggttaaccaaccgggtttcgtagtatgcgagcatcgttgttggtgggcccccccccccccccaagataatgtaggacatgacaacagcgcctccccataacaacccgacatacagaagatcatacgggtctacggatcaccgaagaaaccgacgagccgcccgcgagaaccagacaagcgacgtcaagagcgcgttcaccaacacacacatgacacttctcatgaagcatgcagaagtccttaaaaccgatacactacgccccggcttccgcttcccactcctcgacgagagcgactataatcagcggaatcggaatctagacggagaccggtcagagatgtacgccgcgttctggatatccgctccgatctttaccaaggctctagtaacgctaatactactagcgtcggccacgatgcccattctg

SEQ ID NO: 33925 - DNA, 423 bp, Glycine max
tggctgattcaggttcggttaaccaaccgggtttcgtagtatgcgagcatcgttgttggtgggcccccccccccccccccccccccccccccccttaacatagaaatcgagaccccccagccttaaagaaaaagtttacgacacaaagacgccgcacaccacccgtctcgggcaagtaacccggaagcaccccgcgacaccgacacaacagtgacacaataaaaccagaaaaaatgcaagaaattgggactacaaccaaagcgccaccggcacaccatagcgtacgcctgcgtatcgaaccctgccggcctctagtgatactaaagcgagccgccgatgccgctccgcctgagccccggagttgcgccttgtgaataggtacctggcgttatggcccgaccactgtaatagtgcctgactacc

SEQ ID NO: 33926 - DNA, 516 bp, Glycine max
tggctgattcaggttcggttaaccaaccgggtttcgtagtatgcgagcatcgttgttggtgggccccccccccccccccccccccccaagaggaacaacaaaatcgaccaccgagcaccccacgtcgaaactcagaagtccactcagagcacgatccatgaaacaacgacactgactgactaaaaataaaaggccatagctgatccctcccaaatgcgccttcgaaggaaacatgctcccgcgccttataaaggccgcgaatgggtaacttgcccatgaagaggggaatgcgacgaaaggcgctcctcctcattatggcatgagctaagcggatgaaggggcggaactggcggtgagtcctgcttcagtactactctcgaaaggttgtcctacggaatcgatcatattaactagcctaaagagaacgccctagactgcgacaatatgacccatcccggcccttatgatttgaatgacgatctacagcctcttttatatcaagccctcggcgcctta

SEQ ID NO: 33927 - DNA, 455 bp, Glycine max
tggctgacttcagcttcggttaaccaaccgggtttcgtagtatgcgagcatcgttgttggtgggcccccccccccccccccccccccccccttaacccaatttttaacccacctaatcgcgaagggaaaacgaaaaccgcaaaccagggagctcctcagaaacctaatccaacatcaacagactctctggcgtgaccctcgcgcgcggggggagcggggtccctccccccacctaggattttctataatcaagccttcaccccccaggcgatcgagcactcgacgacgctcgctaacgacatcccgcacaaacaaaaacacacgagccaagcggcgacaaccgtcggccgagacgagcagcgcttgcgcgcccttgacgatatgcggggccttaacgttaccgataatcctattccttcccgcttatgcctaactttacctactgactcccgcct

SEQ ID NO: 33928 - DNA, 470 bp, Glycine max
ctgatgacagaaaatgcaatgcagtttattattaattaattaaaagttctacatacatgcatatcacataactacaacatagttcaagacaactaataatgcataagtagtgacaacatcgaataacttcactacacaaatcaactctctttattccaaagaatatggcctcagttcttcttccatttgcaccatataggattctcccaacactatcaccacaactaattactgatgattagcccttccctttttgatgtttctgttatctttttcttcacaagtcgacccaccaaaagcaccctctttttcactttatatgatgtcatatcttcctcattcaagcagatgcaagttaaagctcagtttatagattttgttggccatggaacatttgtgggggcaccctgttcggattgtttttttctagtagccatctcgagaaagcatcaagtgtttttgtgtcagat

SEQ ID NO: 33929 - DNA, 516 bp, Glycine max
atgcttagtggctgattcaggttcggttaaccaaccgggtttcgtagtatgcgagcatcgttgttggtgggccccccccccccccccccccccccccaaaacaagagagagccgagagacgaccagtagaaccaaaatattctcttaaaccccgaaacattgatatgacagcgaagaatatttcgactggcaacccggcccacctaaccaaagaaagtaagaaagtaaataaaagagaaaccggatacgactgatattaccggtgaccccgataatacgcttgatcatggctcttaagataaaaatgcttgacaatatcaccaggatgaacccgaaaacgcctataaaccgggaatataacacgaaaaagctcatagctccctttacctcgaacaattaaagcgaaactggactaatccctaccctgggagcgataagcggagacccgaaaaggaccaccattaggagacacgcgcacctttaatacgaaccgggattaactcttcggtacccctc

SEQ ID NO: 33930 - DNA, 450 bp, Glycine max
tggctgattcggttcggttaaccaccgggtttcgtagtatgcgagcatcgttgttggtggcccccccccccccccccccccccccccccccccccccccccccccccccccccccccccccaaaacaagagagagccgagagacgaccagtagaaccaaaatattctcttaaaccccgaaacattgatatgacagcgaagaatatttcgactcgcaacccggcccacctaaccacagaaagtaagaatgtaaataaaagagaaaccggatacgactgatattaccggtgaccccgataatacgcttgatcatggctcttaagataaaaatgcttgacaatatcaccaggatgaacccgaaaacgcctataaaccgggaatataacacgaaaaagctcatagctccctttacctcgaacaattaaagcgaatctggactaatccctaccct

SEQ ID NO: 33931 - DNA, 364 bp, Glycine max
gcaacagtacgagcacatttaaatgcttcagtggctgattcaggttcggttaaccaaccgggtttcgtagtatgcgagcatcgttgttggtgggccccccccccccccccccagagaggaacggagccaccgagaccgaacccacacctcgaacctcccagattaccccgagccctgaactttatgacctgatctccaccttcatcactctaaacagagaagatgaactaagagagtcagaaaatctgatgcatgattaccctcccggccacataaaaccttacctactacggagcctcatgcatgattacacacaacgacacgcctaccggattgataacgcgagaagccatacacatgacat

SEQ ID NO: 33932 - DNA, 353 bp, Glycine max
ccgttgcgtatttctctattcattctaagcgaatccgaagcgaagaccgccgaacgaaacgatggacttgatgataagggagggtggggtcaaaaacgacgtggtggtggtactagccgttgagcggcgcgaaatagtgggcgtcgtgcgagcctgtgagcgcgaagacggaatcgtaatacgcgttaaggcgccggcagcagcggtggttatggtattcgttcgtggtactcgcgggaacggcggcggcggtagacggtcttggcgtcgtggctgttgagggttgtggttgtcgcggacgccgttgaagaaacacgggttgtcgcagtggtggagatctggcgcgggggcgg

SEQ ID NO: 33933 - DNA, 498 bp, Glycine max
tggctgattcggttcggttaacaaccgggtttcgtgtatgcagcatcgttgttggtgggccccccccccccccctataaatataacgcgacatcatccttcatgacctaagataataaccttcgaaagaacacggaataaactaaaaggtgcaccaacccccaacgacaatacttaacaccaaagagcatacctgactactctccacacccccggcgaactttcccctcagggcagacaccagagcgaatgaagaagcatcacgctgcgagccaaacatgctaacataaccgtggaataaccccaactatagaaaaaagatcaacctaactcaaagaggatacaaattgaacgatgacaaaggctccactgcgaccctaacgcaagatccgaaatgaactgcgactaggccatgcattccccggaatcgttgcgctccgaaaaagggtgtagatcatacaattgaagggtgcttaacttcaacatgatacaacgacgc

SEQ ID NO: 33934 - DNA, 873 bp, Glycine max
taatgatgagggactcgtctttactcggatcaaattttcatcataatcatccattcttttcttttttgaatgatgccaggctagtcttcactcagatagataaagccagtgttgagtgttctttaaaccttgtgttactcatgtcatggcattttgatcctgtaaatctgagacacttgatcaggaatcacaagaaaacacttgtgaagttgatggccggatagtattcctagtcacataagtgtatgttttacttgaaactgagaacacaggtaccaaattacaaaatggaatttacaggagatttgtaactgtctcaagcatcaaatcaaacttttgtttggagaatgtaatttcttgcccgggcagaacagaagagaaccacaacaccaaaatcaaaactaacaaaggcactgataaagaaaatccccacagaaattgggccatccatcctatcttcactgaaagaacttccttgcgcagattgagtccttccatcatcacatactccactggaagtttccatgcacagatctggatttccagcaaatgcaccgggaaatctcccatacccttgcttctggggaacatatccagaaaaacagttgtaggaaagattcaaaatggacagatcttgaaggctagaaatgtttcctgggatatgtccagacaaggaattatgtgacaaatccaaggctttcaaactatgcattttctgcaaccccggaagctgtccgtaaagaaagttgcatgacaagttcagatattctaggccagctagaccaaataagccccttggaatttccccatgaagcgaattgctggatagatcaattccaaccattgaggaaagatcataagtgaaactgagct

SEQ ID NO: 33935 - DNA, 476 bp, Glycine max
attttatacgatacatcaattcaacatctcgaaaacatccaatctattaacaaatctctaaaacataaaaatatttactctatcacccaatctccaaataatatataaatttccatacattgtcagtacttttttgtatttaatgacttgcatttgtgaaaaaaaaagggttaatattaaaccaattagaaattgttaaccacataattttgatatgtgatatagatataataatttgtaaaaatattttatttatttatctctttcaagtcataatgaaaaaagataaacacaaaaaatacaattataaatttttttatttaaattgttttacttgtaattttttataatttttaaaaaaattattatgaaaatcaatgaactatatattatgtttgtaatcccatgacttatacatacttctcctgtctttattatttctaagacattatagtttaaaaaataaaatccatttt

SEQ ID NO: 33936 - DNA, 848 bp, Glycine max
ggttgggggaaattcatatctacaaagttcatttcttgacaagacgatgccatacattacagcaaaatatatgttcagacggacctacagagaagaaactacactatttatgcacaatggcttctgacattttcataataaattgaaaatcgttggaacaaatagtttgatctccaggtttccatgaacagcacaacagataatcatctccagcttgatttatctgcgggctccacatgccttgttgggtatagaatcttactggaaacagctgctttagaatgaacaggatctttctctcgatttgttctatgctcagaacggaagggaaaatcatcagcctcaagcatatgaacaatttgacccatcttcggtcgcttattgacatccaagtctatacagcgaagacaaaccagtaaagctcgcttcaaagatcttggatagggctgaatatcaattaaaggatcaactagctcatcgcctcgacgacttgcaaccattaccttaaaccaatcaaccaagttcatctctccaggtggtctagaataatcaatgggactccttcctgtaattagctccatcagtagaatcccaaaactatacacatcgcttccctcattaagcataccagtgcttgcatactcaggtgaaacatatccaaatgtccccattacacgggttgtcacgtagcttttctcagaccctaagagcttggctagtccaaagtctgatactttagcattccactttttgtccaaaagaatgttactggattttacattaaggttggaccactttgggttctaatccttcgtgcaagtaggctagcccttttgcagtcccaacag

SEQ ID NO: 33937 - DNA, 360 bp, Glycine max
aacggcaggggaataccacctaaagaattaaagaaacaaaattgggatattaaccaaatgaatctctgtacacttggccaaaggtggcggctaccaatcctcctatctctacttaattcagaactaatgaaatacaaagaatcaacgagcgtgatcgaatgtgagccgtaagatctgatgaccatggaacaatcaacgctgcacttccaagtacttcacctaacgcttgtccagccatccgattctgaccaattcgccggcgtctgaacggttacaagccgccggagtctattctccggcgaacacgacgacccggattcccacatacgccactcatcagaatccggggaagacggaagc

SEQ ID NO: 33938 - DNA, 366 bp, Glycine max
tccatgagagactagagttccatgtctaagagtacttgccctctaactactcttatccgttatactctcctgcttcctacttattaactactcgcgcctgctccaatcgaaatagaaaatagccttccaaactctaatccacctacttcttctaagctaaacgcattgtcgacccaaactcggtcttaaaaatctgagagccggccggacaagctagaattagctttaatacacgaatcccttttcttagaacgaatcatagccgccctgctcgcgaccctcgaattactgcatatcttctgagtatccaaaagagcaggcgaaaatcgacaactggtacacagagtctacctcaaaaacctaaat

SEQ ID NO: 33939 - DNA, 520 bp, Glycine max
atgcttcagtggctgattcaggttcggttaaccaaccgggtttcgtagtatgcgagcatcgttgttggtgggccccccccccccccccccccccccccccccccaagagaaatgacgacagcggagaaattgccgccatcattgggaacagacgactcgactgtctctaaagcccagacggtctaaacgaataagcctaaatacgaaaacggccgcagccaaagcacatagataactggggcagactaaatgagataaaaacataataggaagcctaatcatgctcaagagggaagagcaattcccagaaatgtataaagaacccccggagcgacagatgagacaaactcaagagcatactaacggcgactgtatatagggagaacggctacctccgccgatttacattaggttcgatgaatacactaagaaccccccttaaatacccacagcccacccccgcgcccgcttgccctgctgacagaaaggctcagacaactatgagaacgtcaatgcacct

SEQ ID NO: 33940 - DNA, 520 bp, Glycine max
acatttaaatgcttcagtggctgattcaggttcggttaaccaaccgggtttcgtagtatgcgagcatcgttgttggtgggccccccccccccccccccctagccgcaaaaaaacttgacaacctctttgatccggaaaagaaccaccggttaacaccatacagaaaactctacccaaattaacacatttaactactctacccaaggaaaaaaagcgctaatgaaaattacgactagatgcacaaattaacatataaaaaaaagcgccaactgatcctgaaaggataacgggcatactggtgcacgcacaataaaaactggtcctcgagcgaaccgggaagaaaactaacgagcccagctaagcccgagcttcctagatctagcccctgcggcggaccgctacaagcggccttaagatgccgcggacctgcagtgggaggacctcctggaggagtattggttggatataagcgtgccgtgccgcgtaaagcacgacccggctcccggacaaggtggaggac

SEQ ID NO: 33941 - DNA, 395 bp, Glycine max
gcaacagtagcgagcacatttaaatgcttcagtggctgattcaggttcggttaaccaaccgggtttcgtagtatgcgtgcatcgttgttggtgggccccccccccccccccacaccttgaccgacttcctactacaccaaacctactcccgaacacctacatgagagaaacttacgcttaggacaaaaggcacacacatgagcaagacccaccccattaggagaattgaatatacagccagacaccaaaacctaccagactgggcaaccacacgcgtgacaggccccgaaccactcgggcgcgtatgcagaacaatccgccggaatccacgatgacgaggatctcgcacatttatgactacgcgacggcgaacctctaaacctcaaccaacggga

SEQ ID NO: 33942 - DNA, 536 bp, Glycine max
  unsure (1)..(536): unsure at all n locations
atcgcaacantncgagcacatttaaatgcttcagtggctgattcaggttcggttaaccaaccgggtttcgtagtatgcgagcatcgttgttggtggcccccccccccccccccaactacgcgcgtcgacaaacctataaaagccccacctgacttcaaaccaccaattgggacggacgacctgctaaatggagagaccctcacctcgactcgactcggacaagaagagcagaaagcataaatctaacaaaaccaccaaaaaaacaaaaactgactggctcacttgctcacttgctcccgctcactgggacgaaaccctcaaagagcacacacagaaatcataaattatataaaccttttaagcccgtgacttgccataaggcctcaaaagggccacacgttatccgaccagagaagctaaccttgatgaaaaagaaaactgtactaccctacgagacccaccaataagactcaaagcaaccaactccaccacatagccacacacacacacataatcaaattcacccagagtatact

SEQ ID NO: 33943 - DNA, 431 bp, Glycine max
gttcggttaaccaccgggtttcgtagtatgcgtgcatcgttgttggtgggccccccccccccccccccccccccccccccccccctatggaacacgacgagactctactaggagcgacccctacacgcagcacgacgaacccccccccgccacccccaaagaagcctaaacagacgagcgtatcgaatatatactctaccctccagagaaattagacaatccaaaaccagataaaagacagatagagagaggaaataaggacaccaaagcaatttcaaagcacccggcccgggcactaccctcggccccgagcgccgaccaaccaaccaatgagaggccgaagaatcgcgtgtatggacctctgcccgggatcgactaaatgaccacacgggaaaatgaccggaaacataaagggagactgacacgggagc

SEQ ID NO: 33944 - DNA, 526 bp, Glycine max
cgagcacatttaatgcttcagtggctgattcaggttcggttaaccaaccgggtttcgtagtatgcgagcatcgttgttggtgggcccccccccccccccccccaagactgacatgagactcatgaccacctacaaacaccaccaagtcaggcctcatggaataccgtccagcccataccccttaaccctcacacatagagaaagacaaaaataacaaaaacaactcccgcccacgcagacgcggacaggctcaccgcgcaaaatcggaaatagaaatagccttaaagaaacaaaccacagggcccctgctggaagagataaacatggaacacaaatctaaccccaccttcaatagaaatcaagaatccggagaaacctgagcttatccaggcggatacgacgcctgacgatgatattcaaaatatcgctgaaaaggatcattggcatgcttcactgccggccgagctctctgagcctcacatgcctaccgccctggccgctaccggccggaacgcccgatgaagct

SEQ ID NO: 33945 - DNA, 657 bp, Glycine max
tggctgattcggttcggttaaccaccgggtttcgtagtatgcgagcatcgttgttggtgggcccccccccccccccccccccccccccccccgaaagcactgtacacactcctacacaccccaacgatccaccacgaaactgccccacccacaagaaacccgcgaacaagcatgaacgcagaaccgcggcgagataaataaccgagaaatattacaaacctagaaactctcctcaactaactcataagccaaattacggcataaatgaaaaggacaatatgaaaaatgaaagattaagacgtaataataatttcagatttcggagatacagctcttccccctcgaactcctctcacgagctactgcccctgccaaaaccggaccgatccgcttgcgttagaagacgctgcccacgcctcctgatagtaatgaatctctctcacctgactcgtttccccgcaccgccttaaccaccaccttaccggacaagcgcctgctccttagactcgacttaccggaagaaaccctacctctcagaccgagtggtaaagcggaaatcgactgcctcgactccacaactccgcatgagccgaaccttgagagcgctgaaggaaaccaacattggaaacgaagaccccttcagcagaccccagatca

SEQ ID NO: 33946 - DNA, 396 bp, Glycine max
gttcggttaaccaccgggtttcgtagtatgcgagcatcgttgttggtgggcccccccccccccccacaacacaaggttgaccacaaaaaccactgagaaataaggatgaccattcaaaatacgcgcccgacagagacacgctaatttacccggaagccccagaatctggtcacccgacagagagcacagacaccaaaaaacaacgaagaggcgcacgcacacggagaacacgttcaaaataaaaaacacgaccaagaaaacattatataccaccctacatcgtacgtacgaagattcccggactccgctcagcaatataaaggagcgaagcaatacgcaggctggaaacagcccggtacggactatctacccgccaaacgcgaagtgatgcctgcc

SEQ ID NO: 33947 - DNA, 407 bp, Glycine max
gctcagtatttgtctcccatttttatttattggactgtaagaaacatttaattattacattacgacgccctctgaatccaaaataattgcagaaagaatgacattgacaagcgatgcagtataatgggaaaatggaatgcacaaacatattgacatataccaatacaaaggcagtttgcatatatttttcttatgactgggtgcgaaccgtgcattccagaggaagaccctgagggaatcgtttggggtctgtgcaataatcgtaaatcatgtaattcttctgcacccattttagcttcttctggattgtggaatcaagctgttgagaatatagccaagctttttcagaagaggtgctggagttgcatgaagaaaccccattggaccaaacgcaaccattggctctg

SEQ ID NO: 33948 - DNA, 287 bp, Glycine max
agcgtttaccacacggcaaagtaaaagtcacagtcatacatactactgccctactagttaaaacaaattaatttctttatacagaaaaatttttgattaaaaaaaaaatgaagtagtttccccaaatgagacatggcgaattcagctgatccaactgatgcccacaaatgcaataatacatacagccctaaccatatcagaattataaaaaatcaaattacacaccacctgttttttccacactatatagacaatgttttttttttttagaaggattcatgaatttt

SEQ ID NO: 33949 - DNA, 400 bp, Glycine max
aaacaaaaaagatagctgagatttttcttaagcaaccttggccataattggccctaccatcattattgcagtacaaccactggaattgagtcataaccaatgatatcaatccaccaccgacataaatttcaagagtaagcttcaaatagagaattgctttgctacattattagaagggggggatcacaacttggaaaccacaatgccaattagctactactttttttataaacaacacatgttaaagcaatatgaagtaaatacctcacagagcctttgttctcgggggcataataatgaatacaatatgggggggacagataggcatggaactgacctcctataccgtaccgacaaaagcagcaaagatttacatggccccaatgtggcagtgtacaag

SEQ ID NO: 33950 - DNA, 421 bp, Glycine max
acaaaaataaaatttcaacaatacgaatagacatcaaaatgtatcaaaagtgaatataaggctatataaaaaaaaaatatttttgtaatatcgatccactaggagaatggctacgtttcagtcagggaaccaatgtcatcaagaaaatatacactacctaaaataaagccagaacaaaacaagaaatttcgcaagaaatactaagggaaaaaaaaaccggtggaattttaatctaatggatccaccattttttcccgtaatcccaaccgcactctgtgggttgaaacgcagcatcgggggagatagttgttgttgcgttacgcgatttcagcggcacgtgcaacgcacacccgaatccttgggcttcacgctcgcactcttgaacagcaagaacttgaaccgaaccaccataaagagcttc

SEQ ID NO: 33951 - DNA, 541 bp, Glycine max
aacaaataacaaataatttcttgaaatgaatgttgaccatatttaggaaccacatctgtcagacaaacctttacatcactataacaatcaacaagacttatcaatgtacaacaaacttgcaggaactgaagtctgacaataactatgttaactaaataaatccaactgtgtatgtgggaataagggattctgaattaacttgagttataaaattgttgccagatttcggtcatcatctgaattaacaggaactactgcagggccaatgtctgaagcctcctctaagtgcgtctttgcaaattcatcaacagtccctttcctttcactataaatgatctcattcctttccaccgctgcctgttcaaccttctccttggtcatcgtgctgacatccccggctgcctttgctatagcggtaaaggcactagaaaaccatgaagctccacttattacgtaagaattgttcatgatggcagatccagcactatttgccttttgctctgcagcagccatagcagactttgtcatttcagaaagctga

SEQ ID NO: 33952 - DNA, 426 bp, Glycine max
gcagctagcacatcaaacaagtggcgacagacaaagatttgtgagggtgatccgcgctgagaagagatggctaagatcgccgcggcggcggcagcggcgctgtgcttcgcggccctggtggccgtggccgtctgccaaggcgaggtcgagcggcagaggctcagggacctgcagtgctggcaggaggtccaggagagcccgctcgacgcgtgccgccaggtcctcgaccggcagctaaccggcggcggcggcggcggcggcgttggcccgttccggtggggcaccgggctccggatgcggtgctgccagcagctccaggacgtgagccgcgagtgccgctgcgccgccatccggagcatggtcaggggatacgaggaggccatgccgccgctggagaaaggctggtggccatgggggcggcggcac

SEQ ID NO: 33953 - DNA, 793 bp, Glycine max
tagtggcggcagaagcagaatccgaagcgctgcgcctcaaggccatggcggagtccaagttcaaagcctccaacaacgccaaatccgctctcaagtacgccaaccgcgcccaccgcctctgcccgcacctcgccggcgtgccggagaccgtcgctgccctctccgtcctcgccgcgccggactggtaccgcgccctcggcgccgagcccttcgcgagcagcagcgtcatccggaggcagtacaagaagctcgcgctgctcctccaccccgacaagaacccccacgtggcctccgaggaggccttcaagctcctcggcgaggccttccgctttctctccgacagaaaccgccgccgcgagtacgacgccgagcttcgacgtaaaatcgaggcggcggagagtgagagcgagacattctggactgcctgctccacttgcaggctcctgcaccagtttgagaggaggtacttggggcaggaattggtgtgtccgagttgtgagaagggttttagggctgtggaagcggttcagagtgatgatgatggggatgttagggttaggagtaggaggttaaagttgaaagagatggagaagagggaaattggggtggaagggaaagtggggaatgcgaaggaagggagattggggaagagaatgtgttcggttggggaggttttggagagggctaaacctagtaatagtaagagggttaaaaaaaatggggaggaaatgatgacattggctgaattccagagtcaagtgaagagaaaattgcagggggaaaagttgaaggc

SEQ ID NO: 33954 - DNA, 529 bp, Glycine max
tttttttttttttttttgtgtcattttcaaattcatagccatcaagggtgcggattgaaaatagcatctcaaacacgccagaataagattacaatcccaaacacgcaaccaaacaacaattgttacagcaccaatccccagtatatattaaaaagtaaaacgctcctatgttttcccccctagtaaataaattccaaataataagtacataaaataaaacataagcaaaaaaaaactaacatggatgttagtttcacatgaacattagaacatcactacttatgatcaagcccaatcacctccccaaaaaaagaaaagtaaaaaaaccagaaatttacatattttaattagaagttccttccaggttctcttccaatttgtttttctacgtctgctttagactccaaacaaatattcttttacgcttttcctctcaggtcataaaaaacaaaaaaaaagagaaatttcttgagtactttcagggaagatgaaagagagaagaaggattatcttgatcagaccaatgagt

SEQ ID NO: 33955 - DNA, 518 bp, Glycine max
tcggcggccgcgctttttttttttttttgaagaagtagattctattcattcttcccgctgcactacctctctctctctcttcacctccattcgcacgaaatcatccctaacaatgctcatttcgttgccgtgagtgactagttcaggtatacgcgtgtgcgacctgtgggattttgtgtgtacgtgggcgtgcgtgcatggacggtcgcgggaggcaagggaaaggggtctgatcgttgctcggtcgttcgttggagcctcgttgcttagtcagcctcatggtggcggggccgtaggaatatggggggccgccatttacttcgttgcttgggatggctgtgtgcgttttgaatgggtggtccgggtgggtagcaaaacttatcatcagttggtgagggtacgggtgccaggaggtgcatggttccgtagggccttcgagtgtggaaagtcatatcgctgatggccgacatctgcattttgccgcagattatgctgtggaggttttttccagtactacg

SEQ ID NO: 33956 - DNA, 562 bp, Glycine max
ctattctaagaccatatgcattcatctcattttaaatacccaggccctcgttcactccttagtaggcacacattgcacaaactcgaaatatattgagctaattacagagaaaataaagaatgaggaagacagtgaagatttgtcaaatgtaaagaaccaaagtattcacaaacttgatagcttctacaaaatattaggcagctgagaatccaatctctgctgcaattccctaatcttcagagacagttctgccttttgctccttgtagttctggagcaagtattcttttccttctattacctctttcaactctcctacttgccttttcagcaactcaattctctcctcctcatcccttagtttttcaggggattcacaattattctccccatcaagatgcccatttgaaaggtcatttctaatctcagcaggaaaaactgtcaccttggaagatttgtcatggtgaacaaatccaacacagtgatctgcaattgctttccttagccgttggatctctctctcggagtcaaataagtcactgtttgtagcatcaagctgcaat

SEQ ID NO: 33957 - DNA, 220 bp, Glycine max
atacacgaaataaactaattgcctttattaaaagcagttatagttttatagattcaccactcttcccgtgtactacaagtacttacaaaaacaagtgaagcgttccattcctcaatgcccaaaacgcagcgtttcgtcatctctcagcggcgcggcttgccaagccgaagctgcgattaaggggcggctatgccagcccagtgtcaaagagccttgattc

SEQ ID NO: 33958 - DNA, 267 bp, Glycine max
ggggcttgcatgtggctctgttcctcgtccttctcgggctgtcgtccaatttggcagccgggcagatcctgttccagggcttcaactgggagtcgtggaagcagaacgggggatggtacaacttcctgatgggcaaggtggacgacatcgccgaggccggcatcacgcacgtctggctccctccggcgtcacactctctcgccgagcaaggctacctgccggggcgcctgtacgaccttgacgcgtccaagtacgggaacgaggcgc

SEQ ID NO: 33959 - DNA, 714 bp, Glycine max
ttatttttttgttttttttttcctataaaaaaaatcaatgtaatacaaataaatatgcaaaattacaaaggcacaaaaataaaggtatactattgcatacaaactaggagcttttttttttttacctaagagtacaagagtccccagaataaaattgcgcaccaaaaatgaactgcaaagaatagagtaaaacatcggaagtgcaaaaaaagaaaaacaactgacatgcaaaacttttcttgctcttgccagcatctctcaaaattgttgaagcctctggtaaggattcatttccataattccattctaagtccagtcaagcttgtcgccttagaaaaccatctgtagtaaaaagcattgtcttccgttcttgccctgaagataaaagttcttgcattctttctggccagtcagaatttaatctgcgggcaaaatcttccacttccctgcatcaaaaggtaccacccaaataaaatattagggtgcatcataccatcatcttaaaagcactctagtgtaactaccatgcaaccatctctttatatcaaagagataactttgattacctaaaatgaaaaggtaaaaaaacatggaaggtaaatagagtcatgaacattgccactaggcttaactcaagtgtgcagaaatcataggttccactccttgaaaaccaaaaagatataagagttcaaaacataccagggccgaccgaat

SEQ ID NO: 33960 - DNA, 514 bp, Glycine max
aattgaagtatagattattaaatttcacaccaaattaacataaaaagaaacatgcatgtttcacgactagtgttacaattgctttatatgttgcagtttagagtgaattttggagcaagatgttgaagtatgcatgatcagaacaagtcatgatgagcaagctggtgttgcagaaagcaaatgttttgatccgtccacaagtccgcaccaccaaaaccattgcctgctatgtctgagtagtagctatgagatgagcaacttccagcatcagcacccataagattgtacgacgcgctcgagtcagagagagaaggcgcgtgggcatgaagcgctgatgacaacaatccactgtgtgcttgagtgttactgttggagattaagctgctttggtgggcttgggcccatgatgaggcctgagcctgaatccgctctagcatgcgtggcctccgcacgatacgcaaagtgtccatgaattgcttgctgttcacatcacattttagttgcttagcctgct

SEQ ID NO: 33961 - DNA, 501 bp, Glycine max
gttgtaagattttaaaaatgagtttaattattaagcagtagatatccaaatactacaaaaccgtttacacaaaaacacaaatgctatatatcaggagtcaggacacagactacatgacctttacatatctcatctggaaactttacaaatgaaagcatcccatagcaattcatctgccactcccaaatctagcaacttgtacaatctcacggtaagtggtgtgtatcgccttaaccaattcagaaagaaagtggttgtctgcaaaaaactttctcactcattaaattcaccatcaatgaagtcctgaagtgcgatcattttgatagagttggccttcaagctgtttatagcttcagcagttgccagagctccattaactgttgtcacgataggaaccttgtaatccaaagccatccttctcagggccagaccatctatccgatcaagtgcatcatctgaactggttaccaccatcagctgaatgtccccattggcaatcat

SEQ ID NO: 33962 - DNA, 575 bp, Glycine max
gggaaagattatgttcatcaactaaggcttataacagagttattaggttcacctgttgatgccagccttggatttctccaaagtgaaaatgcaaaaagatatgttcgccagcttccacaatataggaagcaaaatttctcagctagattcccaaatatgtcttctgaggcattggatctactagaaaagatgcttatctttgatcccatcaaacgcattacagttgatgaagcactatgtcatccatatctttcatcacttcatgacataaatgatgaaccagttggtcctgggcaattcaaatttgattttgagcagccgacatgcactgcagagcacatcaaggagctcatctggagggaagcggtgaagtacaatccagatccccccagtcagtaattctttcttgaataatgattttctcattattcttgggtataaacatccagagagagataagtgattgatataatttgtaatgtaaggtaacaaaaatgtgtctatcattatcaacttggccttgttcattttttgaatatcaatcatattttgaaaacaaaaaaaaaaaattaaaa

SEQ ID NO: 33963 - DNA, 585 bp, Glycine max
cgcgattttgcagcttcaatgtctccccagtggtgatgctaagcttctctgtgacactgttgctctgaaatctcatactagtcaggggtttcatatcctcttttttctctgtagttttggttttaatttttaaccgactaagattactattgtattctaggagaaaatatatgttcatttgatcttttgtcttaatattcatacagtttactatccttgtttggttaaaatgattaattcttgtgattctaactactgaaatatttttctgtagtgtttgtttgccaccgagacatttagcattggtttgaacatgcctgaataatttgttcaaatgagtggtcgtgctggtcgacgaggcattgatgaacgtggaatatgtatcctcatggttgatgagaagatggagccttctactgctaaaaatatggttaaaggggtagctgatagtctaaacaggtaaattgttggtttaatttaattttggagagtttcatatctgacaaggttctgccagataatggtttactcgtccattttgttagagatcttaatgattctgaaacttcggaaacaggtttactt

SEQ ID NO: 33964 - DNA, 425 bp, Glycine max
ccagactagaaaacccttgggttattaagcacccgggcaatcttgctgtgtgggatggccaaaacatcaaaattaaaaccaacaacagacaaaatggtgttgtagaggagacttaggtacaaaacggggtctggcatccagaatccctgtgggtttggtccatgttcactccctgaggccggcagggagggatgccccagcggccagctgccctcgccctccggctaggcggctatgcttcttgggggaggctgcctggaagcaggtcctgcttttcaaggggagacaaggggggctccgtccactgagatcaggactggacgattttgcagtttgttgtagagacgaagcgacctgtgtagtggatgttgcatctcaccacgttgttggtgaagtcagactccagaacaatgtacttggggttc

SEQ ID NO: 33965 - DNA, 336 bp, Glycine max
  unsure (1)..(336): unsure at all n locations
nnnnnnnnnnnnnnnnnnnnnnnnnnnnnnnnnnnataaactttgtaacattaattaatgattgaacattttaaccactgacacagtaattggtgcagccgtttggtaagcatggcatataccttatctgcttagccacaaacacgtatttcaagggtacaaacatgcaggtgggacgtcagcatcaatttacgccatcgaataacctagactaggatgtggcattttgtgtcacaactgtgtagcgttaacgcggcatccatgtggtttgcatcaacaacacagaggctaaggcatagggcttacagaacggcagggacaatcatcagcctcaag

SEQ ID NO: 33966 - DNA, 488 bp, Glycine max
tggctgattcaggttcggttaaccaaccgggtttcgtagtatgcgagcatcgttgttggtgggcccccccccccccccgagaagagaaccctaacgcaagccccagaaaccagtggccgaaaacaaccataaaccgaacaatcagaggattgcggaaaactaccctttactcaggacataaaactagaatagcaaaagcaacagagcaggataacattaccccgcaccgagacaaaaatagcaatgccctcctccattatccccccccccaacccggctgaatcagctcgaattaaggaaaggcactcagagccgactgaaaacacaaaagctactacaggaaagaggataactgcacgacaagcgaactggagcacccacgctaagttataattaatttgtgggaagttcttatatattaagacgaagcgccataagcatagggtatccggggagacccggaccggagccctacgccggaacataca

SEQ ID NO: 33967 - DNA, 938 bp, Glycine max
gctattcaacatcaagaccagctgttattctgtttcaatgcaccaaacgtttcaaccggtgccaccacaaaggtacagtttactgtctacactgtcgtgaaagcagaactctcatggaatcacactagaaacaccatccgtacagtatgcagtatagaaagtcgctgagaacccatccacaatcatctgaggctgctctggagttaatcggtagagggaataagaaacttgaggaaaggttcagccttgggagcgatggatctcacgtcctcaaatttggccatttcaaaatcctcgtactggaagccaggggcacaggtgcagccaacaagggagtaatgcagctcagggtccctcttccgagacttgacaagaacgctgccatcagatgcgaacgactcgacgtctagtgtggggaacgacccaaaccacacgttcggtggcacggtatactgggggcgctgacctgcctcaaggtgtgggccaatgacagtaaggtcaatgtgaccgtcgtcgtgaagctcgaagaccgtgagaggctctcccttgtagaagtgccaggtttcagcacagggaatgcggtggagacgggaaacactccctgcgggaagtaggaaatagattgcggtgctaacagcacggtttaccttgtagtggggcgggagctgggacgtggtgagcgtgatggagccgtcgcggaaggtctcggtgtagaagccgccctccgggtgcggcttcaagtccagcagcgcagccacctccgtcgccgtcatctcctccgaggccatctcctccgccctcccccgccgcctcctcgtgaccgcctgcgagtttcttcggcgacggaccctcaccctagaatctagatccaatcgaccgtgccctgctcaacgcggttccggagaggatttgaatgattggctcgttggattccaagc

SEQ ID NO: 33968 - DNA, 505 bp, Glycine max
gcggcccttttttttttttttttttttttttttttgtgatgagtgaacatgttccacacatatagtttcataattgtcagtaactatgacttaaaacaatatatgcaagtgggctgaaattgtccccaaagcaattcgatcaaggtagtttatttttctaacccttgttttttataattaggaaatgatttcttcttattattgaaatttatgtatgtatatatatatatatatagcataaccctagcaatcttttttttttgaatctggattaattatctcctatatgtttggttgaatttgaaagtgcaagggtagtactaattaaccctaggagaaaagggaaggatggggtgttctgctaattgaaaagtatgtgagttaaaaataaagcaattaaaagagccaaaaatgtcattcaaatcatttttgttgcaaaaacgtacaagtaataattcttgtgttttataacatgtccatgtgggtttagttatatatatatata

SEQ ID NO: 33969 - DNA, 827 bp, Glycine max
aggaggtactatggttttccattaattaagaccgataagtacatgtcagtggcacaaagtttcacatcagaggatggagttggcaatgtgagaggaagagttcttggaggatcatcagctataaatggagggttttacagtagagcaagtgaggaatttgtttgcaaagctggttgggacaaggaactagtcaaagaagcttatgaatgggtggaatccaaggttgtctttcctcctttttatctttcaccatggcaatctgttgctgaattcagcattcttgaagcgggagttttaccatacaatggcttcagcttggaacatatcaaaggaaccaagatttctgggagtgtgtttgatgagtttggaaagagacacacctcagctgaccttctgaatgcagggaatccaaataacctcacagtccttctaaatgccacagtcaagagtatcatctttcatcacagtagtaagttaaaaaaaaaaccctttttttataactatctataataggtggttaaaattttgattggatacactttttttcataagtacttatagaagaaaagaaattaaaaaatagaataaattaaatgtctcctatcagttaaaatcaacttatacactttaatttccatagaaactctcaacttattcgaaagctaaggtacataaatcgattatggcttatgaaaagaattcaattcattttacattcttattttcttctccaataaatatttatagaaaagtttatctgaatagagcctaactggcatttttcagtcaccaattcagaattcaatcttgaattttgaccactcaaa

SEQ ID NO: 33970 - DNA, 507 bp, Glycine max
caggttcggttaaccaaccgggtttcgtagtatgcgagcatcgttgttggtgggcccccccccccccccgcgacctaagaagtaaatataacgtccgacaccaccacccatccgaaatcgcccaccgccagaccaccagccccaccaaggacaagactcatcatactgcctgccaaccacaaacaatgacaccacaaaaatcgcgtgtacgccttgcgacgactgaccttgaaatcctaatattcgatgagaccctagcggactgtatctgatctactattctgcaaagggaagggcctaggcctgaatacgtaagaggaggattccgcgccggaagctagtctggggcaattcaacccgatgcgcattcctgaccggcggaccgacaagagggaaagagtctaggggattcctctggctgaggacgaatcggcgaggatataccgcggaaagattaggacctttgcctcggacgaaattcgagtgcattacactgacctacgcctc

SEQ ID NO: 33971 - DNA, 753 bp, Glycine max
gtaacatagtaggggatcatttgaaaacagccacgaatccatccttttaagaccggcggcatctcgaagcagcaggcagcatcggctccttttaagacctactcttgaacgggatcgccctgatgatcacctggtggtagatggcagccagcgcagcgccgatgaaggggccgacccagaagatccagtggtcagcccaggcatggtgctggttgtaaatcacggcggcgccaaggctccgcgcggggttgatgccggtgccggtgatagggatggtggccaggtggacgaggaacacggcaaacccgattggaagaggggcgaggatcggcacatgggagtccctggcgttcctcttggcgtcggtggcggagaagacggtgtagacgaggatgaaggtgccgacgatctcggcgccgaggccgtcgcccttggtgtagccgggcgcgacgacgttggcgccgccgccgttgcccatgtacagcccctgctggaaccccttgacgacgcccgcgccgcagatggcgcccaggcactgcatgatgatgtaaaacaccgccctggtgagggacaacttcctcgccaggaacagcccgaaggtcaccgccgggttgatgtgcccgccggagatgccggcggtgcagtagacgagggcgaagatcatgccgccgaaggaccaggcgatgccctggatgccgacggtggcgcacttggaggtggacttggagacgcccatgacggtgaggatggaga

SEQ ID NO: 33972 - DNA, 406 bp, Glycine max
gggaaaaaatcattggaattggcaagtctctccaaagatgtcagtaaagcaatcaactgtgacattggtaagaaatgaagcatatatagatttatacaaaagataaaggaagaaatagttgccaaggatcaagagcttccactgaaaccttgactgttcttcatctttctcatttccatttcccttggcgtttggcggctctgtgcttcactgcttgagccagatgggtttaaaccatactcacttgtagctgcactgtactcactgcgtgcaccatattcctgagttcccaatgccatttttctgaactttttcatgtcttccttggactgggcagggtcataatctgagctttcatgagaactgtacatagggctgtgtccaggtctaattccttcgttaagat

SEQ ID NO: 33973 - DNA, 948 bp, Glycine max
gtttcaagccctaccgacaggcatttgcttctgctccagtgatcagccccctcccctcttggcctcctctccccccggccaaaaactgatctttttttttcggttctggtaccatagctattagtagtcgtagcggctaacttgcaagccgattgtctctagcacgcaagtgtttttccctcccctgagcttggtgggcgatcgagagttcgagacagtgtacacatacatactctgctcgtcagctgaggatcgatcgcttggtctcgttgttgcgtagataggtactagaggactatagctactagtaggactaggagaggatccgagggagagagagtaagcaggccaagatgatgcgcgcgaaccgggagcagagagtggccttctcgtcgacgaaggaggccgccgcggtgcccaaggaggaggtgtgggaggtccggcccggcgggatgctggtgcagaagcggagccccgacgcggacccgccccccggcggcgcgcccgtgcccaccatccgcgtcaaggtcaagttcaacggcgtctaccacgagatctacatcaactcccaggcatccttcggcgagctcaagaagctgctgtcggagaagacgggcctgcacccggacgaccagaaggtggtgtacaaggacaaggagagggactccaaggcgttcctggacatggccggcgtcaaggaccgctccaagatggtcatgctcgaggaccccgccgccaaggccaagcgcctcctcgaggagcgccggaccggcaaggccgagcgcgccgccaaggccatcgcccgcgccgccctcgacgtcgacaagctcgcaaccaaggtgtcggcgctggagacgatcgtgagcaagggcggcaaggtcgtggacgcggacgtggtgacgctgaccgaggcgctgatgaacgagctggtgaagctggactccgtcg

SEQ ID NO: 33974 - DNA, 397 bp, Glycine max
caaaaattacttgcaagtggctacatgaaatgtttattatcttcacaacggaacaacactacatttcaaaaacaaaattggtcaagattgcaaattattatggtctctcctggggcatcgtgctttatctactctacatgttcatccagaatgaagtagggacagaattcttttagccattaatatttagaacatatatcctttaggtatgtttaagagtaacatcaaagtttgaaaagatttggacatacactggattgattgaaggaaacatgaaaaacaatcctttagcgagggtataaatcagtaagggatacttcattcacagaccatgcaattgaacaagtggtagactgattggaggtagacgaatcagagtccatccctcggtttaacc

SEQ ID NO: 33975 - DNA, 1044 bp, Glycine max
ggcagctccggcggccgaccccaagggcacgaatcggaagtcgttgccgtgggcctccacggacttcttctccttcaggaagcgctcgggccggaactcgtcggggcgcacccacctcttggggtcgttggcgaggaaccaggcattgacgaggatcttggactcggcggggatgtcgaagccggcgagcttgccgtcgttgaggttcatgtgggggaccagcagcgggatggccatgcgcaggcggagcgtctccttgacgatggcctgaaggtaggggaggcgctcgaggtccggctccgtcacaggcacgccggcgcccagcaccgaggcgagctcctcccggagcttgtgctggatggccgggtggttcaccagctcggcgatgccccactcgatcgaccacagcgtcgtctcgatcgctgcgacgttgatgttctcgacgatgtagaggacgttgtcgtggttgatctcgcccttcctctcggcctcgaggatgtgatccatggcgcaccggatctcaccagtctgagccatcaccttcttgcgctcctgtacgaagttgtcctcgaagaccttcatgcggcgcgtcttgaggtcgtggcagcggttgaggtagccgcggaggaaggggcggagcacggggatgaagtcgccgtagttgtactcgaagctctgcgacaggcggctgcgctccgcgttgagcgccttgagcttgttgaagagcgggtcgtgctcgctgtcgaaccggcggtcgaacatgatgcggaacatgtcgttgtacatcatcagctggaggcggcggcggagcacgacgccgccggccgcggcctcggggtccttcctcacgtcctccaccaccagccgggcctcctcctcccacccggcgcggttctgggccaccaccttgttggtgaagaaggggacggtcatgatgcgccgcatcttgcgccagtggtcgccgtacaccgtgaacaccatgtcctgcacaatgaaaatgaagatgtcgaacaccacgttgcgggtgcgggagccgaactccac

SEQ ID NO: 33976 - DNA, 734 bp, Glycine max
ggcaacttgtccaatcttgacaccttggacttgtcctctaacaacatgcttcctccttcgaagttgcacggtgactggacccggttgaacaagttgaaggtttttttcatgtttcagtccaacttggttggggagatcccacaaaccattggaaacatggtggctttggagagattagatctatcgcaaaacaatttgagtggaccaattcctagcggtttgttcatgctggagaatctgagcataatgtttctatctagaaacaatctttctggggaaatacctgatgtggttgaagcattgaatttgaccatcattgatctcacacggaatgttatctcaggaaaaataccagatggttttggaaagctccaaaagctaaccggtttggctttgtctatgaataacttgcaaggggagataccagcaagcataggacttcttccatctctggtagattttaaagtatttttcaacaatttatcaggtattctccctcctgattttggtcgctactcaaagcttgaaacatttttggttgcaaataatagttttagaggaaacctaccagagaacttatgctataatggtcaccttcttaacatctctgcctatataaattatctgagtggggagttgccacaatcacttgggaattgtagtagcctgatggaactgaaaatctatagcaaagagttttctggtagcattcctagtggtctttggactttaag

SEQ ID NO: 33977 - DNA, 527 bp, Glycine max
caccaaactttaaatatgacacacaatttccattgggagattgtgatccaaaaaaagtattaaggactactcatcaaaagagtagctacaatttagaaattaattggaatcctgataactaatcaccacccctgaggattaattaatctcacataccaaaaagtacttctatttggtgtcactttccatgcattctatagcgctgatgttctaaatctgctatccagtggctgtttcactgacttcaattccagaattggcaataatctccatggaagctcagttggttagtcacacacaaatcagcaatttacaacctcaacatgataccaacctagctagctatcattatcaatatccaacttatgctctctttttgaatttttaagaaggggaacatcatcatagtggccaataatactctctcctttagaaaatgaatcttcacaagaaagcaatactcgtagaacctccttcatggaaggtctaatagaaggaagtgttacggtgcacatgatcccgagttt

SEQ ID NO: 33978 - DNA, 860 bp, Glycine max
  unsure (1)..(860): unsure at all n locations
aaatggtgaagaagaaaaacgaaacagaatagctatgcaggcanagctcgtgaggctgcagagtgatctgtcagcatcagaagcatcacatgtacatgaagcagaattaaagaacgaactcagcaggatcaagagatcaaacagtgagtaccagaggaagatacaatctcttgagcaggaaaatgaggatctcactagaagagttcaaactatggaaaagggatttgagcatttgtccctcgttaaagagaaccttggaaagcaggagattggaggagataaccagtcaaaaattgagttattggaaacgaagctcgcagaggcattggaggaaaacaagatgtacagagctcaacagaagagtccgatgcctgaggggcaacctgctgggggagacggcaaggagggcaatactgataggattttgcaattggaaggagagctaagagatatgaaggaacggttactgaacatgagcttgcagtatgcagaggtggaggctcagagggagcggttagtgatggagctcaaagccatgaagaaaggcaggtggttttagcaatgatggagaactgttgcctgacataaaacagacacaggctgactgacagcacagatgggcatgtcatgtgagagcaagcaaagcaaatgcaagtgatgcagagcctggacctgctaactggtgctggaagatgtgtatcccaagacgacactgaaggtccctgtgagcacccagcgcccctacatgacatgatgatccaattgttattggtatttatttttaatggcgtgccttttcatcttgtatataatatacgccggtttgtgaggagcttgactggtcagttgttgatatgatt

SEQ ID NO: 33979 - DNA, 508 bp, Glycine max
aggttgggtttgaaagatttcattatgatttatggtgggataatatcttttttcaattccaccaaaagataaaacacaaatatttgacataaaacactggatatgaacatacggatgaatgtgctgcatgtttcatctgccaagtaatcatcactgaagggatgtggtgaattttatgccaatgttctccattcttttggtaccgctgcttaagtaaagggcaatcatgaatccacagaacagaaagagagttagggagactctcttctggcaagcactggagacgagggcaaccagaaatatggaaggacttcagagatttgaggtggagaaaacccatatagtttgttgttgttagctttgaacatccaattaactcgagcacactgagagaggatggtagcaacagatactctgggaaagacaccacgttggcaagctcatcactaactctgaactctttgagagaatggagtttgaagaatccccagtccttcctagaagcaac

SEQ ID NO: 33980 - DNA, 918 bp, Glycine max
cgtcctccctggcatcaaggtcgacaagggcaccattgaggttgttggcaccgacaaggagaccaccacccagggccacgatgacctcggcaagcgctgcgctaagtactacgaggccggtgcccgctttgccaagtggcgtgctgttctcaagattggccccaacgagccgtcacagcttgccattgacttgaatgctcagggtctggctcgctacgccatcatctgccaggagaacggtctggtgccaattgttgagcctgagatccttgttgatggccctcatgacattgatcgctgcgcttacgtcactgtagacagtccttgctgcctgctacaaggctctcaacgagcaccatgtcctcctggagggtaccctcctgaagcccaacatggtgactcctggctccgactctaagaaggtgacacctgaggtgatcgcccagtacaccgtccgtaccctccagaggaccgtccctgctgctgtgcctgctgttgtcttcctctccggtggacagagcgaggaggaggccaccctgaatctcaatgccatgaacaagctcagcaccaagaagccatgggccctgtccttctccttcggccgtgccctccaggcgagcaccctcaaggcctgggctggcaaggtggagaacgtggagaaggctagagcggccttcctcgccaggtgcaaggccaactccgaggctaccctcggcacctacaagggtgatgctgccgccgacaccgagagccttcacgtcaaggactacaagtactgagttgcttctctttgcgatcccgttgttttggaactcctgcctgcgagtaggttgctgagtgttgtttgcttgttagagcttttatattcggacatgaaaaaaacatgctttctatgtggatgatggttatctttatatt

SEQ ID NO: 33981 - DNA, 954 bp, Glycine max
ttttcaacaagccatggctatctcatataacaagctcacttttgttttcattcaagtaataaacacatacaaacgcgaccctcccccctccccagaaaaaaaaagaacagcaagccaacaaataatcaaagaacgaccgggacacggaacgggcctagctaggaagcagaaactctttattgtcctctctctctctctctctcctatcatgtaatgcaatgcaatgcagcatgttcattcaaatggtggcggtatggacctggttggcgatcgatcgaattatatatgtcgggctggtgggcaagcagctggcaggctgtacctgctgggacccagaccaacgaccctctcatcaggcggcggcgctcctcaccttgaaccggcacagcagcttcttcttcctcgacgccgggttgttcacgcccagcaccagcttgccgggctcggtggccttgaagctgcccttcatgatgggctcctcgtgggcggggaccttccgcgtcttctgcacgatgacggtgtagccgccctccgcgtcgggggtgaactcggcgccgtagctcacctcccaccccagcacgcggagctcccacaccacggtggagttctcggtggctgggatctcgacggtctccttggaggacggtttcacggtgagctcggtgacggcgtcggaggtggagaactcggtgtcgtcctccttgtacaggccgccgaactggacggggacttgctccggggcgatgtacctgaagagggtctccgccgacttgccggggctgcagaagacgatcttgctcttggtgcgctgagtcaggaatgggctcatcaccttgtttgccgccaggtaccaccacggcacgttgatgaacaccttcttggccacgaactccgggtagttgtcctgtagcagggcgagagcctggcgcgtgacggcgcggtgcttgccgagca

SEQ ID NO: 33982 - DNA, 463 bp, Glycine max
gctgattcaggttcggttaaccaaccgggtttcgtagtatgcgagcatcgttgttggtgggcccccccccccccccccccccccccccccccccccttgataaaaattgaaaacaacaaacaaaaaaaccacatcaattaccacccgacgtatcgagataccacgcaccccactaacccccaaaaataacgggacacacccctctagagctcaaaccagataccacacacttttaaaaactctacaataacccgaaggctcgaatatgccaacccgtccccgtccacgaagccgatcattccccggccttggattctgggccctgtgatctgaatgaagaccccctagaacctactatcaaattcgaaagcggtggccgaacccgattgatgaatggctcacggagccgcgctgcagatcttcttacagagctcgccttgcacgggcgcgtctgcgccgaact

SEQ ID NO: 33983 - DNA, 537 bp, Glycine max
gttcggttaaccaaccgggtttcgtagtatgcgagcatcgttgttggtgggcccccccccccccccgcttaatgcgaacctagaccgaaatggaaaatccgataagcggtcatagtcgaaagaaacaaaaacctaatcgagtaacgactctccttaagataaggggaaaattagtcccctcctctgacgcttactgacgcttgaggaaaaatgacaactggaatgcgacgacgcacgcacgctgctgcacgatatacccttggaagatacgcataggtccgaatgcgtcgatagttacgggaacggaagtcttattacctaacgccatagaaaacgactaaatgccgataaacgctcttggcctgacctattcgagtatgaagagatatcccttgaatccgttggacttaacaatggatccggaatttacaccgacgcgcgaaacccttacggactaaaggcgcaatcccgcgcgcaagaccgcgcggccgaatgagtctaccgagatcctggtagatgacgccgcggggatacgga

SEQ ID NO: 33984 - DNA, 431 bp, Glycine max
tggctgattcaggttcggttaaccaaccgggtttcgtagtatgcgagcatcgttgttggtgggccccccccccccccccccccccccccccccccccccccccccctagtgaagaaaaagagcctgagctgaataatatttgattaagcaagagcaagatcatgaatcagcagcaatcaacccatttggaaaggagacgactgtcttctttaataagaaaataaaaccaaatttaaaaaaaaatgatcagggacgagataaaaccgaaacagggaagctttcgctcagccgtataacttcgccttggtaacgcgcaatggcgctctcgcggcgccgaccgaatctgagaccttcgagagggatcacgggcggcgcaggaacgacctgattgaaagcgattaagagccgcggacgtacgggacaaaatggcc

SEQ ID NO: 33985 - DNA, 407 bp, Glycine max
ttttttttttaccaattaagcaaacatatatgtttcattaactcaaatctttctttacaaatctatgatatgaagtttctaatcttccaagtcgtggcggagagctagtgatcagaagaaaaacaacaaaaattataacagaagagtactgtcacacagaatttataagataggatatccagaaccatctatctaccctcagacttcaccaactgtgagaacaccctactcatagaaacaccagacagatcatcgaggcctgagcctgcaaattgtgtaaccgaagcacttgcatcctggttgaaattgttgacctgaggagagagttcaccaatcatattggtgctgttttcttcagggtcgccttgaaccactgcctcttgaagttggagagcatactccaaatt

SEQ ID NO: 33986 - DNA, 284 bp, Glycine max
actatttgagtctcagagagtcgtcagtcgtttcgttgacgacctggccttactattggcgtcgagttatctttcttgaacgtggtatttctctttgtggtctaggtctttcactgttttgacgatttactatccaggaagcagctgcgaagggtctcgtagcaggatattatcgagtgacaacggtgagggacgaggttattgatgcacgggaatcgacggaagtaagagactattataaacaatccgcgtccgacgtctccagtcctaatctgtacgtatgc

SEQ ID NO: 33987 - DNA, 427 bp, Glycine max
tgtgctctaaagtacttcatgaatcagtacatatcgcttgagagttacattagaccttgacggacaataacttctttcaggatagattttgctaagaagttgtctgttttagcaacaagatacaaagaaaagagtacaatgagtgaaatgtaaaacgacatcatagaaggaaacaatgtccaattatgattaatgaacaaggttggtaatacatcaaaatatgaagtctgagatggatctcggtgctgaagacggtaactttcacgacctgacattttcgaatcgctgtttcccctcccctgtgcagaccaccggcgatggaggagtttgtcatatagtgtctctgtatttagactgcgtgccgaattaaagttatagagcagaactccgtgtcggcatggctcaatccaattcggttcggttcggt

SEQ ID NO: 33988 - DNA, 457 bp, Glycine max
tatagaatacatgcggccgcgagctcgggcccccacacgtgtggtctagagctagcctaggctcgagaagcttgtttacgaattcagattgtaacaacttccccggacagataagaaaagaactgaagcaatgttgcttagatgctacctaaagcgtgaaatgccacaatggaggtatgaaaaacttccctgacttttttatatttacatttcaaccaaatgacaaaaactagtcttgatcaaaacgattttggtcgtctaaggttggaacttgaaacgatgttgaaaagaggggtcaagtttgagatcgaagcactctcagttcactcactgtcctttttgtcagaggtatatattccttctaagattcgtcgtgaagtaagctctccttgagcttcatacgagataactagtctccaactcaaggtaatgctcattgttttttttatgactcttt

SEQ ID NO: 33989 - DNA, 450 bp, Glycine max
gaaaaaaatagaatgtgatgataagtttattgggctgatcatatgatcaaagccgacctatacaatgctcattgactaaatattagaggcaaagcttgtcacactggattttattccatgattttgattgcaaaactctagcacactgctattatccagaaaactaaataggagtacaatttatctggtctgaatacatacggctaatgaacagtgggagcaggaacaatttgcagttttcggcgaacatcttccaagtcttcatcaaaatgccgctcataatatacacacataagatcagtggattgcatgccagcatgaatggcccaggggaagtagtgatgataaaacaattttctctgcttttcactgaatctagccgtgccccctataacggacagcagacacataggaaggcccatctgctcaaactcaataaccttcagtgct

SEQ ID NO: 33990 - DNA, 470 bp, Glycine max
caattgctcctatcttcatgtttttgttgcattcgctgttcttgggctggtgctgctaatcgtgttcgtaaaaaagggaaggggaacgacgaggacggatcgaaagtgtgtacttttactagtcatacatgttatggtgtcggaacggaaagaaaggtgaagcgagaccaacctgggctcgtgcaaacggtacttctacatgggtcttcttcgcatctgatgatgcggtgcggtgcgatgcgtacgctcagcagggagccgccgactgaacgccatcatcgggtgacggcggaaggactggcgcaatggcgcaaatggaatgagccagatctgatggagatgtggcttaggcccgacccgacatgcagcgtggccttgcccatcatctcgctgtcatgtgtggcataagaggcgaggtgtgatggattggccagacggagggtcgtcaaacgtgacagaactcctttaca

SEQ ID NO: 33991 - DNA, 517 bp, Glycine max
atggaataaaattgcaacatgtatatttatacaaaaaaaagtgaacataaagatatagaatttacaactgaagtattttacatgcattatagtgattaattttcacttttctgtattgtggcttctgtaagatctagaacagctagatgcatgaggctcatcaacatagctagcatatcctagaaatccagcctctaccttgaaatacacaattcattcctcttacctacttgaatatagcatccctcaaaatttcattaaatagcttgataagctagaaagcacccctaagtagcacaaccagtttatactacactttggtatgggagatgaagaggtttgacatttccttttcatgacaacaatagcattaacatgagctgctctttgtggtttccaagtatggcaataatagatgattcttatcataaataaactttgcctccaattcattgccttgaccagtttaaactttaaagctacaacaatctaatgctcttaaaagctttggcctcca

SEQ ID NO: 33992 - DNA, 659 bp, Glycine max
ggatcacaatcacaccgatttattttatatgttgcattcatacataaaattcattgaaatagaaattaaatttcacatctaacgacttgatgtgtacaatcaaaccaaacacatgcagacaaacacatgcagacaagtttgaggaatttggagaccttaaccacacaagactcggcatcgatactctcccagggcccatatcggaaagatgtttcgatacgatgagtagttaagggtacagttcctcataaatactcctgtgatttcctgttgtgggatttctccatcttccatttgtgaattgattagtaactttattccacggtgtatgggttgtcggatctatctcagcctgtcctgcatcaataagggacaacaaagcccatgaagtctgaactaagtttgcacggttgccttctaagtttgtataaaccttgttttggctcgacaagtaactctttccccatccaccatttggaagcctgctttgataacaaaaatttacaagctttgcgtagggaaggactattatggaagttctttccacaggctgttagtcccactacaggaaaaccaggtaccataggtatagcaaataccccaacaaccgtaccaagagccatcaggattttgtgtgtttttcaatgtaatggattgca

SEQ ID NO: 33993 - DNA, 414 bp, Glycine max
tgtgctctaaagatgattaaaataaggtatggcataatagattctttcattttggtatgttcctcacgtgtccgtgcgataaagcttatgaacaaatctcgcccactagaagtctagaactaattctaatccagtgtaccatacacattaattatgtcaaatgtagtgcacatgattatggtatattggcatcactaaaatgtctccaagtctgaataaatcgacccatattggtttgagtgttatcatgaatctttttcacaatcactttggcctggttccgggatcgggcctaaaagccaacggccccaacgtttttaaagacacatgcgtttttaaaatgacacgtcagttacgtatcgggcctaaatgccaatggcccaacgtcatggaaagtaggaactaaacgacacg

SEQ ID NO: 33994 - DNA, 457 bp, Glycine max
gacgcgttactgatcggatccagaattcgtgatccattttatgtttgacatcaagttacgattgtttttggcttggatgaggatatccagatgtctcaacaagaaggtacataacttaatcccaggttcctggaatactattttatcagacattatcttctattgattaatatatcagcgaataacacagattctttccaggttcttgcgactcctgatggagaagttgcatctacctgtgcattgtctagtcgactgtgatccatatggctttgagatcctagccacataccgttttggctccatgggttagattctgttacaaaatatagatgactgaactcggaaaatttcaccgcttgcattgtttttgttgatagtgataatgtgatatggcactgacccatttcattttgaaccattttccttatgtcacttgttttctttctgtaagcaa

SEQ ID NO: 33995 - DNA, 554 bp, Glycine max
attcaggttcggttaaccaaccgggtttcgtagtatgcgagcatcgttgttggtgggccccccccccccccccccactggccaaaaactcgccccgctcaactcactgcggaagcgaccttcagatcaaagaaccttctctaccgcaacatcacgcaattgaaaaataggatgaaaagctaaagcaccggcaccggcctcgcgatgccgcgattgcgcgatgctctagcacacgaatggcctgggcaatatccagattactaacaaacatactatgatagaaccacccgaggagcacgactggtgcctaaaaaaaaactctcaattaagcaccctgccgctgaaggccccatccgggatgaaacataaaatgcaaaatacttgcttgctgcaactctagaaagcaaacctcacatgagctgaaacgaaatccgatgatcgactcaccgagcttaaggaaacgcgatgaagccgtagaagaccgacggccatacacgctgatttcgtcctacgcggccaccgcgaacgtcgaggggacgattaacccggaacccg

SEQ ID NO: 33996 - DNA, 605 bp, Glycine max
atgcttcagtggctgattcaggttcggttaaccaaccgggtttcgtagtatgcgagcatcgttgttggtgggcccccccccccccccaagataaaaccgcctggcccgaaacaaaatacgaaattggaaaaatccgcccagacctatacttgacacccaaaagggcaagcaaaaaacagagcctcaaagactatagcattccaacacactatactctagaaaataatgcccagaatgctatctcggaccaggaaaggcacaaaacgcacaccgaaaagaacgaaccaagctttaagacatttgcgaaaaatcccaacagacttacccttacgaccgctgacaagccgatgatgagtccgaaagcgccgggctataagccctactgcactcccacgcaggagcgtaggcatacgactatacacccgaaaattacggcgcacagacacgaaacttgtacgaccaggcacggccgcctcggatcggccgcgcgtgcctgctaccactgccggatctgtcagatacacaagatcaccctgacaacgactagaacactgggaacaacttaaaaacggggtgagaatgctatgaacctaccggcctccact

SEQ ID NO: 33997 - DNA, 349 bp, Glycine max
gtgcgtcatggggtcgctcttcggcgggctgaagcccaagacccacatccccgtcctcgccaagaaatgcatggacaaggagctgcagctggacgcgctggtcacgcatgagcttggactgcaggacatcaacaaggccttcgacctgctcctgcaggggaaaagtctgcgctgcatcctctggatggacaaggacaagtaacggaaggagaggggcggccggaccaatccttcctgtctctaaataaatttaccctgtattaacagcgaggcgttgctgaaagcaggtgttagcgagcgccaagactatctgtacctgaaaccctgtgtatcagtatcgtttcgttgt

SEQ ID NO: 33998 - DNA, 514 bp, Glycine max
ctctggtcccatactacttggaagaagaggctaactggaaccttgacttggcaaacatccgacaagcagtggccgaggcacgttcgaagggaatcactgttcgagcgacggtgattataaatccaggaaatcccactggccagtgccttagtgaagcaaatataagggaacttgtgcgatattgctaccatggaaacttagttctgcttgcagacggagtgtatcagcagaacgtttatcaagatgagcgcccatttataagcgcaagaaaggttatgttcgacatgggtccgccaataagcagggaggttcagcttgtttctttccacactgtgtccaaagggtactggggagagtgtggacaacgtggtggatacttcgaaatgacaaatcttcctccaaagacagtagatgagatctacaaggttgcatcaatagtactgagtccgaatgttcccgggcaaatctttatgggagtgatggttaaccctcctaaacctggagatatctcata

SEQ ID NO: 33999 - DNA, 449 bp, Glycine max
gtcctattcattggtacttgcacaaagccacctcagttttacataattacggagtgcttgtctagacgaaggctgtttcatttcttgcacaatgagcataatgtgttggacctcccaacgcttctgaagtttgcactagatgtatgccaagggatgtcctacttgcatcagaaaggcattatccacagagatttaaagtctggcaaccttttattggataaaaatggtgttgttaaagtagccgattttggtctagctcgtattcaggatggagggggtgatctgactgcagaaactggagcctgtagatggatggcacctgaagttgtcaatcatcagccctgtgacagcatagcaggtgtatgcagttttgctcttgtgctttgggagctcatgacatccaaggttccgtatgaggccgtgacccccctccaagcagctgttggtgt

SEQ ID NO: 34000 - DNA, 652 bp, Glycine max
  unsure (1)..(652): unsure at all n locations
nnnnnnnnnnnnnnnnnnnnnnnnnnnnnnnnnnnnnnnnnngaattgagcataaatcatttgcattacattgattacatgaaacaagacattgaatattgaggaggatggcaggcatacctgtcgtgttgtgcaacacgcggaaggagaaggaggatgacattgagaaacctaaggtggggaaacaacagtagtagtagtagtagtagtagtaatgtatttagcagcccttgaagtgaaaaattgggaaagggctctcacacattggaaagtcaataagacaaaaaaagaaaaaaaaggaaagcacaagcattaatgctgccacaatgaaccctcgaagccacaaagtatcatgctctcagtctcagagtccccaataaaatacccctcactctcatcataaatgccgtgactccacgcctgagaatacggccacgggtccaaatacaccaactccccactcgggtcgggtatttcgaaactcgtccccagactcggcagctccactatctcccccagctcctccggcgtcgacgggccatcgccggaggaagaagaaaccgccaatgaagaccaagatgacgattgcgatagcgacagagacgccgacgacgacgaagacgaaggcgtcgtcggaacatcgttaacctgc

SEQ ID NO: 34001 - DNA, 787 bp, Glycine max
tcttttttttttttttttatggatataaaaaatttaatttaattaatcaaatcatttgaaattttatgcttacaatattttgactatacaaagttataaattttaatttttaattctaaataaaaaaaagtttcacagcattcaagtaataaaaggatcccctcccaaaaccaaaaaaaaaaaggaagaatgtcaaaacttaccttgaaggaaaatacatttttttaaaaattctaaaagggaggggaaaaatgtgaaacaaaaagtatgagatgtgtgccaattatatgaccaaatcgctttctccattgctgtttccttgtaaagaagctcaaaataaaagcattttttcccaggtttccctttgcatgttgacaggaccaggatgaccaggatgcataagatgatgttgcctttgctactacttttgacggcgcaaataatctcgtacatactgatgtacctcagtcttaaccaccatgtgcatcttctttgaatcttcccacaacaaaccattccattctctagcacagtcacaggctccttcaaacacatctctggaagggaactcatcgtaatagtatgcatctgtcatctcaactctgtttagatctgcttcccacagcctaatctgttctgtgacattttcaggcacagatggtatcctctccgcaacacgaggatgagcattttgctgaaggaaagtgattatctgctctgctgtaatgccattttcaaaagcactatacaagctttcttttgtaatagccccaacaataagatttgg

SEQ ID NO: 34002 - DNA, 370 bp, Glycine max
ggcattcaaaaagggatcctttttttttgggaatcccctaaagcttgtaaaacacacgttcaggaagggatcatttttttttttaaaaagctgcaattttttgactgactttggacaagtcaattttaaagttttagccgcttcaaagtcccaaaatttccatgcttccatgtggggggagaataaatttttaaaagcttggttttgattttggggaccatgctcctgggcgggggtttcccaggtttgcacctgtttcacactttttttttcaggggttccaactttgggcacataaactggagccaaagggccaaactggtagctcattgaaggctgttttgcatttttttttaagctttttttttcc

SEQ ID NO: 34003 - DNA, 369 bp, Glycine max
gggggcggataacttcgggtgggcccaattttttttctttcagggggggggatttttaacgggaacgggggtcccctaaaaaccccaaaacctttgcaaaaaccaaaggggttaaaacgggggggcaaaccacaggggtgcctttcagaggacaaaagtaaaacctcggggccttaaaggccctgggttttcctgggttatgacccctcctttgttatacataccctggaccaaatgtccttaaaaaaggggggctagattcatcctatggggggcctttttgggacgggggcaaacttgaagggcggcccccaacttatgtaaaagatcattttttcccctttagtctccaaagacgttttttttttt

SEQ ID NO: 34004 - DNA, 919 bp, Glycine max
cttaaatatatattttttattttgtcaacttatcaaatattaaatctgaataagatgaatgacaagcatattattgttgtgcatcaatgatatttagaggcatcagtagaagaagtcaaaaaattagtcatcatgaacttttatggttcttccatttctcccattctgctcggtatcaatttatctgtgctttcttcatgctccaagcattcagttttgtgatgttgacatcagcagttccattattgaaagcatatagttgtgcttcatcattgattgctaatgtgggataaactctagccgtgatgcaagcccttccttctcctccaaaactctccacgacagaatgatcaatcaaggttctcaatgatagcttctcatgaagagggtcgacgtccacaaaagttccataactggtcaaatcattgtctttgtttaaggaagacctgctttgatcactgcacaagagcaccaaatatttgtgttggtgtctgaatattctgaagaaaactgatgtatactcttgcaaaccctctgaagcaaaaactaacagaccaaatgggcccagtccacttttgatggatgaaccctttttactacacagaatttgggggtctgtccaatagtccaatacttcagcctctctcaaattactcacttcaaatgaaatttcaacatcggcctgtgttgctgtgacaccattaattggaagcaacttgcctccttttagcacttgggggggcaagttgactgggtatgcacgtagcttttcaacttccaccactggccactgtaccaactgtttaccagacttatgcagccataaagcccttggaattgtatggattccagaccatcccttcttgatatcagcagcaacactagaggattcattagcccaccctaacaaaatccttct

SEQ ID NO: 34005 - DNA, 348 bp, Glycine max
cccaaattgctcatatcattacccaagtggcaactacagcttacacaaccaaatgtttcatcccaaaactccatatgatcctacccaaaagcccacataattaagcacgcaacccaagcagcaccatgaccccagttacacaccacataatacacagatacaaccacagacataatacaagagcaccagtaccagagcctctaaaaaagcaatttctagccattcccaaagcgagtcacgtggcctcccattccaagactggtggcataaacatcatgcaccaacctcactgcaccctggtgagacctgtgtcggggccgatctggtagggaatgggggccccacagg

SEQ ID NO: 34006 - DNA, 379 bp, Glycine max
gatgataatgggaacctattcacaactaaaacatcactagtaagtttaacaacttctatggtgccatcaaggaaatatcatgacaaaaccaatttggtaaccattttcctacttataggatgatagctggacaaatataatgatgaaccagcaacacaacaggactccaagcccagcagttatttgtatcaacacatctattcatcaggaatgttttgtattatatatgtgtaaaattccttatgcaccagcctgttagtgataaaatagaaacaagcacaaagattgtggccacttgctagaactccttttgagtgccttcctcaacagcagatcgagctgcctggaattcaattgtgtaccgtctctgcagttcttt

SEQ ID NO: 34007 - DNA, 362 bp, Glycine max
aacaaatagtaaaggttacagttcagaaacactcacatacaatcacatttataacatacatatccatatagaatataaataagggagaaaatggcacaacatatatcctatatctaattgatacaacaatgagtaaacaatactacagatacatctggagaaatgacacgtggaaaacctaacaaacagatttgccaactaacacctagtaccaaccaaagagtgcaactgttgagtcaaaaccatcgtgtgacactcatctgaccatcagagttgtctttgtaagttaattgtcagctgtcaatcaagcatgagtgagagcctaaatgaggttgactctgcataacatcaaataattcaca

SEQ ID NO: 34008 - DNA, 286 bp, Glycine max
ggagttaaaggtcatcttatatatttaacatcgaaaaaaaaacttccagtaaattcaccaccaaaaacatatgaaacatttcaaaaatatatcacaggttgtttacatcaaattccatgatcagagaatttacagatgagttggtgggatcaccatttaaaatttcgcaatatatataatatgtatgtcaaaaccaaaaacacatatgtatggttttaaaattcacattccataccattgtaatgacaacagaacacatgagggatgatgaggatgatgaagatga

SEQ ID NO: 34009 - DNA, 383 bp, Glycine max
  unsure (1)..(383): unsure at all n locations
nnnnnnnnnnnnnnnnnnnnnnnnnnnnnnnnnnnnnnnnnnnnnnnnnnnnnnnnnnnnnnnnnnnnnnnngggccccctgaaacaatggaaatttttttttttcaagctggaaactcctttaattacccgggcaaacttggtggctaagcatttactatttttgttttaacgggtttcaatctggggatgcaaatgaaaattttattatccttcttttgaaggtctgcccttttttaaatgctttagccctgacagaagcttaaaaacatcctccattggtggcccatcggatgacctgctttgggggcaaagcattccaaccttaaaaaccagtttaatttcatgcaatgaacttgcaaaagtcccttcattctcattat

SEQ ID NO: 34010 - DNA, 506 bp, Glycine max
gcagtgaaaagtaacttttgcctcaaaccatagccttactcgtgaaagcaatgcatgtctgctacctagaggaggttctatcagtaccacataggaactatgaatcagaagagtactggtttgaagctatcaattacagagagtacttactttacttaaaaacccttgtgcaatttcagtggattaatgacaactcgagcgagtttcaaatataaatattttttcaattctattccctgcatcgggaaagaatccaggaagaaatataaaaatggaagatcaaagatccctgccatgccatggtttcttttcaggaataattctctttgtcagtctatttcacagacctttcaactcttctctactcatgagctttttcccgttgctaacagggcatgaaaagatgagccatcatcttcagcctccattttcttcatttccatttcagcttttcttatctggtgattttcccaggcttgaatcttcacctcttcacgcttgaacct

SEQ ID NO: 34011 - DNA, 368 bp, Glycine max
gtgtaaacccaaaaggcctaaacctgttttattttttgaaaaaccgcccccaaatttatgggaaaccccttttacaaaatggtttcctattacaggggatcccccccctctccaatttaaagagacccaacaatttcctcaaatacatttttaccttggggggggacccctaatttgggggcaacctttggcattttttccctttacggaccattcgaaggcctgaatacagtttaaccattgaccccccatgccatttttgagtaattttgataggaagagtaacttttttcagggtttttcatgccttgataagatagatcagaacccgcaacctgccattggtttggaataatcccatttacctt

SEQ ID NO: 34012 - DNA, 475 bp, Glycine max
acatatactttcctctaattaaatgaaataaaaaaaactgagcaatgatgtcttgaaataggcaattccttaagcaactagctgaaaatgcttttaatgcattgaaataaactaatccaatacactcgtctattataaactaatcaaatagaagcctagcttatttcagtctttcggtcaaatgaatctttaacaagcttcattaattcgaccatcctcaatcatagttgttcctgtcgttccattattctttcttccaatttagtgtagcgcaagatgccctgcagcatccaaaagcttacccagtctttctgcaaccgtagtcaaagttgtatcactcttgcagaacgcaaacctgacgtatctcttctggtagtttaagctagaaacttcatttgaagacaagtttgtatgaaaaaatccttgacctggaacagccactacccctgcttctattatcagtttcttaacaaat

SEQ ID NO: 34013 - DNA, 487 bp, Glycine max
tggctgattcaggttcggttaaccaaccgggtttcgtagtatgcgagcctcgttgttggtgggcccccccccccccccccctcagacgaaaacactacctacaccgaaaaaactaagaattggaatcctacaactacatagagaccccctccaggccagaccagaaaccacacgaacgagccacgcgcgcgcttactcccacagggaataacaactataaaacgaccaccgaataaataaccagctagcttttttacgcttacctcagccgaggtgccgggcggatactatgcggcctactctgcgctgatctgactcgttgctgcgaaaacgaaaccctaacctgggattaggaagcttccgacgacccactcgactaatctactaaatacacttactagacatctgccgacgaagctcaactgtccctactttacgaaatacaatgacgccccgcatcatacggaactggcgataatagacaccc

SEQ ID NO: 34014 - DNA, 513 bp, Glycine max
gttcggttaccaccgggtttcgtgtatgcagcatcgttgttggtgggccccccccccccccccccccccccccccccccccccctatccataaagcccaacccacaagccaacgtcatcttgaataacctggctccaccagaatctaatctcggcagaaacctgcacaaagacacgcaccacatatacacacgtatataaagccctcaactcagtatgcactgacccgacgcagcaccactcgttaatctaactcagccactcgaaaagcaccccaaatcttggctgcttacaagcctaatctgccgacacaagctccggacgccctacctcctgaccccccaactcaagctctactgggtaggcaactcataacggccggccctgggctcgatgccgcctaagaggacgttctccctgcactacgagacccgccggcacgccttgaccgcctcgtaccactgaaccggctaccccatcaccctggggtagaggaaccttaaggccgggccgc

SEQ ID NO: 34015 - DNA, 532 bp, Glycine max
gcaacagtagcgagcacatttaaatgcttcagtggctgattcaggttcggttaaccaaccgggtttcgtagtatgcgagcatcgttgttggtgggccccccccccccccccccccccccccccccccccccccccccccccccctcccccccccccccccccccccccccccccccccctaaaacctgagacggcctcgatgagccgatgatcaagccaaccagaataaccaagccttaccccgaagagacctgatgcctacaaacttctaagaaaataacagacggggaaggaaaaactcaaataacagacaggccgaaatgcccccgcagatagaaacacgggatcgaagggaaaagggatgcacggaaaaggagaaatcccgatatggccctgcgggacaagcacggagtggaaagcaagaaaataactttttaaatagcaaaagaacgatccccgaagcgatgacccttcgacaggcgaacttggactgaatatcggctcaaaactccagcaccctttacgacctata

SEQ ID NO: 34016 - DNA, 564 bp, Glycine max
atgcttcagtggctgattcaggttcggttaaccaaccgggtttcgtagtatgcgagcatcgttgttggtgggccccccccccccccccccccctagacgacacactccgcgcagcctactattacaaataaaccaactggaacgatggagaaaagcacatccccccttgcgcagactcaaccaatgcttctctaattaacaagccgcaccaaggacatataatggaggacggaggaggaatcctctaggagctactcaaagatgacgacgataatgaataaagaaatgctgccgatgcacactggcatggccgaagagaagaggccccataccatggctctatgatgcaccatgccgaagcctgcgattccgaaatcctaaatgccctgactgaatattctcctgaagcggaaaattttacactgcaccaagcgccaccggacaatgaggaatccgagcagaatgctacccgaggaaggggataatatgactcccctactcttcacatggactattcggatccggaggaacgacatgatggagagcctcttctgacactactta

SEQ ID NO: 34017 - DNA, 636 bp, Glycine max
tgcttcagtggctgattcaggttcggttaaccaaccgggtttcgtagtatgcgagcatcgttgttggtgggcccccccccccccccctcgaaaaggaaaagactgcaccatcacacgacacgaccaggcaacagatataccccaccagaaaacactacaccccaaacaaatataaagagcaagaatgcaatgcaacactgaatggaaagtccagaagaaaaaatcggcagcttcccctcacggaggataagaagaaggacttacggaagaactcggaccagagtgaacggactccaaacctccgaccaccgtcagcgtaaactggaggcagaaagaaaaagcgaaaacatcgagaaatggaaaaaggctcctagcgagtcctaggcgcacgcgccacgcgccaatcgccaagctaaacccgagaaaatgaaccgcccacctaaaacggaagctaagccaagtggactactgccgccgacgccagtgtgcgtgcgacgatgtgtgcgcctgaaggcggcaacggcgttgtggaagggagagagtaaacggctgtgggtgccggggcgatggacgaacggccgaatgccgcggaacgcggaggtccgaagtataaagcggaatactcgctgtcatcgt

SEQ ID NO: 34018 - DNA, 568 bp, Glycine max
gcttcagtggctgattcaggttcggttaaccaaccgggtttcgtagtatgcgagcatcgttgttggtgggccccccccccccccccccccccccccccccagtcctcgaaacgacacaactctttgcgcaacgaaaaccctacccctcccggaaaccctctaccctaacactacaacagaaacgatataacccctccagatcccggcggtagccacccgcttccgggcataataaccgccccaattaaaggatttattaaaaaatttaaaaaaaaccatcttgtgcttccctaatagcctcccgaaagagcgagagccaacctactgccgaatcccggtagactaatgatactcctcgggatcttaagcccggcacctggaatccgacgaaggagagcgaaacggcctgaaacacgcaggcctaaggcaaggctctgccgctaccccggcttgaatctgagcccgcgaaaagggaagaatctcccgctattatgaccactgagtcgattattatcaaataagaacaagagcagacttgcagctgcgaccccggggactccgccaaggg

SEQ ID NO: 34019 - DNA, 478 bp, Glycine max
caggttcggttaaccaaccgggtttcgtagtatgcgagcatcgttgttggtggccccccccccccccccccctatagaatcaccaacacgaccaagccgaaaagatccggcccgccctaacagcagaaattaaactagattaagcaagcagaaacgactcaccgggggagctctgacccccgaaccaaatccacgaccgaaggccccgggccaagagatgctctttcagacacagaacttacttccgaccgtaacatttctaagggccaagcgctcaacccctaacctgatccaaccccctgccgacagcacgcagcccatcgccgaaccgtgccatcgcccgaaaccggaagcgctggaagctatatcgcggcggaaagtcaaaacccacgaaggcgccgcccgccccgccgaagatcccgccgaatgcgagacgacgagctacgcggacaaatcggccgcctggaccccgcggctt

SEQ ID NO: 34020 - DNA, 585 bp, Glycine max
atgcttcagtggctgattcaggttcggttaaccaaccgggtttcgtagtatgcgagcatcgttgttggtgggcccccccccccccccccccccccccccccccccccccccccccccccccccccccccccccccccccccccccccccccaaagcctgaatttactccggagagaaataccaaaacccgggatactacaaagtcagcaaacaggatacggaacactaaaccctagaaacactaccactaaagcacacgccgaaaccgagaaaaaaaaggttcgcgatgagcggagggctcggcatttaataagaaaacaacgggggggggcgctaaccaaagaacatccccatttggataggaaatgttggaatggacgcttggactgaaccggaggctcacacttttagcctatcagcttttttaattaagaacaattttgcaaaggaaacggatgcccgcacctaaccgcgctatagaggcccccgccccggcgagatcgcgggaaccacagcagaacagaaaatggacctcataaaggcgatggatgacgctgagaactattgccgcccgccccccgcccc

SEQ ID NO: 34021 - DNA, 566 bp, Glycine max
tgcttcagtggctgattcaggttcggttaaccaaccgggtttcgtagtatgcgagcatcgttgttggtgggccccccccccccccccccaagagaacacacagcagaatcgaaaccaatcaagttacctcgcgcgaaaccctcccgacctgacctcaccgcatccaacagttgattatccgagacaatagcctccctccataaacactggctagacatcaccggcaccgcagatgctgaaagctcaaaccacagaacccatgagactgaaaactaaatcactctcagcggacgcctcgtagctctacgtaaattcactgaactccttctcgccttacaccataaagccgccctacctgtcgcatcataaaaaggatctcgtcgccgacgccctactaatttcccaaacgcatgtattggaggagccggagctcactgccttgccgctccctgatgcctactacgttacttacgcttacctggagaaacgcgaatccctaccacaaactcatgctctgccggccctcgattagggcgagcgcgaacggacactcttggcgggactat

SEQ ID NO: 34022 - DNA, 596 bp, Glycine max
tgcttcagtggctgattcaggttcggttaaccaaccgggtttcgtagtatgcgagcatcgttgttggtgggccccccccccccccccccaaacaatcagccaaccaaacctcccacacaaaccttgcgcgagaactcactccctagagactacggcgaagactccctagcaaacccaacccgagactacacgacagaaccgcaaatcttctaccgaacttgcccaatcacaataaacgaactaaataatgagcgaaccagcagaacagcctaatatatctaaaacacgcaaacatgagactacggattgcgccttgctgcgatgctataagacttggaatttgcaaggctactatgaaacggaaagagacgataagagccggaatatttatacgccttcggccggactggactaaaacctacacgatagatagaaagacgatctaatttttaacccgcgaacggactcacgaaaggctggcttccaaggccgagcggggaaagaccgccaacctctactgggccgagaagatttatatgaccgtttccaaacccccgacgctttctggggggcagacgaggctgaacccccaccgg

SEQ ID NO: 34023 - DNA, 404 bp, Glycine max
cttcagtggctgattcaggttcggttaaccaaccgggtttcgtagtatgcgagcatcgttgttggtgggcccccccccccccccccccccccccccccccccccccccccagggaaaaaaaaagcaagacaagacctaatacccgaagagacaatggatctcctgacgttgcctccaaaccttaaaattagtatgacaaccgcatgcgacgcgccgcgggcgagaaagaggcagaataacctcatgaaataaaaataagagaaatccagaatactacaaaaacaatactataggagagaaggcacgaggggaccccggactcgacttgaaatcccccagggagaagtactccgaatggggcgaaatgaaggacgagatcgccgccccgcggccgcgggcgacct

SEQ ID NO: 34024 - DNA, 626 bp, Glycine max
cttcagtggctgattcaggttcggttaaccaaccgggtttcgtagtatgcgagcatcgttgttggtgggcccccccccccccccccccctggcataatgcatatgcgaaaaccgacccgactgtctcaattacggccacagaattggcccgcgcgatcccgcagccgcatagaggaaaccgcccgagaaaagaaacaaaaaaagaccgccgctggcgctgcagccacgactggcagactaagcacaccccgccaaacccctataccggcccaatagctggcgcaacgacaaaacaggatgaaatatcgcaagaaataaaaaaaacgagatgccccggagctcagacaaactgaaagcaaaaaaacccatcgatcacctgcgcgacgacctcggcgaaccgggaatgcgccgacccctgaggaagaaattcaacgattaaccttgggacgacgcggaacaagggatgcacgccggtgaagacgagccaaatagacggccaacgcctttcgcccttaaatcattggccgcaccaatccgccgaactttttaccgacacgtccttttatcagcaaattaccacctagcacccctcgacactcacgcctaatctctcgcggaataaaatt

SEQ ID NO: 34025 - DNA, 605 bp, Glycine max
atgcttcagtggctgattcaggttcggttaaccaaccgggtttcgtagtatgcgagcatcgttgttggtgggccccccccccccccccccccccccccccccccccccccccccctgtcctaaatctcaccttaaatcataaaactatcataagaacgagagagcgaatcgcgaaccaaaatgtaacacaaacacagaacaaagaccgatagatgtatcgcgaaccacaatactatgcaacaatctattgacgttcaaggaaaacacataggatgcagaataatcttaagaaataagcgtcaaaaatgaatttagccataggcctgagggcgccctacgagtaattgagcgacgcgcccttctccttaccggcctcggagaagacggccgaatcgcaggcgcctaagctcttgaggccttattagagggagccttcagcccattaggacacccctctgctgccctgctctcggaacaagtcgaaagcgcccttcgtgacggccgggatgcaggcgcataacgaggcgccgcggcgggtttctccggcggaataagccctcgagtcggaagagcgctggacctacgaggatggaagatcgccctcc

SEQ ID NO: 34026 - DNA, 391 bp, Glycine max
gttcggttaccaaccgggtttcgtagtatgcgagcatcgttgttggtgggcccccccccccccccaaagcaagtagcaaatccacctgaccgacgagacaaagccccgtgaatagagataggaccggatagtacagaaaccccacggccacgaaaaacaaccggctcacagaagaacttaacgagaagccggaaactccaacgcccctatcgacgtctcggcacagaccaaacaaaggtgcgaaagctgtccttctgacactactgaccgccgaaaagcaactaccccgcccggcgcctggggaagccctgatcctaagccgacacgaagcgaagcagataaagaaaacgcgtcccctgagcttgatcatgacttaagaccaaaccggggg

SEQ ID NO: 34027 - DNA, 1384 bp, Glycine max
atcgcgagcggccagcccttttttttttttttttgtttttttttttttttgagcacaatgtcaacaaatggtgagctcgtgttatatgaaaataatgctctgctcattattcagaaacaggaaggcaaatttcattattttacaataaaattgaaataatttggatcaaaatgacaagtgatgttgtgatttagttgtcatggttgttgcaatgaattcctttgagttttgatatattaattataattattttttaaaatatttttttatatataaaataagttcacccttgcatttatttgatgtaattatccccttaagggaaccaatttagtattgtattcacttttataatattgttttggaaagccgtaaggcctaatacctttatgttataatgttgtatattacgtaatggattgcacatatttgtgttaagtgtagaaatctattagatatttttaaatgactatagtaattttatggaatgtaaatgaagagagttgttacatgaaatgttgttttaataataataatattattatttaggttgttttaataaataaggaggaccttagttaaataatatagtaatctaggccctaaattgaaatatatgaaagaccttactaaaaatagaccaggagaagcccaataaggcattagactagttaggtttaaccacatacacaaatcctcacttttgacttaaataggagagaaagaaagagaaagaaaaaaatagagaaagactttgttattcaaattatatcgtttatgactttttgtatgctcttctataatcttctttgtctaaagacactagttaacaaattttggaactagaaatgttcataagattaattgtgtcttatttcatttggtacaatttgaatattgaagtagaaattgaaggctatactaaaatcatatcgtgaaaagcattagttctaattatttgttgtccccttattactacataaacaacttggtaactggttagaagttttggaacgtaccactattatctatggctagtaaattttgttatgttcatgttctgtcaagaatgtacaacagcattgaatcagatattggaagcacaagctcaactcaactttgttggaaagcaccaccctaaggcttgatgaaatgtattgacgcttcaattaagcaatccaaaggtactactagttttggtattgtatcttgggattggcatggttagattctaataagtcaaaaattaactttgtcaaagccattgagtgttgggttgaatcatacgttttgatatctgaacctgttgatccgctaatccaatttgttgactcgttaatttgtattaaattattatttattaatattatttatatatactttt

SEQ ID NO: 34028 - DNA, 455 bp, Glycine max
tttcaaacccctttttcctttcgctctcgcgaaacccagcagtgtccaaacacacactctcccaaaccctaaccacggcaccaccacattctctcgctcccccctcccttcagccatgccccaatcacgccaccgtcgcgtaaccgtcgtcgacctcgccgccgccttcgcccgccgccgcgcctcattcatcttcatcgatgctccgccgctccgtacccctccaagaaccgccgccttcggccgcggaagagctcgcgcttctccccgctcccagaacacaccgccatcaactgcgcgacgtggtagaggacgcgttccgtcacgctccgtgcttcccgcgtggttccctaggacaccactccgtgacattactgctgtcgttcaggcgatcgagaggagaagtgcgaggctaggagaagtcgaaggccagcgaatcggaaacactgatcctg

SEQ ID NO: 34029 - DNA, 566 bp, Glycine max
  unsure (1)..(566): unsure at all n locations
gctcctaaaaagcgcgcagatgatttcagnaataaacaccaatacacaataaactcgagactccgacgctgcaccaggaaaagaaggaagcaaagctcagaacgatgtcgtttcggtgggagaacgagaaccctaaccctaactctcccttgaagaaacgttggtccctaaaccaaatggtaatggcgatgaagctccagtccctctcttgttctcctggcatcaccgacaaaagcaaccctattctctccccattcccacttcctatcaccgatcgaacccttctcttatctgacgagcttctcctcaaaatcattgcattagtctccgattcctccactcagcgaaactccaactctctggtctgcaagcgctggctcaacctccaaggccgcctcgtccgctccctcagaatctccgactggaacttactcctctccggcagactcatccaccgcttccccaatctcaaccacgtcgacctgctctgcgacgccttaatttcccccaaatattccgacgttctcttaacaaaccgagtcatatccatgcatcttagttcagac

SEQ ID NO: 34030 - DNA, 355 bp, Glycine max
ttcaaattgcagcgtgcgtctctgtgggtactttttagttcctagtggctcatgcttagctcgttcactgcctcggaaactgttacctctctctctgctaaagtgctttcagtcacagccttagcgtgcgtgcctgaatcttatttaccttaacctcttcacgtctttattagtactacatcactttaatgtaaccgcagtctttttttcttgtcaaaagaaaaagcttttttgtctttcttaataccatttctctttccatttaatgtccaacttgtcacaagtattctgaaccattcccatcatgggttcagtcatggaatttcgttaatcttgccacataaacccatctgag

SEQ ID NO: 34031 - DNA, 467 bp, Glycine max
tctcttgcgtccgcggacgcgtgggatcagagttcatcacaatttctggaaattaaaccgaagatcgagttcttctcttgtttgaaaaattccgatacattttagtactttctgaccttgtccatgatgttttcttacccgtgtcttttttcatttttaaggtgactatgtggctttgtgtgtgcgggttgcttttatctctggatacaaggttgaagcgtgagcgtgttatcgataattatcttctaagaagcatgtttcttaaacgttgaacattgcagtcctgtcttgagttttcttcaaggcttggtttaacagcgatatatagagagagaaagaaaaattgcattgtctgtttgcattagaatctgtcttccccccgtgtgaaggtgttgaatttgcaacactgttgattgagagatattaaaagaaaaaaaaaaagtgaagaagggtattgagatttttgc

SEQ ID NO: 34032 - DNA, 740 bp, Glycine max
  unsure (1)..(740): unsure at all n locations
ctcttataagcaaccccatctctctgtcccaatcccaacataccccccactggtccttttccattctttatacagacacacacaataaagaaaaagaaaaactacgttttcctttcactattctttttcaccctctccctctctcccatatatgatccaatatattgctataatacaatagaaccaacaactgtgacagacaaactctgagtagtacctcttttattctcctcctccttctctttcattcgcaaaccactctgccatcgtgttttctttcacctcttaatgaaacctcttggtttgtgtggttgaaacaaacaaagataagtcataataataaatcgggttggattcggaagggatgatggcggtgagttcaacctgcaaagatgggagcaaggtggcactggacaacggcaagtacgttaggtacacacctgaacaggtggaagcactggagaggctctaccatgaatgtccaaaaccaagttctcttcgccgtcaacaactcatcagagagtgtcccattctctccaacatcgaacccaaacagatcaaggtttggttccaaaaccgaaggtgcagagagaagcagcggaaagaagcgtcacggctgcaagctgtgaacaggaagctaacagcaatgaataaattactgatggaggaaaacgacagattgcagaagcaggtgtcacacctcgtctatgaaaacagctntttccgccaacagacacaca

SEQ ID NO: 34033 - DNA, 441 bp, Glycine max
ggttcctctcttcaaacaaattcagccaaaacccagtaaccaaaccatggcctttttcctaacacccattcttctcaccacacctcccaagttctaaaatccccagtcacctcaccaatttttaacccaactccagagtcccctgttttcccctgtttcccttcccctgctttttgcacattttcactgttgttgagtgtggacactcacaatgtcctcctcaagtgtctgccaagggttgcaatcttgtctcgaaccccgcgtgatggagccacgtgtactcaggctcaaactcgcactacaacaaggttccaattttcctcaaccctctccctctcccactaccaacacattttcactttcacccctctctgactccgaagaaaacccacctaccaactgccaatgtgacaaaaatgacacaaaatccggcgagcctag

SEQ ID NO: 34034 - DNA, 385 bp, Glycine max
acttgtttcaagatgctactatcaagaattctatgtctcatatgaatggaagtagacatgaagccaaatcttcagctgccacatcaacagaaaaccaccttgagacaaaaaaatttgtccaatcctgagccagaaaagaaaataaatggtagtcaagtagatgagagtattaaggtgcctaatcctgagccagaaaagaaaataaatggaagtcaaatagatgagattattaaggtgcctaatcctgagccagaaaagaaaataaatggaagtcaagtagacgagagtattaaggtgccaactgttgaggataatacctttgtgaatgctgggtctctggaaactgttcatgctgataataaaaccagcactgggagacgtcttc

SEQ ID NO: 34035 - DNA, 416 bp, Glycine max
tgttataggttatttggcaccagagtatgcgataggagggaagctaacaaggaaagcagacatttacagctttggcgtcctccttggggaaataatcagtggaagatgtaacacaaactcacgactaccaatagaagaacagtttcttctagagagggtatgcatgtctcatattccccatcgtattggcatatcttttactagcatcaattcttgcagccagtttttcttattcaatcatttattctaactaaacatgaattcaccatgttcatttagtaattacttgcctgaagtcacaaatgtttattggaccgtgtgctcgtctacatgtaaaacttgaactccctatttggtttgaactgctagcaaaatacagaatcatattcatatgtgaaaggatatgcaaaccaaac

SEQ ID NO: 34036 - DNA, 597 bp, Glycine max
aaccctaatgcctgcaagggagagtagttggagtgtaaggcgtaaagtttcccatggtaacatgaaagaggttgtttcggtccctcggctatcgtttccaagggtttattcggattccatgttgtgtcttcgtacatcagcaaatgcaattttgtctccatcctcatccctgtcgtcatcttcatcatctatatcatcatcatcctcaccgtcttttgtttctccagattccattacttctgattctagcattcattcaaggtttttgtcagaagtgtccccagactcttcatctctgtactaattgtgctagtttgtcaatcacatcaaattctacttctcataatttttctagtttgtccatcacatcaaattctacttctcaaccagtgtctcacagtacagatatccttggtgtcaagttatcacatcccttgtttcagtcagcctctttaccattgaagaaaccatcaacttcccttgctgaacgcagaggtagcttgtcaaaaattctgatgttgccgctaatgaatgataagacacaagtaacagataaatcgacaacgtctcatgctagtcaagaatctgacattcttg

SEQ ID NO: 34037 - DNA, 645 bp, Glycine max
gtttgttccagaagaactctcttttgggggctccaaagatcacaccaacattgccaaaggaaaaagaaccaaaagggtaaggccacaatctcctattcccttctccatcaccgccaattcttccaccggaggagaaaaagaagaagattgcggcaatgttgatgatgacaacgtcataaaaaatgaagatattaacaacaacaacatcaataacatcaacagcactcccaccacttctgcagaattacaagacatcacagatgaagaggaggacatggcgaattgcctcatccttttagcacaaggacaatcccgggaatccccgaaacacgccgaggaagacgccggcatgagctacgccaagcacaacagtaggaaattcttggaagctgctaccttggggtctagcagggcagggtactatgtctatgaatgcaagacatgtaacagaaccttcccttcatttcaagcacttggaggccacagggcaagtcacaagaagcctaaggcattgatggctattggccaaaagaaaaaacagcaacatcttttgtcatcagatgaggaagagtttcaattgaagaccaataagtcaccattttccattcaattgaatacaaatgggaatttgtacagcagcagcag

SEQ ID NO: 34038 - DNA, 632 bp, Glycine max
ttttttagcaaaaatgttaaattaactgtaataataaccgttaaattccgtgcgtatattggtatatactatataacgtataaggaacggctgcatcactcgtgtgtcagtcttctgtctatttttcagtgtaaagtgccaacacggcttccgtcacaaccgctcccatttccaatccaatttcttcaaattcgctcaattcaattctctctctcatcccttttttcaagctccaccatcccttctctctctttctctctcaaacagaaaaaaaaaaaaaaaccgtttaaaacaatctctctctctctctctctcttcaatcaatgcctcaccaagtcatggtccgttcgcagccagcgaacggccaccggaggcgcggcgtcggcgaagtggccggcagcgccgcggcagactgcactgccgtgtgctgctgctgcccctgcacggtcgtcaacctcgtcgtcctcgccgtgtacaagctcccgaaggggctcgtggaaaaagctgcgcacaagagacgacgccgtatgccgaagaagaacaacaccggcgacgtaaaaaacggcgtcgttttgttgcaggcgcagcgttcgagcagcgtggaaacgctcgatattgcggtggggcccacg

SEQ ID NO: 34039 - DNA, 377 bp, Glycine max
cagttttggtatgcctgtgggatgattactgaagaataactgaaaaacctgagatgcatgaagagagagattaaagcaagttaatttgttggtttatggttttttctatagttactacaacataccatatattttctgattttaggcggtcatatatacagatatatgttatatattagacatggaagaagttctggtgggatacccgtatactgtatagatttatgattgatcgattagattatccagggtcttgttaaagttgggtttatatttcgtagaccaaggagaaggattcgatcatgctcttgtacatctttcttttgttatataattagtgggtttgttttattaaaaaaaaaaaaaaaagggcggcc

SEQ ID NO: 34040 - DNA, 469 bp, Glycine max
tttcgtccgctttgataggagttgatccattccactgcaaaatgaggattgagcaagagagtgatggagtctccgcttccacaaagcacctcgtctttgcgtattacgtcactggtcatggttttggccatgccactcgagtcactgaggtggtgcggcatttgattcttgcggggcatgatgtgcatgtggtcactggtgctcctgatttcgttttcacctccgaaatacagtctcctcgcctaatcattcgtaaagtgcttttggactgtggagctgttcaggctgatgctttgactgttgatcgtcttgcctctttggagaagtattctgaaacggcagtaaagccccgtgctcaaatcttggctcaagaaaccgagtggctgaactctgtcaaagctgacttagtgatctccgatgttgtcccagttgcttgtcgagcagccgcagatgctggcattcgctctgt

SEQ ID NO: 34041 - DNA, 483 bp, Glycine max
atcggtttatcgtcatcacaatcccaattcatcgctcctccaacaatacaacagccatcatgtctctgaatctccggcagaagcaaacagaatgcatcgcgcgcatgctgaacctgaaccagcccttaaacgccgccggaaccgcgaacgaagaggtctacaagatcctcatctacgacaagttctgccagaacatcctctcccctctgatccacgtcaaggacctccgcaagcacggcgtcaccctctacttcctcatcgacaaggatcgcaagcccgttcacgacgttcccgcagtttatttcgtccagcccaaccaacccaacgtgcaacgcatcgtttccgacgcctccaaatcgctctaccagagcctccacctcaacttctccacctgcatccctcgccccctcctcgaagacctcgccaccggaaccctaaattccgattcgattcagcgagtctccaggttcacgatcagtatct

SEQ ID NO: 34042 - DNA, 532 bp, Glycine max
cttggacaggcatcccctagcatgagtgttttcgctgcaggtcaggctgtttcttacaaaatgtttcagacaattgaaaggaagccagagatagatgcttatgatccaaatggaaaaatattagaagatattcaaggcgaaatagagttgagggatgttgatttcagttatcctgcaagacctgaggaactgatatttaatggattctctcttcatataccaagtggtacaactgcggctttagttggacaaagtggaagtggaaagtctacggttatcagcttggtagaaagattctatgatccacaggcaggtgaagttcttattgatggcatcaacctgaaagaatttcagcttaggtggattagaggaaaaattggccttgtcagccaggagccggtgtctgttgcatctagcattaaggataacattgcatatggaaaggagggagcaacaattgaagagataagatctgcatctgaacttgctaatgctgctaaattcattgataagcttccacagggattggaca

SEQ ID NO: 34043 - DNA, 299 bp, Glycine max
cttgtctcttgggtttgacaactgctataaatgaatggagcagcgtgttatattcaataatctactctgcatctccaactattgttgttggcattcttgacaaggatctctagtaaaaggacactcctaaagcatcctcagcttcatggcgctgggctgagacaggaggcctacaacaaaaagttgttttggttagcaatggctgatactttgtggcaaagcattgctgtcttctttactcccctaatcgcatattggggaaccactgtagatgtaacaagcataggagatctttggac

SEQ ID NO: 34044 - DNA, 516 bp, Glycine max
ttgacgcgagggcggacgcgggggcgagatcgggattttcttccttcacctccgacgtgctcctcagctccagaggctcagacacacgccatggtttcaccggcaatctctacaaagctcttgccgacaggggaatctacactttcatcgacgatgaggagcttcagagcggaaaggaaataacaccaacgcttctgaaggcaattcaagagtccaggattgccatcaacgcgctctctataaactatgcttcttcctctttttgtttagatgaacttgcaaccatccttggctgcgccgagaggaaaacactcttggttttgccggatgtggctccttctcacgtgcgacaccgggaagttagttatggagaagcgttggctaagcacgaagaaaggttcgagcataacacggagaagttgcagaaatggaaaatgactttgtatcaagtagctctcttgtctggctatcatttcaaatatggagatggatatgagtatgagttcattgggagga

SEQ ID NO: 34045 - DNA, 569 bp, Glycine max
cggtcgcgtgggcggacgcgtgggcggacgcgtgggaacaagctttgaaagctgggttccgacatcttgtctttgaggataactatgacactggaactggtgatcattattcattaaggcagatatgtgatcaatcttatattagaggtggggggcacaattgctttaaagacagtgatgaagctaggatcaggtcaaggaggaagaaattctgggagaaagcagtcgatattggagaaactctgtggtccagatgaagcatggtggggagttagaggctttatgcgggataactttaatcatagtaataagccaatatcttatgctcaacatttccagaatagccgatatattgaatctattcttgatgtttactgggagctccctccagttgctggtccttccctcacccatcaaaccagatatgatcctgctcgtgcacccagtcctattgttgaagatgggcggtatggcttgttccgaaggctaggtttggccaaccttgacaattctgtatttaatggatacactcagatggtttatttacagatatctgaacaataagttag

SEQ ID NO: 34046 - DNA, 449 bp, Glycine max
agaagccatcagctgggcgtgggagcttctaaccaatgtttattaattaccatcagatcgcatttatgccacatattttggtggtgatgataagtctggtcttgcccctgaccttgaggctagggatatatggcttaagtttttacctccggggcgtgtgcttccttttgactgtaaagacaatttctgggagatgggtgatactggtccttgcggaccttgcactgaaatacattttgacagaattggtaaccgtgatgctgcatcattggttaataacgatgatcctacctgcattgagatatggaaccttgtctttattcagttcaatagggaggctgatggctctcttaaacctcttccagcaaagcatgttgatacgggaatgggttttgaacgtttgacctctatacttcaggacaaaatgagcaattatgatacggatgtct

SEQ ID NO: 34047 - DNA, 491 bp, Glycine max
cccatgcgtccgagaaaaagtctctcataagcatacaccatttttgtggcagtgaacaattgcacacctctttgcaaggcaacatgacctttcttgtctagaacttccctcccactaacccataactcatatatggccttctttagagcactcaccgttggtgcaaatgcacaacccatttcattgccaacaattacagatcctacaatgcttgcaagcctagtggccattactggcttcccagtcagcatggcttctatagcaaagtgtgatccaaaccttgtgctcttaaagtggggtttacaaaaacgtcaatagcattataaaaagaggccaattcagcttgctccaacggccccaaaaccaatatattttccccaagatctctgtatcgtgcaccccaaggaccatctcctgcaaccacaaccatgctacaatcttggaaagtgctattttcttcaattgtctgcttcaatgcttcaaacatcaaa

SEQ ID NO: 34048 - DNA, 895 bp, Glycine max
ccttttgcgttcgaaattatatatccgaagggtgctgagatagatgtccgagcaattgtggttggtgatcatacaatgtctgttctagaaatttggggtgcagagtatcaggagcaggatgcaatcttagtgaagcctgaaagccgtgatctcctagaatcaatctgtaacagggaaaaagtttcaatggctgttattggaactatcagtggagatggacgtgttgttttagttgacagtgtagcagctcagaagtctatttcaaatggactccctccacctccccctgctgtggatcttgaactggagaaagtccttggtgacatgcctaagaaaacttttaagtttaatcgggttgtttatgagcgggagccacttgatattgtccctgggattgaagtgatagattctctgaagagggtattgagtttaccgtctgtttgttcaaagcgcttcttgacaacaaaagttgataggtgtgttactggtctagtggcacaacaacaaactgttggccctttgcagattcccattgctgatgttgctgttacagctcaaacttttgttgatgtgactggaggtgcttgtgccattggtgagcaacccatcaaaggcctgttagaccccaaagcaatggctcggttggctgttggagaagcactaacaaatcttgtatgggcaaaggtcacttccctttctgatgtcaaggctagtggtaactggatgtatgctgccaagcttgatggggaaggagctgacatgtatgatgcagctatatctctatctgaagcaatgattgaacttggcattgctattgatggagggaaagacagcctttttatggcagcccacgctgaaagtgaagttgtcaaggcaccaggaaatcttgtcatca

SEQ ID NO: 34049 - DNA, 460 bp, Glycine max
acgagctcaactgcattctccccttcccattttctgagaaggtgggagagagaccccagagaaattcaatacatctctttctctgggtctgatcccatttgtctctccagattcgcccacccttttgcttcaatttctcaaaaccgacacgcatttttttgtcttctaatttctggtggctgaatctcaaaaaccctagagagcaccgatttgggggctacgtttctgtttcggacggagaacgagaaagcgaggatttacgcccgacccatttcgattggaagggtccagattcaaagggatcgtttgatttcatcgaataatcacccgacacgaaagggggctagatgcgaagaaaccccctctgaaaactggaagcgttcttctaaaaatcgatggattcagcgttttcgtccttgggtttcgtgattttcggtatttcaattagtttttacgcgtt

SEQ ID NO: 34050 - DNA, 451 bp, Glycine max
cggttgctttgggtggcagtagcaccagcactagcagcggctcgaccgggtccggttcgggtcggaacggaaacaataacgcggtttcgaagagatctcattctggtgagttgtctgggtcgagctgagaccaatagtccgacccgggtttcgaaaccgggtcaccggagatccaattcgggtcaaagccagagatctccttcgtcgccctcctccgctgtcaattctccgccgctgaacgttctcccggccgggaacatctgcccgtccggaagggttctcaaggcggcgaccgcggccgtggcgccaagccggagctccaggtcggatgttctgggctccggcacggggaattacggccacgggagcataatgcgaggtggaaaaggtggcggcggcggcggcggtggtggtggtgatgtgaggatcgctggcgaatcggcgaagggcg

SEQ ID NO: 34051 - DNA, 582 bp, Glycine max
ttatttatggacagagttattcagcctcctttggttgatacgactgcgtgtttatgcagagtagatacaggcctaaaaactgttgctggagcaaagaggtatgtccctggaacaaagctctgtcttcggcctgacattaaaccatccattcacccaactagaaacaagccagcacgtggtgacagaagccgtagtcaatcccctctacttccaggactccctgatgatctggctattgcttgcctaatccgagtcccacgagttgagcaccgtaaacttcggcttgtctgcaaaagatggtatcgtcttttggttggtaacttcttttactctctccgcaagagtcttggaattgcagaagagtggatatatgtcattaagagggaccgagacgggaataatatcaatggcatggcctttgatccctgtgtacccaactatggcagcccctgccacctgttcctaaggaatattctggagctcttggttttggctgtgctgttctcaatggctgtcacctttacctgtttggagggaaggacccactaaagggatccatgagacgcgtcatattttatagtg

SEQ ID NO: 34052 - DNA, 534 bp, Glycine max
  unsure (1)..(534): unsure at all n locations
acgagcttcagaacctctctgcactgatctctgccagcggcaatgccacaacagctacagcacggcctccgagagggcggccctgggcggttcacgcggcgtcgtcggacactaccaccgccgcgcaagcgcagttgggtaggtacgaagaagggaagctggagcgacccaagtgggttggggagacccctctttcacgtctcgttcaagctctcatctccttcaagcccttgttctctgtcctcaagcttggtgctagaagggctttgataagtacagctgagaagaacaatataccttggaggaaaatggcacaagagattttagagtcagaagtgtatagggagctggagagcattcaaaaccagtctttagtgtatcctgattattatttgaatccatttcatgcatatgaagagggaaatcttacatggctggcagcagcagaagcagaggctgctacaatgtcaatggccagacgagcacttcctgatgcttcttcaatacaggaagcanatcagatactgcgtggca

SEQ ID NO: 34053 - DNA, 394 bp, Glycine max
cccactcgtccgattttataaagattaaaatatttggtggcttttactggaaagaaaatgaaatataatattaaatgataataacaagaaatatatctaagacttcttaaaatttagtgtgacacggtgactaactctctcagtctaattaatagtttcaagttatcaaaatattatctgcacctatttccatattttacttcaaaatgatcattggattgagtatgtcacttgaattggaagaatgatgtcaataattgtttttacattcttttcaatcctcacgcataaaaaaaatgatgacgacaaactaaataactcacttctttcattattttatgatgaaaggctactcgattttcttaaaatattgattaaagaattaaataagttt

SEQ ID NO: 34054 - DNA, 455 bp, Glycine max
aattggttctcccaccactctctccagctccaaagttcgtcgttccctcaccaattttcaaccattcttcttttccttcttatctttgcttgcatttctgttttaagttattactattgtcttctctttgcgtttacttttctgctgctttcttgtttggagaaatgcagcatcatttcaagtcttgtgtttccaaaacttgcttcaattgtcaaatccaaatgtgtgcaattgcgtctatttgttcgggttttctcttattttctggatggataatcatgtccattaatggtctaccaagcattgcatttctgttaaacatcaataagtattattgtggataaatattacccagacttataacagaatacgtgtatatgcgcagctcctgagtgtgtattattctgcattcaactgcagaatcacaaatagccgttttagtgaggcattgagtg

SEQ ID NO: 34055 - DNA, 487 bp, Glycine max
tttcactcgtccgctgccaaccacactgaacaacagacacagtctgtttggtcagaatatggagaacacagatccttgtagacattttctcagggatgttaagcgcatcataatcaaggttgggactgctgtggtcactcgccaagatggaaggttagctgttggaaaattaggggcactctgtgagcagattaaggagctgaattctcttggttatgagattattttggtgtcatcaggtgctgctggccttggtcgccaaaggcttagatacagaaaattaattaacagcagctttgctgaccttcagaagccgcaagttgaacttgatggcaaggcttgtgctgctgttggacaaaacagccttatggctctttatgatgttttgtttagtcagctggatgtgacatctgctcagctttttgtgacggacaatgattttagagacaaagatttcagaatgcagctcagcgaaactatgaaatca

SEQ ID NO: 34056 - DNA, 322 bp, Glycine max
ttcactcttccgcccacgcgtccgcggacgcgtgggttttctcttacatatatgtatacacacacacaatagttaatttgttgttgcttcaattcgtttcttgcgtcaaattaagtcatctggggaggctcataatgaatatagggttagtggtaatagtggctgtggatctgctggagtggggttgcagctgcacatgcacaacgagtaccttgctactttatttttggagactcttcggcagattatgggaacaacaaccagctttggtcaaatgcaagagctaattaccttccttatgggattgactcctctgttggcc

SEQ ID NO: 34057 - DNA, 351 bp, Glycine max
ctacgcgtccggccagttgttggtgtcagagggtgctttgatgctggaagtctactcttatccaaggacagcttgggagaaatcccccatttctcatagcacccgaatatatagtggagagagtacagtccaagggtttgccattgaaaaggaatatcatgttgagcttcttggccatgatttcaatgatagggaattgatagttagatataaaacagatattgataacaagaagattttctactcagatttaaatggatttcagatgagtcgaagagaaacttacgataagattcctctgcaaggtaattactatcccatgccctatctagcattcatacaaggatcaaa

SEQ ID NO: 34058 - DNA, 406 bp, Glycine max
ttgaatttacgctttctggggctggagagaggagacctgtgagaactgagaaaagaacacaccacatatagagaaggtttgtgagaagtaaagaagacgcagacagtgctttgattttgattgaataaaaggaacaaaccaacaaagttatattggaaacgtgcccaacgctacttcttcgccacatgcaacagtgacgccacgccaccgcgagatccattcgtttggaatccatctatcttcaaaatgttaagaatttgagaaatgggttttgaaatccaagcaatttgagacgcgggttttgaaattcaagcgatttgggacgtgtatttttgaatttgaggccattttattgatgggtttgggaggaatctgaggaaatttcttcaatgtcggagagcgatca

SEQ ID NO: 34059 - DNA, 364 bp, Glycine max
acgagaacaaatggaagcattggcggtgggattagaaaaatccgaaacgagattcgtgtgggtggtgaagacggcttccacgaaggaagaaatggatgaagggttcgggttggtaccggaggggtttgcggatcgggtttcgggtcggggcttggttgtaaccgggtgggccccacaagtggcgttactgagtcaccgagctgtgggggggtttgtgagtcactgcggatggaactcggtgttggaggcgatgacgaggtggggttgtgattgtggggtggcccatggaggcggatcagtttgtgaatgctaagatgttggtggaagatagagggctagggggtgcgggttgtgaagggtcggt

SEQ ID NO: 34060 - DNA, 368 bp, Glycine max
ccctcgcgtccgcggacgcgtgggttcgctaaatctgcttcaatcaatcaatctttgtcttcctcacaaccaccaccattctccgccggtcaaaccaccgtttcagtggcgggaaccgagcttgaccgttattaggtgcatccctgtttcgtttagacatggaggtttccgtttcgtcgccgccgagaaagtccatagcggagaaggtattcggaggttactataacgggaacaatagccacaaaaaacgtggcagtgaggctcacgatgatgacagcgatggaggcatggaactcatggagattggcgcccaaaggaccaagaacgtcttgattctcatgagtgatactggtggcggtcacagagct

SEQ ID NO: 34061 - DNA, 486 bp, Glycine max
tttttcgattcacgcgtccgttgtaatgttgatgatttgagatcaagaagatcttctgtaccattacttgaatttgagtctggatgttataccaactcatcttgaagtaggtgaaaactctccagtttctacagatattcaaactaatcatttggttgctgatttaaaggtattaaacaaaatttcttcctttcattcaccaatttccaacatgctggattcaaatgattggttctggaagccatttgctgacattcgacagataggcataaaggaattccagaaaagattattgccaaaatttgaatttgtaagcagctctattgctgaatatatacccacagcccatcaattaatcactgaggaaggtacaaggttgcatatccctctcaagactgacaatcatgttgtgtctgacttcgagggtgaaccctcagcataattgcttgtgcactggccttattgaaagatgcatatgaggtgtca

SEQ ID NO: 34062 - DNA, 539 bp, Glycine max
cactaaagaaattttctccttttttcccccatagatcatctaagctatggcgaggacaagaaacaagagtttacaagcaaaactggttcttcttggggacatgggggcagggaaaacaagtttggttcttagatttgtcaaaggtgaattttccgagtaccaggattcaacaattggagcagcattcttcactcaggtgttgtctttaaacgaagcgactgtaaaatttgatatatgggacacagcagggcaggaacgataccacagtttggctcctatgtactatcgaggtgctgctgctgccattgttgtgtatgacatcacaagcatggattcttttgtacgagcaaagaagtgggttcgagaagtgctaagacaaggagggcgaggaatatgccaaagaaaatggcttgtcttttcttgaaacttcagcaaaaaccgcacaaaacgtgaacgagctcttctatgaaatagccaagagattggcgaaagcaaatccttcacgtcaaagtggaatgaagctgcataacagagctgga

SEQ ID NO: 34063 - DNA, 379 bp, Glycine max
tggtaatgaagttggtcgtggttgttctcgaacgtcaattggggatgcgaggtacaaagggtggctcgaaaagagtatcgattctgaaacgatggagaaaaaaggggttgtaacggttacgcgccttttcggaccgaacgcaccgttttattggtttgtcttttgaaccgtcaaaagttgtgtcccattgtttccttcctccaatataacgttgacaacttcaatttacagtgaaacgcgctctttcctttctacaggcttgatcattgcagaacttggccataaaattctgataaatttctcaaatggatcacgggaatcatcttcttgttttttactttgctctctttcttattaagaggtgagtcatggggttggt

SEQ ID NO: 34064 - DNA, 398 bp, Glycine max
cggacgcgtgggcggacgcgtggggcaatgtagacgactctgagttaaaggctctctttgagcaatatggagatatccgaaccatttatacagccagtaagcatcgtgggtttgtcatgatttcttatcaagatctaagggcagcacataacgcaatgcaagaacttcaaaataggccattgaggtctaggaaacttgatatacattattcaatcccaaaggtcaatgctccagaaaaggatattggccatggtacactgatgctatctggtcttgattcacctgttttagatgacgagcttaaacaaatttttggattttatggagaaattaaagaaatctatgaatatccagaaatgaataatcacaaatttatagagttttatgatgtccgagct

SEQ ID NO: 34065 - DNA, 477 bp, Glycine max
ctttgcgtgggcggacgcgtgggttaggaatcaacaagagaggggtccattttttccgtcccgttccaaaggaatatatgcactctgctgaattgagagacataatgcaatttggaagcagcaatactgcagtattttttaaaatgcgggttgcaggtgttcttcacatattccagtttgaaacaaagcagggagaagaaatttgtgtagctcttcagacacacataaatgacgtaatgttgcgacgctattccaaagctcgatctgctgtgggtgaatctttgaatgaagacacttctaatgattttaagccttctaatttggaactatctgaaaaacgtcttcaagagttatcaaaacttgttgaagaatctcaaacgaatgctgatcaattgctggataaattgcgtgagaagcaaaaacaagaagaggacatgctacaagaattagagggcttacaaagatcctttagagctg

SEQ ID NO: 34066 - DNA, 458 bp, Glycine max
ccctttcgtgcgcccacgcgtccgatttaactacgggaggatgtccaaagaacaatggtcaaaacagttgtatattcaataaggctccaatttcagcaatcacgaataagaaaacatacgaggaagatacctgtgtcgacaagtcaaatcctcagcatgaaagttttatcaagagatacagcatcaagttggcatccacaagtgcagacctctggatgggtattgtattgctcttcatagacattatggttgctttagaaatacttgtaaggcaagtgcacggctgcaaggcttccgggagtcaaagaaagagactaaacagaaccatgactgacattattgtgctaattccagtgacaatcttgatgctaattcctgtaacagctgtaggccatgcagctattctagcagctatcaagaagtatatgccatgcttgatcccctcctctttttcttca

SEQ ID NO: 34067 - DNA, 487 bp, Glycine max
gtcatagactgtgaaagttatgggagctgtggttggaaatgctatccctatgttgggagatgcatcatcagtttatgctcgacaaggagcaggcatgttgattagttttcttgttcaggggctgggtgtagagttggtaccttatgctcctctattggtggttccgcttctaaggtgcatgagtgattgtgatcagtctgtcagacagagtgtgacccatagttttgctgctcttgtacctttacttcctttggctcgaggccttcctcaaccaattggattaggggaaggtgtatctagaaatgcagaagatttgcagtttttggagcaactacttgacaactctcatattgaagattacaagttgtgcactgaactgaaagtaacattgaggaggtatcagcaggaaggcataaattggttagcttttttgaaacgtttcaagcttcatggaattttatgcgatgacatgggacttggaaagaca

SEQ ID NO: 34068 - DNA, 568 bp, Glycine max
ggtatgcgtggaggacactggaattggaattcctttctcagctcaggataggatattcatgccatttgtgcaggctgacagctcgacctcacgaaattatgggggtactggaattggcttgagtatcagtaaatgtctggttgagctaatgggtggtcagataaacttcataagtcgaccccaggttgggagcaccttttcttttactgcagtttgtggagcatttaagaaaagttcagttaccgacgggaaggttaatttggaagatcggccttcaagttttagagggatgaaagtcattgtggttgatgggaagcctgttagagctgccgtgactagataccatttgaagagactagggatactagttaaagttgcaaataggatcagtaaggctgttgctttatgtggtaagagtggttctttgaaatcgggaatgttccagcctgatattatcatggttgagaaggacacatggataactggagaggatggcattttcaatacatggaaacataatggtcgtacgattaagatgcctaaaatgatccttctggcaaccaatatt

SEQ ID NO: 34069 - DNA, 469 bp, Glycine max
catctcccaatccccccactggtgcacgcctcatggccttgttgggaacccaaaatcctccctccaatcaggaaccatcatcggttgtgtactcatctccatcaccatcacctgtggtttctgatttctcagtgccaccagcctccacacagcagccctcagggtctcctgtgaatctggctagtcctcagtccacaccaaccaggatgctcagcaccaaactgcccaaggggcgccacttgatcggagagcatgctgtgtatgacattgatgcgagggtgcctggggaggtgcagcctcagcttgaagtcactcctatcaccaagtatgcctcggatccaggcctcgtgcttggccgccaaattgcagtgaataagtcttacatatgctatggactcaaactcggggccatccgggtgcttaatatcaatactgcattgagatatttgcttcggggccatactcagag

SEQ ID NO: 34070 - DNA, 670 bp, Glycine max
gcgcccacgcgtccgtccacgcgtccgtgcgctttggaggcttccattttccctcactttctgttacctccaaacactgtcgaattcttcttcgttctctgcgacacatggagatgtcaatggaggattcgcgctcgcacgagattctatccatggctctcgaagctttcctccgacgcggacgatctccccgattaccgaacagttctataccggttacgccacgaatatctcctttgacgccgtcgttttaaggtcctttcttggctctccgaatttcttcgtttctttcgctgtttatgctcggaattccaacagtaggatatcgttgtctcgtgatttcccgtttcattcgtgaatcatttgttgttagtgactttagattggttatttgtctctgtgcaaagtttggatatatgagaattttcagcgcgagttagtctcggaaagttttctgttatgctatgttagggtttggaaccaagtctgcaatgtctctgaaaccttgatctggaatttaagggagattcctgttaggagtttcgtggttttggaatttaagagaggttcctgttgtgtttgtgtgttgattgattattgaatattgtctagtgttgaatttttccgttgactttttggttggggaaattttaatggctggaaagttgga

SEQ ID NO: 34071 - DNA, 440 bp, Glycine max
ttttaccaccacctggattttctgcagcaaaactggactcttcagaggcatctgggcggccatattccagtacctttgggaacatgcattctggtttaagcgaggttgagatgctgagaaatgattctatgcataggagttctactacagaagctgaaaataggtttttggagtcactcatgtctggtagcaagagcagttccccactcagtagtctcacattatcagaaggtttacaagggtttcttggtaatgattctggtaatttgggcccatcaggagtagatagcggaatcaacctttacttactggccaagaggatggcacttgaacgtcaaagatccttgcccaatgcttatccatactggccagggagggatgcagcaccccttccaccaaaatcagatatttttccagatgcatcgccacattcaaatatg

SEQ ID NO: 34072 - DNA, 494 bp, Glycine max
  unsure (1)..(494): unsure at all n locations
tggtagccattgtgccttgtgacttcaatctcatcacgggtttgtataatttcccctctccaatcacacaattgaaatatgcacttgagttgacagcactcatttttagaccttatgcacaataagtataaacatactcatgctttagactcatggataaataaaaataattcatttcacattaattaaaaaaaatagttcatattatttaattttactaatctcaagtgataaataaaattatttctaaaatatcgttaattgaaacttgttattatggataaaaaaaaagtcattgaaaatagaactaattaaataaagaatgttttaagaataataacattaaatataataaaattaattaaatttgtttatatttaacttcaacgtataagataactttnttaattatatatgagcccataggaaaaaggtttattgaataagtaattaaaatagaaataattatgtataagttaatttaaatgaatgta

SEQ ID NO: 34073 - DNA, 326 bp, Glycine max
ctcgataatcactcccgaagatgtgttggagtcgctgatgaacgacggcacaattgatgccctcagactgaagatcatcaaccagctcaaagccaatgaggaattgaagagtactgcggtgaagatggctgagcagaggggggttctgaacacccctggggctgagaaacagaccaaaagagagctctttgacgcacttcggcaagaacttgaagcttctgtacttgaaaaagcctcaaaatcagtttgggatttaattttagacaataatggcctgcgtaaggagattagtgaaacggttgagcgagtgttttgtcgattgagtg

SEQ ID NO: 34074 - DNA, 432 bp, Glycine max
tgttcatttccatcttgggagcctaatgccctttcaatgttttatttgtctgtaggaacaagaaagatcaactttaatgatttgttactactgaggagacctcaaagatcttaaaccagacatttgtaagtgatgaacaatattttgtctttgggaagatgcatggattctcccatgttgatggttttgtggaaataagcaactgcttggcggaaatgattaaatacgcagccaatgaaccgtctgccggtctcttctttatccaacatcacactcaaaatgcagtgccaaatgtcatcaaacttaagaacaacattattgacaagtctcacgaaacaactttgcagaccgaagatttggaggattccgtcgcaatggtgagatcaatgaaagagtgtggattccccatagctgatgagatgatcggagaca

SEQ ID NO: 34075 - DNA, 431 bp, Glycine max
ttatagctgaaagaagtgacattccagacattgataagaaaaagtaattgattttcttactacttctgtcccttttgattagtttccaggcctgataatgttgttttgctgcctgaagttttaatgattttgtgggtggggggggtactgatgttcatataaaataccgatcaagatttaatgattttgtattgttaaagctatgaagcatgtttggtatgaagctttttgtacgccactcataacttctttatcaaatggcatttgtaaaagattaacaagtgaggccagaatgtactaatggtattcttattgcaaaatctactttaccgaagtgagtgtatatggccaagccataagttgttggtcacggtggagtggcctaattggccactgtcactagagccttggatgctactgcttgatcttat

SEQ ID NO: 34076 - DNA, 502 bp, Glycine max
cccacgcgtccgaaaagtcactgtctcagaccaaggagagaacaagcacagcctcttagaaaagcttcaccgatctgacagcagctctagctctgtaagcttcttttcctttattttctttgcatgcataaacattatatatatataacttgttcatcctgaaaggaataactttatattaacttgtcttttttttttaatatttattttataatttaaacaaaacttaattttatacgagattgttctagttgaatcagcgatcttgagtttggttctaggattgtcaacccttgatgaatgatttcggatctaaaaaataaaaaataaaaaatgttacttcaaggtgggttttgattggtatatatatgtttgcagtcaagtgaggaggaaggagaagatggtgagaaaaggaagaagaagaagaaggaaaagaaagggctgaaagagaagatcgaggagaaaatagagggtgatcatcatcatcacaaggatgaggaca

SEQ ID NO: 34077 - DNA, 439 bp, Glycine max
acgaggattctcaaagcccgcaaggacttgggtttaccttcgaactctccgcccacaccctccactcctccctctccttcacccttcatttctaggcaaaactcaaacacttcttcaagactcagtgtcagtggtatcagcctccctcctcctctcactatcccaaacccttctgcttcatggcctactatgtctgagcttcaaacccgatcgggttgctggctcttctacttctttatcttccttacccttctatgctaacggaggctcggatccaattgatgagttccaacttcaagaccagctttctttcctgaatgatggttctaatactagcatttctcacaagaacaacccagatttgttttacccgacttactcagacttttcttcaagtcctactactgctgctgaccctaccctatttccttcctatggt

SEQ ID NO: 34078 - DNA, 276 bp, Glycine max
ccgttatatagttcggagtatttgaagataacaggggcgaactctgtcaaggagcgggaaacctctaattcgattgttcctggcagcaacaattacgtgacctacttgatcaccacatagactaacatttcggaatttggcgcctgaggcgccgactttgcggtccggcggcggttccgcgacgtggtgacgctctccgaccggctggcggaggcgtaccgtgggttcttcattcccccgaggccggacaagagcgtggtggagagccaggtgatg

SEQ ID NO: 34079 - DNA, 387 bp, Glycine max
gttttacaccacattcccctctatttgcaatgggggtctcctcttctttctttgggagcacctttttcaccttccattttccttctactatctctccttcaaaattccatgggtgcatgtttgagtaagaagaaagggtcttcttctacagcaaccaagtcagcttcttccacagcacatgttgctgtgcctgagctgaagaacaatcctccttctgttagtggtgtcactgtttccaaacccaaagtggaaactgaaactgccccagaagtgaaactgaacaaggacaattctaagaaagtggaagagaagcatgagacagtgccagaacctgaagggcatgtgaaaaaggagatattcatcatcaagcacaggaagagccatgat

SEQ ID NO: 34080 - DNA, 540 bp, Glycine max
acccctttatcacaaagcatgatgatgccaaggttgatttggcaggatttgttcgaagcgtttttgatcctacacaaagattgaaggatttagcagatatgttgacaatacattattacttgctatttgatggaccgggggatttgtggcaacatacaggggatttatatagcgaaagctcaattttcagtttctctgggaaacaacatcgtggtccaagtaatatctttacatctctatcaagtattagaactacattggttggtgactggcctcctgaaaagttggtgcatgttgttgagaggctccaatgccgcgctcacggtgaagatggagttgcaattagggtaatcaggatccttcataattggaaatcagttccttcatatgtggagatggcattcaagtagagggcttgccaaacttcaaggatcttggaattgacattcctagcaaaagaatgggtacatttcatgaacagttcattgtggaaccaacaagccttattggatgcgaaccaactagccttattggatgcta

SEQ ID NO: 34081 - DNA, 740 bp, Glycine max
tttctttaacaaattgttagaaaatgcaacacaaaatcttcgccacaatgcgtagcttgaagatcatggatggttgcaagggcactcaggtctacgccatcaacccctccggcgccggtggcgccgacggcccaaccggcggtggaatcggcgagaagcttctccaacagctccacgaccacatcaaaggccaaaccctaagaaccaaatcggttcggaacttgcaagctacgaaccatacgacgccgtcggaggttgtcctctccgacggctcgctccttccttatggcctctccatgacggaccttctggagcccaaaattgagccttccttgatgtcggtggacttcgtcgaaactctcgccggagtccaccgccgcacaggggactgcccccagttcgaccgctccgaggtctacctggagcaatgcgcggtgtttcaggggctggccgatccgaagctcttccgccgcagcctccgtgccgcccggcagcacgccgtccacgtgcacgccaaggtcgtgcttgcggcgtggctgcgccacgagcggcgcgaggacgagctcatcggctcatcctcgagcgactgcagtgggaggaaccttgagtgcccccgcgccacgctgactccgggctatgacccagagtcggtgtttgattcctgcgcgtgcacgcgtgcacacgcagggaatcgtgatattgatgatgatgcaatgacaatagtggttgatgagcaatgc

SEQ ID NO: 34082 - DNA, 626 bp, Glycine max
tcttttttttgggcatttcaggaattgactctgtctcctccatccccttcttctctcctccaattaaccatgatgcagatcagctccaccatacccgcacacaatcttcacatgttccaaatgagacgcgccagtttccgatgtcgtgcctctccgttgaacccaaccaccaccacaacgacgataacaacaacaacctcgtcttctccacagtccatgaaaccggtcaccgactccacccgcctgcacctctctaacctcgacaaactcctccagaagcaatcaccaacaactcaacccaaccacaaacaacaacaagaactagccttagccaccacaattcaaagcaacataaccacaacgacgacggagaagaaaggaaagaacgtcctggaaggcctcaacctggcacgtctctggccggacatgaaagccaccgaggaaatgtcgccgtgccacctcaaccgcctccagcgcctcctctccaagacggccgagtactcgccgcgaaacaccctcggcagccggtggcgcgagtaccacggcagccacgactggaaaggcatgctcgaccccctcgacgagaatctccggcgagaggtcgtgcgctacggcgaattcgtgca

SEQ ID NO: 34083 - DNA, 457 bp, Glycine max
tagattgcagaaataagacagggattgtccttttaacacaggcttctatgccccacataataattggttctagtcttctggtgcttgattttggtgaataatgaattatgttacatttagcactaatgcctaagatgggttttacagatttggtagatgactgagatgaatgtctttgatcattaggcattagccattcaattaaatcttaagagttaaaatgcttcaaagttcatatgctgtatgcatgtacctccctccctggatgagatagttaaatcttacagttgatatttatttcaatatgcgtgagtttgtttttctatcaaattcaattttcctcacaagtgtgcatcctttttccatttttaccttaggtcttgctaagctccttataacagatcctttcttgatttgattatactgatgatatctgatatctaacttgaaagatttt

SEQ ID NO: 34084 - DNA, 489 bp, Glycine max
ccaaagaggccctgaaggagggatcttctaagaattctcccgtgctctccgacccggactttgctaatacacgtgaatctgttgtccaggtccttggcaacttaacagcagttcactcatactttgatttattcacaaggaaaatcgaccaagatgatatggagcttgaggaggctgagttggagctagacattattcagaaggaacatgcattaccaggacgaatggatgattccaaagattggaatcagattccaggtcttccctcctacagaaaggatgtctcaaggcttcagcaaatcagagagtgcattcgttccctagaaaagtccaaacttaaagaagatatcatagctcgtaggcaaaagaaactacttatgagacatgcccgtcaaaaacatttggaagaagcagctttacgggaagcagatcttctgcaagaacttgatagggagagaacagctgaaatggaaaaagagctggaaagac

SEQ ID NO: 34085 - DNA, 355 bp, Glycine max
tatacccccccttgctccccctcctgtgcaccctcttctccattctctccctcgccctctgcctcttcctcatcttccccaccgccacaacaacaaccaccctccacccttctctctctccatgcttctcttccacaatcaacgcctacgtcgccgacctccctcgatccctcaactacgccctcctccacacctactggtcctctttctccgattcccgtctccccaccgatgccgatcacaccactcccccttcctccctccatcagacggctaagattcccccttaccccgagaacccactcatcaaacagtacagcgccgagtactggatcacgggcgacctcatgacccc

SEQ ID NO: 34086 - DNA, 492 bp, Glycine max
cccatcgcgtccgcccacgcgtccgaagaccagccttccatacacagcaccctcaacgtgtgcgagagagagagagaaattgctaaaagacaaaaaatacttgaaagaacaccatgaaagttctgattaacaatccgaaaccatttctctcatcaccaaactccattttccccaacaacaaccctcgctttcatcttcgcccattccccaaacgccaatggatcgggccaaggctctgtttggcgagggccgcgttggattgggccaccatcgagcaattcgggcttcccgtgttcgacgtccggaacccggcgctgtcgtcgtcgtatcgccgttcggagttgcccaggcccaaccagacggtgctggaggcccaggctagggtttgcaccggcccgacccagacccgccccctcgacgaacaacaggccttcaaggtcttcgaccttatcctcagatcagctaggggaggaatgaaagatgaagatgaag

SEQ ID NO: 34087 - DNA, 649 bp, Glycine max
gattctcaaagacagagggagattaaacacagagagcgcgagagatacagagagagagagagagagagagagagagagagatgggaagagctccatgttgtgacaaggcaagtgttaagagagggccatggtcaccagaagaagacacaaagctgaaggagtacatagagaagcatggaactggagggaactggattgctcttcctcagaaagctggacttaagagatgtggaaaaagttgtagattgagatggctcaactatctcaggcctaacattaagcacggggatttctccgatgaggaagacagaatcatttgcagcctttatgcgaatattggaagcaggtggtcaattatagctgctcagttgccaggcaggactgacaatgatatcaagaactactggaacaccaaacttaagaggaaactcatggggttgcttccttcatctcatcaaagaatagcaccctatcaacaattctcctctcaaaacccttcatcatttccttctcactcatcgctatcctcttcacaatatagggactactactacaactcctctcatcattattacatcccagcaccaacctcatctttcacatgccttgaaccaatttctgctccttcaagtaattacacaaacacaac

SEQ ID NO: 34088 - DNA, 468 bp, Glycine max
ttcttcgcgtccgcggacgcgtgggatgaagggacattgcccaaccgtgaattatacaacactgaagaacttcctaatagtgagtcagagaatcccaagttactgcccgacaaccaatcaagcaatgatgaggacccacacagcaatcagcatgttgagcctgaggcacaattcaacaatctatcagcgagctctgaagctccagctgatgataatcatgttagttctgaagctacccttgaccagaagcctgcgtctgaggcaccactcaaatatccatcaacgagctctgaagctccagctgatgataatcttggtagctctgaagctacacttgaccagcagcctaagtctgaggcaccaccaagcaaccagttggtcaattctgagacacttccgaatatggtgtgctacgttctgaacatcagactagtatgaggtggttatatctgaaacacagcaaagcaa

SEQ ID NO: 34089 - DNA, 468 bp, Glycine max
ttgtataatgatgcttttcgccgaatggcccggttgaccgatggtactttgagtgaggtgctgccaagaatatcagatactgatgtacaaatatcccgtcagcgtatttctgcatttctatcttcacacaccgcttatgaattacttcccgagtcaggcaaggttgttgctttggatgttgatctaccagtgaaacaggcatttcatatattgcatgagcagggagttttcatggctcctctttgggacttctgcaaggggcaatttggtggtgttcttagtgcttcggattttattttaattttaagagagctggggaatcatggatccaatctgacagaagaggagcttgaaacacataccatatcagcttggaaaggaaggaaaatcgtatctaaatagacagaacaatggacatggaactgcattttcaagatgttttatccatgcagggccatatgataatct

SEQ ID NO: 34090 - DNA, 443 bp, Glycine max
ttctttccacgcgtccgcccacgcgtccgcccacgcgtccggtccactggtttgagaaatttaattggttcattagcagtgagaactatttggttatcagtggacgtgatgcacagcaaaatgagatgatagtgaagcgttatatgtcaaaaggagatctatatatacatgctgatctgcatggagcttctagtacagttatcaagaatcacaagcctgcacaaccagttccacctctgaccctaaaccaagctggatgtttcaccgtctgccatagccaggcctgggattcgaaaattgttactagtgcctggtgggcttatcctcatcaggttagtaaaactgctcctacaggcgaatttctgacagtagggagtttcatgatccgtggaaagaaaaattttcttccaccacaccctcttatcatgggttttggcctacta

SEQ ID NO: 34091 - DNA, 452 bp, Glycine max
ctccttgttcattgtcatctacattgaattgaagctccaccaacctcttctgccacctttgttttcagtttccaaactctcatggggatattaattgttctgcttattttacttatcattcatatacacgggaatggtcatcacatagaggcaggaggaaatattaatccaaagaggggctgtgatttgtttcaaggtaactgggttgttgatgattcataccctctttataatacctcagaatgtccctttattctcaaggaatttgattgccaaaagaatggtcgtcctgataaactctatgtcaagtacagatggcaacctaaagactgcaacttaccaagattcaatggtgaagacttcttaagaagacttagagggaagaatatcttgtttgtgggggactccttgagtttgaaccaatggcaatcactcacttgcatgcttcacac

SEQ ID NO: 34092 - DNA, 459 bp, Glycine max
ttcaatcaatttttgtccttcgtgaaagattttttgctttgggtcaagtggttcaaagagaatataaaattttgaatctgctggactttactagcaaaagaaagcgcatgtcagtcattgtgcgtgatgaggagggaaacatcattcttttctgcaaaggagctgacagtatcatatccgatcgactgtctaagaatggaaaaatgtgtttggaggctactactagacatttgaatgaatatggagaagctggtttgagaacgctagccctggcttacagaaagcttgatgaccaagagtactctgattggaacaacgagtttcagaaggccaagacagctgttgggtctgagagagaggcaatgcttgagcaggtttcagatatttatggaaagagagttgattcttgttggggctactgcagtggaagataaactacagaaaggggtgccttaatgc

SEQ ID NO: 34093 - DNA, 390 bp, Glycine max
cctcgcttacgcccacgcgtccgctcttcttcagcttcttggggtaattaattaacgtgcttttctattcagcacgaaaccaagcctcatcatagtttttctttcataaacaaatcaaaagaatcgttagttcttcagttcgtgtgttgcgcaaagcatgttgcatagaagcttcaagcctgcaaagtgcaaaacggcattgaagctcgccgtttcacgcataaagcttttgaagaacaagagagaagcccaaataaagcaactcaagagagagttggcacaattgcttgagtctggtcaggaccgaactgctagaatccgggttgaacatgttgtcagggaagagaagacgatggcagcttatgatcttgttgagatatactgtgaact

SEQ ID NO: 34094 - DNA, 541 bp, Glycine max
gggaaaggagcctgcattattgtgtatgcctgcctctctctctataactcatccattcctttgccgcttttatttattgttatttattttgaatttgaatgttgttgttttttatatgttggattggtgcagatacaaagcgtttgacgaagtggacggaatcgaagttgcttggaacatgatcagcgttgaggacgttgtgcagacgccgcagcagctggaaaaatcgtactcggagattcacctgctcaagtccttgaaacacgacaatgtcatcaagttgtataattcttgggtcgatgataccacccgcaccatcaacatgatcaccgaattgttcacctccggaagtttgaggcagtaccggaataagcataagaatgtggatatgaaagccatcaagaactgggcgcgtcagattctccgcggcttgtgctttctgcactgtcacagtcctcctattgttcatagggacctgaaatgtgataacatttttgtcaatgggaatagtggactggttaagattggagatcttggattg

SEQ ID NO: 34095 - DNA, 414 bp, Glycine max
aaacaaaatccatcatcaacaccaccgctaccaccatcaatttcttctcatgggtggttggctttattggtatttgggcattttaattcacacacttcaattctcgtgttcagtcagaaccgtccatggcttgatcccacaatccccaatccaatgcagcagttcaggctgcaccctccgcaactcctacggcgcgtggggcgaccgaaaagactgttctgccctcaacgtgacatacccaacaaccgaagaacagctccgttcggcagtgtcctacgccgtcagaaacaacctcaaagtcaaggttgttaccagattctcccacaccattcccaaattatcatgcccacatgaaaataacaacaacactattaatagcagcaccgccaccttgctgatcagcacggagaagta

SEQ ID NO: 34096 - DNA, 422 bp, Glycine max
tactatactttgcttggtgcttgtgctcatagggggttaggtgatgaggctgaaatggtgtttaggactatgaatgagagtgggattgttcctgatattaatacttatagttatcttgttcagacgtttgggaagttgaataggcttgagaaggtttcggagcttcttagggagatggagtccgggggtaatttgccggatattacttcttataatgttttgctagaggcttatgctgagttggggtctatcaaagaggcgatggacgtgtttaggcagatgcaggctgcggggtgtgtggcgaacgcggccacgtatagtgttttgttgaatttgtatgggaagcatggtaggtatgatgatgttcgccatatttttcttgagatgaaagtgagcatcacggaccctgatgcggtgactta

SEQ ID NO: 34097 - DNA, 892 bp, Glycine max
  unsure (1)..(892): unsure at all n locations
ctaactttttnngaccncctagnatcagggactgccttcgatgggcgtttggacatgcgtatgaggcaggcagcaatgagtagggctagcgatggaaatcatcaaggtgatcttctatatgatcattttagtgagaaggatgattttcggtttgactttatggctgatactggcgatggtgggaactcatcttatgctgttgcacggctgcttgctaagccttttattcggacactgaaagatgattctgagcttaccttgccacgtggaaacttgctacttattgggggtgatcttgcgtatccaaatccatcagcattcacatatgaaaggcgtctttttgttccttttgagtatgctcttcaacctcctccttggtataaagcagagcagatagctgtgaacaagccggaggtaccctttggggctcaattaaaacagtacaatggacctcaatgttttgttattcctggaaaccatgactggtttgatggactccagacctttatgaggtatatatgccatagaagctggttaggtggatggctcatgccccagaagaagagttattttgctttgcaactccctaaacggtggtgggtttttgggcttgatctagctcttcatggtgatattgatgtgtaccaattcaagttcttttcggaactgataacagagaaagttcaagacgatgactctgtgatcattattactcatgaacctaattggctcactgactggtattggaatgatgttactggaaagaatatttcacaccttatttctgattatttaagaggaagatgtaagcttcgaatggctggggacttgcatcattacatgcgtcactctcatgtaaagtcagatgggcctgtacatattcaccatcttc

SEQ ID NO: 34098 - DNA, 278 bp, Glycine max
cccatgcttccgctccttccctgagacaagcgtgatagctcgtccagggaaagagcaacgacacaggggtttgagtcctggcgccatcgtggccatggtggtcgcgaactgcgtggcactgctcgtggtggcgtcctttgtggtggcgcattgttgcgctagagggaggggttcgagcttggtggggagtggagagagctatgggaagaggatgagtgggagcagctacaatgggagtgagaagaaggtgtatggtggtggtgagagtgatggaacta

SEQ ID NO: 34099 - DNA, 436 bp, Glycine max
gtttttctcgtgaattaacaagcctagctagctacgtacagttttaatattcctgaaaaatggatggtaaggttggagaaggagaattcattgtgagtgtgaccaaggaggagatagtggtaccagagcttccaatgaaagagcaatggctgccactatcaaaccttgatctactcattcccccagtggacgtgagtgtattcttctgctacaaaaaacctttgcctgaaaaatattattgctttggaaccatggtggggtcactgaaaaatgcactggctcaggctctggtatactattacccttttgctggtgaaatggtggccaacaccatgggtgagcctgagctgttttgcagtaaccgtggggtagattttgttgaagctgtagctgatgttgaactacagtgcctcaacttgtacaaccctgatgacac

SEQ ID NO: 34100 - DNA, 496 bp, Glycine max
ttcacgcgtccgcaagaagcatcagatagatcatagatacactgactgaaagagatcagatcatagatggagttttttctagggctatgtggggttcttgttgccttctcagcagcactttgcctcttgttgctcttgatattaacattttattgggttgttttccctaatcaaacacttaagaagcttaagaaatgtgggttgggaggtccaaccccaagttttccacttggaaacattgaagaaatgaaacgaaagaataacattcaatcttcaattgtatcctcaaatttctcgcacgatatacactcgagcgttttcccctacttttcaagctggcagaaatcacatggtaaggttttcgtgtactggttggggacggagccatttctgtacgttgctgagccagagttcttgaagaaaatgtccacagtggaaatggctaagaaatggggaaaaccaagtgtgtttagaactgacagagaccccatgtttg

SEQ ID NO: 34101 - DNA, 572 bp, Glycine max
acgctgaaccttttgttgaatggggccctaaaggagggaaccttgtgaaatctcctgctgggacactgacttttgatcgcaacaccatgtgtggtgcaccagcaaggactgttggatggcgtgacccgggatatatacacactagttttctgaaggagttgtggcccaaccgagagtacaaatacaagctggggcatagattatttaatggtaccataatttggagtcaagaataccaattcaaagcatctccttttcctggtcaaaattccttacaacgtgtagtcatatttggtgatttgggaaaggccgaagctgatggttccaatgaatataacaatttccagcctggctcactcaacactactaaacagatcgttcaagacttaaaagatatagatattgtcttccacattggtgatttatgctatgctagtggatacctttcacagtgggatcagtttactgcacaaattgagccaattgcatcaactgtaccttatatgacagcaagtggcaatcatgaacgtgactggccagatactggatcattttatgggaccttggattct

SEQ ID NO: 34102 - DNA, 477 bp, Glycine max
tttctctaatgtgttgtcaaggctaatcatttctttgtcgagttgcccaacaaagatctgcatcaatatgatgtaacaattactcctgaagtgacatcaagaggagtgaaccgtgctgttatggagcagttggtgaggctgtaccgggaatctcacttgggtaagagactccctgcttacgatgggcgcaagagcctctatactgctggaccacttccttttatgtcaaaggagttcagaattgttctcgctgatgatgatgaaggagctggaggccagaggagggacagggagttcaaggttgtgataaaattggctgcacgggcagaccttcaccatttgggactctttttacagggaaggcaaactgatgctcctcaagaggctttgcaggtccttgacattgttctgcgcgaactccctactacaaggtattgtcctgtcggaagatcattttattcacctgatttgggtaga

SEQ ID NO: 34103 - DNA, 451 bp, Glycine max
tcgtgcttcttggggtttgattacagttctgcaaaaatggttcctgagaatgagcaagttgaatactctgttcaagaggatgggaaggtctttaagccaaaagatgagggtgaaagttaaccaagagcttttgcaattatcaaaaagtggattcgcaaatagagaggggaaacagatttatgatttctttctagcattggcagcctgcaataccattgtgcctcttgttgttgacacaatccgatcctatggtcaagctaatagattaccaaggggaatcaccagatgaacaagcgttggcttatgctgccgctgcctatggttttatgcttattgaacgaacctcaggtcacatagtcgttaatattcatggagaaaaacaaaggttcaatgtcttaggtttgcatgaatttgatagtgatcgaaaaaggatgacagttatattagggta

SEQ ID NO: 34104 - DNA, 531 bp, Glycine max
tgttattcttgctgcagatttatcacctgctgaggctggtgacagggtgccagtgaatgcaaagatggtaaaaagccgatccacgactggtgctgtttaccggtctttcacttcaacatgattagatccagttacaaaaaatgaatttgagtatgtgaacgttgagatgaatccaaaaaagatgggatatgtacaactgcatacaacacatggtgatgtgaacattgagctgcattgagatatagcccccagggcatgcgagaacttcatcactctttgtgaacgtggatattataatggagttgcttttcatagaaacattaggaattcttatgatacagggcggtgatcctactggtactggtcgaggaggtgaatctatttggggaaagccttttaaagatgaacttaactccaaattagttcactctggaaggggtgtggtaagcatggcaaatagtggcccccacactaatggctgccagttcttcatcttgtacaagtttgcaaatcatctaaacttcaaacata

SEQ ID NO: 34105 - DNA, 557 bp, Glycine max
tcgtcacgcgtccgcccacgcgtccgcccacgcgtccggcaaaacttgcaatcaaatctgttcatggtgacgatgcccgtaaatatgaaccattctggaaggtcatagacaatcattggaattctctgttctgtcaccctctttacttggctgcatacttcttaaatccatcataccgatatcgccaggattttgtggcgcattcagaggtagtacgagggctcaatgaatgcattgtccggctggagccggataatatgagacggatatctgcatcaatgcaggttgctcattataatgctgcgcaagacgactttggaactgaattggcaattagcacaagaacaggtctagaaccagctgcttggtggcaacagcatggaataagttgcttagagttgcaaagaatagctgtacgcatattaagtcagacatgctcgtcctttgcatgtgagcatgattggagtatatatgatcagatacattgcaaaagacaaaatcgtatatctcagaagaaattgaatgacattatatacgttcactacaacttgcgactt

SEQ ID NO: 34106 - DNA, 664 bp, Glycine max
ttttttttttttatgaacagaaattgcaaattaatacatagtacacttcaaaatccagtacaccagcacgcatattaccaaacctctctttcctcccgcttccgactctgagaacgatgatggcttcttaagcggtgaagagtccgatttcgagcccgagcccaccaggcccgttctcgtcaactcttcttctcagccccctcatgagcccgtcttcgattctcctccccacagacccattgttaagccacctattccagtgtccaagcccatcccaaagccaacaccagtagggaaaaagcctctacctattcccgtaacaaagcctataccaaagccagttcccattgttaagcccattcctattccagtgttcaagcccatccccaaaccaattccaatagtgaaaaagcctctaccttttccagtaactaagcctatacccaagccagtcccaattattaagccaattcccattccagtattcaagcctgtcccaattattaagccaattcccattccagtattcaagcctatcccaaagccatttccaatagtgaaaaagcctctacctattccagcaattaagcctataccaaagccaattgcttcactaaaaaaacctctacctactccaacaattaagcctgtacccgagccagtt

SEQ ID NO: 34107 - DNA, 436 bp, Glycine max
tttggacgcaagattcgtgctggtgattgtgcacttttcaagccacctagggactcccctcctttcattggaataattcgcaagttaacatttgacaaagaagaaagtccgagttttgaagtaaattggctataccgacctgctgatttgaagcttgctaaagggattgtactggaagctgctccaaacgaagttttttactcctttcacaaggatgaaacacctgctgcatccttactccatccgtgtaaagtcgcatttcttcgtaagggtgttgaacttccttcagggatatccgcatttgtctgtcgacgagtatatgacattgagaacaattgtttatggtggctaaccgataaagattaccttaatgaacgacaggaagaagttaaccagctattagacaagacaaaactagaaatgcatggggctgtgc

SEQ ID NO: 34108 - DNA, 509 bp, Glycine max
agatggtttggttgcctttgaagatggattctccgtttatgcagatgccataatccactgtacaggatacaagtaccactttcctttccttgaaaccaatggactagtaaccgttgatgataatcgcgttgggccactatacaaacacgtctttcctcctgcattgtctccatggctctctttcattggtttaaccttcaagaattcagtctaccaaataattgagttgcaatgcaagtgggttgcaaaagttttgtctggtaaagttcttttacctacagaaaaggaaatgatggaatctgttaaagaatactatcaactcatggaggaaaatgggttgcccaagcgttacactcattccctttatccacttcaggctgactataaacactggctagcggctgaaactggattgcctccgttggaagaatggaaagagaatatgcttaaacagcgctttaagaactttgctgaaatgaatgaaaagcacagagatgaatgggatgata

SEQ ID NO: 34109 - DNA, 421 bp, Glycine max
ttcgttggaacttcaaattccggccactctccggctaaatgctcccttcctcggagcccgacgacgacgacgatgacgtgaaatcgtgatcgtgaatcgtgatcgcccctttttttttacactctcatttgttcttcactgtcactcgcaatggcggcgacgaacgccggcgtggcggcggcggactcggccgcttccgccgacgaggcggcggcgaagacggcgcagaagcgctacgaggggcttctgatggttcgaaacaaagcgataaagggaaaaggcgcatggtactggacacacttagaacccttgctggttcacaacaccgaaacggggctccccaaagcggtgaaactccgttgcaccctctgcgacgcccgtttctccgcctacaaccctttcccgaccgtctccgagcacc

SEQ ID NO: 34110 - DNA, 429 bp, Glycine max
atccacgtcatcatttcttgactaggctccgcgtcaccgtatgggtatcttatcccctcctcccagatcccaatatcacccctctctcattcccatccattcttaattacaattaagaccaaaaattcgttgcccctttggctctgcacagacattggttttagtgatcgacggtttggcttctgggctggttaaaaatttaatcttttttcatccgtaagggtttgggtatctgatttcgaattttgatcgtggttcttaaggtttcttggggttggaagaaaaacaaggacttataggactattctgttgcatagtcgcttttatttattttccttttttgatttggttaaacttgtggattatatgagttctggagttaaacacagggcacaaacaagttttaaatttattattttgtgagattct

SEQ ID NO: 34111 - DNA, 482 bp, Glycine max
cctatatgaatcaaatgaataaaactattacatgaaaggaattattaaacctcccaaatcattcttggaaccactaagtagtgaggagaaatacatgaagcagaaatcagaaaaacctacaacacaaaaatgtgtatagcaaacaatatgtctccatgtcgagggtttccatgagggaagctcgctcaatataagcaagacatgttagtgcactgcaagacccaacaataatttgtaattcttctccaattcaagcaaagcattgttaagtcaggattaagccttaagcgccctgtagatttttccccccttcctttcatgattgatttcttcgctcattcttccaagagttttttgcaacttcagcagatgaatcattggaatctccattaccatcctttggtttggagaagaaaggatcccattcatgaggtcctacctcgtgctctccctcaggcagcaaagcatatttccaactgtac

SEQ ID NO: 34112 - DNA, 398 bp, Glycine max
aattcatccccttttctgatgcataaaatacataatttcttattaggaataatgggtgtttagtagaaataacatttactttatataaactattggggggaataccaataatgggcattatcccatgagttattgggataggtatttttttagcatgtaaattaaatgaatattcattacagccatccattgtttttgttgggactgctttgactatgctctgtcctggtatcaatggctttttccttcgaaacaacttcttgatgttgaaacctacatgtgtttagggctgtctcagactcaaattgatcaacttgtgtagcatgcatttgaatgtaattgttattgtcaaggatgagactcgagaattcctggtgccgaattcggcacgagctggt

SEQ ID NO: 34113 - DNA, 789 bp, Glycine max
tgtttatacactttccaaatcccaattgaattaacacttactatttagatataaatgttagtccctatttgagtttcagctccgtccacggatagaaataacgacttcaaccgaaagtcaaagccatggacagatcctaacatggttggaaaataaaattatttgcacaaccaaagtcctataaagaaacaacgtaggtgtttccgatgttgtttctatggctttgcattgttcttcattctactacttggaatgaaatgaatccttaagttttacgtttcacttgatatgaccactttcaacaacaacatcaccactaccactctctcaaatgtctctttctcgcaaaccactttctccgtcgccctcgaccccagccaagcaaatcgacgccggtgatttagctccggcaccgcggttgaccaggcagaggaagctccggcacctcactcaccaagacattggcttcttccattccgacgagtcttcgtttcttcccggtttgccggagtttcgctcccacgccggttccgaccaccggtctttctctgctctgccgcaaccgctgccgcttcccgaagcgccgttgacccgtcgagcaaaatcaatcagctccagttccgtaaatcgtcgtcgcctttcatcttcgttagaacaacatggctttgctatttcgaggagcacagtgtatcaagaagcagtggcacgtacaaaacctacacttaatttggataaatcctgcttggattctactcttgcaaatgcaaattacaatctgagagagcatac

SEQ ID NO: 34114 - DNA, 436 bp, Glycine max
ctcacgcgtccgcccacgcgtccgcggacgcgtgggtttgagcgctaaaatgcaagagactcacattgttctcgggattgcctcggtgtgctctctgttggctatcatcgccacagtcgtcactctgccatctctgtactcggagatgagccaaatgaacagcaaagtgcgcgacggagttgaggccttccgcgtcaacaccgactcggcctggactgacttgatggacgtgcaagtggtcgtgacgccgccgtcgaagccccgtgataaccccttcaactccatcttccgtgccaaacgtcaactgcccggacactgccagtgcgctggcctccaacagccaagctgtccccctggtccgcccggcccgtccggaccgcctggacagcctggacagcctggaggcgcaggacagcccggacagcctggacagcct

SEQ ID NO: 34115 - DNA, 460 bp, Glycine max
ttttgattatagtatgaacttctctcagcagaggttggtggataaatgcaaagagattccagtcgaattatttgccaagcttgagcagacttacgcactcttagcattcgtaaaccccgacacttcaccctttggttatttgatggttcgttgttctgccctattttttaatttccgcaatttttatttatttttagtcgtttaaccaaagaaatgttttggctgccgaattgaacgaagcagttttgtctgcgctgcacaagccatgtgtgtcgagacttgaacaactctttcggttgatggtatggaaccaacaccaattaaaaacaaagagtgacgggaccaaactgacgaccgaaactgtggaagaaatgtcaaaatgtcttttctcgaaggaagacgattcgtttaatgagttactttgattttttttaaatttttgtataaaattattatcatt

SEQ ID NO: 34116 - DNA, 485 bp, Glycine max
acaccccttttctttttcttttctttctctctgaaattgcaaatctcaaaagcctcaaaagttagaagagagagaaagaccaccacgcacagaaacagcaataattcactttcttttccaactatatccttccctctctctctactatctctctctctctgaaactcatcatcatcatcgccgttgagatctcagaaattgtgtttgctgataaagaaaggatactctagaaggaacttttagccatgtctagctcagcaaaagttttggatcctgcattccagggagttggtcaaagagtaggaactgaaatatggaggattgagaattttcagccagttgcattgcccaaatctgagtatggcaaattctacacgggagattcgtacatcatcttgcagacaactcaaggcaaaggaggcacttatttttatgatttacactcttggattggaaaggatacaagtcaggatgaggctggaact

SEQ ID NO: 34117 - DNA, 389 bp, Glycine max
ctttcgcgtgggtaagttttgttatattttattcgagaagactttaattgccattctccgatttgctgtgactttttgcaattggacaatgtcttcggaacaagcattaaaagcaaaacaacttggcaacgaggcgtacaaacggaaggaatttgccactgctcacaaatattatgacgaagccatcaaatatgaaccaacgaacatcgcattttacagcaacaaagccgcagtttttttcgaggaaggaaaatacgacgaatgcatcgaaatgtgtggaaaagcggtggaagttggacgagagaatcgggcggactatgcgctggtggcaaaggcttacgctcgaatggcaaacagttacaaaatgaaggacgaccccaagaaggcac

SEQ ID NO: 34118 - DNA, 448 bp, Glycine max
  unsure (1)..(448): unsure at all n locations
aattaatatactccttcattttcaatctgctcatgcccctatccattttcttacgtgtgatttcaggattcttcatattccaaatcatctactattagacttcttgattggtcaaatcctatatttgggtctgctcatattctctcatttcttgttctttctccgtactttacatacccttcataaaacattattaataaaaaacagttacttggtattcttttctggggtggctcttgttgttggttggtctcatattgctagcggttagatgaattctgtttcttccatgtgcgtttgatttccatttgtgaacatgggaaaacattggtctttcttccatattacgggtacccttttccttttgtgcaaagtctgtctagctgggagtcaatattctggacgtgtcttacccggngtattaaatggttctcaaatgaattggatt

SEQ ID NO: 34119 - DNA, 408 bp, Glycine max
gtttgaggctcaaacttattcaaaatggacttcgacggccgcatcaaggcttaccgcttcgtggcttactccacggtgtccttctccatcatctctctgctttcggtttgcttcacgctgccgatgctgaagagctacgtgtccaacgttgggctgaagatggactctgagctcagctcatgccaaagcaatgccaaggacatctggtcagaagtgagtcagctgaagggtctgccgttgatcgtcagcggaaaccgtacggcacgtcaagtgtacggtggcagcggcggctacggaagctgccaagactgttgctcaggcggaggacccggcccggctggcccgcccggacagcccggacgccccggaaaccctggagctcccggatcgcccggacagcccggacac

SEQ ID NO: 34120 - DNA, 491 bp, Glycine max
tccacgcgtttttaataattgagatatgattggagaattttgaatgtattcatttattgaagcttctatcttaggattcggggaaatcaacacatggggtgtgaagatacaatttgataatgtacatgatgtggagacaatcacatcaaaaatacatttatcgatgaaactctttttatccttttaaattccaaaattacaaattgatgtgttggtgacttggtgtgttgtgttaactgttgagtaaccatgtcaatcaagtgacatttgaaatttgaatctgaaatgtgtcaattttttaaaaattttgcaatgattattcagtttggacaaagattcagtagtgcatcagctagttttttctaaaacaattatttttcacaaacagttatgtgtttcttacagatgaacttgttttatgaaatgtctagctaaaaacaaaaaagagggagaagatatttctatagaagggtacccttgatgctcaaact

SEQ ID NO: 34121 - DNA, 407 bp, Glycine max
aactttggctattttttgctttatataaaaaaaattcactgaattttactattaacttatttttaggataaaaaaatccagatcgcattacgttagaatcaattttaaccgaaatcaatttcatccaaaatcaattttgttaatgctcactcaacacacaccagttcatgggcactgctactgaaatttttcacatgttttgtgcttgtttttgtgtaaaagtaatgtaatatggagtcctcgtccttgattgtggatgatttcagattttagtcatattctgtgagccaggtgttgtgaaagttactgccattcagaacattgcggggcagattattaatagagacactctgactggcctcatgttgatagtggagaatcatattactagccaggccttgaaagca

SEQ ID NO: 34122 - DNA, 379 bp, Glycine max
cctatcgcgttcggtccagttaagctgtcttttgtttgtcacatacaaattccgtctccgtccaaaaatgcctgagttacttttcaagaccatcacgcagcaatcgttcacaattgaagttgaggaaactgcaacgatcggcgaagtcaaacgaatgatccaacaggtcaaaggcgcagaatacccagcggagaaccaaaagctgatcttcaacgggagggtgctcgaggatgccatgttggtctctgagctgaactttgcggcgccgaaattcattgtcatcatggtcatgcgaaaacccgcgcaggcatcgtcaactgttcggtcagcaacatcgtccacatcgccacaaaagaagacatcgacagcggacggacag

SEQ ID NO: 34123 - DNA, 560 bp, Glycine max
gtgtaatcaggttcaggattggatttggatcaatgggtttctataaagcttgcaattttggtgtaaggagtgctgatttcagttaaggggtggttttgaagattctttttttttatactctttttggggtttgaaggggatggattttatggaagtttcaatcttgcatcatgcggggatcgtgcttattgggctatggattctctctgcattcaactggtgtcacacggttgcttattttgtggctttgatctatctttttctggttcatgaacgttatgtcacgaggttgcggaagaagttgcagtttgaggagaggaagcaagctaatcaaagaagggtagttctcttggttttagtgtggttatttgattttgaggggaaaatagtaacttaataagttttaaaagtaaatgaactgaactggggtcaatgaaagagaaactgctaaagaataaattcctctttgaagttaaaccattcccttaacttgaaaaagaagcgggccctgagagaagagacaaatacagaagcgtttggaatggattagtacaatatta

SEQ ID NO: 34124 - DNA, 423 bp, Glycine max
cggactgcgtgggcaaccaacagcagcagaagcaaaaatggctgactttgacaaacacgctgcccagcgcgaggcggagtcgctccgcactttggccttcttcggcgtgtgcctgtccaccgtggccacggttatcgctgtgctttccgtgccgttcgcctaccagcacttccagcagatcggcgcccaaatgcagaacgaagtggacttctgcaaaatgcgctccggcaacatgtggcgcgaggtcacccgcacccaggcctactccaaggtgtcgcacgacagccgtcacaagcgtcaggcaggcggttgctgtggctgcggagtgtcgcccccgggcccgcccggaccccctggcccatcgggacaacccggcggagacggacaacccggaggctcaggacagcccggagcaccaggcca

SEQ ID NO: 34125 - DNA, 438 bp, Glycine max
gccattatcaacaaagggccactaccagcacatcatgccgggctggaaagaagcaaccgcggtgcaccagctatcttccaactcctatgaggcaattctacacgatgactggtgtatcggcagtgtacctaatggaggctatgtgaccggcgtgcttatggaagtcgtacggacccactttagcacgtctcttgcaaagcagaatcagccgcatacaatagctcttcatgttgaatttctgagacggacacaggctggtcctgcttatttcaatgttgaagatgtcaaattgggccctcagacatcgatcgtacatgtttcaatggagcaagatggccgtcaggagattgttgcttatgttaccaactccaatatcgataaagaggagggcttctcgtttaacacggaatacaagctgtctccatctttacctgacgt

SEQ ID NO: 34126 - DNA, 586 bp, Glycine max
cggacgcgtgggcggacgcgtgggtgtccccagaagtggatgacttgtcaaggggtgatttcatatcagaaactaaagctttggcaccggatgtggaaatgaagaaggaagatagtgtcaaggtggaaagaccagttaagaaggagaaaactccagaagaaattgaagaggcaaaaatggtaacatttaaggagaagtttgatgtgctaaaacatgatttcgagaagcaaaacaatgccaatgacataaagacaaacaataaattggaagagcaggatgggaatagggaactagctactatatcatcaaatcccaaagaagagataaccgttcaatctacttcaatgcctttatcaacagctgaatcaggacggcagagcagtctctctcccattggacacaagccgcccttgcagccagtttcaaagacggacaaaaccacaggatcattgacactaaagcatgcgaattttgtcctctctcaacggcaacccaagagatgtgcaacccattattacattgcttgtaacatcttacaccagcagtgtacaaagatgaagccccctttgccagcagctattggctc

SEQ ID NO: 34127 - DNA, 541 bp, Glycine max
  unsure (1)..(541): unsure at all n locations
gttaatttagcatccaactgtggatctacaaattcgttacaaggaaatgttaataattgtcggcaatgttcacaaaaggaactggcccctgatctctcttgtcagatttgtgggatttggattcacagccattgttcaccttgggttgaatcaccatctcagcttggtagttggagatgtggtgattgccgggaatggcgatagcagattttgtttgtcatcctgtagagttctcttgggtgtggtggtggtgagagatatggtaattgccgggaatggtgatagcatacaaactgactctcgatttcagcattaatcatacaagttggctcagtatgcgtgcattgattggttcaggtatatttcagagtttaattggcatctgcaggtttctatgaatttagttaccgctcaaataattgcggctttcctgcaactgatagatagtgtttgagtaaatgatgacttggacacagtatagttgaatgctctggaaccatattggttnttactcccctagttgcattccccccaatcccca

SEQ ID NO: 34128 - DNA, 406 bp, Glycine max
gtttgtgtttatggcattatgccacatgctccgctcgaccactgctcctccgtgtcgatggaacccttggtgctccaggcgctgatcactgccttcctggaccgggtgaacgccgatcgcacccaacgcgttgtgctggtcacgagtggcggcacccgtgcgaagctggaaaagaatgcggtccgtgccatcgaaaacttttccatgggcacccgaggggccgtcagtgcagaatattgtctgcgtcaaggatacaacgtcattttttttcaccgcgatgagtcgctgaagccattttctcgcaaatattcacacatctttgaacatttggagacaaccgacgacggacacgtcaaagttgttggctttcccggccttgtcgacgatttggctgacttcaagcgct

SEQ ID NO: 34129 - DNA, 419 bp, Glycine max
ttttagttaggttctgcacgctctgcttccagcgagtgttctttcttcgtttcaacaccttaatttgcacacgctgcttcttcaggttttaccaaaatgaaattccaattctgattggagaataagtgaataacacctaaagaactgcttccaagttttgtccttcttgaaatccaatatattctgtccaacttgatgcccagggattctttatatatatatatatatatatatatatatatatatatatatactttgctatcgttttgtctgcaattatttttttcaggaccaaaagctttctcaaaaaagtagatcaagataaactattttaatcaatcttggcatacacttccgagtttgtctttcaatttgccgtagagatgcgtgctttaatttattccttttgcaacatgatc

SEQ ID NO: 34130 - DNA, 484 bp, Glycine max
tcggtgtctccaacaatgatgggcgcccctcctgctcccaaaccgctaaagcctcagcgtgctgaatactgttctgaagtggaacttggtgaaccacaatggatcaactgtgatatacgtaactttagaatggacattctaggtcaatttggagtaataatggcagatccaccatgggacattcacatggaactgccttatggaacaatggccgatgatgaaatgcgcagtcttaatgtccctgctttgcaaactgatggtcttatttttctatgggtcactggacgtgcgatggaacttgggcgggaatgcttggacctttggggatataaacgtgttgaggagatcatttgggtcaaaacaaatcaacttcagcgaataatcagaactgggcgtacaggtcactggctcaatcacagtaaggaacattgtcttgttggaataaagggcgatcctgaagtaaacaggaacattgacactgatg

SEQ ID NO: 34131 - DNA, 583 bp, Glycine max
tcgcgtatgaagctttggttttttctaatccaactcaggtttttttcacgcaacaacaggggagtttagatctacaagttaatttacgagatgaaatttgtttaagtttatttttatctccagacctaaaagttaggtttttcccaatattaggcgcaagttggtgttgttgttttgaagggagaagctggcatgagtgagtgagtaggtgacacaacagcaacaagtggatggagctatgcttgcttgggaagttgaaaactttgaacacaacacaagaaccgcttaccagggagacaacccaataccactccactcccccatatacaaataccgctttcttctctctatcttcccttcctgccattaaataaatatatgcaatactctttcatactacacagataaacaagaaccatttattactaacatcatcatcatcagcatcatctttagcccataaaagtaaaaaacaaaacactgggcctggggaccccgctcactctcaagtctcaattagctggatgtgacttgtgtggttagggtttacatgcagaaacgcatgtgcttcgtgtctaattca

SEQ ID NO: 34132 - DNA, 485 bp, Glycine max
  unsure (1)..(485): unsure at all n locations
tctacgncgtcgtggacgcgnggggtttgagaataatcgtattgttacaaaaatgctttcttcttccgcctgctgtactctgttggccgcgctcatttcggcggcgtttttcgccgcggctaacccaccaacggtgaagcagtgcttgtgctccgaaattcagccctgcacccaaaagtacatgaacacgtggaaggcgtgcatggagcagtgtaagggccatctgtccggcgtgggtggcaacgtggacaaattgggccactgcatggacagcaactcggcactcctccaatcgacaatcaaatgcacccaatcgcatagccaaacggcatgtgccaaatcggcggcatcagctaaacaggtgccaaagcgataccctgaaacgttggaaattgctacaatcagtgagatcaatcggatggtcaacagcatgggcatcgaaggcgcaatgaaaggcttgatggatgccggcaaaaaaatgtacg

SEQ ID NO: 34133 - DNA, 422 bp, Glycine max
cggacgcgtgggtggacgaggatttctggtcggaagtgtctgtcgtctgataatcccggggagacaacaagcggatttccgaccattgactatgatcatcagtttctaccgatgtctcctctaatgaccgaagaaggggtccttatagatgctagttcgtccagtgtgtgcgacgacggcgtggacttttggcgcaatgtttatgcgagagctgaggaatttacgcagttattggaattgtgatgttagttaatgttgctcttaattagtagaggccaagtccttcattcaacggaaaacaaaagatcatgtcattgttcttctattgtttggacttgaattaatttcctagatagaaattaataaagtgtgtccattacgactgttactcgatgtgattataataaagtgtgcgtgttcat

SEQ ID NO: 34134 - DNA, 455 bp, Glycine max
tttacgcgtggggtttgaggtagtgtaataaattcttattgtagtaaaaatgtccgaaaataagtccgaaggtggcgctgaaaagaagaagagcggtggattcaacacgaagaagtttttgttggacctcgcatccggcggaactgctgctgcagtctcaaaaaccgctgttgcacccatcgagcgtgtcaagctgttgttgcaggtgcaagatgcttccattcacatcaccgcggacaaacgctacaaaggcatcatcgacgtcctcgtccgtgttcccaaggagcagggctttctgtcgttgtggcgtggtaacctggccaacgtcatccgttactttccgactcaggcgctgaacttcgccttcaaggacacttataagcgagtcttcacgcatggagtggacaaggagaagcagttcttgaagttcttcgccatgaatttggcttcgggcg

SEQ ID NO: 34135 - DNA, 539 bp, Glycine max
ctgcataaaaatcaaatttgtgggtcctgtcctgcgccggtctctactagaaagtcgatacaaatggttttgcaattttcctccgaacaaaagcgtcttcttggcttgggtcgtgtgccttcgcttcgccgtgggcttcttccacgaacctccctctccgatcagctttaccactgtctcaaaacgtttctgactgatcctgattctggatggtttttggtccatggattggtaggaactggcaaatccgaactcgcgaccaaagttttatgggaacgacccgagctatgtttcgcactcgtcgaccgaatcctttggatcaccgaccgacgctttcatccggctgaattgagtcaattggcggccgacactcttttgctggcggtttcactaaactctacgacgaactttttgcaaatggacgagtgcgatgcttttttcggatgctcgcaatcggctggcaaaagcagggaactttcgtacgtcgcccattctctgcactctctgctcaacgataactttgcaaaaacccttctgat

SEQ ID NO: 34136 - DNA, 346 bp, Glycine max
gtttgaggtaaaattttattagaagagatgaaatttccattggctttcttttctctgtgtttattggcatttgctgaagtggcagccgaccgggtcctccttcttatagacaatcccacaattcgggaatcgcactccgtcttcatcaaatccctcgaagagcgtggccactccgctattattgccatggctgatgacccaaacctttcgcttatcaaatttggcgaatttctctacgaccatttgatcattttcgcaccttcggtggatgactttggtgggaatataaacgttgacgagatcaccaaattcattgacggtggtgggaatgttctcgtcgctgcag

SEQ ID NO: 34137 - DNA, 329 bp, Glycine max
catgtttgagccttttgtcgttttagaggaaaaccggctcaaaaaatggactacgaagccaggatcaaagcttaccgcttcgtggcctactccacggtgtccttctccatcatttcgctgctgtccgtttgcttcactttgcctatgcttcaaaattacgtgtccaatgtcgctcagaacatggacagggaattgagtgcttgtcagggttctgcaaaggacatttggtcggaagtgaaccaactgaagagcatccccgtggtgggaggaaatcgtacggcgcgtcaagcggacggatacggaggaggaggcggcgcattgtccggcgg

SEQ ID NO: 34138 - DNA, 484 bp, Glycine max
ctgtcgcgtgggtgagcgtacaatgggcagcagcaccagtgtccaaagcacgttcattttgcttatttttgccctcatcgcttttggcaattttgccgccggcggcggaagtgccgaaaggggcgggtcatcagcagaaaacgcggcgaaaacagtcgtaagacaaacgttgcagaaatcgtacggatacggtgaagtaccggcaacgtacggagatgagaagccggactattccgtgtgcagcggattgccaaaaaggaacagaaaggcgtgcaaattggtggtgcaaattgcggttgaagcacgaaaggcagaacgacgagggcttttggaagacgacgaattgccgccgccctcccagggacttggactgccctaccttcgaaaaccgaccaaagcggaggaggacgcacaaccgccgccaaaagttgtggcggaaagatacgcgtgcatgaacatgacatgtctatgcccatatttggga

SEQ ID NO: 34139 - DNA, 323 bp, Glycine max
ctcgcatttttttaaattaattttattttctgcctgtcaaatgcttttcttcgcccgacttttcttttggctaatgttctttctctccaccacaggacggcacagcgcgaaacaacataacatgcagcaatcggcgccggaaaagaaaaggctcaaaattctcgtctattcggtaatccccgcgcacaggcacatgcaatttatgggcgcaattgccgactcattggccgaggcggcgcacgaagtgcatttcatcaaaacaatgaacgacgagtcgcaatggatgagcaaagccgagagcaacgagaccaaactgtccgtca

SEQ ID NO: 34140 - DNA, 435 bp, Glycine max
tttcaaaatggttaaatcatcttctgtagccattatcggtgctgggtcagttggtgcaacgatagcgtatgcacttgtgcttcgtaaagtgtgctctgaactctatttggttgacattgatgataaaatttgtgaaggtcaagttcttgatctatctgatggcactttccttactcaaactaaagtaaacaaaggatcttatgaggatgcaggccaatgtgacattatcattttctctgctggtgccaagcaacatccagaagaaagcagaaatcagcacattgaaagaaattataagattttaatctctgtgttcaactccatgaggccattgaacccacatgctattgtccttttggttgcaaatccagttgatatccttacctattttgctcaacagatatctggattaccaaagagtcaggtttttggagc

SEQ ID NO: 34141 - DNA, 550 bp, Glycine max
aattggacttgttaaagcaccaaccgatgcttctattggcactacgagtgaataatatcgacacggttgtgttgcctttcggaacggatgggaagaagcggcccaactcgctgatcagcacaatgaaaaaaatgctaacggtcggaattggctcaatcggccgattgactggcatcggccaacagaagcggagcatcgacgcatcgggcattctcttttggcacgagagggcagcgcgggtgccgatgagcacggggcagcagctgcacattcagcagaagtcgttcgcatttggcacaataaaagcgaaggcgcaaagacttggcctttcccaaattggccttcagttgcacccttcggcaacatttggtcgcattcagaagatgaaagctcgggcctcacccgtccattctttgggcgtcaaacacattggcgccatcgaggcgaacttgccattgtacgcacaactgaacacactatcccagcagaagcaagtcacactgaatgtgcaagtgccgaaaacaccgacgcgtctcttctctttgcacac

SEQ ID NO: 34142 - DNA, 422 bp, Glycine max
gtttatttaggaaggtagattctggggtggttggttttgttctgttgttggattaaaagaattgttttttttaatgatttttgaaaaaaagaatatttgtgggggtaaccgattagaatgaggagttcaggtatagtttaaggttgcaacatgagcttcagagaggggaagatagaaggagaagatagggaatgtgaagaatcggtgttggggagcactgaatccaaatcagtgagggaaaatgggtctttagcaagcactcagctgacagttgatgagaatctattggttgaccctaaactactctttattgggtccaagattggagaaggagctcatgggaaagtttatgaaggaaggtatggaaataaaattgttgcaatcaaagttctgcatcgtgggagcacttccgaagaaagggc

SEQ ID NO: 34143 - DNA, 464 bp, Glycine max
tcgctatatcaaggaattcaaaaagagaaaaacgaaaatactcatcctcataagcatgacttcagcgtcaccgggtcatcggagaaaattctccggcaatgacccgccgagttccgggcgcaaactccagccagagaaacactccggtcgccgatttgcgcccgctcctctgacgctgaagcttccgttgcaaaacagtgagtactctcttcttcggccatcgaagctgttgctgaatgtgaccatcgagaactgtttgggggccgtacaggtgctgttgtcgcctgaggacaccgtcgccgatttgataaaggctgcattggcgttctacgagagggagaagaggaggcccttcttgaagaacactgatcccaagtgctacgaccttcacttctcgtccttcacccttgaaagtttgaagccagatgataagttagtgaacttggggtcaaggaatttttttc

SEQ ID NO: 34144 - DNA, 503 bp, Glycine max
cccacgcgttcgattcgattgaatgcaattgaacaagtggccgaatatttgcgcagaactaaatttcagcaggccaaactcagcattgacatgttctcttttgacccccaaatccgacccgaaatcgttgcaaaaccattcgatgaaaaaagcattcaaacggaagatttcaccaaaggcgaagaatctatgccaatttcacttgtcaatgccatcgatgtctcgaaaatcgaccccaattttgtgtatcggccacggagaacagggataaagcgaatgcaaaacgacgagggcgccgaacaaagcatcgacccgtgcttctgttcgggctgttcctgcaccgacgactgtgcggacagcaaaacatgcgaatgccgtcgtttgaccgcagtggcacacgaacgactgagcaaatcactgcaaattcacaaagcatgcgtgaagggatacaatttcaggcggttggacgacaaaattatcagtggaatttacgagtgcaattc

SEQ ID NO: 34145 - DNA, 443 bp, Glycine max
ccaagtttgagcaagaacattatggtaaacaagtttttaccgctgatcattttcgtttttctgctgattgacaccgccatatgtcgccatcaccatcggcactcccatcatcaccatcaacaaaatgagcagccggagatgatcagcgttccgcttcgccgcatggacaccgtccgcgcccgtctggcgctcaccggatcgcttgaacagttccgcaagcatcgcacggagtcgttgcgccgtaccgtggagcaaatgaacaacaactacaacaacaatgaagagtacagcagcgcggaatcggaccaggaacagatggaaatggcacaaaacggggccagagttggcacggaaattgacgaactgttgcgcaactacatggacgcccaatattacggtgacatttccatcggttcaccggcgcaaaatttcaccgtcatctt

SEQ ID NO: 34146 - DNA, 495 bp, Glycine max
tcgaatttgtatgacacttctacaggtaaccttaataaatagtcggctttcaagaaaaattgtcatatcaaatacctaggcttgctcatactgaactcaggaacggagaattacaaaaatttcatttcttataaaattacgatgatgggtgattctaggatccttatgccattttgaacttatctaacatgaataaagatactctagtgtatggatcttggaaacaaccactatggtaattcgattagaaatgaaatttctgcaatttgcaattattgaagtcattatgaaaaagaacatgtctcagttatagaatttttttttttgaaaaatcaactattcatttttgctaccgagcacatgtaccgtacactttcattagaccaagcatgtaataacccagaagaagacaccattttagatgtgcaagaaatagagttatgtacttgttgactactttctatcacatgcaatctattatattgtctttttcaa

SEQ ID NO: 34147 - DNA, 434 bp, Glycine max
tcgcttacgcgtccggggacgcgggggatttgattaaggccttaattaatcaacttactaggtaggactcgaactcgagaactctagttgatggatttaggtactagctaaaatcatgaagcatgcgcgaattcctatcgacccagatgaggaaaggtggaaagagagatgcaccatgaggatgaaggaattggagaatagacaattcccaagtcaaaacgcagcatcacaaccagaactagtgcataaggagcttgttgggaagagaaaagttatgacatctgagttgtatgaagctgttgaaaaaggagacgtggaaaacttcgtggacgcgttgcagagaacatgtgatgaaaggagaacacccttgcatgctattttcgatcaagttacctgcgcaggtgattcattgcttcatgtggcagcagatcata

SEQ ID NO: 34148 - DNA, 504 bp, Glycine max
ctttcgcttgggcggacgcgtgggtgagatttagacaaacaatttcctaaaaatgttgagccgattttctaaaatcactgttcgtggctatgcaaaggatcttaagtttggttcggaagggaggaaagctatgctctccggtgttgacatgttagcggatgctgtcgctgttacgatgggtcccaagggaagaaacgtggtcatcgaacaatcctggggcagtccgaagattaccaaggacggtgtcactgttgcaaaggccattgacttcaaggacaaattccaaaacatgggcgccaaacttgttcaggatgtggcaaacaagacaaatgaggaagctggtgacggaacgacttgtgccactgtgttggcacgtgccatcgcaaaggaaggcttcgagaacatctccaaaggtgctaatccggtggaggtgcgcaagggactgatgaacgcagtggacgaattggtcaaggaactgaaggcaatgagcaaaacagtgacaac

SEQ ID NO: 34149 - DNA, 455 bp, Glycine max
tcgcgtacgcgtgggttgtcaccaacatagtaacatttaaccacacctgtggccaaatgacatcctccaccttattgctttgctctattgctcttctctactctgcatcatttggagctgaagcatggacctcgccctacatacccgtctcttcgctcatcagcaaaagtctttatgacaaatttttccttcacaaagatgacactgcatgcccagccaaagacttctacccctacgacgccttcattcgtgcatccaaatccttccctgcatttggtaccaccggatggttagcaacacgcaagcgtgagattgctgcgtttctcgctcagatttcccacgaaaccactggcggctgggccaccgcacccgacggcccatttgcatggggtctctgcttcaaggaagaaattagtcctcagagtaattactgtgattctactaacacccaatgg

SEQ ID NO: 34150 - DNA, 439 bp, Glycine max
cgggtgcgtgttcgtcgcagcgccttcctgaacaaattccaaatcgaggcaatttactcgctgaaagccaacgcccaaaatgcgatcaaccgcgtgttggagctgttcaaatcggcctacttctggaacaccaaatcccaactgatgagcggacagagtgcacagaaagacggaaagatcgccgccacaattctaatcgacccggtgactcagaagagtgccaacattaccatccgaacgccggcgcaacagttgcgcatggagcagatcgaagtgccgtacaaagtgcgccctttcgctttgattcgccagcggagtgcgcaacagacgcattcgctggctcagctgttccaccaattcagcatcaaataccgcccccaatgcaccgttgacgggcgcaaagtgaacactttcgacgacttgatctacacggcccccc

SEQ ID NO: 34151 - DNA, 457 bp, Glycine max
ttgtcgcgtgggttgagtttgtatggctcggattacagatatacaaaaaacgattgagccaaactttctttcaattgattgcgtggatgccgcaaatttttcgtgtttctcagatgggtccccgtgtgttatgggaattgatgaggcggggaggggtccggtgctcggaccgatggtttacagctgtgctattgtcaaggcggacggcttagcaaagctggactcaatcggggtcaatgactcgaaggctttgaccagtgccaaacgaagagaaatattcgcgaaaatgcaggaactaattgcgtctgttgacccaaaacaaattctcacatattctcttcgcattgtccatccccgcacaatcagtgcgcaaatgcaacggcgcgtcaaacagtcactcaacgaaataagccatctttgtgcaatttcactcatcgagaaagcaattcagaatggg

SEQ ID NO: 34152 - DNA, 462 bp, Glycine max
gtttagataaaattatagaacaagaatgaaggtagcacaggtactgcacatgaacggtggcgttggacacgcaagctatgcaaacaactcccttcttcagcaaaaggtgatttgtttgacaaagcccataagagaggatgccataacaagcctctattgcaacaccggccccagaagcttggcggttgcagatttgggttgctcttctggaccaaacactttgcttgttgtgtctgaattcatcaaaattgtggagaagctttgccgggagctaaaccataaatctccagaatacaaggtctttctgaatgatcttcctgggaatgacttcaacaacatcttcaagtcccttgatagcttcaaagagaagttgtgtgatgaaatggaaagtgggattggtccatgctacttctctggggttcctggttctttctatggcagggttttcccaaatcaaagtct

SEQ ID NO: 34153 - DNA, 439 bp, Glycine max
ctttatcgcgtttgcggacgcgtgggcggacgcgtgggcggacgcgtggggagaacttcgctttcagtattgtcaaattgctttttcaaaaatgccagctaaagctaatgcaattggtattgacctcggcacgacgtattcgtgtgttggagtcttccagcacggaaaggtggagatcatcgcgaacgaccaaggcaaccgcaccacgccgtcctatgtcgcgttcaccgacaccgaacgtttgatcggcgatgcggccaagaaccaggtggcgatgaacccatccaacaccgtgttcgacgccaaacgtctcatcggacgcaagttcgacgacccggcggtgcagtcggacatgaagcactggccgttcaaagtggtgcagggagagggtgctcgtccgaaagtgatggtggaagtcaaaggcgaggacaaagcgttc

SEQ ID NO: 34154 - DNA, 823 bp, Glycine max
tttacgcgtgggcggacgcgtgggcggacgcgtgggcttcaaccccaaatccaagtctttcatgagtgactcagtgggaagagccagtgcagaaacaacttcagagttctactttgccataatctcaaatgctgcaactgtcacaagccatgctgcttctaagttaatgggaaccacagataccacattagaaacttggtcaaatttcattaccttaagcccttataggccctttggcacttactatttctgcactggaaatggaaagtcagggaagaaaattgtgataacaaactcaaatgcagttctacaggtcctgtttttctctgctcaattaagcactgaagcagaagctgctcaagttccctataggagcttacgagatcatacaatttatggcaccgaactgcaacaaatggggcctcagaatgttgtgcacttggatcaacatcagctccagaatcttcctttgtctgaagatggtgctggtggctcaaatgcaaccattaacacggccttaaatgaccttggcctgattccaagagcaagactgtgcctccgggcagcagcagagtgggaggcaagaagaactgacaacgagaataagatcaaagagaagaaagattttgttgcgaaaaaattggacgttcttcgggaatacagaaaaatgtataaggataaaagggtgggtttttacgatggcttcagggagcataagcaaggtgaggatgacttcaaagcaaacgtgacgaggctagagctggcaggtgtgtgggacgagatgatggaaaaggtaagaagttatgaactcccagatgaattt

SEQ ID NO: 34155 - DNA, 509 bp, Glycine max
gtgtgacataaggatactttggaagaagacctttcatcaagattcttaaatatgcgttttcttccacttgcgttgccgcagcaagagaactcatatgattgtggcctatttctgcttcactacctagagctgttccttgttgaagcacctcttaatttcaatcctttcaaactaaccaagttttccaactttctcaatgtggactggtttctgcctgctgaagcttttctcaagcgaacactgatccagaagttaatctttgaacttgtggaaaatcatggttcacatgaaatctcttcctctgactgtagtggcgatgatgagtgcttagaaaataatgataacagaactgggattgatcaccctgaagtcaataaggagccaacaacttctcatgctgggcagggaatagaaatcactctattgtctggttcatcgactatggatcctcaatccttgaacaacacaggattggttcttaacgagctttttgatccatgagctactgc

SEQ ID NO: 34156 - DNA, 446 bp, Glycine max
cccacgcgtccgcccacgcgtccgatctagttctaatatctgataacacaatttcataattagatgttaaactagtatactggcagtggaagtttgccttcgacagaaaaaaaatgtatagggattttaggaggggaaagctatgctctcaccatttgagtttgctcactctcttttatcatcattttttaaattgttgttaaccacttgtgttttgataccattgtggatcagtagtgtttgatctatgtacattagattcacctacttcaggtatttttttcaagctgacttataggcatacctttagtgatgttcatcttttggaaattttggcccattttcttgtggtgaggactgaggccatctttgtagtttgctcttacttttggaagtgaaataacagcataccataccttttgtttactacagaagttattcttttg

SEQ ID NO: 34157 - DNA, 518 bp, Glycine max
aaaccgtacatccaccacagaaggaaaactaagtagaggtataaatcaagaaggaatagactattacaacaatctcatcaacgaactagtggctaatggtatacaaccattggtaacgcttcttcattgggatcttcctcaatctttagaagatgaatatggtggcttcttaagtcctcgcataggtaaagattttcgagattacgcggaactttgcttcaaggaatttggagatagagttaagtattgggttactttaaacgagccatggagttatagtcagcatggttatgcaaatgggggaatggcaccgggtcgttgttctgcttgggtaaatccaaattgcactgggggtgattctggtacggagccttatttagttacgcactaccagttacttgctcatgcagctgctgttcgtgtatacaagaccaagtatcaggtatcacaaaagggtttgataggcattaccttagtagctaattggcacctaccattctcgaataccaaagctgatc

SEQ ID NO: 34158 - DNA, 462 bp, Glycine max
tcgtttcacttttttcgccttctctctcttatcacacagctgttactatttttctcttgatattctcactttctctctctctctctttctctctcttctggggtagcgcactggtcgcgctccttcagctgaacttcttcgttgcggcactgagtgaggtggttcactctctctgcctctttctcttctctcttcctagaaacaaaccatcatcttcttagatctataccaacggcgaaggaaataatctcttgccaaaagcacaaccctaaacacttcctccgagtatttaccagaaccatagtttttaaaagcagagagcgtcgaaggcacagctgtcgtgtgggaaggtcccaatgtgtgctagaaattataaagatcattgacaccattgccgaagaaggggtctgtgacctcactcgcgtccctcttcccacatttcaactttcatgttcattaact

SEQ ID NO: 34159 - DNA, 606 bp, Glycine max
  unsure (1)..(606): unsure at all n locations
tatcaatntgtggagataatntgaatctgagtatgtggattggtganaatgagagtcaattcaagcatgtgggagaggatgttgaatctgaacatgcttcactcagttctattgttgacaatgatgatgtaaatgctgaagacatcattaccggagtttctgggcaacaggaaaatgactcatgtacatcttttgaagcatcatttatggatgctgatagatctttgcatgtcactacctcaactgattctactattggtcaagatgaagaaatgatgaataacattaaggctganaatgtggagttaaatgctgatattgcatgtatgagtaatggcttgccctcaagcactactgggtggatgccttttcaggatagtcaaattatgttagctgataatggttatccatcatttcattctggtaaagttaatgttgatgacatgtcatcactgtctctttcagcttgtgcttcatacatgtcatatggagaccattaccagaacaattttcaccgtgatgatgccgagttcaatgtaggccaagaggtgaaacaaacacctggtattttttcttctgaagggtgtcaagcttaccagtgttttc

SEQ ID NO: 34160 - DNA, 352 bp, Glycine max
gtggtctatacgcgtatgcatcatcttctttggtgggcccgatgatcgtgaagccctagagctggggaagaaaatgattgaacacccagcagttaaagtacgtgttgtgaggtttgttgaaaaggatgacctgatgaatggaaatgacactgtgttaagcttctcacatgacgaaaatggtgacaagagttacagcttctccactgctaaaatgaaccaccagatagaaaaggaattggatgagaaggccgtgggaaattttcgaagcaagtcgaatgaaatggcggaatatgttgagaaggttagtgagaacattgtggaagaagtaatagtaatagggagtagtggagat

SEQ ID NO: 34161 - DNA, 414 bp, Glycine max
tcggttttggaatatctcctgaaaaccaggaggaagatggaaccctcaatacatctggagatgcaagtgggacaggcatgggagagggtgtcggattaaaggatgtaagtgatcagattgccgatgaagatcagctgcttggaacacgggaacagcaaaatgaaaagcaagatgactctaatgaagtgcctagtagcaataatacagggattgagatggaacaggattttcaggctgatgcaatgagccttagtgaggactctggagaagatgacgattttgatggcgaaaatgaggaacttgagtttgaaatgggacccactggaccagacagtgaagcagtgggtgagaaagtttgtgatgagaatgaagatgaaactcttaatgatacaagagaaaagtttgaatctggac

SEQ ID NO: 34162 - DNA, 501 bp, Glycine max
ctgtacgcgtgggcaaacccatcacacaaaatcacgtaagattgtacctcccaactcaaaagcttcaaactttttccagtttccaaattaattaagacacagagagagaaaccacaaaaaagttgcaaatttttcttctttcgtcacttttttttctgttttttcgtcacaaaagtctgacccttttctttccttccattgaatttggatggctggcggcggaggtggagaccggccgccgtggaaggaggcggagccgcctcgacccaccatcactctgccgccgcggtctggttccatggagtcccttttcaatggaggattcagccctggtcccatgactctgctttctagcttttggggtgatggggatgatggaaagtccttctctcagctcctcgctggagctatgtcttctccggtggccggagcggtcgccgccggcgtgatggactcacctggcctcttttcatcttctcaagtgtcttttggaatgacaca

SEQ ID NO: 34163 - DNA, 421 bp, Glycine max
ccctcgcgtccgacacgccccacaattaagccatagtgcacaaagcttttacaagaaattgaaaagtcaatatccaaattcatcaattaattgctaaacttcaattcgcaatcatgcaaaaccaacaaccctccggtatcatcaaccctaagtattgtgctccatataatgtcgacctagcaattgtgagaaaggtcctggcattaactgatagctttaccgtcaccgatgtcaatggccaaattgttttcagccttaaggcctctctcatgaccctccatgaccaccgtgtcttgcttgacgccgccggagaacccgtcgtcacactacgccggaagttaatgactgctcatgatcggtgggaagttctccgtggtggaagcacggagcccaaagatttgatctttagtgtgaagcgatc

SEQ ID NO: 34164 - DNA, 339 bp, Glycine max
gggggtgattgcgaacaccaccaacaaagaacacacacaacacaaccccttctcccttctcttaataattgcaaagtttttttttttctttctttcgttcttctgtgtcggtgtttggatcgaattgtctttgattcgagagttgaacgcagagtcgggcgccgtttggatctgaaaccagtgaatttgagcttattttttgttgaatttgtagctgattattgttgttgttattatcaataatcggtgagaggagtgagtgaaattttgattcttctttttttttttttttttaaattattgttttgatgggggaaggtgaagctgaggggagtgatg

SEQ ID NO: 34165 - DNA, 616 bp, Glycine max
acgcgtccgaagaaattcagcaaaaaggccagatggttcggagttctggttggaggtgtcatgctgttgggtcatacaaaaataaagccatgagagctgctgctttttcagctgatggttctgtgctggcagttgcagcagacactgttattacattgtgggatcctaataataatgtcctcattgctgttataggagaaactcaaatgcctattatgaggctcgtctttgctggaaagtcagattatcttctgtctgtatgtcatggttcaaaaccgcagctgtctgtttggagtatgtcaaagttagttgcatcttggtcatacagactccaaatagaagctgtctcatctgcaatagatttgtcatattttgctgtccttgctctccttcccgaatcgaatgaatatacatttaaaggtgatgggataatcttattattcaatgtgacagatcctgttcctgtggcttcctggtcagttactaaggccaagggagggaggctggcttttctccaaggagatccatctgaacgagcagttattgatgggaaaccaacacagacactgcttgcatatataaatggagatcatgaatatgtcatctttcatccatc

SEQ ID NO: 34166 - DNA, 442 bp, Glycine max
cccattcgttcgcccacgcgtccgcccacgcgtccggccaattgatcagctgagacattctctcccaatcgccaaattcgtcgcctttttctttcgcccctttcgaaatgcttctgaattttgaatttattccaacatatttcacgtcaatgaacggctttttcgttcccatttttgccttttttgtcattcaattgcattttgcctcggccgacccttttgctcagggcaatttggcattggtattcgatgccaaatccggaaggagctcggaaaacagcgcacagatagcaaatttgagcgctctttggtgtcaggccacttccgacggaagtgatcagcttccgatcaaaagtgcccgattcatccaattgcaccctccgccgctccgacaccaccaggccagactcagtcccgaagggaatcgcgcttttctcgactt

SEQ ID NO: 34167 - DNA, 434 bp, Glycine max
tcgcctacgcgtccggtgaatgcctgaggaagaggacaattacaatggctgctgtttctttaaggctcctttcctttctgtgtgggctgtttgtcatcataatatcacaagccagtgcccagacatgtgataacagcagaggcaactacacaataaacagcacctatcacaacaacctcaacactctcttatccaatttctcttcccacacagaaatcaactatggtttctacaattgctcctatggccaagaaccagacaaagtatacaccattgggctctgcagaggcgatcaaaaccagaatcagtgcctcaaatgcctaaacgaatcgagagtgtctctggcagataaatgtccaaaccagaaagaggcaattgattggagaggagagtgcatgctgcgctactctaaccgttccatatttgggctcatg

SEQ ID NO: 34168 - DNA, 427 bp, Glycine max
cccacgcgtccgcggacgcgtgggtcaaaattagccagagaaatggttctgagatttgtttatatcataataattttgatgatatggtgcatgtatccattaacatctgcacagtatgagaatgggactataacatctgcgcagtacgagaatacgactatagcatcacgaccaggttgtgatagcaaatgtggaaatgtttccattcctttccctttcggaatgcacgatcccaaatgctatgcaagcaaccagtttgaaatagaatgcagacacaataacaatacttctcaaggtcatcagaaacccataccccacctaaagtacataaatttggaggtaacgttgattttttcttaacgataaatattaattattaatttctgttaacaaaggtacaatcatacctacaaccttttccttcttt

SEQ ID NO: 34169 - DNA, 618 bp, Glycine max
gttgtgtggccaaaatctccagcaaagcgactcggaaacggacaacgcacaaaacggagaacagaacccatgtgccaagtgcgacccgaaggaagtgaaagagcacgagttggaccgttccacggtcattcgctgtcaaatccaaggcgagcccaccaagcagtacacactgcacagctgcgagatgcgctcccaatatttgtaccgtaactcgaagagtgccgtgggaaactacggtgccgccatgcaaacgatcgttgccgccacattgcatgcgatggactccaaacacacataccagcaaatcccggcgatgagtgcgagcacggaagagacgctgatgtactccaacagcaaggaagtggatgagaaacgcttttacaggaacggtgacgacgactttggcacggatggaaagggttcgccttttgcgcaagtgccaaaagtgcagcaggcgcagcaggcactgatcaaactggtgcagaacgtgcaggacaaactgaagggcatcgaccaacaggcgcctgtccaacagcaacgccttgtcgaaatgttgcgcatgtgcacacaacaggaactgaaccaagtggaaaggcaatgtccagggaacacgggaca

SEQ ID NO: 34170 - DNA, 427 bp, Glycine max
gtttgagtgatcattgaaaattgtcctcctcttgcttttttcccgtaattaacgaaatgtccgaacccgtcgccgacattgccgtcattgggttggctgtaatgggtcaaaatctgattctgaatatgaatgaccatggctttgtggtttgtgctttcaatcgcacagtgcaaaaagtgactgaatttctggagaatgaggcgaaagggtcccgaattgttggagcgaaatcaatggaggaaatgattaaattgctgaagaagccgcgacgagtgatgcttttggtgaaggcgggcaaagccgtgcaggagatgatcgaccgattggtgcctctgctggaggagggagacattgtcatcgacgggggcaacagcgaataccacgactcaaatcttcgttgcagagaattggcctcaaaaggcattca

SEQ ID NO: 34171 - DNA, 714 bp, Glycine max
gttgcattagcccaccatgttgaagcagttcatcgcgctggccaaagcgcagtggggcgaccagcaggacaaacagcacatgaacgtgcgcattcgcggcacgcaagcgcacacggagcagacacgcgcggtgatggcgcaaattcagcagcagcacgagggcaagcgacacgggttcagcgctcaacagcaacgcaaaatgctgcagcgcagcgccttcctgaaccaattccatgtggaggctacgtacgcactaaaggcgtacgcacagaacatgatgaaccgcggaatagaactgctaaagtcggtctacttctggaacaccaaatcgcaactgttgggcggaccgaacgcaccgaaaaacggaaagatcgccgccacaatttccattgatccgctgcagccaagcaatgccaacgtgaccatccgtacgcctgcgcagcagttgcacatgcagcaaatccaaatgccggccgcggtggggcgccccttcccactgatccgtcaacagagcgcgcagcagacgcattcgctggcacagctgttctacaagcagttcagcctcaaaagccgtgcccaatgcattgttgacggacgaaatgtggacacttttgacggctttgccttcaccgccccgctctcctccaattgcttttctgtgctggccaaacactgcagcagcccaatggaagaacagcatcagcagcagcccca

SEQ ID NO: 34172 - DNA, 571 bp, Glycine max
atcactcgtccgcccacgcgtccgcccacgcgtgcgtccacgcgtccggtcaatggggatggagggagggatgtgaatcttggtgatagcaattatagctttggggaggctgaggcattgagtgatgagatggaagaagagtctcggtatgttgcggagattttgaggatcagggatgttctgcttaaccctgaagatgagtctgaggctgtgttatttgattcattgaggcgggcttcagttgatggaactcaccgcggactgtttaaaggcaactgagattggcaaggctgtcaatcctctccgaaagcatggatcaaaagatattcgtcaactttcaaggactcttatcgatggctggaaagaaatggtggatgagtgggtcaaggccactactaccacagctatcacaggttcagaagaaggtacaccggattcagtgaatccatctgttgtagatgatgatgaagaagaaggacttccatcacctcccttggatgaaggggctctctttgtcactcaggctggttcaatggaactgtcacagttctttgatggcatggacgacgac

SEQ ID NO: 34173 - DNA, 538 bp, Glycine max
agagtatttgctgcacttcaactcagatttccactaccgcatcctcctccttcaacttgcaatttttcgtcatcatttctttgggggcaactgagtggagtgttttgacttctgataggttttttagggtttcgctttaggaggcatttgggtagtcaaatcttgtcaaaattttggatctttgaaggttggtcggtggaaattgtaaaaccctatttttgttcttctgcaccgcttattgttgttgttatctatattttcttttttctttatggggactgaggatggaacaagcgatgctgataaaacggaatttgatgaacgagttcagtgtttgaaaggtgccgtaatggatggtggggtggcaattgtggatgggaattgtgtttctgaagagggccagctcttgaaaagtgaagccatgaatgttggggttgcaattgctgatgaaaatggtgttgctgaagagggtaggatcgggaaaagtgaaaccttttgtaatcgggtggcagttgcagataaaggggactctggtgga

SEQ ID NO: 34174 - DNA, 606 bp, Glycine max
ccaagtttgagattatacgacttattttctgcctccaacatgtcaagctgtcttgacgtcttcaaactgacggacgatgacgcaatgaaatttttggtgtgcgaatcgcacatcggcaccaaaaagatggactaccaaatggagcattatgtgtggaagcgtcgatcagacggcattcacatcatcaacattcgcaaaacgtgggagaaactgttgttcgccgcccgtgccatcgcggccattgaaaatccgtccgatgttgtggtcgtctctgctcagccgtacgcccaacgcgctgtgctcaagttcgccgctcacatcggtgccactccaatcgttggccgttttacgcccggctctttgaccaaccaaattcaaaagaatttcaaggaaccgcgtctgctcgtggtgtccgacccgcagttggaccaccaggcggtccgtgaggcgtcctacgtgaacacgccggtgattgcggtggccaacacggactcgccgctgaaatttgtggacattgccatccctgcaaacaacaagcaaaagcactccgtcggactgatttggtggctgttggcccgtgaagttttgctgttgcgcggcaaaatc

SEQ ID NO: 34175 - DNA, 497 bp, Glycine max
tagggattgagggaccaaaaagcctaggtttgcatactctatatgattgtcgtgcatgcactatttatgatgcaatgttctatggaaattggattaagtgtgtggatttgggcaaagtttttggttagaatcgcgtgtttgatgagcttatgtttacctgattatttttataccatagggtggtccgaaaaaaaactagtcaatactaaaggcatgttaagggctgcaggtatggtatcaatctggctaaaggtattctggaacatcactcgaaagggatcctagattttgacaaaccaaggaaattgctcgcagattttcgaattggcaagctcatcacaggcaatatacataggttgcaggtttctaattagcattttaggataactttttttttcccatttttgattaattaaaatcattcagattgataattcacattttctgatcatgttcattaggacatttattggttgcaggttatgtgtttgatcaaa

SEQ ID NO: 34176 - DNA, 436 bp, Glycine max
cctacgcgttcggtttgagccggaaagtaattaacatggaagcagaaaagtcgcgccaacaagaggcggagtgtatgcgccgcttggccttcttcggtgttgcgctctccaccgtggcaacattgatcactgtgctgtccgtgccgatggtgtacaactatgtgcagcacgtcaactctcaaatggtgtccgagctggacttttgcaagtcgcgctccggcaacatttggcgcgaggtgacccgcactcaggctcttcacagcaacaagcagcgtgtggcccgtcaagcggactacggatacggcggcggtgcctgctgtggctgtggcgtgtcggcgcgtggcccacaaggacctcctggccagcccggtgtgcccggtgacgacggtgctcagggcaacaacggtgcgcccggtattccggcaacgccccgacc

SEQ ID NO: 34177 - DNA, 472 bp, Glycine max
ccttttcgttcggtttgaggtagaaaactttgcaaaaaaaaatggccgacttcgaagggcgtgtcaaagcttaccgtttcgtggcttacacgacggtttctttctccatcatctcacttttgtcggtgtgcttgacactgccaatgctgaagagttacgtgtccaacgtgggcatgaaaatggactctgagctcagctcatgccagcacaatgccaaagacatttggtccgaagtcagtcagctgaagggaatgcctctgctggtcgccggaaaccgtactgcgcgtagcgcatacggtagctgccaagagtgttgctccggcggtgcccaaggccagcccggccaacccggacagtctggacgacccggaaaccccggagcgcccggctcacccggacagcccggacaaaccccgcagacgccttgcgagcaagtgcacccgccttcatgcaccccgtgccctggcggtca

SEQ ID NO: 34178 - DNA, 430 bp, Glycine max
ggtttatcgactgcccccttttttttttttttttttttttacattgccagtgtacagaagttaaattctatgttaaatttgaaacttttagaacaattgaaatagcctgcaattctgatcgacattaaacaacaggcaacaacaacagattcatcaattgcagctgaaacaaccatcaaccatcaactggaaattcataccaacaatgatttctgagtgtaaaattttctacattggcaaagggtatagaagttactaaattcttcattaaattccaaacttctaggtctagaacaaaattaaatacccttcagagtgagtctattcatcatcatcactctcgtcactgaagtacccacccttgatctttttcttcttactgtttccagccacaacaccgttaccatcatgttggtttcccgccaagagc

SEQ ID NO: 34179 - DNA, 555 bp, Glycine max
atattcttgctcttgcagcagaatcttctgtgtccttggtaactttcttgctatctagctattacaagattttcctttttattaacatactactactatataatatacacaattagaatctttgaaagtacttataagaagcttatgaaagtaatttgttcttttgaactttattccaataattaaatttctgagtgaaacataataatagactgatttaatgtgaaaacttaatgaataaatagttagttaaattacttagttaattgcgcactctcgaaatcaatgtatcaatgaataaaattatatttttttatcctaaattttgataagttagtcttttaattctttaccatgataaattgatactttaatacgatttttagttgtcattaattaaattttaattttaaccgtttgaatttatattttaaaattatcataaaatattaaaaaattatatcaatgattaaaaaaatatttttaaattcaggaactaaaaacacacatctcaaaacacgggattaaaataataattaaatcattatttaatct

SEQ ID NO: 34180 - DNA, 463 bp, Glycine max
gaattgagtttgagttcacggaaaaacccgacccgaataacaggatccgaaatggagtcaatactgggtcgggctctggagtacactctcaagtactggctcaagtccttctcccgcgaacagttcaagctccaaggccgcaccgttcacctctccaatttagatatcgacggcgacgccttgcattccagcgtcggattgccgccggcgctcaacgtcgccaccgccaaagtcggcaagctagagattacacttccgtcggtgagcaatgtgcaaacggagcctatcgtggtgcatattgatagactcgatctggttctcgaggagagttctgattctgatgaatctcttagttcgaactgctccgcgccgtctcctccctccgccaagggaagcggttatggtttcgctgataagattgcagatggcatgactatacaaattcaaacagccaatcttttac

SEQ ID NO: 34181 - DNA, 589 bp, Glycine max
gttcttgcaaaaattctcatttccctgatgggctgctccaagagatgttttatcctaaaagcatgaaaccatatcctgaaatgagggagagaaagaaaatatcatatcacatgaattctgataagcagagttcaaggcctttgagtaaaatttcagaggagatttctatgccatcgggaaatgttgcaaatggagttttaggtactgcttcaagttcgtttttcagagggaatgaagcattttccaatgataatatgctgaagcctgcttcaaatatttcagttaatgagatccaatgcaattcccctttcctctgttctgataccaggaccaacactttggcacagggggatgcgactgaaaaattgcaagaacttggacggtgtggtcaagactgtatacataaccagttgcctatgatttctgaacatggaaatagagcaggaaatttgaatcgtcgaagtggttatagctatgataaaattataaggaacattagattcaaggctggtgttaactatagcttttccagaagagtggcaatacctctttgtacagcttcagttattgctgataactgtggaactat

SEQ ID NO: 34182 - DNA, 420 bp, Glycine max
tattttctcgcacagaaaagaagggttttcgttcgcacagtgctcactcgcttcgttctgttcctactctcgctgatcatcatccatggctgaaccacgcgccgcctccgacactcgcctcaacctctccgtcgcaccgccattgcagatctccaaagatgtccaaggatctgacaatcccattccactctcaccacagtggcttctgccaaagccaggggagagtaaacctggatcgggatctgtggagaaccatgtggtctcaaactcaccatttggcaatcgctcagagactgttaagacatctggaaagggagaggatgttcatgatgcccataagaaaaaggatgtctttaggccatccatgtttgactcagaaagtggacgtcgtgaccgttggcgtgatgaggagagagacac

SEQ ID NO: 34183 - DNA, 468 bp, Glycine max
ttcctcgcgtccggattgaagcatggccaaaattctaccaaaactctagcgaggacttcaaattttccatgtaccctctatcactgtatgatttttgatcctctttctcatgttctaaattttcccctcctaccaaaagacatcttcttctcttcttgccatgtttccatgatgattttccatccaagaaaactatttcacccgtaccttggctcaagtgattctaccatggggacggggaggagaacaaattatagttcaataccttcgcctcttcactcaccaatcccactttcatcaattccgtgggttccttccctcattcatggagatcacatgcatctaaaccttgcacctatcgttataattgtcttagctggcacaacttgcataattatgtttctcatcaccttgttcaaaatcctaaggtactattatccaaatagatacaacgttagcagaagcaac

SEQ ID NO: 34184 - DNA, 472 bp, Glycine max
tcggtatcaaagaatggccaaaggcattcacttctaccgcttcggacattgagcggaaagacaatgaaaacgaagagactgaagaggacgacggacagtgggggactgaagcgacggcggcgagcagttcagaggaggtaaaaacgacacaatgaacgtagaaccggcgaatcggagaatatctcaaaaaattgggagcggagaagacacacagacacatgttgaaattcgcaatgggaacgattggaaatgacgaaaacaggcgtgccgagctaacgctgaacactctctgcagacggtcgcttgcgcttttgcgctttgcgggccaaaactgaacagtccgtcgtgggcagtcagcggccacaatggaaagcggatttgcgagtgcaattccttttcccagagcaggcgcccgacttggagcaggtcggacagcacaatcgaacggaatcggaacagcagcagaaaatgt

SEQ ID NO: 34185 - DNA, 457 bp, Glycine max
tttttgcgtgggcggacgcgtgggcaaaagaaaagcagtagcaacagcccatataaaatataatggccgaaacctgcgactccaacaataaagtgatccgtgaataccaccatgatgcttcctttatgtcaaggtgtgacatctttactgatgttaccgagtaccaactgtgtctggcatatgccggagaatctggtaaaggaaagttcgaacctaagtgggacacagacaatgtcactccccaacttatcgagcagttcaagctaaattgtgatgcctcgggtctgccagtcaaagtatttgtcagcatcggaggagatgaccccttcaaagttgctgctggtggtgccgatgattgggttctcaatgccacaaccacactccaccacatcatcaacgagtaccacatcgatggaatcgatgttaactacaccacaatccagtgcaaccaaacatt

SEQ ID NO: 34186 - DNA, 404 bp, Glycine max
ctttttcgccccggagccgctggccaacccgggcaggctggagcgaacggagttgtctcacgcccaattcctggcccgaagggaccgcctggagcgcctggccagaacggaaaccccggaagccaaggtcagccaggacagccaggaggccaaggaccgcccggacctcctggcgcgcccggtcagcccggccagcctggaaactctggccagcctggacagcccggagcaccgggacagcccggcaaggacagcggctactgtccgtgcccgccccgctcttccgtgttggcagtcaaaaagaagatggcggcagccaagaaagcataagcgacaagcgcagggagaagagaaccgaaagacaaaggaccgacgcgaaagcgaagctgaagatgatcataatt

SEQ ID NO: 34187 - DNA, 362 bp, Glycine max
ttctcacgcgttcggtttttcgtggggtttgagccaaactcttccaaatggcttactaattgacgccgatcattatgttgcgttggttgttcgttgggcttgtcctctcctcgcatcaacagatggcacaaatgggtcgaatggaaggggatcaaaagcgcggcatggaaatgggccaaatgcgtcggcatggaaatgggccaaatgcgtggcatggaaatgggccaaatgagcggcatggaaatgggccaaatgcgcgggatggaaaggggccaaaagcccggcatggtcatgacacaaaaatcagaaatggatatggcacaaatgcgcggcatggacggcgatgatagccagatgcgtgc

SEQ ID NO: 34188 - DNA, 459 bp, Glycine max
tcggtatagttaaaaggaacttcttaacttctcccacatctcaattgtgactgctatcactaccaccaaaaaactacatatctctcactctctttggccatgccagaaaactgcatagcacccaaatctgaacacagcaacactactcaccctgaggaaggaccacctgagatgactcagactgtccttcccatacaaacaaataagcaatctttcccaaaactggctatgtaccccataactttaaagtttgaggaattggtgtacaaagttaaaatagagcagaagggtgtgtgttgggtggagcacaaggagttgcaaagagaagaccatactgaaaggagtaacaggcatggtttgtccaggagaaataatggccatgttggggccatctggcagtggcaaaaccacacttctcacagcacttggaggaaggctcagtggcaaactatcaggaaa

SEQ ID NO: 34189 - DNA, 556 bp, Glycine max
cccatcgcgtccgggggtcaatgaaacaacaaagcaagaaagctcgtggcaaagaaaaagctagccccaaaaaaaagccttaaagaaagctgattacataaagcaataccttttctctctctctctttttctatctttctttctttctttcttccttcagttgtgccactatcattcctcctcatcatcatctttccatacgagtaaagctgaaaaacccgctattccaacctctcaccacttgtactagttttgagaatttgatcgtgtgctaacatatagtcctcaaattaaagcacaaatatttttccacccatgttagacaacaacaattgcagtgcttctaattctggtgcaccatcttcttctgatgccgcctttgcattatctgaaaatggggcggctcacaacaaaaggaaaagaagacccgcaggcacacccgatccagatgctgaggttgtgtctctctcaccaaccaccttgctggaatctgacagatacgtgtgtgagatctgcaaccaagggttccagagggaccagaatcttcaaatgcaca

SEQ ID NO: 34190 - DNA, 559 bp, Glycine max
ttgtttcgtggggccggggtcaatttcccttgttaaatttcctcactaccggtccacaataccaaaaaaactacgaaaccaaactcttatttctcttcctcaccaaacacttcatcaactctctctctctctctctgcaaacaatcatgccaggtttcttattcttcctcttttgcttcttcttggcatcatcacaacacatcgcaatttcattctccacagacaccttaagctcaacacaaattcttctaaccaaccaaaccctcgtatcaccaagccacatcttcgctctgggcttctttccggggaccaattccacatggtacttaggcgcatggtacaacaacatcaccgacgacaaaaccgtagtatgggtggccaatagagagaaccctctcgagaattccagtggttttctaaccatcggagaaaacggaaacatcgtcctcagaaatccatcaaagaagaaccccgtttggtcctccgacgcaaccaaagccaacaaccccgtgcttcagcttttggacacaggaaacctaattctcagagaagcaaacat

SEQ ID NO: 34191 - DNA, 596 bp, Glycine max
tctgtctccgtctttctttctgtttttttcccttcgcttctttcttctaaacataaattagaagattccaaatctatgatgaaaccattagcatgatcgagtttccatgcaattttattaaacataaactcagaataccttcgtttaggcacttatttaacccaaaacaatatatattttagatatcaccatttcttcttgtggtaatttctctcttgtcacctattaagaagctgatttttttttgggtcttttgcctcttgaagtttctcactgtggcattaataaaccaaggaaaaacgttatacccggaatcatgtcctgtgtggcagcacgtactgggcgacaacgacagcgctatgaagacaatatgcgactcgtttctggatgtattccctatagatggaaaaagggaaaagtagatcaaatgggagatgcagaggagataatagaagtgcttatgatttcttcaccaaaacgtgatgaccttgtgtttccaaagggtggatgggaggatgatgagactgttacagaagctgcttgccgtgaagcgctagaggaagcaggagtcaaagggattgtaagggaaattccct

SEQ ID NO: 34192 - DNA, 487 bp, Glycine max
attggctcttggttccacctatggagaaatcaatctaaagagaaaccccacaaagaagggtaataatagtgacaagaagagtcacccacttctcagcttcttggctcttcgtaggaaaaagaaaacaacagcaaggcctgaatttgcaaggtatcttgagtacctcaaggaaggcggcatgtgggatttgaattccaataaacctgtgatgtattacaaatgatcatagcaagtttgcttcgggtttgaatgcaaaattaatttgttggcatattaatacgttaagagtttatatagtactactactatttgattcttaattatgtccaattactttgacaagatgtagagtatggctacttttgctattaattaatcattcatttgaataatttgcaaacatcaaaagttcatctgccctctttcgataggttttagtaatataattaaagaagctaataaacagactttttttcccactgaaaaa

SEQ ID NO: 34193 - DNA, 378 bp, Glycine max
cgttaatgtaagaaatcgatcaagcacaaatggaacaattacacaagaaaattgaggatgacttagaggtctcaagattggcaatgcatctggaaagaagcggatatcaatgactaatgaggagaaggttaaatactatgatatagcctcagaaaaacgtatagaatttgatagagcaatggcaaaatttaacaataaaatggaaagtgggggagtttgacgaaattggtgggtaaagcctccttatttttctgtattcattttttcttatgattctgccgtcattttctctgggttgcatattgcaagcgcttgtattgcttcaaatgctgggaagcttagggcggctctttgagaatactctatttcttttgatgg

SEQ ID NO: 34194 - DNA, 394 bp, Glycine max
cttttcgcgtgggcgttttgcaagtgaagaaagaacctttggacttggttaaaaatgaattgccagtgaatgcacctatagtcggttaaaacttaaaaaaagaatagccaaattgaaaaaggagctctgatatgatcattcctctttctattctgaacagaatttccatggatgctactatgttatcttgtgtatttacttctttcagcttgttcattgagaaggctattaaggaaaaaaaacaatgtaaccgtgtctacgggtaattagccatttagaatctttgttaacagtaccgtgcgtgcgcatccaaaatatgtgtgatctgattatctttgattatttgacataatcaaaacaaaatagtaatcagacaaataacaacgggtttgtg

SEQ ID NO: 34195 - DNA, 465 bp, Glycine max
cagaaacaaaagatggtgcatcagaggcaaaacaacatccatgttcttgttcttccataccccggggcacttctggctttgccgtggcacaccaactcgctcttgccgcaatacatgacgaacttcttcttctcaattagcaacagcaatgagtgccaccaactctaacaagctctcttctccttcacctaccattcaccagcgtaggctcacccgccagaggaagcttcgctaccccactgacaaagacgctgctctgcattcaacttcctctctacccgcttctcctcttccttcctttaagtccgcttccagttccgaccattggtcttcctctgcggttcctcaaccccttccgcgtcccgattccccgtggacccgccgtcacgaccatcatcaccttggatctccccctttcgaacatcctgctttctcttttcgcagaaggtcggtcgatcatgatgc

SEQ ID NO: 34196 - DNA, 430 bp, Glycine max
gaatactttggaaatggagggacaacaaatttggtcacaaagtcaagcccagtacttggagacagagttgaccaagatgctgccaaatgtggttctacaaatgtctgaagtcaatgagcaatgcatttataaagtaccacagaaatttcgtgaaggtaatccaaaagcttatactcctcaagttgtttccattggtccgtttcacaaaccgcgtgaccctaatggagagaacaacactttggtgcgaatggaagaactcaaactggaatatcttcggagatttctaaatcgaagcaagcacgtaagtatgaagcatttatttcaaagacttattgagaaggaaaagcgaattcggagttgttatggggagcctattaattgcaacagcaatgattacttaactatgattctagctgatgctcgttttatt

SEQ ID NO: 34197 - DNA, 427 bp, Glycine max
gttgtatgtttgttaaatactgatatatcccaaataaattttaatgcattatatttgtcaccagtaaatataaaatgggcaaaatgtttgcaaatcagttgatggagtgtgcaaatgatgaatcatcatttcggtttgtcattagagatctgacaaccaaatcccccgtcctgcaaatcattctcttaaatccagatacttggtcatgttctgggaattgttctagtttagaagacaaagacccaattgctaaattaaagttacagcccataatcaaagtgcttttttctgactgccacaatgcaacagaatctcaatcaaggttgatagaggaatgggcaacaaagaattcggctgaagacattttcatgttgactcgtcaaacacaagaattggtgggttttttcatatcagcaaaagatttata

SEQ ID NO: 34198 - DNA, 301 bp, Glycine max
gtatagtggaggagaccaatgttaagcactataaggtttgtgacaggcccaaatcagctttcttttgggataacttgcacccaactcaagcaggttgggtagctgtgtataagaagttgcaaaagacgagcgctcttcatcaaatccggtactagcttgctagctagctagagagctatgcatgcatgatagctatttctaggccttttgtttgttgttaataatgcaccgcctttccatttggtaatttatcctcaaattctgagtcttttatatttattccaagggctttctcttcaaa

SEQ ID NO: 34199 - DNA, 407 bp, Glycine max
attatttcctttcaagtctcttaatttctctatatttcaaaaactcaaaccctaaaatgaacgacttgttctccggctccttctcccgcaccaatgaccaagtctcgccggaccaccaccatgtgatcgagatggcggccaccgcatcgccaacggccgagggaagcgtgaatctcgaaaagttctttcaagaagttgagcaggtaaaagaggagctgaaggagctagagcgtctccatgaaaatctgcgtgggtcccacgagaaaagcaagatccttcacagcgccaaagctgtgaaggaacttcgcttacgcatggacagtgacgtgacacttgctctaaagaatgcaaagctcgttaaggttcggcttgaggcactggaccggtccaaccagaccagtcaaagc

SEQ ID NO: 34200 - DNA, 427 bp, Glycine max
ttggttttttgtccaactatctttcagaatagtcacaattttcgtttgaaacgcatcgtctgttcatcacaccatggccaacggacaaacagcacacgctgcgatggccatcgaccttggctccgagttcatgaagatggcattgatcaaaccgggcgtgcccatggcgacggggctgaaccgggactcgcaacgcataacgccaatggcactgaccatccgggacggggagcgcttactgggcgacgcggcgctgaaaaagttgcttgtccgtccgaagaacaccttcatattctttttggatttggtcggcaaacagtttgacgacccgacggtgactgcattccgcaacgaattcccatatttgcgcctcaaagcgcaccccaaacgaggcaccgttcaatttgagacggatgttggtgacatg

SEQ ID NO: 34201 - DNA, 558 bp, Glycine max
tctacctcgcgttcgaagtgagagtgagagagaaggatcaatctaaataatgagaagtgaatatctctcatagtgtcgtacagcatacaccacacgcatacatttgtacacagacatgggaccatttctctgcgtttaaattttgatctttttggtggacgacaggatccgagtctgccgcttccctctccatatcatcatgctcctccttcaccttttcttttcatctctctctctctcattctcttcttcttcttcgttaaccttctcctatggaaatggaggaccatcatcgtcaccatcatcagtatggcatcactgatctgaggcaactcgttaacggccctcggccgactcatttccccaccatgccgccaccgcccaaggcggagctgttccccggcgactccaacctgcaggctgcgacacaacaacactacgagatgatgatgtttggtcgtcaagtagccgacataatgcctcctcgttgtcttcatgacttcgcctccaccgattccgccaccaacatcgccgttgccactcccaccaccaccccta

SEQ ID NO: 34202 - DNA, 538 bp, Glycine max
gagagctaattcaaccaaaatgtctcccaaatacattatagtgttgttggtagcattggttttggttgcaacttcccttgctggtcaaccagaaaagcctccacagcctcatcctccaacccttcaagaacaacaactcaccccacatcttgatagtacccacctaccacctcataaacgtataccaccacgcgagacaacaacaaaggagcaaccaagcaaagaaaagaaaggccatccccatcctggacatgatgctggggtggaaccaaacacggatcgaaagctaccaagagggcctccaaactgatcagtgagtcaagggttttagattgcgtcatatggtttaactttaaggactcaatctctacaaccacaacatcaggacatgttgttacaaccataatcgcaatttggaaccttggctagctaaaactattttaatatcaactatcaagtattaataatggtcagtgctacatgagcgtgtatgataaaataaaaagtagggagtctgaaccgttgtaataccatgtga

SEQ ID NO: 34203 - DNA, 385 bp, Glycine max
tccacgcgtccgcacacaccctgtaccgtacagttgtacaaagtccttatctgtacatatcctcccctcatcccccgcccccgtcaacgtccagcaccgccgaaaacacaattcagggacacgactccccgtcggcaactcccgaaaccccctcccccgcttccccaacacacggacacaacggccccccccccttcactatccctaacggggtactgaacgccacgacgactacgtttacgacgaaggcccaccgagtccttacacgccttttttctctcccgaaagggagacgaggcaaaaccgaagaaggatactggcagctgctacggcaaaagtgatcttagcccctctgattgcgaaggaatcccatacccgccatgtc

SEQ ID NO: 34204 - DNA, 446 bp, Glycine max
attactttttttttacagaatggtagaaggaatacttaaagattacgcaactttcatgactgtctgttatgagaagaaaactacactaaagaacattaaagtaaaagaaagaaaagggtcaacatatggtatccacgaagtcgaaatggcatctggtaccatatggcgtatactgaaatgtttatagcgaaatgctggttagcaacaactttttcttcttcttttttttgtgtaaaggaaacattttgtttttactgaagcaacaacatctttttaagaaaatatttttctaccatatgtattagaataagtaataattatattctttttaaagaataatttttttaatatattaagaaaataaattaaaatcaatatttttttaaaatcttattagcaagttgaaaaaaaattaagataaaataaactaaaaactcaatatataa

SEQ ID NO: 34205 - DNA, 673 bp, Glycine max
tccgctttaagattctaagcttttggctgaaaatcttttggatacaatctgtacggagtgtggtgcttcaagggtttcatcatgtaaggtttatagtgctgttccacctccacagcaggtatacactgctgttccacctccccatcaggtatatagtgctgttccaccaccccagcaggtttatagtggcccttctttgttgaagcagattcctgctgccatttcacccccacaagtttatagtgctgttccacccccacagcagttgttgactggagttcagagttctggaattgacctagaggcaggtgccagcctaacctctagttcaatgtcagcagctggggtcttgacaccggttcctccagcttccttggttggagtgactggtgtcactggtgccctcactttagggactccatcacaatctataggacatttaagctctgggcctcaagcaaacatgattggttatactcctccccctttagtatcaggtggtactagctatattggatatggtggattatatcctcaagctacccctttgcaacaagttgcccttgccttgagacactcacctcctgtcacatctacagatgctcccacaacatcagcatcaaatggagaatccaggccaacctcaagctctgatcttgaaaaggagaaacgg

SEQ ID NO: 34206 - DNA, 429 bp, Glycine max
tttacgcgttcggtttgaggcaatgcaagagacacaaattgttgtgggagtggcctccgtgtgctcccttttggccattgtggccacgttggtcgttgtgccgtcattgtactcgcagatcaacgaaatcagtctgaaggtgcacgacggagtgcaggcattccgcgtgaacaccgactcggcatggaacgaactgatggaagtacaaattacggtcactcctccggcaaaaccccgcgagaatcctttcgtctccatcttccgctccaagcggcagctgcctggacattgtcaatgtgccggcgtccaacagccccaatgtccgcctggcccaccgggacccgcgggggcacccggacagcccggataccctggacaagccggagagccaggacagccgggaatgcctggacagcccggagcgccatg

SEQ ID NO: 34207 - DNA, 374 bp, Glycine max
ggggtattggtctaagacatcttaataccagcagtgattccatgaaagggcttactatcatgtctatttcacttgagcgatgcccaaaacgatgctcctctcatggagaatgtaaattttcttttgatgctagtggattgacatcgtacagcttctgctcttgtgatcgaaaccatggaggcttcgactgtagcattgagaattgtaacacatcaaggaccatgtacggcaatcaatttttctccattgtatcaaatgctgcagccatacttcctgcctactgggcccttcggaagaaggcattagcagaatgggttttatacacatccagtgggatttcaagtggactatatcatgcgtgtgatgtaggaacc

SEQ ID NO: 34208 - DNA, 233 bp, Glycine max
cggtcgcgtgggcggacgcgtgggctagaacagaagttaaaggcaatgtcataattaacaatcatcacattgccttcaactagaacagaagttaaaggcaatgggatgattgttaactatgatggtcgtgtttttagctgatggcaactaaattgaaatttcgggtcggctcacttttaaaatgcatatgtttggaaagcatgaagaatctaatacaatgatcttatcttatt

SEQ ID NO: 34209 - DNA, 378 bp, Glycine max
cccacgcgttcgcaccttgtcatcttcctcagggggaggaggggggcatccacacacggagaggacagtggcacttgccgtgggaggggtggcggctctgggattcttgattgtttgtttgttatttctcaagtcggcgttgaagagaagaggtgggaagcgctgataaagtttattattttattcgatctggattgcgtgtgtatatacccctccctcaggatccacagatgatcagtttttaacatcttaggtgaatatacctttgccttaattcgtatagtttctgatcgaaagggattatcattattattattataggaaaatattcttatgatgagtagtgaatccgatttgtggtatggtatggtatgaaat

SEQ ID NO: 34210 - DNA, 382 bp, Glycine max
ctcacgcgtccgctcatctacatgcccaagatgcatcacccttatcattactgtatgattttgaggaactcgagggagagtgggatttccttactcgtgtagttgcgctaaccttttatccaactgtttctggaaggaaaccattaacgcttggcgagattgaaatccttggagtttctcttccgtggagtgatgtatttactaatgaaggccctggtacaagattagttgagcatgtcaagaagtttgatgaggagcttaatccctttgtatctgattcggatacgaatccatctaactcttcatcctcagaaaaagcgtcaccacccaaacaaggaggcacttctgctgaccttttcattgacctcctgtctggggagga

SEQ ID NO: 34211 - DNA, 397 bp, Glycine max
gtaggcacaatgtatcataatgtcgaagcttatgtacttgagagttttatcattttgtgacttccaaagtctggattctttgcctgactcaatagttgcagaaagctgactaagttgcctagtgacatgtgcaatcttgttaacttgcgtcatcttgagatacttggaactcctataaaagagatgccgagaggaatgagtaaattaaatcatttacaacatctggatttctttgctgggggcgagcacgaacagaatggaatcaaagaattgggagcactttcaaatcttcgtggtcaacttgaaattaggaacttggagaatgtttcccaaagtgatgaagcgttggaggcaaggatgatggataaaaaacacattaatagtttacagttggaat

SEQ ID NO: 34212 - DNA, 409 bp, Glycine max
gtggaactgcccatttccttatttgcaaagaacctgactatcaacagagtctatggaatatgatttcatccgttatgggagacaaaaatatggaggacaatgatattgagccagctccgaagctaattgaagttgtctttctgaactgcaaagggcaggttgatcaatgggttgagccttatctcagaattacagttgaacgtttgcatcgaactgaaaaatcacatttgaaatgtcttctcatgcaagtgattgcagatgctctttactacaatgcaccactgaccctcagcatattgcaaaagttaggtgttacatcagaaatcttcactctttggtttaatatgttgcaaggagtaaaaaagaatggtgtgcgtgctaattttaagagggaacatgacaagaaagt

SEQ ID NO: 34213 - DNA, 314 bp, Glycine max
atttgtataattacgatgttatatactgggatagtttaattgaaaaatgaaaccaggagaggtttattcgctggcgtacaatgccatccaatgtttgggatggcgttccattcttgtgaagactgtccttggcttggccagcgcacactccttccccgaactgtaccaaaacgtggagatggaattgaaaatcttccaaacggctgccattttggaaattgttcacagtgtcgtcggtttggtccgttcgccggtgttcaccacaattgtccaggttttctaccgtgtcactggtgtctggctgattttgcaca

SEQ ID NO: 34214 - DNA, 411 bp, Glycine max
tttcggttcttttcataaaaaaaactttcaaatatggatcgcaggggccaatttcctcgtcattcagaattgcacaagcttaactggattagacttttcaattaacactctctctggaaccattccagaaaatactgccactcttctaccatttgtgacatctcttgatcaatcttcaaataaattttctggagcaatacctatgagtcttgcaaattgtaccgaccttaatgcccttaaacttgatcagaatcgactaagttatcattttccccaacagttgggccttctccaacgacccaggacatttactgtgtcaaacaattctttgacggggcctgttccaaactttaccaatggtcatgttgtggtaaattattcaaataatgaagggctatgtggaccttcatt

SEQ ID NO: 34215 - DNA, 683 bp, Glycine max
gcttatgctctcgaaaagactgctttatatctggatctctagatcgaactgttttactgtgggatcaaagggctgagaagtgccagggacttttacatgtacaaggaagacctgctatatcatatgatgatccagggcttgtctttgcaattgcctttggaggatacataagaatgtttgatgcccgcaagtatgaaaagggtccctttgagatattttctgttgggggagatatttctgatgcaaatgttgtgaaatttagtaatgatgggagactaatgcttttaacaacggcagatgggcatattcatgtgcttgacacatttcgtggcacacttttatccacatataatgtcacacctgtctcatgcaactccacattagaagcttctttcagccctgagggaatgttcataatatctggttctggagaaggcagcatctacgcatggagtgttcgaagtggcaaagaagttgcaagttggaggagtgcaacttctgatactggacctcctgtaataaagtgggctcctggaagtcttatgtttgctacaggatcatctgagttgtcattctgggttcctgatttgtctaagttgggatcctatgttggaagaaagtagaaacaaatcaaacaatgcatgataaaactattgtttgcctattaacccactgaaagaatt

SEQ ID NO: 34216 - DNA, 378 bp, Glycine max
gatagggtttatcggcgcgacaaatcgaaggagggcacgtctgaattatgtccgaagatgagctggacaaactcaaaggcgaggcggacgcgctgcagacttttgtcaacaaacggctcgagaaggcacttcagctccaagcggagagcaaacgaatctttgagaccattcgcccgtccatcaatagtttcaatgaagactacctccactttttgcgtgttgacttggacagccaatccaccgtgttatcggctgactctctgaagaagatggaaacattgaatgaaagactgaaagatcatcacgacttgtgggctaaacaggtcgtcttccgctatgacgagctgctcgttaaattagacgagttgtccgcaaaat

SEQ ID NO: 34217 - DNA, 279 bp, Glycine max
ccgtctcgtgctggggaccaggacgactctgaggagcaccctggttcggtcaccatgactgctgccaagcggaccacctatcgaaacatggccgaagatgctgtcaattcagctatgaagaccgggaagatgacccccgccaacggctgtatcaccaacaatatcaggattggtggtggtgaagggtggtatcctattttctttaccattctttttcaacagaatatgcccatgaaagtcacatataggggtaaagtggttcccgctgtgatggacact

SEQ ID NO: 34218 - DNA, 439 bp, Glycine max
tttcgacttttgagcaatgttatttgtgcgatttcgctctgttttcggaacttatcgtgcgttttctgaatttccttctgcaaatcggacttgtctttatgacttccatgtgaaaaatggtgccaaaatggttgagttcgcagggttttcgatgcccattcagtacgatctttcggtcagtgcttcggtgcttcacacgcgatcgaatgtgagccttttcgatgtctctcatatgttacagactgaaatcaccggtgcccatagggtgcaattcattgaatcactgacgccaactgatgtgacgaatttgccggagaacagtggagctttgagtgtttttacaaattcagagggagggataattgacgacctgataatttcaaaaacggcccacgaatcactttatttggtgacgaacgccggaaggattggaattgat

SEQ ID NO: 34219 - DNA, 249 bp, Glycine max
atttttaatatgcccatccaatggccatattgtcaagatcatatacgactaatttgcatatacaatgggtgcacacgatctttcttcagcttctaccgtgctaattggaaaaatattaacgttctctgtgttgcttattaccatgctaagcacttaactgatatcgtgagagggcatttatttcatttcgttggcacataattcctttattccttgtacgggggcgagcttgatgtgaataaattaacc

SEQ ID NO: 34220 - DNA, 357 bp, Glycine max
aagaaactggcttacgatcgttatctacagaaaccccatcacgctctgtcggtgtaggttcggtgaaactgagttcaagaggaaagcacggtgccatcgtttcttaccaaaacgtcgtcgttatgaggcacggcgagcgcttcgacaacttcgagccgtcatgggcggcgacggcggcgcggccttgggacccgccgctggccgaggccggccggaaacgggcgttcaaaacgggcctgaggctccgagagagtgtcgagtttccgatcgggcgcgtcttcgtttcgccgttcctccgctgcctccagaccgccgtggaactcgtggcatctctctcgatggtgttgccgttaagcc

SEQ ID NO: 34221 - DNA, 417 bp, Glycine max
attttctaaaatggttgagcgtacggtatgggaatggcagatggtgaacacaatgaagcccatttggatgcgaaagccggcggaagtggaggaagatgagtacaaggagttctacaagtcaatcaccaaggactttgacgagccattggcccatgtgcacttcattgccgaaggtgaggtctccttcaagtccctgctgtacgtgccgaaaacactggccactgacgcattccaaaactatggcaaaacggaggacaacatcaagctgtacgttcgccgtgtgttcatcaccgacgacttccaagacatgttgcccaagtatttggcattcattcgtggtctcgtcgactcggacgatttgccgctgaatgtgtcgcgtgaaatgttgcagcagcacaaactgttgaaagtgatcaa

SEQ ID NO: 34222 - DNA, 157 bp, Glycine max
cggtcttgtgggctcagctaatgtaagaaatttagttgggtgagatggggtgcgtgaagcaaaaaaggaggtgcaggatgtaattccctatgacttgtaaagacctttgttggtgggctatttgaatgaaagaactgaataggaaatgaacctgtgt

SEQ ID NO: 34223 - DNA, 267 bp, Glycine max
ggttaacaaagaaaaaatataggtgtcactacctatacacaatataaaatgtgtgtgccaagtatttgtacatgtaaataatatagggacaattattattacatatgtagagctgagcagattcgcatgagttattcactgcaattcaacaatttagcacaccaactaatgtttttttccacttatctaaaagtggactttgtaactttttccttggagaagttgttgctgtataatgcaagtcatttcaatgttataagtactatt

SEQ ID NO: 34224 - DNA, 413 bp, Glycine max
tgattactaatttaccacgagatgcacaaaacattgttttaaatgagttatattcacaagtggctgattctgatgatgttgtccgcaaacccacactggtttcatggctgcagtcattatcttacctttgcacaaaagctacaaatcaaaatgcagccaaccgaaaaagtgaaagtgaagataatccaactttgtctagtattgcagacccatataacagtggaagagcaactgcacggctctaagagattcagatgtctagcatttaagaaggttgtgtatgctactactacaaaggaacctgcactatatgaagttcaggtttccttaaccaaactatggagcagaaaatgagagctgattactccctgaagtagctcctgtgaagcctgattgattactcccaaaagtga

SEQ ID NO: 34225 - DNA, 377 bp, Glycine max
tgtttccgatttagatgagaaaaacaacaactactattcaaacaacaacaaagcataggtatttgaggttttgagggaggacccttttggttcttcatagtggtgttttaggtgctatgccgtactttcactgtgtaagcacaaaatctgacaacaacaacagaatcttcatagattgtggggaacaaaaagggtacaataaccatagtgttgaaattgaagaatattttctgagttttttcaatcagagttgtgcgatgtagaaattggcactgatgtggtgatagctgatctgggtgttgctcaaatcactttttgtgatatgggttttgtgatttttgaagtgtgatacttttgagttgagacattagttttgg

SEQ ID NO: 34226 - DNA, 305 bp, Glycine max
gtccggaggaccttttagttctgcttgtgggaatggtgttttaggtgctgtgcgccatactcactgtgtcatcatccaaaaatctgccgacaacaacagaatcttcatagattgtggggaacaaaaaagctaccataaaccatagtgttgaaattgaagaatatttttgagtgtttctttccatgcgtgatgtacttactgatgtggtgattgctgatctgggtgttgctcaaaatcaaaatccctttttgtgatgtgggttttgtgatttcgtgtggtgtgacttgagacattggtttggtttg

SEQ ID NO: 34227 - DNA, 484 bp, Glycine max
ggttattggaacagtgaaactcaccccctttctcactctttttctcctttccttttgctactcctcaaaacttcccttcttattatcactctcccccggttaggtccacacctccatcggacccacccaccatggcctccaaccaccttctcaccctaacccgccgcctccgccgccgcctaccctccctccgcctcttctccacctttccggcggccaccaagtccccctcccctcctccccctacccctcccgacgccatgctctacgaccgcctcgcggaggcgaccaaagccaaactccgccggctcgataacccggacccacgcttcctgaaacacgggtccccggtgcccgcgctggcggaccacacgcgggtcctgggcgcgcccgagacccgcgtgacgaccctccccaacggcctccgcgtcgacacggagtcctccctcgcctcccagaccgcgactgtgggcgtctggatcga

SEQ ID NO: 34228 - DNA, 467 bp, Glycine max
ctattggcccccaatcgccggacacaaaaacccacccgaaaatgttccatttggccgccatcgctgcgctagcggcgctcgcactgcccctggcgtctccagacatggtcagaccatgcctcgagggctacgcacaatacggcaaatactgctacacggcattcacaaaccccgacaaaagcctgccatggtcagacgctgacaaaatgtgcacgactgaaggtgccgaactcgcgtcagtgcacagcgaaacggagcgcgaatttgtgaacatgctcgtccttagggaggcgaacaaaatggaattcaactgcaaacagccgggccgcgccttcttttggtttggcctgaagctgaaatggagcgaaaagaagctggaggatgcaagttggacggacggaaagccggtggactacttgagcccgaccgagtggtgcgcgtacaaacggtcgttgacgatggacaac

SEQ ID NO: 34229 - DNA, 654 bp, Glycine max
tctttgggtccaatcaggaatgtcacaaactgtgtcgactgaccttctagaccgttttgacaggatggctggccccattgtgaaggtgggcaacttaattcaggggatcctgtctggttcagagaccgacatgatgaaccccaagaattcagaacccactggattgttagaagaggtctacgctttgcgtgacatctacacaatccttcgagacttataatgtctcaaatttcaatgatccctgaagaggcccaaaaggccgaaacacaactgagtgttggatcatggcatccagtagcaaaacgagcaccgctgacgaagttcagcgacagatcgagcatatgaagtcacactcagtgtcattcagtggcagacaagggtattttgtttccaaggacaaattaaggtccatagaatcaaaactcctgaatgccatggaaaaagatgatgaggaaagcccaacacggctcctcaaccttcaggacgaattggatgaaattaagaaatcttctcaatttctccaagacgaactgaaggcagctcaacaaaaggtccgcgaaagaggtgaccttattgctaagttgcaacgggaaaaagagactcaagaggccttagccaagtccagattggacgaagttaataagacccataaag

SEQ ID NO: 34230 - DNA, 356 bp, Glycine max
tctgagattggaacgcatgatgagcttttttccttgtgagtttatggagtctatgctaagctaattaaaatgcaagatgcagctcacgaaactgccatgagcaatgcaagaaagagtagcgcaaggtatatattcttattcattttgttttgtttatggttttgatgatgatttttttttgggttactgatgttaatcctatttgttggagaccgtcgagtgctagaaactcggttagctcgccaataatgactcggaattcggcgtatggaagatcaccttattcacggagactctcggatttctcaacttctgattttagcctctccattgacgcttcgtcctacccaaactat

SEQ ID NO: 34231 - DNA, 517 bp, Glycine max
tcttctctctcagagcttttctaatcggcttctccggtaaatttttgtcgatccaccgatgagcttttgacattgactctcttattagtttcttctagtttggtgagaggagtttttactagtatcttttttactgtacaccaaatccctaaatttaaggacatgtatgctcgcaatcctcccctcaatggctcacaatctgctcaagctcccgactggacccctgcagatgccgataccggactccaaggtctcgcatgcgctttgattctcagcaactgtacggtctctttagggtttccgctaaatggccctgactgtgctcaattttgtgatttgcagaatcgatgtggcgattagggttgggtagcgactcgtaccctgagagaccaggtgctcctgactgtgcctactacatgcgaactggtgtctgtggctacggtaatagatgtcgttacaatcaccctcgcgatcgtgcctcggtaatttcttcctctcattcattcttctttcttaa

SEQ ID NO: 34232 - DNA, 372 bp, Glycine max
atctcttccttatccggaggcataactgttggctgttcgctttagacggtcactttctgttccaactcagccggtcgtttcataatggccatgaaatcttcccctgagattgcaggtacagtcatcttctctcactgcatcgcactctggttcattgatgcatcatcgcagtacacggggctcgagtacaaggttgactcggttagtttccttgggacgtttttagtcactttaatcatagtgacaacacccatcacaagagccatgacccctgtgaaaataggtgacctccctccttctgttgtagcgttgttgcacgcctcttgaatggcgtaaacttcttttgcttagaagagaaagtacaagaagcgt

SEQ ID NO: 34233 - DNA, 536 bp, Glycine max
accttgtcatgtggcattctcagccgttgaaggccttattctttaccatcctcaagagacattttatttgctctttccttgcctatttcctcaacaagcaaatctacatcgtcaattagactgttgaactctgcttgtagagcatcatctaattctgcaggaacctttttccctgttacagtatcataaagaggacagaatccatgtaacacgctcaactccagacctaattggttacagaccaataccgatggatctggcattctttcagatggcacatcagcctcaatgcctgtaattatgctagccccaagatccacaggaactgaaagagacgaccggtctgtaaatacacgaccacctactctactccttgccccaagaacggttacagaaaaaccctggcgctgtaaatgacgtgctgctgttaatccagcaggaccagctccaattactataactttcttctcatctataacctcacatggaacacagtcccttcctctcatttgattactatgtgcagaggagagtgt

SEQ ID NO: 34234 - DNA, 519 bp, Glycine max
cccttggccggctatcgaacagccggactcccatcattagatggttgccaagaacatcttcgttacggtttgctaattctcggaataacatcaacaaaactcggaaggtttaaaaaacccacggtagtatgaagtgctactcgaaatctttgccacccgtctcgttccagttcctagccgcaaggtgtcgatgcccatgggcgacactcacacctcgctcacactcgggacagcctaggcggatccatgctttccaacgaagcacgcccatccaacctaggcgggtggaatcgatgcccatggggacatctcggtatttcgtgcgcaagacgactataccgccacccaaacggcctaggagaatccatgtcagcccatgccatgacacgcccattctcttcggcgacgaggtgaaaagatgcccgtggggacatctcggtaatatcatgcgaacaagttatataccgccacccctaggcctcgaagaatccatgtcagcccacgcatgacacgcccatt

SEQ ID NO: 34235 - DNA, 359 bp, Glycine max
actacgcttccgcaagtttgaggcattctgggtggtgccggtcgatgtgtcccttccaataaaaaatggtctcccgttgcccggccaaaaatgccatcgacgatggcccatcgtccgccgttgtccgtctgttccgccaacggtttgacaactgcgacccgcaatggctgatcagatgcccgggccgagtgaatctgatcggcgagcacatcgactacagcgactactccgtgctgccgatggctattgagcacagcacatgggtcgctgttggaccatcgccggaacggacggtgcaattggtcaacgaagaagaagaaaaataccctcccttcactttggccatttccgattcgttt

SEQ ID NO: 34236 - DNA, 407 bp, Glycine max
ctgttcttttgcattgcttgtagcagaagctgctgctgcagcttattaaagaaagaaagcctccaagacaaggtaaaaagtgaaagtttcaattagcttgtttctaattaggtaatggcttgcactaactgttccattgtcttctttgcgttaggaagaagtttttggttgacaacatctttaattttaacataaatagatcattaaagataagcttaattatattttcagtctcactatttatttgttcccaatggtcatgtatattttgttcaatttttgttacactattcagattgtttttaaaagagttttaatcagtcctttccgtataattttaccgtaacgtaattaagagaaaatgagagaaaaataatgttactaaaaatagcataaaaaatatatac

SEQ ID NO: 34237 - DNA, 342 bp, Glycine max
gtttccgatcgcaccgtgtttgcttcattttaatgttacctcattgaaccaatacgtatgcatatgtacaacactctctctctctctctgggtttcaaatggcatatagctggtaaaaagagtggatgtaccattcagacttcaattttgatttgaccaaagaatggcttggatgctgggctctctttccttgaattgtgatcttatggtgtctgatacacaatacgtgaaatgaactagtgtgtagtgacttgataactgagaatcaacgtttatgtgttacctctactatgagaaagtcaagttagctgagcagtttgtcttgtaatgggttcattctct

SEQ ID NO: 34238 - DNA, 420 bp, Glycine max
tttttccaacttacactactacttcagaacccgccaagaacttccccttccctctcgacccttttcagtccaaatccatttcttgcctcgaaaacggcgagtccgtcatggtctctgcacacacctctgctgggaaaaccgtggtggcattgtatgctattgccatgtccctccgtaatggccagcgcgtggtctacacttcccctatcaaggctctcagcaaccagaagtacagagaattcaaggaagaattctccgacgttggtttgatgaccggagacgtcacaattgatcccaatgcttcttgcttggtcatgactaccgaaatctggcgtagcatgcaatacataggctctgagctcactagggaggtagcttggattgtttttgatgaggtccattacatgcgtgatcgtgaga

SEQ ID NO: 34239 - DNA, 406 bp, Glycine max
gtctggttctgttcgctctgcttccagcgagtgttctttcttcgtttcaacaccttaatttgcacacgctgcttcttcaggttcggttcatcacccttctcttctcttctttgttttctttcataaccctaatctttctttagctttgctttgcatcattttatatccctaagtagcatttagttaccaagttaaactgcttgctgttttgtcctatctagaccgttacggttatggatctgaattttatttataattttttactttcttctatgctttttcttttgtcgtttgagtatattaaatgaaatactactattttctgctgagtcttggtcttttgtggtatagatctgatgctttcactacaataatccgttctaattggttttctctcactggatct

SEQ ID NO: 34240 - DNA, 327 bp, Glycine max
tcgcggacgcgtgggtctgtgctcagattacgtgcccattggtcaggttgtgattattaaagaaagaagattgtaatttctattgggctgtcaagttacaggatgaagcgtatgttacaagcaacttttgtcatagtacgtatgaggaattagtatagagcttttatggaaataaatgcaattctattggcgattacaggttattattatatctttagtatttatgtctggaggtttggaaatcagtactaattgagtcattgacttaaaaaataaataaataacaaataaaaaaaaatatacaaatataattaaattataaaaacg

SEQ ID NO: 34241 - DNA, 670 bp, Glycine max
ctttttggtcaaccatccagatcactatctcactcagcaggttgtttacaatgcaaagaaactttctagtcttgtttcaaagaagaagaaaaggcagaattggcttgactactatgaacttaaatattctagaaatcaatccacaaggccatctaaaaagactggttttcttggcctttgtggtaatagagtcgatgcaattgatttttatactgatgaaatcaagagactatcagaagaaatagaattggagaaacataaggtgatgaagaattctaaatatacaatgccagctgcttttgtttccttccgaactcgttggggtgcagcttgtttgtgcacagactcaacaatctagaaatccaaccgtatggttgactgaatgggctccagaacctcgtgatgtgtattgggataacatggcaataccatatgtttcactaacaataaggaagcttataattgctgtagctttcttctttttgacattctttttcatgattcccatagcattcgtacagtcactggctaacattgaaggcattgaaaaagcagcacctttcctaaaatcttttattgaaatgcaattcataaaatcctttatacaaggtttccttcctgggattgctttgaagatatttctcatatttctgccagcaatattgatgat

SEQ ID NO: 34242 - DNA, 451 bp, Glycine max
tttcggttcaattaagatttacaatctcttagggatgctcagttctttccccttattattgtccttggtcggcctcatcgccgtccacgccgaagtcttcttcaaggaggagttttctgatgacagttggactgatcgatgggtcacgtcgaagagcatggatgactacgggaagttcgagctgtccgccgggaagttcttcggggacaaagtgcgggaccagggcctgaagaccagccaggacgcccggttctacgccatctcggccaagttcccgaagaagttcagcaacaagggaaagccattggttgtgcagtttaccgtcaaacacgagcagaacatcgactgtggcggcggctatatgaagctcatggcttctgacatcagccaagagaactttcacggggagacgccgtaccatctgatgttcggcccggacatttgcgggccc

SEQ ID NO: 34243 - DNA, 311 bp, Glycine max
gctaaaataaaattgaattttgcaatggatggggacaaaacgcgacagcacgaggcggacagtttgcgccggttggccttcttcggcgtggcactgtccaccgtcagtacgctgatctgcgttctctccgtgccgatggtgtatagttacgtgcagcacatcaactcacaaatgatggccgaagttgacttctgcaaaatgcgttccggcaatatttggcgcgaagtgacgcgcactcagggaatgcatgcggcgactcgccaccgcgtggcgcgtaatgctgacgcgtgctgcggctgtggcgaatcccc

SEQ ID NO: 34244 - DNA, 359 bp, Glycine max
tcgtgttcgcgtgggcgggcgcgtgggctcgcgggaggtctataaactcgactcgtaggagtctacttcatataaaaataatagccaaatttctataaataacatattaattaaacattgcaacaacataataaagcaaaatagtaaaccataaatttcacaatacttaaataatcaagtctagtaatgcatcattactagataatgacttgcagaggtgatagtagtagtagagtattcccattgagggtttgatgctgttggaggtttatcgatgtaggaactacacaccaaatgggggtgtaaatgagcaaacaaaatccaaaatgacctgtgttttggtctaatttttttaagtt

SEQ ID NO: 34245 - DNA, 335 bp, Glycine max
ttttaagcaatttgatcgtaaaacataagaatagacaaataatctatcatcgagaattatgtcgaagttctttcgaggtgctatttcaagctccgagtcatcagaaagcgaggagtctgccgatgagcaaatcgttcaaacccgtacgatagctcgcgatttcgcatatccgagtgattctgaggacgaaggcccaaaacgaattgtgcgcacccaaaaggacaaaacttatgccgaactcaaagaacagatccgttcttcacgaaatgctcgaaatatcaaggatattgctaaacttcaaacagtgtttgaggctcaactgaaattatgggaaa

SEQ ID NO: 34246 - DNA, 394 bp, Glycine max
gctttcggtttttcagttggatgctgagcttctctcgcatctacttttagaagaacaccttcagaaagatccggtgacgcaacaggtaattggccctcttatacgagttcttggttctggtatacatatattgcagcaaagagctgtaaaggccctggtcagtattgcattgatatggccaaatgaaattgcaaaagaaggtggtgttattgaaatttcaaaagttatattgcaatctgatccttccattcctcatgctttatgggagtctgctgcctctgttttggctagtattctacaatttagttctgaatactacttggaagttccagttgctgttttggttaggctgcttcggtctggcttagaaagcacagttgttggtgcattaaat

SEQ ID NO: 34247 - DNA, 446 bp, Glycine max
gtttggttctttcctctaataacctcactggggaaattccagcttcccttttgaacctcacaaagctttcaagatttgcggcaaatcagaacaatttcataggtcctgtacctcctgggattacaaatcatctcacgagtttggatcttagttttaataaattgtctggacccattccagaagaccttttatccccatcacagttgcaggctgtagatttgtcaaataatatgttaaatgggtcggtgcctacaaaattttctccaaacttgttcaggttaaggtttgggagcaatcatctgagtggaaacattcctccaggtgcttttgcagcagttccaaatttgacatacttggagctggataacaatgacttgaccggaaccataccggctgaattggattcttgcaggaaattggcgttgttgaatttagcacagaatcac

SEQ ID NO: 34248 - DNA, 397 bp, Glycine max
ttaggattcggcagaccgactgtgcgtcagtgacagtgcccatttggtgttgcctgtgcacatcgcaacggatatcatgcgggaaaatgcgttgggacaaaactcaaaactcggcaccaccaaacgtggcattggtcccgcctattcgagcaaatgcttccgcaatggcatacgactgggcgaactgctccaccaaccagagaaatttgaacaaaactatcgttcgctggtcgcccacttcaaaactcttttccctgacattgaattggacacggaaagtgacgtcaaacagttgaaggcccatgccgcacgtcttctccaaatgggcattgtctgcaacacaaccgttttcctgcaccaaaagcgtttggagggcaaatcgattttggtggaagga

SEQ ID NO: 34249 - DNA, 1015 bp, Glycine max
cttcacgcgtccgggtgtcgcaatgggtgtcaggggcatcaggtttacctttggcaggattctgttttatgattttactcagagatatcttctgtaatttatttctattttaattctgatgtttccccaatcattatagatttcactttaggaaatgcatctgcatctgattatgtggacctggaatcaactgaaacgtggcttgcggattactttaatgatgctgagatggatatcagtcccgaggaattgaaattttcagtggcagatgatgttcaaattgatggtacagaggttagtgccatcaaaccatcacgtgaacaaaatgtggttcaacaaacgcatatccctcgaaccacccgtaatattatcttcaaaggtaggaaatcttttatacatatgccgacaaagttggcttcttctgtggcctatccatttgccttcattaaaccaagtggtgcccatggagacgtaactctgaaggaaataaatcagcacattcaaacaccgcctcctttgaaatcaaagcaaagcaatgatgatgatccatctgcttaccccaagtcagccttctcagggaagcctgtggttggtaaaacaaaaattcgcaccgaaggtggaaaaggtagcatcacaattacaagaactaaaggttaggcgtaaattgttgactactaacgttgtctctcacccatatttaatgttgggatttacctcattttctgtaatatatctggcagatatagaagttgatactgcaattattttttgctcttgttgacatgcatatattacaccaccttagtgtttctttccagcggggtctagttaatcttatagctcttctttgggggggatacatgattttgttttgacttatgtaatgagaatcatagtatttgttagatctttagtccccaccattcgtcggctctacaactgacaaacaatttcattaagcttgccatagctttgtaatggagtatacaggttatttttatttagtggcattgtt

SEQ ID NO: 34250 - DNA, 361 bp, Glycine max
ttggtttgagatacctattgctttctttcaatcaagtctctcaaaatggctgaacaatccggggaaacctttgcgtttcaagcggagattgcgcagttgatgtccctgatcatcaacaccttctactcgaacaaggaaatcttcctccgtgagctgatctccaactcctctgacgctcttgacaagatccgttaccaggcgctgaccgacccgtctcagatggagagtgggaaagagctcttcatcaaaatcgtgccgaacaaagccgataagacattgaccatcatcgacactggcattggcatgaccaaagcggacctcgtcaacaaccttggcaccattgccaaatccgggacaaaag

SEQ ID NO: 34251 - DNA, 381 bp, Glycine max
ccctcgcgtccggttggaccatttgcccattgacattcacagcaataagcttcttgattggctcatttcgcgtcgccattgccacaagaattggcgtgattcggtcgagacgatttcgggccaaaattggacatgccattcaggacatgccggagaacgagcagatcttggccattctcagcaacgcacaatacatcaactatttccattgcaaacaaattgtggacattctgcgcgacactgaaaaggagacgaagaacattttcgggatgtactcatcgcaacggatgaaagattggaaggagatcatttcactgtacgaaaaggacaacgtttgcctggcagaggcggccaattttctgcaacgttttgtccaatatg

SEQ ID NO: 34252 - DNA, 451 bp, Glycine max
ctcatctacaaatgtggtggaattgacaaacgtactatcgagaaattcgagaaggaggctcaggaaatgggcaagggatcatttaagtacgcttgggtgcttgacaagctgaaagccgaacgcgagcgtggtatcactatcgacatcgctttgtggaaattcgagacaagcaagtactatgtcaccattattgacgctcctggccatcgcgactttatcaaaaacatgatcacagggacttctcaagctgactgcgctgtgctggtggttgcttgtggaacgggagagtttgaggctggaatttcgaaaaacggccaaacgcgtgagcacgctttgcttgcgcagactttgggggtcaagcagctcatcgtcgcttgcaacaagatggacaccactgaaccgccattcgccgaggcccgttacacggaagtgatgactgaagtgtctaact

SEQ ID NO: 34253 - DNA, 384 bp, Glycine max
gttaactacctcattgggatcaacagacagcaacctgtcatccttaagatcttacagttctggtggtttagttgattttttctcagaaccattccaagcttctggaccccatcaaaataaagtgtcttgtactccacaaccatctgatctgggaagtactgttagttcagatctttctgaggcaccagtggcacccaaaccattttcttcatctgcttcatctattgaccttttccagttaccagctgcaccctctcaggcttcatcagtggatctgtttcagtcatctgctttatctgcaattgcatctttcaatgagcgtcaacctttgaaaacatcacaatcctcatctgttgactttatggacctttctcagcagccatc

SEQ ID NO: 34254 - DNA, 424 bp, Glycine max
  unsure (1)..(424): unsure at all n locations
gtataaactgtttttgacagcgtttgatactctggacaaaacaaaacctgtagttagtcagagatatattggaggagaaaccaggttagcttttggctgaactgcttcgaagcaacaaacaactttgaaattccaacacacccgaaaagaagaaacacctttgaaaaaattaatactttaaaaaccttttagagagagaaacataagagacgtgaaccgagactttttttttctttttcttctttttattttcccccatctcgttttgctgcttccttccttccttcgttatccagtcaccaattccaatcctttctctctctaggtttcggntttctctctcctcagatctctttcccgtttattcggcggttttcggaaccacccctctttatcaatcatctatcctcaatcatgtcataca

SEQ ID NO: 34255 - DNA, 419 bp, Glycine max
ggcccttttccttaaattcaatttacaaaaatggtttccaagcttcttccggtcattctctgctgcttgtttttggcttctttcgccctctgctcgcccaaggctgctgatgtgctgaaatttaaacgagaagcggcgatcagcagttgtggagctggacagtttgaatacgggggcggctgttgtacgacatgcacaagcgatgctgattgtacgggcgggaagctttgtgtgcccatcctcaacttgctcagcgtcagtctgtgctttgccccatgcggaaattaagacagaaaagaaagcagcaaatgagggtgttgatagtgtgataaattgataggattaaatggaaaatggggagttaataattacttaaatgcatttaaatagtgattgatcaataaatatttttcggagtt

SEQ ID NO: 34256 - DNA, 439 bp, Glycine max
atttaatctatcaagtgtcatgcttttaatagaagtagttacttatggaaaactgagttttatttatttgtttgtttggtgaatgaaaatagactctaccaattcttatagatgtattttttttacagcattcttagagatgtattataaaattatttatacatcttgacttggctgattaagctttaaggataattcattgcatattataggaggttttataataaagttgtctagaatttggtttctgacagttttaaaggattatgccttgaaaatgcttaaggacacttataaaaagatgcttaaggaagagtactagtgcataatccacactttaaagatgaacatatttttgaagttaatcagctgaacatattagcaattttgaaattgcaaagtacaaacacagtaaaattttctacactcatcttctttc

SEQ ID NO: 34257 - DNA, 388 bp, Glycine max
ctctaaagaattctttagttacacgtttgtccttcccttggttttaacccaaacggcattaaacttgcgtcaccggcgacttcggctccgctgacgatttaattttcagcaccggtttcgccctgtggctccactatcatgaagaggttgtaactgtcgacgaggttcacggtcgaagaaattcagtctgctggcgtcagcgtaaactctgccagggtggtcggcggtaccgcattaccacagttgcattctacggcaggggagccgcagttgacttgccaatggcacgggtttaaagcggtttgggttaaaactaatggaaggacaaacgtgtcagtaaaaaaatctttaggaaccattttagaacttttaaaacacaagggaccaa

SEQ ID NO: 34258 - DNA, 398 bp, Glycine max
ggtccatgctgagccacgcaaggctagtgaagaggatgcaaagaagcatggtatcccccctggctactcactaaagaactgggaccctactgaggagcccatccttctccttggcagcgtctttgactccaactccctgggcaagtggatctatgactggaccgtctatagccacggctccagcagtcctttctctgagatggctggtgacctgtggcttcttctgatccagcttgccggcaagaccaagcgtgccgctaaggcggtccctgccgttcgcaagtctgacaacagggaagtcctcgaggacttcattggcgctggcgagcgcctcactgacaaactccgtgacctacttgtcgcctgtgagcagcccatgctcgaggccagcaagaagg

SEQ ID NO: 34259 - DNA, 368 bp, Glycine max
cttacgcgttcgcaaaaaacggagacaaaaaaccaacaacaaaaatgggcaacgatggccatggaggtggggggcgcaacacaaccacaagcagttcaacaatgtggcgatggtccgcctatggattatacgggcagactgtcaaatacacgtttctcatcacaaacgtgttgtccgtggttttctccctgatcacattttcctatggcgcttggctttatcacaaccggtcccaatactatgagctgttggcaccaagtttgtacgtggatgtttgcctgatcatgatggtgatctcatcattggtcgtggctaacagagtgattgctgtatattctgtgctaaaagagctccgatgcctgatttat

SEQ ID NO: 34260 - DNA, 441 bp, Glycine max
atctctgtgtatgttgaattagcttcaagtttggaggagaaaggaaaaggttcctgcagggaagactgctcagacacatgcgggaatttggctgctgtgtgtggctgtgagagttcaaatgagagagaagacatcgcatgttgcagaaacgaggactcttcaaaagaatgcaaggaatctccaattatgcatgtttgtgatggtttaaataagagagaagttggtggatgttgcaagagctacatgaaggaatgctgtgccaaacttggtcactcatcaagacctagatttgtaggaggtttgtcagaaattattacagaataggtgcagttgactccagcgtaagcaacagatgtcagcatgctagcttgttcttgcaaatttatatttatttagaagatttttagtgacatgaatgaaagcccgtaaaatattactgct

SEQ ID NO: 34261 - DNA, 437 bp, Glycine max
cgttgatgtttccaccggtaccgaagataccaacagcgcttggactgattcgacaatgggcgattcggacgattccgacaacgattcggataacgagttcgaacaagagtactcgaaagtcgaaaacaacatcgacaactcgatccgcacactaaaacaaggaatcatgagcgatctcaaagagatgaaacgtcaagccaagatcatgagcgaagatttgaaacgccaaaaacgcgagatgatagaaaccaaacgtcgtgcgttcagagcggacgcttccgctgtagctatgcgtcgcattatcttcaacgagtggtcgcctgccgatcaaagcgaagcgaatttgagcgatagtcgtggcaaagaagctgtcgatcctcgcaaacgtatcatggaagtcgttggtgggcaatcgacgaactcgcaaggaatgggca

SEQ ID NO: 34262 - DNA, 466 bp, Glycine max
tttccgttggttgttccaaatgtcggggcatcagttgcatcttcagctaccaatgcctggggaggatctgggacaatgaagggaggagcactggcagcattaaagagtcatccatggaaaaaggatgttattcacgagccaggttcgagagaagatgcttggggtgatgaggagtgggctactggttctgctaatgtcaaattgcctattcagaagaaagaagcccgaatatctgcttcagtaaatccttggagtgtcctaaatcaagaatcgtcttcaagttcatctgttgcagccattaaaattgatggttctaggaaacactctgaaagtagtgttatcacaaagttggagcctcgtgatggtggttcaaatctaggagggcagcctgcaggaaactttgatgctttggaagcttctgatgtagtagatgattgggagaaggcttgtgaatagcaaggagtaa

SEQ ID NO: 34263 - DNA, 427 bp, Glycine max
tcgggtgtgatgagattgcagattctcttggactctgcatggttcagcttatcttgctttgtagtattatgccttcattttatagttcatgcagaaggtcatgctagaagaatcagaatgactcaatgcatcaggacattattcctattcacttatggtgtaatgagtgttgattcagttgcgaagattgctcaatatgtgcctcactttttcagtttaatttttaatgatatccattgtgtttttagattatctttttacccatcagtgaggactctgcacacagattactattgcctctatatgtcaatcactaagctggatgaattatttgcaccaataaagctgctgcaccactgctttcaattgagaaattagtggtgtccatgcctcatacctattgttaggttggcattttgataattga

SEQ ID NO: 34264 - DNA, 172 bp, Glycine max
tcggagttgacagagagaaaaaacgtaggttgtgtgatctttgattccagtgaagagggacacagagaaaacaagttttgcagggaagccatacccttcgtattgtgtaaatagctgcggagcatggttagttaaacaacgccctgtataaaatggcctttttcaagaaaaa

SEQ ID NO: 34265 - DNA, 432 bp, Glycine max
tttcgatttttcaataagatgggaaatgttcagacttcctcaattgccaaccaattgttgccatttgagtcgtatattgtcgagattcccgagctcaaatatgtggcaagtttgggcgccacgcggttcatgaaagtggcccgggttgagcacttcagcaagggcccactggtggtcaaagtgttcgtcatcattgatcaacaagtggcggtggagccgtaccgggaccaactgttgcagatcagccgacggctcatcaaacacccaaattttgcaccggtcaaccgagtgtttctcacttctcgtgccgccattctgtgccgacctttctacaagtcgacactgtacgaccggctcagcacgcggccctatttgacgggcattgagaagcgatggatcgcatttcaactgctcaaggcattggctcaatta

SEQ ID NO: 34266 - DNA, 833 bp, Glycine max
gggcacgaggctgctcaaaatccacagaaaaaaatggcgcagaaattagctgcaagaaatgcccttgctgctttgaaagagaaggaggtgggaaaaactcaggaaaagaatgatgacaatgggaagaagaatggaaaccaaacatttactaggcaaacattaaatgatatctgtttacgaagaaattggcctatgccattttacaggtgtgtgaatgagggtggtccagcacatgcaaagaggtttacatttgcagtgcgtgtcaatactactgataaaggatggacagatgaatgtgttggagagccaatgccaagtgtcaagaaggccaaagactcagctgctgttcttctcttagaactactgaacaaattatactcgtgaaagatggagtgattgtcatgcacattctatattgccaaagtatttaaaccattcctgtgcatcaggtaatgaacccagcattatcaactcgttcaaaccatgtctcagtcaatggttgaataaacaagaaacaagagatgttacaatttacaaaaatattaaatatggatccaattatgtgattccgctgagaaaatcataagagatataacttcactttttacctactggcataggaacctgagaccttaatttaatgtttacgaacactcaccatggccagtatttgtgacgggggatagtggtacataaaagtcgcggaccagaatttcagaggccagcataaggtgtcttgttgacgctgctattggaggttagagtattctattttgtagtttgtatgtattctagaaacagctcatgcaaattattgaatcacactacaatct

SEQ ID NO: 34267 - DNA, 567 bp, Glycine max
gccatgccattctgctatttaacaacactggttgaagatcatcttgtatcatgttgcagaggttcttggttctcagcagatttctccattttccaagtctatcatgaatgagtatgctgataaactgcatgtgcaacctacatatgacaccgttcaggaacagctaggaggggtgcttcgtgtttttaaaacttctttagttttcaatggtacaagttacaccggtgatccagctagaacaaaaaaggaagctgagcagtcagccgcaaaggctgctattctttccattatgggtgattctacctcgggaactgcgctcgttgagattattaagtcaaagtctacattttatgatgcaatcaaaggaaagggaccacctctgtcacagcctagtgcagtgttatccacaacaaatgcaggacagatctctattacactggatcataaagatacagaagttgcagcttgtgtggctgataataataataatgagactaaagttgaatttcctgagtttcctaagatgctttccacatgtcaagaactccaaatgatacatcaagaatc

SEQ ID NO: 34268 - DNA, 430 bp, Glycine max
  unsure (1)..(430): unsure at all n locations
cccacgcgtccgcggacgcgtgggtgcagatatatgatcaaaggtggggataattatgctctcttcaggctcgggtaatatgtcaaatgagctaataatgaagcctgctgatggaagggttctgtgcatttatctttgatagtgttgctttctgccaagttggtcttcgttgggtattgacttaacaaaaagagtgtgaatggggaagctccagtgtccaaaatggactgctttggtgcattacctttagattcttcttgtctttgtgtgcgcagcagctctctgaaagctttaggatttgttgtaacttcgaggatgatatggtagttcttttcatcttgaagaaaatgcgcagcatagngctatattatatttattttctatgtttggtntggagggttcagtatgcgtccttaattattcatgtgct

SEQ ID NO: 34269 - DNA, 515 bp, Glycine max
tcgtggtaatccaatcagaatatgggttcagagatacgtgtttcataagcaagttggagaaagtggtcagtggagagtgagaagtagtcactgaaccatcaacgtcggaaaccgaatccgaaaccaaaaacggttccaaatgttgaaccccgaaccgccgccgccgccgccgccgatgatggttccgccggcgacgccgatgaaccgcgaaacgacgtcgctaaggaagaagaacagactccgaactcgaactcgaattccacctttcgacgtggactcctccttcttcaccacgccgatctccttgcaaggcaccacaaaatcaaacgcgatctccgtggagcaatacgacggcgtttccgcttccgcttccagccccgtccacgtcatcaacctctctgataccgaggacgacgacgaagtccgaatcctcaacttcactcccataaacacgtccttcggaaaacgcagcaagaaatcatcatccaaaggagagtgctccaactccgcatcgt

SEQ ID NO: 34270 - DNA, 419 bp, Glycine max
tcggattgtcatggtcaacaacgccaaaagccgtcctttttgagttccctgtcttggatcctgcaagaagcaaagacccttttcttgaatctttatttggagctctggtttttgtttgtttgcacttgcagggtggtttagagattttgatgcttaaacgcctacccaagtttttgtttttgtttggagttgatctttgattgattcttgtgttgaggtttggctggacttgatctgattcgtttaaagttggaagctttggattggggcaaggttctgttggggtttgattttggtcttttagtttgatcttgaagttttaatatttggtacaagcccttggttggtctttggggaattaacgtctgtaagcactgtttgtggtgttctgagatggaattgaagtggatagtgaaaag

SEQ ID NO: 34271 - DNA, 468 bp, Glycine max
ttgctcacgcgtccgatggaggtaaccgaattgaccttcagcagaacatggagaagccatcccttgatcatggtttcatgccaatcaatgagagcttgtgtttggggaagaagaggtccaataacccttatagtgggagtggtaagaaccctttgatttggagtgatgatctaaggcttcaagatttgggagggccagcatcatcatgccttggccctcaagatgaccctttcaaaggtgaccagattcagattgcaccaccaggatcattggatagaggagctagcactgacattgatcccatgtcagagatctatgactcataacctgtgcttcagagtgaagagaaaaagttcgatgcatcatctatgaagcttgaaaggccttcaccaagaagagcacctcttcagcctgaaaggatgagccctatgatcagcactggtaccatggcacaaggtagaggctcac

SEQ ID NO: 34272 - DNA, 371 bp, Glycine max
actgcaaagcaaaatgtgatcgtatcacattattatgaaataatgtctgataaaaataccaatcaatgtatctattcctgtagtacataaaattagtcccgggggtggggagtgaaaaagctcctgtaacaactacctttacttcctagaccagtaagcgacatctctctgcaaagacgacgtgtactcactttactccgttctcattctgcctttgctcttcctccccattgccatgccccagtgtctttctttggattctgaacccacaaatcctcaaaacttcaaaatcatcagttccatcaccaagggcaccaagaaggataaataatgcccaagctatttgtctctttccagagaggaagcagtac

SEQ ID NO: 34273 - DNA, 380 bp, Glycine max
tggttccctctcgccgtgccccacgcgccgtgatcgaccccgtcccgaagatccggcaagtggggttcttcgccccgcccgagcgctcccagtcgggtcctctcgacccgacccactcctctcccccaatctccaactccctctcccccgtcatgatcccgcccccgcgccacctctccgacaacctcctcctccatgacccccgccctgccgcctctcccctctcctccgcctccgccgtcgccgctgccggaagcggaaactccttcgactccgcggacttcttccccgccccactctctcctgcgatgccgtcttcttcgtactccagcaggattgccaccggcggcgccagcgacggtgggtacttcaaggggaac

SEQ ID NO: 34274 - DNA, 673 bp, Glycine max
tagtttatcgggtatttctgtatttcatgttgcaatttttttatagtgttttgacttagtgcaatttattttgatttaaagagataaacgagttggtaactaaactgtaaaagtagagatgcaagatcgtgttcaggagaaataatccctgcatcatgactagcgtaccatgtgagattataaacagaatgacaaacggtaaaacatggtgactggtgagacattatttgtagatcaacatttgcggagttataataattgcattgttgatgttttactttgtcaataatattgacattgatttctaattggccaagcttcttgggtagcaactttttatggttaaaatatctatcgcttgcatgatattcttgatttattttatgttcacaaagacaaaaatggattgtgctcttagaatgagtttatggattaatcaatctcaaaaaaactggcttctaggattggcttagttttataaggattatattaactttatttctagttgagatcttaatatactacctcctttcttatgtataagattatttttactcaattgtttgtccttttttttataagattcttttctaaaagtctgatgcattaattatttttatcttataatatccttaattaattgagaaattgattgagagaaatgcttcaacag

SEQ ID NO: 34275 - DNA, 500 bp, Glycine max
cccactcgtccggcagttttctgctcagcaacaaaatcctctcttacagcagttcaattctcaaggctcatctgttgcttctcaatctagcgtgggacttggagtccagtcaccaggtcttagtggtattgcttccacctcattaccgcagccacccaattctgtccattccccatctagccaacaatcattgctattagttgtttccaaagatgcagatgttggaaattctaaggttgacgagccacaactacagatttttcctgatgattcggggactgaatctactgctagtactgggattggcaagaatttcgtgaatgaagatgaattgaaatccacatatgccgtagattctcctacaggagtacctgcctctcttccagagcctgctcagacttctagagatattgatttgtttcctggccaacctttacaaccaaatcagcgtagtggtaaccttggtgttataggaagaagtttgactgaccttggagctg

SEQ ID NO: 34276 - DNA, 354 bp, Glycine max
ctctctacaagggttcgaagattcctcgccctatgaggagctggaatgagagcaaattgaccagcgagctcctgaaggcggttgagaaggctggctataaaaccccttctcctattcagatggctgccattccgcttggtttgcagcagcgtgatgtcattggcattgccgagaccggttccgggaagaccgcggcttttgtgcttcctatgctgagttacatcacccgccttcctcccattagtgaagacaacgaggctgagggtccctatgctgttgtcatggcccccactcgcgagctcgcccagcagattgaggatgagaccgctaagtttgctcagtatttgggcatca

SEQ ID NO: 34277 - DNA, 575 bp, Glycine max
cccacgcgtccgacccgctcatgtgaaagacgcatcttcctcagagtttcgctccttagttaagaaagaaggtgagacatttctggctaatcacaccttggtaggagcaaagtccagtttgcggcgcaaaggaacttccctctccattgcagagcgcagagggaataaccccccacctcgcatgttgctaccctcagccagcgaatcatcccgtgccagcaaggtccgggtaagatccaggtcattctcattgcctgtcttggatgatactttgatgaaggatgttagttgcaagcaaatctaaccgtgaaaacagtgggaaaacggctaatatgagatgttgatattattagtatagctgttgagagtaaggttaatggcagaggatcattgtaatatggtactgtgtcatgttaaggtaggttgttatgcttgaagtagaagacttctaagagaaagttaactttattacagtggttcagtttcttcctgtataggtaatatagccatagttggctcaaatgatctagttttagaggtgaactttcactcctgtttgaatattggtgcatgcc

SEQ ID NO: 34278 - DNA, 411 bp, Glycine max
tcggcatcatcatggcatcctgatggtgtgacctttgccactggaaaccaggacaaaacctgccagatttgggacttgcggaatttatccaagtcagtggctgtgctgcagagcaaccttggagccatccgttcaatcaagtatacttcagatggccggtatatggctgttgcagagcctgcagattttgtacatgtgtatgatgtaaaaagtgggtatgagaatgaacaggaaattgatttcttcggtgagatatcaggcatatctttcagtccggacactgagtccctgttcattggggtctgggatcgcacttatggtagccttcttgagtatggcccgcgacggtattatgcataccttgattcacttacttgaatattcaaggaacaaaaaatgacatggtagctg

SEQ ID NO: 34279 - DNA, 697 bp, Glycine max
gagtcctctctctgctgcgaacaattgccagatggggaatgcattgaggtggttcagaaagacaaagaagacgatacactgattgaattggactgtcaaaatggttttcctgaaggaagaaaggagtttgttgcacctgctgttggaatggagtttgagtcgtacgacgacgcttacaattattacatctgctatgccaaggaggtggggtttcgcgtgagggtgaagaattcgtggttcaagcggaacagccgggaaaaatatggtgcggtgctttgctgtagcagccagggtttcaagagaataaaggtcgttaatcatttgaggaaagagacgagaactggttgtcccgcgatgataaggatgaggttggtggagtctcagaggtggagggtgcttgaggttacgcttgaacataaccacatgttaggtgctaagatactcaggtcggttaagaagatgggaaatggaacaaagaggaagccgttgccttgctctgaagctgaggggcagacggttaagttatatcgtgcacttgtgatagatgctggaggtaatggaaatttaaactgcggtgcaattgaggacagaactttctctgagtcttctaataagttgaaccttagaaaaggtgacacacaggccatttataatttcctctgccggatgcagttgactattccaaacttcttttact

SEQ ID NO: 34280 - DNA, 409 bp, Glycine max
gttggtaactcgtgtgtgtgttgatgttaccataaatctgttgttgtaggctttgcacgcatagcattagcagcaacgccaccaccaacactcacatcaagaaaacctagggtttgggtttgcggcatgagtcgccgtggcatggacgacgacgatgaggaggagtacgaggaggaggacgagcaggtcgccgacttcgacgacgaggaggaggaggacaaccaccgaggacgcgggggtggtggcggcaggaagaggagaagatctggattcattgacgacgacgccgaagaggtcgatgaggacgaggacgaggaggacgacgatgacgaggatttcgatggacggggtggtggtggcggtcggaggcgccagtacaagaaggtttccgcttctaatttcttcgacg

SEQ ID NO: 34281 - DNA, 273 bp, Glycine max
tcgaaccaatgtgggagaagatggagagttggggaccactattgcttcgttatcctccatcagcacagatgtaagtcttagctgctacttaatttttctttggctcttacacccactcttctagctccaaggccacacaaaaccaaaaggaacatgggaacaacgaccgaccttaactttgattatgtgctgaggcaacgcaaagcatttgatgaaacatacgctggggtgaaagggcttgccgatgtacgtgttaagaatgttcctaccttt

SEQ ID NO: 34282 - DNA, 627 bp, Glycine max
ccctttcgtccggcgcgaagaggggagattcaggtaattagggtttgatggaagaggcgaaagtggaaactccgatgacaacgtggagagacaattgttcgcagagtttgagccctagagcgcgcattgtctccgtcgcctccaacatcgctttccagcctcttcacaaccccgaccctcaagtttggggcgttctcactgccgtctcctacaatgcccgcaaaaggcaccagggaattaacattttattaactgctaatgagcactgcattggtcgattggtagaggatgtgcgtttccagattgattcaaattccgttagtgcaaatcattgtcgaatatacaggatgaaagttactaatgaaaatatggagaatgccacatcaatattcttgaaagatgcatgcacaaatggaacttaccttaactgggagagattgaaaaagaatggcgctgctgtagaaagtttgccatggcgatattatatcatttgctgctcctccgcaccatgatctggcatttgcttttgtatttcgagaggcgcttgtgcccagccttatgccagataatgcagttgctaaacgaaaagcagaggattttgtttccgataacaagagattgaaaggt

SEQ ID NO: 34283 - DNA, 408 bp, Glycine max
tggaaaagagatatgaaattatcattgggacagccgaaggattagtttatctgcatgagaactccaacactaggataatccacagagatataaaagccagcaacatcttattggatgcaaagcttcgtgctaaaatcgctgattttggtttggccaggtcctttcaagaggacaagagccacattagtacagctatcgctggaactgtggggtatatggctcctgagtacctagcacacggtcagttaacagaaaaagctgacgtatatagttttggagtgttactgctagaaataattactggaagactgaacaatagaagcaaagcatcagaatattcggacagtctagttacaatgacatggaagcattttcagtcagggactgcggaacaattaatcgatccat

SEQ ID NO: 34284 - DNA, 831 bp, Glycine max
  unsure (1)..(831): unsure at all n locations
tattttaattcgatgtttctattgacttggcatttgaaactctctctcttctgtttgatcttgtttttatgatgaaacatattgaaaactgaggttttgaaatgtttctggcacaaatcggatgccctgacttccggaaccatttcaacttgtctgactttccctagacttgcttgtgtttacagaaaattattagctcgccgaaaagcatttattctcatatttttcttgtttaatttaacgtagaaatgttgtttaaatatattgtgtcttatttttgttgacgggaccatgatttatagaggaggttaaaaaaagttcttgaagattttgattaaagaaaataaagaatatataacaataaagtatttataatattatattaaaaatataaaatttccttgatatctatcttgttaaaataattatggggaggcatattaaatcctatcatagatgagttaacgccttaatggggctcgaatagtttatgttctaagtttaactttagtgttcttatatacataaaaaaattctctttaacacaagtaacaccagaacactcattataaataagactttatttttaccgccgaggaaaattaaaacataatggcatcagtagtaaaggtcgtttttgaacaaataaaaaacgaagaattttttttaggtgaaacttttttattaataaaaacgaatacattgtggaacaatatatcactttaagggaaaatcctaattgaaacgcttggaattntatttttttttaaaaaaaaacaatttgtgatacaacaagaaatgagaagagcaatatgtataaaatatagtgat

SEQ ID NO: 34285 - DNA, 469 bp, Glycine max
ctttgtcaactgaagcatatgtccatacgggattgccaagcaatacaggaaatagtgtccaaagagggagatcatgaatccaatgatgaagagataacatttgagcagctccgtgttttgtctctggaatctttaccaagcatagtaggaatttactcagggaagttcaagttgaaattcccatccttggatcaagtgactttaatggaatgccctcgaatgaaatattcttatgtacctgatttgcatcaattcaagcctcttgagcaaatttaattggaagagcagaagttttagggaatccatcatgcagtactcattatacagtcacaatgacagtagtgggtgaacgttgggaattcttcttcccgtatgatgttgatgcatcatgggacggaatcttccaccttaggctctgttgggaaggactactctgatggatcatgctgctactcttctctttcatctc

SEQ ID NO: 34286 - DNA, 468 bp, Glycine max
gatttaccaggctagagtgacatgtccgataatgagatgctcacatgccgggtagtccttttctctttattcatatttgagcttccttgctgtcataaattgatcaattggattaaactgctctcaaactccttggatttttcatacattatctaatagaagacaatgggtggatatctggagaaatcttgattcgctttgcgtcaggttctggcttgaactattaatgcaaattccaactcagcatgtcgtgtacaaatacagttaaacaggagaatctggattgacttaactatacaccaattctcagttactatcctagatgatttataggggggatagcatttttgtctttaacatcgttctctttttttattttgtacccttggtggcaattacttgtatccatgtgtcgtgtccttgatatggtcccgggtctagaacatgcagagagactaaatgctttct

SEQ ID NO: 34287 - DNA, 541 bp, Glycine max
tggacgcgtttgtcacaacacacacacacaggcatttttagaaagaaagagcgagatttccagttctatgaccaggatttcttggaggaattaatgactctaagaagagaaacatgggacaccaatccaagcacagaagaaaaccagttcttctctgatgctgggagttttgactgctttgatcaaaactctctaccttacctcccaaactcttcttgtggtcaagaagttcctcaaacttacaataacgactaccccttcagtgaaatctatggctccttacttgatgaatcctcaccacagattatggattcattctatggcacccttgatataactccactcaatacccctccatttcttggtcaagaggattatccattgtccatgatggaagaagaggacccgggttttcttggggaagagcttaagaatttggagttgcaaaccacatgcaaagtggagaaaacacaatcctccgaaatgccggctttcaacatgggaacgggtctggaaagaaagaacaaccgatcaaagaagc

SEQ ID NO: 34288 - DNA, 475 bp, Glycine max
  unsure (1)..(475): unsure at all n locations
cctacgcgtccgggaacattcatctaagtcttgtcctccctccttcttcttctctcccctgcttctctttctccttccaaatcactcctataatttgcaattccaagggggtttttgtgaaggaaccctaaaatataattttttgaccaaagatggggagaggtaagattgcgattcgaaggatcgacaactccactagccggcaagtgactttctcaaagagaagaaatggattgctgaagaaagctagagaattatcaattctttgtgatgctgaagttggattgatggtgttctccagcactgggaagctttatgactatgcaagcacaaggtaattaattaattaagatcaatttatttttagacaaatttattagtcctttcgctttaaatgatggaaatcgatctaaaattntgggtgcaatattattgtctcagcttttctttgctaatataaaatctgtactatata

SEQ ID NO: 34289 - DNA, 695 bp, Glycine max
  unsure (1)..(695): unsure at all n locations
tatcnccctccatctttgctttgccttgcttttcgggtgtgtatttctctttcttccttcctttctctcttggtggggtttacgttgagctgtgataatacttgcgcgttcctccttctgctaccaacgttttgcagtgcccaaaaccttataaaccttttaagttttccattctggctgttcgctcggactctcacacttgtcgcaaagaagcccttgtttctcacaattacaagatgtggtattttgcggatttaagctgcgactagacctgtaactcggtgggggttctagagtttgtttctgtttcttgcatatatatatatatatatatatttatatatatttggtgagtgatatttgagctaggaggaatcttccttttgagtgtggtgtgaacaaaagatgaatgaaaggtcaagagacgaggcatctcctcagctgttagatttgatctcaaacgagagagagtggcagatgaacaagagaaacgaaggaaagtcctcagaagacagaaaactcgaactcaggcttggtccacctggtgaagactggtctctgggtggtaaaatgaagaacaacaacacagaaagagaagatcaatctcttctctctcttggttgcttctctcctaacattaacagtaatgcgttccaaagcaaggcctctcatncatggccaaactaccaccacca

SEQ ID NO: 34290 - DNA, 425 bp, Glycine max
  unsure (1)..(425): unsure at all n locations
gacgtgnaagagaacccacgtttggaggaagcccgcgggagggagagcatggatancctgaggngggacatggagaaatctgggggagaaactgtagtcttgagcnctggtntgaagnacanagaagcaagtgcaaccatgatggatgtggtggatgaggaaggcgaggacgaggaaatggatgatgatgccgatgatgtcccggggatatatactgaagaggaggatgctatagatgagggcgaacacgaggaggttgataggttcggcttctgatgtgattcctcaccagttggactgcatcagagctagatctttgtatagcgccttgaccttcatttggtaaatgtatacaaaccttgaaagtttgactactaattaatcaactagtttatttcatatatactgtcagcactttttgctct

SEQ ID NO: 34291 - DNA, 501 bp, Glycine max
  unsure (1)..(501): unsure at all n locations
ttccacgtgtccgcgaactctctctctgtctcatcttcgaattcgaagcaaacacaaaccctaactttcgagttctctcggttcgtccattgcactgagccacagagcaattccgtccactcgaagcaactacgtcgcactcgcgccctggtctcttcatctttgattctcaggtgcttttttttgctacattttcagtgaccaggccgattttcacaacattggtttcttctctttgctctcttcgacctgcactttctcttccaaaatgaaccaaactgccattgccaactttgaaaaggcaataggctgttactctccatcggttcaggagcttattgttattgatgatgtgctctccgccatggttggcattgaaggacgttacatcttaatcaaaacaatttgtggaaagagtgatgatattactttnctgggtgatccgtcaatggatttggccctacaggagttggcaaaacggatattccctctntgcaagag

SEQ ID NO: 34292 - DNA, 273 bp, Glycine max
taagttctgatgcgcctgccactttttacatgaaaaacatggagcaggaaccagttactttagggtggtttatatataactgtctgttatattgtagatgttagaatgtagattattgtgtatgaatatgggattgaacagctcccttgcactaattgtgctgtgtacagtcctttactattcttgccttttatcctttcattgtgatggaggaagaactacccttgctttctggaagatcagaaaaaagataagctgcttgttcacaacaca

SEQ ID NO: 34293 - DNA, 473 bp, Glycine max
tgttttaatccctctgttgacatcatttgctgtttgccaacttgaagaatttgttagcattgattgtggagggacaagtaattacactgataccagcacggggttggcatggatctcagattctaggatcatgcaacatggcatttcagtggaagtagaaagtccaaatagaagcatggtgcagtatcaaaagcgaagagactttcccatagagagcaagaagtactgttacacactaagcacagaagagagaagaagatatttggggagagcaacgtttcagtatggaagcttggacagtggagacacttaccctcagtttcagctctacttggatgcaacaaaatgggccacagtgtcaatatatgatgcctcaaggatatatgttaaggaaatgatcatcagagcaccctcaaattctattgatgtttgcatgtgctgtgctacaactggttctccttttatatctaccc

SEQ ID NO: 34294 - DNA, 476 bp, Glycine max
gggattttatggaagattccttgcataaatcaagtgattctagaagcatcccaacgaatgaaagaatgcatgaacaaccagagcccataatagtgttgtcaaggagaaaatccttcaacgaaaaagtttgcaactgcatcatcagcaacaggattggcaggagtctcctgaagggtaaaagatgcttgaatttcgtagaagtcttcctgctttcaaagagaaggatgcatttctgagttatttcagagtcaggtggaaagggaaaaatggtgccctctgtgatttctaatttattacttctttccttcaatgatttgtttatacttctacaaaagaaaaaaagaaaaaaggcttgaagcttgtgtatgatcctttatataagatacaactgtataatttatagtttcttgtgaatagagtcaattttccttactcttaaaaaaaaaaaaaaaaaaaactcagactagttcctcgtg

SEQ ID NO: 34295 - DNA, 316 bp, Glycine max
tttccaattttataccgaaagaatatgttcaattatagctgtttacgcaaataacagacttcagtataaatggctggttctatatggttttgggtgttagattgatttgacagcaaaacttgcactgggaaatggatgcttcatatctttggattgtgaagctggtaacccgctctggccgaagatagaagttagaacttagaattcgtggagtagtggttatatcatagaattaaagattagatttacaaagctttactgtgagcttctcttgtaccattttggttgctttttttgcaatctttgtcaaattggc

SEQ ID NO: 34296 - DNA, 674 bp, Glycine max
  unsure (1)..(674): unsure at all n locations
atttttagatcctggggtttggttgggcaggactgttccggaaatttctggttgagccaggggaaatgtggtggccatctaatctggtccaggtctcattattcagtgctctacatgagaaaagcaaaaggcctaatggaggcacaacacgtacccaatttttcctcctcgtcttggtctcaggcttggcttactatgtgttccctggctatctgttttcaatgttgacatctttctcttggatgtgttggcttgcccccaagtcagtcctagtccaacaacttggttctggtttgaggggtcttggaattgcagcatttggaattgattggtctaccatttctgcttaccttggaagtccactagctagcccttggtttgctactgctaatattgctgttggtttttttcttgttatgtatgtgatgacaccaattgcttactggtctaatgcctatgaggccaagacttttccaatattttcaagcaagctgttcatgggaaatggctcactgtatgacatttcaactattgtcaactccgaattccatctcgatcggcangcttattcaatcaaacggccagntcatctcagcacgttcttttgcatgacatacngnnnctcgattgcagcactatctgctacagnntgtgcatgtctgctctttcatgga

SEQ ID NO: 34297 - DNA, 487 bp, Glycine max
cggtttcgtgggcggacgcgtgggaatctttcccacaggctacccagataacagcaactggtaggcccagtagtttgcaatgaaccacctgcttatagtttcttggttgctgttgcaatgaacttaacttcgtctaactactgtttcgcctcagtttggagggggatgagtttagttagttaagaacttctcaagattaatgtgcattagtataatgtatatgcatgtttcctcctgttcctgccaaggtcacttatcctgtgttggcacttggcagtgtcttctgatgctttaggcaactctttagataatttgcatccattttttttcctgtgtgagtaatgccattggtcaccaagttgtataaggcttttgttgatgttgttgctgagtaatgccattggtgttgatggtgtgattcggatgtatagatatttgtaggatttgcaaagggggagatcatgtgtttgaccatcaagcttatgca

SEQ ID NO: 34298 - DNA, 461 bp, Glycine max
ggtgactctcgtcgtaagtatgctacaggaagcatgcctacttcaaattttcaaatcacatacgggtttacagagtgcacacctgatttgtcattgcaagagtgcactcagtgcttgggtgaagctatgcgggatatcccagtttattttaatgggaaaactggaggtaatgttttaaaacccagttgtagaattagatttgatccctactccttctacggatctacgctgaaattagacccagatgcaccgccaccagcgaccccgctaccatcaccgcccaccaacaacaattcttcttcacaaggaaagagcaacacatcacgaattatcattgccatagtagtaccagttgctagtgttgttttggtgctcattcttttctgcatctatctaagagtgaagaagccaagaaaagaaaatgagattaaaagagaagaagataattatgaagatgaaat

SEQ ID NO: 34299 - DNA, 537 bp, Glycine max
tattaaaatactagatgaagccatgatttcctttaatagaatttttgttatgaattttggctcaattttcataataaatggggctaaaatactttgatttcttagatttttacaaatagaatctcgtaggtcataacttatcatatatgcaaatttcaatctataatttttttagttatgttacttatttaataaggtcgattggtttatgcgaattgattttctgttacgataaattgacgagactatagctaatccaatagctgcttcagcggctgcaattgctataacaaaaatgcagaaaatttccccttttagttgggaattatcaaaaaaatcagaaaatgttacgaaattcatattaactgcattgagtataagttcaagacacataagagccctaaccatatttcgacttgtgatcaatccataaagccaatcaaaaataaataggactcaaaacaagtacatgttcgagtatcattcagcaactccttatcaattttgattcatttcaatatgaaaaataattcaccg

SEQ ID NO: 34300 - DNA, 386 bp, Glycine max
  unsure (1)..(386): unsure at all n locations
nnnnnnnnnnnnnnnnnnnnnnnnnnnnncaaagcaatcgaaaaattttattgataactcagtaactagatacaaaggaaatctggcaaattgattaaatgacagctgaagcttttacttaataccaaatattaacataatacatgaaaacatgaaaaattgtaacctgaaactttacattataatttctatatatcaaagttaacattaaaaactcaatacaaggtcatgccatagatgctctttctctttccctttccctttgggggaagaaatattttggggcatgactagcaacttgagacatggttcttatcttaagagcatgtgtggaaatgttcttccattctcccttgccaaagataacaagcctttgtttcaactca

SEQ ID NO: 34301 - DNA, 548 bp, Glycine max
ttttttttttttttaatgaaaattcaaataagctaaataagccattgaaaatacaagtctcactgtacagtacaatcaccataaatcaataatttaaagtctgaagagaatgaaactaaagatgaaaaagctttaaagctttacattgagaacatgaggaggcttgtacagatatgtttgtgcatgccacaaaactagtatttgaattcaattaagatgaaaaatctcaaagcctcagagtgagatcaggagacacagatgtttgtgcttgaggtgcagttgctactacaaaactagtatttgaattatgagcatgctcaccatgcctcaaattaacataacccctttcatcaatctgtctgaaacttccaggccaaaacagaccaacatcatcatcttccacgaagatcggtgtccgaaaatagtctttcccgaatttcgctgcagcactcatatcaggagccctcattgaatgatgcacatgcccttggtgcattgcagcatgagcttcgagtccaagcgaccgaaaagcagaaccatggagaggc

SEQ ID NO: 34302 - DNA, 461 bp, Glycine max
  unsure (1)..(461): unsure at all n locations
cttagcacaaaaaggctctntgctggagattcagttctttttatcaggtataaagagggctaatagacagcagccagcactatcttcatcagtaatatccagtgacagcatgcacattggcattcttgctgctgcagctcatgcagcttcaaataacagcccgtttactatattttataatccaagggccagcccttctgaatttgtaattccattggccaagtataataaggccctgttcaatcaagtttcccttggaatgagattcagaatgatgtttgagactgaggaatcaggggtacgcagatatatgggtacaatcactggtatcactgacttggatcctgtccgatggaagaattcacagtggcgcaatcctcaggttggatgggatgaatcgactgccggtgagcgcccgagcagggtttctatttgggatattgagccagtggtgacctggt

SEQ ID NO: 34303 - DNA, 338 bp, Glycine max
acgaggccgatcttaggcatgaaaggtggtggcccacattgaataatagcgaggatcttgtgtctatccttaccaccttgatttggacggtatccgcacagcatgcagctattaattttgggcagtacccttacggaggttatgtgcccaatcgtcctccgttaatgagaagattaatcccagaagcagaagtcgagagtactagtactgaatatgccaatttcttagctgatccccaaaagtttttcctaaatgcgttgcccagcgtgttacaagctacgaaatatatggctattgttgacatcctctctacccactcatccgacgaggagtatttg

SEQ ID NO: 34304 - DNA, 381 bp, Glycine max
  unsure (1)..(381): unsure at all n locations
catactccaaccatagctgagaaatattcagaaatgaagcccccaaagataaaatcaagcagtttcaaggacccctctatgtcaagcaagcaccggtcgtcaagacgacctgagtatgctgaattctatggttcttctgagattcctccgtacaccaaatctaagagccagaaagaaaggccaagacacagacaacgagaaaagagtggagaagtcgttatgggggcagttggagctgaggctaaaccagttgagacaagggctgttgatcataataatccaaagtttgaccattacagtatgagaactaagtatgcatctgaggagaccttccgattcaactttcagtaaacaagntttgcatgatttatttttcactag

SEQ ID NO: 34305 - DNA, 208 bp, Glycine max
acgaggcgaggggcagcagcacagcacttaatttgtcaagactctgaacaataattccccgtattagttttacttgttaagttataatctaattaacacgatatcaagggactattcaatcttaaaaaaaaaaaaaaaaaaaaactcgagagagagagagagagagagagagagagagagagagagagagagagagagaaagagagat

SEQ ID NO: 34306 - DNA, 722 bp, Glycine max
  unsure (1)..(722): unsure at all n locations
tgcactcttaacatcagccaaatggtttacttggcactgtgctctctgctaacgttggccttatctttggccacaacacatgcagcaaacttcgagatcgtcaacaattgcccctacacggtgtgggccgcggcgagtccgggtggaggccggcgtctggaccgtggccaaacgtggaacctctgggtgaacccgggcactgccatggcccgtatatggggccgcaccgggtgcaactttgatggcagcggccgcggccgctgccaaacgggagactgcacgggcggcctcaattgccaaggctggggggtccctcccaacacacttgcggaattcgcgttgaaccaatttggcaaccaggatttctacgacatctctttggtggacgggttcaacattccgatggacttctaccctctaaacggtgggtgtcacaaaatcagttgcagcgctgatatcaatgggcagtgcccggggccattaagggcacctgggggatgcaacaacccctgcactgtgtttaagacgaatgagtattgctgcaccaatgggcaaggaagctgtgggcccacaaactactcaaggttcttcaaggataggtgccatgattcttatagttaccctcaggatgatccaacaagtacttntacgtgtcccgctggctctaactacaaggtcgtcttctgtccattgggagaaccctatgttactcttcatatgcc

SEQ ID NO: 34307 - DNA, 409 bp, Glycine max
acgagccgccacttctcactctgactgaaccacttcaccaaacaaaactaccacattaaaaaaacatgtcactcttgttctcaccgccaccttccctcacgggcctcagccttcacccccatgtgcactttagcccctccatgtctatcctacgccgcctccccttaaaccttcgcaccaccccgccgccgccgcctcgccaccgtttcggccgccctacgccaggacaccgccgtctggaccccggcccctctctccgaggtcgagcacgccgccgagtcgctctttcacatcgccatcgacgtctccgacgcccccgaccttgccgcgtcacacacactcgccgggcagtacctccagctccgggtccccgacgcgccgaagccctcgttcttggccatcgcgtcgc

SEQ ID NO: 34308 - DNA, 743 bp, Glycine max
gcaaaagcaaggattaataatggtgtttgtataattttgttttacttgtttgtctcctgaaagtaccatacaatcttcgaagatgatcgggaaggacgagttcgtctcttactcgccccttccctccaaccctaaccctaaccctaaccctaaccctaaccccaaccccaacccttatcccaatcctaatccttattacgaccctaaccctcatccttacccccaaaacgtcgtcgttttgctcccctcctaccgtccccatttccagcgtcgtcgccgccgctgcatcatctactccgcggcactcttcctcttcctcctcgtcgctggcgccgccttcctcctctacccctccgacccggagattcgtctcgctcggatccgactcgaccgcatcgggatccgaaccaacccgaggcccattctcgacctctccttctccctcaccgttaaagtccgcaacagagacttcttctccctctcctatgactccctcgccgtctccgtcggctaccgcggccgccagctcggcttcgtcaccggcggcggcggcggccgcatcagggcgcgtggctcctcctacgtcgacgccacgctcaccattgacggatttgaggttatctacgacgcgttctacctgctcgaagatatcgctaagggcgtcattccattcgatactgacacccgagttgaagggaaattagggcttttcttcttcactgttcctttgaaggcaacagtgt

SEQ ID NO: 34309 - DNA, 946 bp, Glycine max
acgaggaaaatagccaccaatctatgtctggggttactgaagttccttcacttacaaaaatctatgacgttgaaaccacaaatgattccacagactcctatgctgagccagaacctcgcacaagcctcattccaagtatgaccataccacactatgatagccatgctgaattctcctcgaaagctatgagtgaaagtcatggaactgagcatataatggatagcaaaagctgcagtgatggtctttctgcttcaatttcaggatctcatgcaaccgctaggaggtagtgacaattctactaatgggcatggtggattctcattctaataagttgctagatgctttgggagaagaagatgtcagtcaggcaccaaggtcagctgctccttctatgaaagcaatttggttactgttggaacaagctgttgagaaaggcagtgctcttgttttagataaggattctttggatgcggacaatatttatcaaaacacagttgcctttgccaaatcagctccacccggaccagcttttaggaaaaacacaaaggctgtgtctcaaaagaatcctaagcaagaaggttcaactttggagactaaagaaactaccattgattccatgaaacggaaaaaggagaatagtactaaaattcctagaaaagcaaattttgatgaccaattactaaatgttgtaccacaaggaacattaggagttgatgaacttgctaaacttttaacatgatactggatggtgttatcagaagttctagtgtcattttacttggtggtgaggatcgactggcagagagggggtcgttatagcagaggtcaacttggatccgagcgaaggggatgtccattatttttcatccattttgtaaagttttttctaatttattgttactgttaaagtggtagattatgaatgtttgtaaaatttttctgattt

SEQ ID NO: 34310 - DNA, 491 bp, Glycine max
  unsure (1)..(491): unsure at all n locations
cgcatggacgtccatgtcagcctcggcacgtgtgggacacacgcattccgtgagctcgcgcgcaactacctcggagtggactcgcatgtgttgttcgaggcagtggagggatgcatccgcagcggtggctccctcacgcctgcgcacgtgggagagatactgctcaggaacagaggggatgttgacgtggccatgagggaggtcttggcagcgatgcaggggaggatgctagtcgccacagctgccgctgatcagccggaaaatgaggaggcgtcgacggctgccggagttaggtcgccagagagcgtgctgatgatggggtcgccggagaattgggatgtgaagaggaaggaacaacatgggtgtaataatttggataagaaagtcaagtttttcgttaggttaaggtcgttgaccagatctgatcctggtagataanatttgttttttttagaaaacaaaatttggatgaatgcagctctattatttat

SEQ ID NO: 34311 - DNA, 529 bp, Glycine max
agtgggaaaatttccctctcgtcacagttaatggagttggtattgttctcgagttatcctatgttctcatttacttctggtatgcttcagccaaaggaaaggtgaaggtagccatgactgcaataccagttttgctggtgttctctataattgctgcagtgtcagcttttgcattccatgataatcatcaccggaagcttctcgtaggtagcatcggcttaggtgtttcagtaacaatgtatggatcccctttgattgtaatgaagaaagttatacaaaccaagagtgtggaattcatgccactaccgttatccatgtgctcatttttagccactgttctctggctgatttatggacttctcattcgtgatatattcgttgcggtcctagtgcggttggaactcccttggggatcttgcaacttgtactttactgtaaataccgaaaagggagtgttgtggaggatccaagtaagggggaccttgagaagggtaacttggagaaggtggaaatggaaattgggagagtg

SEQ ID NO: 34312 - DNA, 663 bp, Glycine max
aataatagtttcacatgcatatgtacgtgccctaaacattcaaaaccctacgtacgtcaacatctccgaaaaataaaaatggcgaaaaggagcatgtgtgtttttttgtgcgtgactttgttcatggttgggttttcggagtgttcgagcacgagcacgttcctctacagcgggtgcacgcagcaacggtacactcccaactcgccctacgagtggaatatcaactcgctactcacctcgctggtgaactcagcgacgtactcggcttataacaacttcactgtggtggggtccactcagcaggacgcggtgtacgggctctaccagtgtcgcggcgacctcgccatgccggactgcgccgcgtgcgtggcgcgcgccgtcacccgcgccggcgacatctgccgcggcacgtgcggtggctcggtgcagctcgacggctgcttcgtgaagtacgacaacgcgacgttcctcggcgcgcaggacaaggcggtggtgctgaagaagtgcgggccgtcggtagggtacaaccccgatgccatggggagtcgcgacgccgtgctggccggactcgccgccgccggggggaacctttgcgtcggcgggtctggcggggttcaccgcgtggcgcagtgcaccggcgatctcagctacggcgagtgccag

SEQ ID NO: 34313 - DNA, 430 bp, Glycine max
acgaggtaagacgcgcgactggattgtggccctcaaggcgctgatgctcgtgcacaggctcatgaacgatggtccgccgctcttccaggaggagatcctctacgccacccgcaggggaaccaggctcctcaacatgtctgatttcagagacgaggctcactctagctcctgggatcactccgcttttgtcaggacctatgctttgtatctcgatcagaggcttgaattgatgctgttcgatagaaaaggcacagtctccgccgccaatggtggcggtgatgataggtttggcggaagagacaatttccagtcaccgccgtatgagtacggcggtggtgaatttagaggggaaggcgcttatgggaatgggatggggaagacaagatcgtatggggacatgactagtataaaattcggaagggaagaaaag

SEQ ID NO: 34314 - DNA, 814 bp, Glycine max
  unsure (1)..(814): unsure at all n locations
gagccagaggaagaaaaccggtttcttcgaaagcgttcgcgcgattttccggcacggtcgcagaggcaaaccggttcagaaaccggatcttccgcaggaagattcgtcgtcgtcgaagatgaagaagaagagaagttacggtaagaaagcacggggaagcaccactagcagcacaacgaatcgaaacggcgcgtcgtttgaagaatcgttttcgagtgcagcaccacctcccggtttgggttcggtgaaccggttcgcgtctgggagaaggtctgagtcgtggggagtgggtgactcggaaatccgcgtgttgcattangatttgtttttttaccgcgccttgcaattttggtgacggctatggtgggccccactttgaatagtggttagacgggtgacttgaacaacggtctccaaaaaaaaaaaaaatggatatagtagtgacagtactatggctttttgtgtgtgtatgaaaggttggtaaagtggtagtttcttttggaaacgtgatgaatttgctgttaaaaaaaaaaaataacaaaatatataaaatatatttctatttntcttctttctctttctgttctctctctctctttcctctttatatatataaactcttgggggggccgggtctcccattctcctatattgggtgtgatatactcccgcccatgtgcccttgtttttacactgtggtagggtagaaaacctcggtgttacccatatttatgctgtcgatcaactctcccctttttccgcgtggttgttataaaagaaggggtgcgcccctcgccttcttctctcatattgg

SEQ ID NO: 34315 - DNA, 796 bp, Glycine max
  unsure (1)..(796): unsure at all n locations
ctgtgtttgagaggactaaagtaaacagatgggtgacaacaacataggcaaagtcttagagagagaaggctttaagtacaacttcacggcagctgcaagtgacacctctgcacaagatgaggtgattaaagagcaagatcggttgcttccaatagcaaatgtggggcgcatcatgaagcaaatcctttcctcctaacgccaagatctcaaaggaagctaaagaaaccatgcaagaatgtgtgtccgagttcattagctttgtcactggggaagcttctgacaagtgtcacaaggagaagcgcaagaccgtgaatggcgacgatatttgctgggcccttgctaccctagggtttgatgactactctgagccacttaaaaggtacttgcataagtatagggagttcgaaggggagagagcaaatcaaaataagggtaacaccaacccttatgaaaacaacattgcaaacatataaattaattatgtggaaggtgaactctttctccaattcccatgatcaatgtgattgatagttgttaatctgatcttctagttttctcctgaatttgagatactcaaggggcttgtatccttatgtgatatatatatgacgtgagtcatgtatgcaaactcacgtgttttagacctgatattttcatcaagggttgaaattaccctagatgaacacatggtagcttgagaatcatgtgagttacaactaatctttgtatttgtctatccaataataagcttggatcctttccagnnnnnnnnnnnnnnnnnnnnnnnnnnnnnnnn

SEQ ID NO: 34316 - DNA, 129 bp, Glycine max
acgaggaaggacgctttcagaggcgaaaggccatggggagataccgtctgtgatccatggatctccgatcgggaaaccgtatccaagctccgcggctagtctgcgctctttggacttttaaaacttagc

SEQ ID NO: 34317 - DNA, 533 bp, Glycine max
tttttttttttttggttgtcgaagtcatcaattaacttctatctaattttttttcgttcccttttgttttgcattcccggagaagttctgatggaacccttattcccagcctctcaattaacgtgcctcgatacatagtcgagtgctcatgcatagcaacattgatcgtttcgtcgtagaagtgagcgcacggtgccccactggagaaacctcacgagggaccccagaacatcaggtggtgatgatgggtatcgcttatttcttggtggccttggcagcagacttggtgaccttgccagcggtggcagcggacttgtcgacagccttgatgacaccgacagcgacggtctgtcgcatgtcacggacggcgaaacgacccaggggagggtagtcggtgaaagcctcaacgcacatgggcttggagggaatcatcttgacgatggcagagtcaccggacttgatgaacttgggggcagtctcggtagccttaccggtacggcggtcgatcttctcctggagctcggcgaacttgc

SEQ ID NO: 34318 - DNA, 378 bp, Glycine max
cagttttttttttttttttttttttttactcttatttcatatattttacactacaccaccagcgggagtgtcaatattcaccacttagtattattagtacttgggaacattaataacaagcgcaccattttccatataagccttcatacgatgaacgttggaattttcgggtagcatcaaggtttgaatgaatctgcctctagcacgctccaaaagttgccccctcccattccttgtttccctctccacccacttttcaccaatgatgcatagctctctcccattttccacttctaccctcacttcattgtgcctaagccccggaacgtgtgccttgtacacgtgtgctgtaggggtctccttccattccacgtatgc

SEQ ID NO: 34319 - DNA, 363 bp, Glycine max
  unsure (1)..(363): unsure at all n locations
acgaggtgatcggtgttcacttgatctcatcataatcgtcagcgtcaattgaagaagatgccgatcagaaacatcgccgtcggaaggcctgaagaggcgactcaccccgacacgttgaaggcggctttggctgagttcatctcaaccttcatcttcgtgttcgccggctcaggctccggcatcgcctacaacaagctcaccgacaacggcgctgccacccctgccggcctcatctccgcctccatcgcccatgcattcgccccttcttcggtcgcggtctccgtcggcgccaacatcttccggcggggcacgcaaaccccccgcgcacctntcggcgcccttcgtcggcggcaacatcacctt

SEQ ID NO: 34320 - DNA, 691 bp, Glycine max
gggcagaaacaaactgaaaccaagccatcccaagtgagaacttttccaaatggattgattatagaggaggtatttatgggtaaacccgatggcaaaaaagctgctcctggaaagaaggtcagtgttaaatatattggcaaactgcaaaaagatgggaaaatatttgactcaaatgtgggaagggcaccctttaaatttcgcctgggtgtaggacaagtccatcaaagggtgggaggttgggatcaatgggatgagaattggggacaaacgtaggatcacaattccaccgtctatgggatacgcggacaaacgcgttggcagtataccaccaagttcgtggcttgtatttgatgtggagttggttgatgttggtcgctgatttctatccctcattgtttcggctgcggaatggtctggtcccccttcgggctgagagaatgttaaactcacatttaccatttttggtccgaagtgtgtgtgtggatcttgagaccaaattagagctcaagttttgtaggaaattttggattgaattagggaattctcagcattacgagtttacatatgcgacaaatatagtgtttgctttcgttatcaatagtgttaatcattaaatgtgggtttcgtttggattgtacaatttttacagttcactgaacaaaaaattatcatgcctcatttctcaaaaaaa

SEQ ID NO: 34321 - DNA, 458 bp, Glycine max
gagcggaagaagagcatccctgactcagtcgaaagacaaaggagcgttcattcatcatgtcgaaaagcaaagcgaaaaagaaaaatagtgatagcgatgaagacgacgacgttttctactaccgctatagcagcgtcaaccctacccaaactcaaactcaaacccaaaccctacaacacaatccaaatcccaaatccaacaacaacaagggatcttcgtcttcttccttggctccgtcgaaatcaacgttgtacgtttcgaacatcgactactccctcacgaactccgacctccacacgctcttctccaccttcggccgcgtcgcgcgcgtcaccgtcctcaaggaccgccacacgcgcctcagccgcggcgtggccttcgtccagttcgtgtcgcgccacgacgcgcacgatgcggccgcgcagatggacgggaaggtgctcaacggccgcaccctc

SEQ ID NO: 34322 - DNA, 452 bp, Glycine max
  unsure (1)..(452): unsure at all n locations
nnnnnnnnnnnnnnnnnnnnnnnnnagttaatattaattgaaaactgaaattatattattatataagaataaatatcaatcaactgggattctacatgaagcattacagtttatggatttttcttcacttagtaaaacaaacaactgttatatattatccaactcaatacaaaatacaatataaagtttcatcaaaatgtattcaaaaaccatctagagtgctgcagcttattctgatttgtggagaatagtattagtatattattcttgtctatcgcctcaaggtatgcagaatatactccgcataaagatccattgagtactggatggattcaacggcagtggatgcaggtagaaaatcattaactgctacctccttgttctcattcttcttgtaatcttcaaagaagcggcgaatctccatgaggcgatgaggtggaagttctttgaag

SEQ ID NO: 34323 - DNA, 415 bp, Glycine max
  unsure (1)..(415): unsure at all n locations
aaaaactccggcattgaccggtccgtggtggaatcgttgccggtcttcagattcggagcgctgcgggggcaaaaggaaggactcgattgcgcggtgtgcctgaacaagttcgaggccgcggaggttctccggctgttgccgaaatgcaagcacgcgttccacgtggagtgcgtggacacgtggctggacgcgcattccacgtgtcctctctgccgctaccgcgtggatccggaggacattctcctggtggaggacgcaaagcctttccgccagagtcatcaacaacaacggaacaaggaagaggaacgcgtgcgtttgaatttggacctggagaagcaggagatagtggagtctcgacggaggcattcgtncgcttgtggtgggggaagagaaacaacggaggagcagcancaga

SEQ ID NO: 34324 - DNA, 384 bp, Glycine max
  unsure (1)..(384): unsure at all n locations
acgaggcagattgttccgaatgatctgaaagctcttgctggtagctttatggcaaaagtgaatcaaggactggagcaagctcatgggactggttatggaggcagtggctttaaatttaatgaagaggaagatgaggtgaggaaagcagcaaagaaagcacaagccaaggagtatgggtttgaagaagaaaagtcagattctgaagatgaagatgaaggtattaggaaggcaggaggtgatatctcacagcattctgcttttgcccagattattgctgccactaaagggaatgctcctgcattgcctactccaatactcctaccatccttgcaagtcttgcctgngacagggctacctcttcctgcaaacgatggggcagcntga

SEQ ID NO: 34325 - DNA, 657 bp, Glycine max
accaggaatggccaacaacagcgaagaacaacagaacaactcaacaagatcatcgatcatggagtggaagcagatgcatccacttcaccaaatcgcagaaacacccacccacaagctcctcctgaagcaatggctgaaggaggaagaactcatcaacagccgcatagcgttgaaagagacccaaatagattcaacccgcaaagagatcaccaccctctacatcttcttcttcctcttccactccaccaccctcatgctcctcttcaactcctcgtcaccctcttcctgtcacagatcgtgggtcccttcgctgtgctctctgttattctcgctgggcctaatatgggccttgcgttacaagagcgacgtggaggcccacgtggagaagatgctgcagcgggagaaggaggacaaagggttgctggggaagtgcgtggaggagttgaagaagaaagggttggagtttgatttgctgaaggaggttgatgcgttgaggagggccaagagtttgagggtggagaacaaagaggttaggaagtggtcttccagggactttgtttctttgttcttcttctctatggcttgcttctctcttgctctcatgagggtcatcttgtgcacttaggatttgcgattggtactaatatgtacttaact

SEQ ID NO: 34326 - DNA, 435 bp, Glycine max
tgaaaactttcgtttttggaacctttgtgtgggactgttgacttggctgataactatacgaataacaagtctcaaaattatacagaaaaacccaaatgttgttaatcccctccatccaattatgagaccagaaagcactattaaattgttggggtcaggcttacaaaatgtagcgtaacctatgatactatattttcacaaatcttgaatttaatttcttgagcctatttgcattatcagtcacattacttttctatactgtgcagggtcatctatcatacttaacctgtttaccatcctcgtctaatatagcttctatattatgtttagaagcattcttccctttaccagcatcatggttttcaggtgacccggggaacgtgtcttccttcgattttccgacattattcaacacctcttcagttgttgtctgaa

SEQ ID NO: 34327 - DNA, 864 bp, Glycine max
ttcagaagaagaactgaaatcgtcatcaaaaatggtgttctggcatgggtctgatgtggggcagagaccttgcctaatcattaggtttgggttagcctgcagtacattgacatctgaagatagacctcgatttgctcaggcagtcatatcacaggtagaatatggagtcctgcacttggttgatgcagacaacccgcaaattacggtgttggtggactgtgaagggttgtctccagtgagaattcccatgcaaataatcagatcctgttcttcccttctgaaagaccacttttcctaaatcgtcttggttgcatgtttgtcatacgattgccagccaatgttcatgttattgcccagacttttattcaggatttgaagcctgctacgagaaacaagttgaaaatagaaggggagatgcatcagaaagttctttctgactatatgccaacactgccttcatatcttggaggctgctgcacctgcatgaaatgctccaacattggccagggggatatgctgcaaacttatgcaacctggggaccagcaggagagatgggttggaggataccagtgacagtgacaatgacaatgaggattctccaacattgcatccttgcgatgaattagaaggcaacttatatggtaattatgaccagttgttgagaactgctatagtaggcattcttatattttgggtttttatagctcttggtgctgtagtatttgatcccagtaatcgccactagccctgataatgcaagacacgtcaaatttagtttgtatcccttgacgagtaaatctttcttgtgggcggcataatcctcttccaacagtaacactgcataactttgtagattcttcaga

SEQ ID NO: 34328 - DNA, 583 bp, Glycine max
ttttttttttttgaacaaattacatggagcagcatgcccttatttcataaaaaaaaatgtattctacagatatggcttgatgttagaaacagcaatacgttggttttgtaaatttatccatgactgctttattacaaacttgcttcttggagtgacggtactactagaaacaaacatggggagggatgagctttcctggattcatgatatcgttgggatctaggactgcttttatttttttcattgtcctcaatgcttccactccgagttcttcttcaagatacttcatttttccagttccaacaccatgttcaccggtacaagttccttctaatgacaaggcagcatgaaccataaactggttgagtctctctgcctcccgccgctgttcttcttggttaggatcaaataaaataaccgtgtggaaattaccatcaccagcatgcgcaattactgtgcaaactagtggtgatgcatccagctcctttttagaccttgaaattaaatcgccaaggtgagataaaggaacacatacatctgtagtcattgccaccagatttggttccattgcaaagcaagccca

SEQ ID NO: 34329 - DNA, 612 bp, Glycine max
ttgcttgccgggagtaacccccatgttttgtaccggttcgatgacgtggagtttccgaccgaattgcggctcgaggcgttttcgcccgagtatttgtctgcagaccgggcgaatcttagaccggttattgaggaggtgccccaaacagtgcgttttgggggcaagtttgatgtggtggtttcggttgatttgcctgtggtggggattgtggaagtaaacttggctagcgcgccttttgccacgcactcgttctctcagggtcaacgtttggtcaaactgacggtttcctctgccgtgcctgacggcagtgacgggaggtaccggattggagtaacggctccgccgagtggggcggtggcgccgccgggttactacatggcgttcgcagtgaacccagggagtacccagcattgcaaagtggatacacgttgtcataagtagtaactgtgaagtaacgaagtctctttgatgcattttggaaattgaaattgtatttaaatttatttattttctttttttgggggcaagtggggggattaaaaatttaaaattgagattcttcaattggttaataggaatttggggattgggaaggtcggtaagtgtgactgg

SEQ ID NO: 34330 - DNA, 342 bp, Glycine max
  unsure (1)..(342): unsure at all n locations
tttttttgaataattttaaaatgattattttagcaacacgcattgttcgaatcatacagtagatgacagaaccataccaatttcctggatttctatgctcccttaaggtacaatgacattcatggaatctgatgctaatggatcagagattgatgtcaacctatttagcctaactacaggatttggacaacaatttaaatttgtgagcatgacaagaaaacagcgacaaaattttaactctccaatcccctattaagggcacaaactctaagcaaaatataaagggaaaattgataagacaaccctggntacgtgaaacaacacaagaaagacaaaaacaga

SEQ ID NO: 34331 - DNA, 424 bp, Glycine max
  unsure (1)..(424): unsure at all n locations
accaacgcacaagagaggcgcacgcaccacgctctcgctctcactctcagctcctcctcctcctccgtccaatcgccgccactaaccgccatcgtcgtccgccgccaccgcctctgcttccattccacgtctcaggtccctttgtatttccggcaagtgtttcagacaacataagctggcttattcttttagttgggtgttgggaagaagatactgtaatattgtgttgtaagagagttaatggagctgaaagtttcatctccaaacctgagntctgtgcaccgtctgattgcgcaggtgatcctgggaaagggaggtgagtgatgatgatgatgaagatccggatacaagcatcgagagggagcctcgtctaacttgagagagagtttcaattctgtaatagaggcatcaaaagcgtacaaat

SEQ ID NO: 34332 - DNA, 613 bp, Glycine max
ttttttttttttttttttaacagtgcttaagctgtctgcttgaattaaatgaaacattcagctggagcagaatccaaaacgagacaagcatgatccgaggaatatagcttttgtttttaatgttcctagactatgaaaatttctaataagattactttgattgctctgaataataaataagtaaatatacaccaaaagggaagaaggatttaattttacaaaaagagacacttgcacccattgcggctattgcagatggcactccaacaccgattgaactgcataacctgctcaatcgagtctagttgtaaaacaccacaatgcaatgacagtggctatggtcaggaacaatcctcagctcacaagccaattaactaatcaccaccaccaccaccaccaaacattcctcccattcccatcatgtctttggcggatcccatctgcttcatcaagttttgtaacccacccatgccaccaatttgcttcagcatctgaggaggaaggactttgctcatgtgttgcgcattcatatttcgggatacggcactcatatacaccttttctatggtatgataagccccttcattttgctccatatctttgccagacgttt

SEQ ID NO: 34333 - DNA, 702 bp, Glycine max
tccaggccagcccttgagcttccaccagtttcaccctcttccaggggttcacagtcaggttccgctaggctatctcttgagccaccatcagttacgccatcatcaaggactgcatccttgccaccgacattgtctacggatccaccatctccatcaatttctggtggatctttccaggaacctaaagtagacaaaagcaatggatctagttctggcttgtttgggttgatatctggcgtctatggtccattgctgacaagaactcgcagtgcgacagatgcagtagtccaaaaaactcgttcgactagttaacagtagcatgtctctttttccttttttggaccgcagtaaactatatatagattattggacctatgggggggttgaaaatcttcaccagttggtgactgttcagaagaattatgaaccgttaattatagtatgcccgagccaaattataaacgactgggcattaaattctgcagcagagagcctgtatctctcgagtctcattaggattaaaattaaaataagaatttgtccgatattcaactgggaaagctggtaaaggaaagagtcactattgaattgttctaaacccttttgttcaccgtattatttttgaattttgagaattagatgtaaaatcttgttaagcataaaaaaaaaaaaaaagaactcgagactagttcaactcgtgcc

SEQ ID NO: 34334 - DNA, 524 bp, Glycine max
  unsure (1)..(524): unsure at all n locations
ttgtaaattatgttcaacttttgagcattataattgttacctattattgttatgttttttattagcaaaagggctgaagcccaagctagaaccctctacagaaaggcactccctagagaaacaaagttgaccaaaaaatttaaaagaaaacaaaaaaggaaagagggagagagagattattgctggagaggagggggtttctacccccggcttcgnnttgggtgttggacgactctttcctcccttgcccttccttgttgatgcccatttgtcccagggagttgactcccttcttaggtagggttggcttccttgcttggacttcgagttggggcccggtttcgggttccgtgtgcccaaccggtcccccgggttcttcgatggtcgcttgctgcaccgtgtccgagctgcctctgtttgattgcactgatgcttgttaagtgttgaaggatctacaagaggctaagacgtgatacccctgcggctccatccgtatcatcgtattagacaatgctcgccaagtg

SEQ ID NO: 34335 - DNA, 494 bp, Glycine max
aggttgggcatctctccagactattccaagagcagctgtgtttgacaagaagactagaactaatttgcttcactggccagcggaagaaggagaaagcttaagacttagcaactccgaatttgaaggagttgcggttaaacctggctcagttgtgccactggacataggcccggccacacagttggacatatttgctgaatttgaaatcgaagatttagcatccaaaggaattggcaaggacaatgtagactgtggaaatggagctgttgacagaagtgcttttggaccattcggtattttggctattgcagatgaccaactttctgaactaacaccaatttatttccatctttctagtactactaaagatggcagtttaaccacttccttctgtgttgatgaaactaggtcatcaaaggctcctgatgtttcaaagctcatttttggaagcaaagctccagttctcagtgatgaagaattatcaatgagggtat

SEQ ID NO: 34336 - DNA, 859 bp, Glycine max
gaaagatatcgatgtacttatttgaattcgtggcacagcttccaatttggaatttagaaagagatcataaattgtaagcacatctatattcaataatcagtcacccatgctcttgtcaacttgtttagattttgcttcttcacaagaatgagaagaatataagacaggtattagctttcttctttgtgagtgatgatatgcataggcagttatttaaacctttatgttgttttctggtattgttctgcaatttctaacacctattttgacagaatcaaatgtttaatacaattattcttttttattaactcttttatcaaatacagtggcttgaaagtattgtgtctgctgccttgaggaagaaaagtggtgaagaaagacaacttctcagttccaaattgggtcttactaattcccaaccccttgtctgctttgccctttgtactggagccttgtcagatcctgtgctaaaggtttattcagcatcaaatataagtgaagaactaaatattgccaagagggagtttctccaagcaaatgtaattggtgaagaagtcaagaaaagtttttctcccaacattggtggaaagattttctagagaagcatcaataagcgtagacgatctctttggatgggtcatggagagtgttgataggaagctgcgtgattcaatgcagaagtgccttaatcctaaatccagccaaaaaccatctcagatcatagaatggttaccttatagctcaaggttccggtacgtgttctccaaggatgtcatagacaagccttggtgggtatgagtctatgatgacatctaactgcttggtaaagattattgaatgattagtggaggcataactg

SEQ ID NO: 34337 - DNA, 314 bp, Glycine max
gtttttttaagagaattttagagatgttttataactaatgccaaacaagctctaaatgctggcaagatacaatatacatgaaaacaaaaaaccatttaaaggctaaagaaagaatgggctaattcttccttgatccaccaccacctctaaaggactgccaaaacacaggccaattcttttgggcttcagtccaaccccaaaaggaaccctccctcagagggtcccagctggaggacacaatcccataactcacacccaacagagcagacccaaagaaaaagaatgacacaatgaatggcacccaagtgggcaca

SEQ ID NO: 34338 - DNA, 316 bp, Glycine max
agcatggattccgtgtcgttattaacaatggtcccagtgcctgtcaatctgtgtatcatctgcacttgcatgtattaggtggcagacagatgaattggccacctggttgaaggttggctattactttttaaattttaactgcctattttctgatgaatctctcatggatatttcttcatcaagagttgtaattttgagacctacatataaataatcttgcaacaactgatcctttagtttggttatatgattattcattgggagcttatctatgattatatagagagggtgaaatgcttttttgtgtgaaaaaaaa

SEQ ID NO: 34339 - DNA, 354 bp, Glycine max
  unsure (1)..(354): unsure at all n locations
ggagaaacgcggcgattacctcgctgncggcgaccgaggtgggcgcgttgtgatattctaacgcgacgatcggaaaaagaatgctaggaatgaccgaagagaactggagcagcgggaatttcgcgacttcgcggcatcccgaatttcgtttcaaaacggaatttcagagccacgagcccgagtttgattacctgaagagtgtggaaattgaagagaagattaacaaagtaaggtggtggatgtccaacgccagtttgcaatttattctttcaaccaacgactaaacaattaaattgtgggaggttaaggaacataaggtaaaacaagttaaagaaatggcccctcctttatgct

SEQ ID NO: 34340 - DNA, 172 bp, Glycine max
agcgaaatcaaccagaaacttttctatgacatcagcgttgtagtccatctttggccgatcagaataacccaggccaggccaatcaacaatagttgcccgccaattggtgttgccattacgttgagcaatgtctccagccactagtctccattcctcaacagtgctaacatca

SEQ ID NO: 34341 - DNA, 386 bp, Glycine max
  unsure (1)..(386): unsure at all n locations
ccaacaactgcttccagttgtttaaatcggcaaaagattcagtgtgaggagagacatattcttggtgccacattctccgtgaggcaaacaagacagcagatgctcttgctaaatttggcgttgatgttagatggtcaaagtaaagttttttattctactcctagttttctttctgctcatgttttagctgatgtagctggtatttttttttttcccttcctcctgatttttaataaattttttctcttgggaccttagcctctctcttgcaccaaaagaaaattgtaaaatattccttaatttattttttgaattaccatcccagtggtgtaaagtatcattattgatgagtaatttttatcgaaaaaaaaaaaaaaaannnnnnn

SEQ ID NO: 34342 - DNA, 241 bp, Glycine max
agcttggagttgttgcttttccttttgggcctcatataacttgcttcctgcagacccctttgcttccagcagacccttagtgttattcgtaacatcttgcttggctaacttcgcatacgtggtccctttgtttgtcacttcgtcttgtttttcttttctagtttgttgactttcctctcatttcgtgtgtttctggtacaccgcttgttcatcttgatataaatcttaattattaaaaaaa

SEQ ID NO: 34343 - DNA, 248 bp, Glycine max
agccgaatgttacggaggctctgattagtgttctgtagttgatgacttatctgggggacttgacatattgaataataaaataatttgtatcagtatataaaaatgaaacttcaagcttaggtttaattttgatcccgccaccattcagattatgtaaaatttgaagaaatttcagattatgcgcttgtatttttttaactgttcgccggttggccccattcgttgttcaaaaaaaaaaaaaaataaaa

SEQ ID NO: 34344 - DNA, 496 bp, Glycine max
gatcacacctcacaactacacattcattcgtgagcacataattacacagcacaacagatctcaaagaattagagaccaacccaattcacaaatacactattacatgaaatgcatgacattacattacacagtaaatgaccatttcggtccaaccgggaaaatgtagctgaagatgaaaatttatttagcccaactgaaaaaaacgacatttcatcctttcctttcgggacaaatacaattttcagacactaaattgttaccaaaataaaatttttgcaacattacgtaagatgatattaacaagcactaagcacatgcacaagaattattatcaacaacaagcgcgtcattctctccttcattcctgaagaagaaataaccaatggtgagacccaccgcaagtgccaaaaatacccctccattgaaggacatgaccgccaacatcaacaagtacccgatcgccgagttaacaccgaacagaaccgcttccgcaaac

SEQ ID NO: 34345 - DNA, 367 bp, Glycine max
agcgttctacatacgcatcatgctttgcctatcttgaccaggacttgaggactgccttcaccaccttgcctgagagtagacgcaaggagtatgtcaaaactgctaatgagttggtgtctaactttggtgagtttgataggcatattcggacgccaaaggtatatgaatcatacctatactacgagaagacattgaagtcaatagatcaacttgtggccatactagcatagcacaaggaggaagctgcagggtataacggtcttaatttgcaattcttatttttgtggtataaagcctcttgttacgttttttttccttccattttaattccgaattgaaaaaaaaggtattatagaaaaaaaaaaaa

SEQ ID NO: 34346 - DNA, 200 bp, Glycine max
agcgtggttcttccccatgtattaccaaatggttcagtggataaggtatgagaggaagacaaatggtcctgaataaaatacagtgatgtgatgaggcaaaatatcattgaggccaactgagttcaacagcacattttgcagctgaggctaaccatagtagacagaattactaaccatagataatacatgtataattcttt

SEQ ID NO: 34347 - DNA, 742 bp, Glycine max
acgaggtcaccatccatggagagatggtgctcctcaaaaactacagttcattaaactttgcaggactagttaaaattttgaagaagtatgataaaagaactggtgggttgttgcgtctgccttttacacaacttgctcttcgtcaaccttttttcacgactgaacctctcacaaggttagtccatgaatgtgaggaaaatctagagctgctctttcccctgcaagcagaagtaatccaatctactccccctccagaaaatcagtctagaccaccggtagatagcgcaacaaatgccttacctgaggcatcctcaactcttggggatgaaactgtgtacatatatcgtagcactcttgctgctatgagagccataaagggtcttcagaaagcaagctccacctccaatccattttcgttttcatccctttttagcaaccaagatggtgatggttctggtgctgtaactgctgaaaactctgccgcacattctccagctaccttgcagaatgaagaaagcgttggtaaagaggaaactgattctgtgtaggaaaatttttcttttatatctgcttcctgtatcttcttctgggtttctgtttcagccttgttggttgaaactaaatgaaatgtaatctttttgttcgtatatacaatcaataaatacaagtcaactagtaagatgtactttctttaacatttaccttgggaaataatacctgagctttgccatattaaaaaaaa

SEQ ID NO: 34348 - DNA, 512 bp, Glycine max
  unsure (1)..(512): unsure at all n locations
acgagattaatatggctcccaccaagaagtccaccggtaagaaggttgctccttctccttaccccgtcaagggaaagcaaaccaccaaggctgctgccaaccctttgattgaaaagacccccaagaacttcggtgtcggtcaagatgtccaacccaagcgtgatgtctctcgtttcgtcaagtggccccaatacgtcaagcttcaacgccaaaagaagatcatctaccaacgtctcaaggtccctcctgctcttaaccaattcacccacgttttggacaagaacactgccactcaagtcttcaagttgatgcacaagtacagacccgagtccaagaacgagaagcgtgatcgtctccgtgctgctgctcttgccatgtccgagaagaaggaggttgccaagactgactcgcccgctgtcatcaagtacggtatcaaccacatcaccgctgtggtcgaggccaagaaggctcaattggtcgtcattgctgatgatngtgaccccattgagttg

SEQ ID NO: 34349 - DNA, 442 bp, Glycine max
gaattcggcaccagattttggtgggactggttgtagattgtgcaaggggagaaatcgagctttttgttatagccgatcatggttttctgacttctctctcaaagcatgctctttccagtttcaaccaatttatgttgaaatttaatatttccccactttgttgggcaaaggtttttgtaatattatagtggtggctgaaatgaacaaaaggttcccgccgatgatttcaattgagcagactttttatgccttgtgactagtatggaaacatgttcattatgtttgaattctatatatttagtgagagattaacatagaccaagggcaaaggttatcttattacgttgcacaacagggcgtgtgccacattattatcaaataatgttttcactcatactttccctttttttcttaattatacgagtttagaaaggaaaaaaaa

SEQ ID NO: 34350 - DNA, 526 bp, Glycine max
gtatttgttgtcttttgttttatatttgcatttgcattgttaagtatgctcttgcttgaattccactgttttatagatgcagccatcctttcattaaggatgcaacaaaatggatgaagttaagactacacatgttcaatgaaagttttaaacatttataaacattctgcagtaattttttaatgtttgaactgcagctattcgaggagtaaaacagaagatcaattatatttatttatttatatttttgttaacaaaagttagtttattagttttgttagaaatgtcaggagattcgaactatgacctctgccccctcccttcttcctttcctcttttccaattactgggtcaaccttatatcccctagaagatcaattatatgcattggtttcaacaccaagaagaccaaaagagaaaaataggagtaatctattaattatgtaaaaattgaaaagaataaattgtgttttttccattgtacatcttctagtgaagcatacacaacaaaaaaatataaacctta

SEQ ID NO: 34351 - DNA, 211 bp, Glycine max
aattcggcaccaggagagagagaactagtctcgcgtttttttttttttttttttttaaaattaaacatatgatccatttgtgtagatgccaatgctaggtcggcttataattattgtaaagaagaaagcaggcaaagataaattagatagcatgtaaattgtagcttgcacttactgaaatggatcatatgtttaattttaaaaaaaaaaa

SEQ ID NO: 34352 - DNA, 448 bp, Glycine max
ttcggcacgagatcaagttcagtgatttcggtttctgatggtggagttaggagtagtagagagatcataaggtataaaagctctagggttcatgaaattttcactctctatagcaggttttggaagattatctacagaactagacaacttcttttgaccaacaccgcagaagcacttctcgtgggtcttgtgttgggaactatttatatcaatataggggtttgataaggaagggattgagaaaaggtttggtctttttgccttcactctcacgtttctattgtcctccacaacggaaacccttcctattttcatcaacgagagaccgatcttgctgagagaaacttcgagtggggtttataggctctcgtcttatctcattgcaaacacgcttgttttcttgccctacttgttcgttgttgctgttatatactctatccccgtttat

SEQ ID NO: 34353 - DNA, 184 bp, Glycine max
taagatcttgctaccctttaccatttccaagactaaaatatatatatagctagctaggattaaccttttgagtaactagggtttaacattaatgtaaaactcttgtctttttcaatatctgattttgtgtgatttagaagtaaaaaaaaaaaaaaaaaactcgagttttttttttttttttttt

SEQ ID NO: 34354 - DNA, 282 bp, Glycine max
caccagtcacctttgacgatggcatcatatggggatgtcatgaatgtgccaagttatgaatctgttaacagcaagttccatgcaaaatgaaattgcatgtgatccaccttcggctcatcatattttctggatcacaagcatgcctacttccaattttcaagagcaatatacaccgaatcagcaatgctgaaaataaatcccagagaatttttttgtgcggatctgaggaaccattgttcttgttccatgtttgttttttttttttataacgatttgccttac

SEQ ID NO: 34355 - DNA, 524 bp, Glycine max
acgagcggcaccagcagacctgcatctggcaatcccggcaacagtgtaacgcctttccccaccacattaccgatgccaatctccaccgcaagccaaatataatttccactcggtttgcggacgataatggctaatggtttcacagagggcacggaggtgttgacgatggtgatgcacggtggttcctcggttgcgactggggttgatttcagtcaacaatgggttcctccacgcggccctctcctctgtctcgctcacgctgagatcgctgccatttgtgtcgtctccgtgggtttcacagccgctacacggtttgcgtcgtcgacggacaaggctcaaagatgccagatacgagagaagagagagaaatgagttgcagagggcaacagagagagaaatgagcgtttaattgtatttttttaatggtgcatcaaaacaacgtccaataaaataactaggttgaaaaaatgaaagactcatttagtaaattaaaatataagaagatcaggattcgtaaactgaga

SEQ ID NO: 34356 - DNA, 640 bp, Glycine max
cacgagaacaagtacgaccacaactacatgtactacattgggagcttgtcggagagtcacttgcagaacatattcttctcctacggcatggcctatggtgggggcggtttcgccataagctaccctttggccaaagctctgagcaaaatgcaggaccgttgtattcagcgctatcctgctctctatggctccgatgatcgaatgcaagcttgcatggctggactcgttgttccactcactaaggaaaatcggttttcaccagtatgatgtgtatgggaacttgtttgggcttcttgcagctcatccagtgactccattggtgtcactgcaccaccttgatgtggttgagccaatcttcccaaatgccactagagtagaagccattaaacggctaaccattccaatgaagcttgactcggcatctctcattcaacaatccatttgccatgacagaaataggagatggaccatttcagtgtcatggagttttgctgttcagatatttcgcgggatatttacacagcgggagatggaaatgccttcaagaacatttctcaattggtatagaagagcagattacactgcatatgcctgcaacacacgcgcgtttagcagaaacccgtgtcagagacctttcgtg

SEQ ID NO: 34357 - DNA, 625 bp, Glycine max
caccaggtgaaaagtgttttttgtggttcaaactttactgctgttgtatgtcttcataaatggataccaagtgttgatcattctgcttgtgttggatgtcgcaatttatttaatttcagaagaaaacgtcataattgttacaactgtggacttgtattttgcaaatcatgcaccagcaagaaatctataaaagcttcccttgctcccaattccaacaagcccgcatagagtctgtgatgattgttatcttaaacttaggaaagctgccattgaatcagtaccctcagtgcaaacacctagcttgagatgcgtaagtttgcaagacaatagaatcactaaaatacagggaacactactaaggcttgcatcttttggttctattattcaaacagaaagtagtcaatcaaagcttccagattcacaagatagccatcttttcccatctttaaatggaaaattgcagatgagggattttgctccttcaaaatcatcacattctctctctatggattccaagacacacctttcagtttctgagcccgctgcaagaatatcttgtcaatcaatgtcaccagtttcatcaaagtcaagtccaagacaatcttatgaagatataaatgatgat

SEQ ID NO: 34358 - DNA, 453 bp, Glycine max
cacgagattcaacgggaatttggtttgtaggtgctaggttccgatactatgttcttttgcgacctatttttttattgaaactttgggtttttttgtattaaaagaaaatgaattttgatttacgcattgttgatatgatattatgccagttattatttatttgttgttatgcatataataaataagtcaatttttttaattgaaagaagaaaacttctgagtttctctttggtgatcggatattatgtcaggtattatctatctgttattactttattgtgatgctgcctaagctatgatgctaccttgaatgtatcacctcctctccaccttttggctgagaaatctttgtccgttgatgttctttaatgaagccctttttagcacatgatagaaataaagaaattgatgcttataaatgctagactccattgtgttggtgtaaattgattt

SEQ ID NO: 34359 - DNA, 294 bp, Glycine max
gtggaggtgaaaacaaggtcaattcttcagaagttgctgttaatgagcaacagaaagatgaaggtgaaaacaaggttactgtaagtgcacgtaagactgtcagaagaagaaaggctaacccacaataacatagagaaagtagagagttttctattaaaaaaattccgatcaggatcatgatattctgtaatgaactatttggaagccagttgatgtcgaactctattcacttttggcatgcaaatattttcatgttgcaatagtattgtacaaatgaaatggcattgtacaaaa

SEQ ID NO: 34360 - DNA, 651 bp, Glycine max
agcgttgctttgcttgtggattcgaggggaagctctatgtcatgggtggaaggtcaagcttcacaattggaaactccaagtttgttgatgtctacaaccctgagaagcacgggtggtgtgagatgaaagatgggtgtgtcatggtcactgcttatgcagtgctggaaaagaagttgttctgcatggagtggaagaaccagcggaagttggcaatattcaatccagaggacaattcatggaatatggtaccagtccctttgacagggagttcaagcattggttttcggttcgggatattggatggtaagttgttgcttttctcactggaggaagagccttcatataagactttgttgtatgatccaaatgcagcaccaggatctgagtggcacacctctgatataagaccatctggtttgtgtttatgcagtgtaactattaaggcctgaaaagttggctgattcagaatttagagaccttgaggaactaaggacctttgttggtttactaggatggatgatgttaatttagtgtttttgcctgttcttgttggttttatcatggcatgtcatctctctgatctatggctggattgtttctgcagttattcacgtaaccattgactttgaccaagcactacttcagaaaaaa

SEQ ID NO: 34361 - DNA, 468 bp, Glycine max
agcctgacttcctcttgacattttatagatacaggaggaacgggtgtttggagcatgtcaatgaagcaccttatatgagccctattgaacctggcaaactttttaaacaaatttctaacttgtaccttccaccacttccccctcctctcccaatcttgactgatagtaatgtgacagaggcacctttgcctggtgtctctggaagagttccaactcctggagtaggagtagctccagcccccattacagcataaagaaatgtaaacaagaaaactaagtgtggcatccatacatgccataaccttgtggactccatatatagttggaaaaggaattaaaggatttctttctctaaggagtattttttttattaaattgaacattagagttattatcccatatagttgctattgtaatgatccgaagtgtttcttcattatcgattacattcgtttggactgtaagccc

SEQ ID NO: 34362 - DNA, 429 bp, Glycine max
gctttaaaaactaacatctgcaccatacatggaatcatactaattaagtgcaataagaatgaagcaaaaatgaaataccgagtaacacattactgacggtcaatggaaactaacttctacaccatacacacaagtatcccagtatctaaagattaaacgcccctcaaccccaaaaaaagaagaaaatgagcccttttggtacaaaattgaaccagatattaacccatatctcagccccttttaaactggaaaaatatagaactacttaaattcaagtacaatgacaacgccttggaaactgacgcaccaggtggttttcttctctctcgaattatggcttcttttatcattgacagtttttggtgaactttcttccatatatgattcactgcaccatccacaggtattggtccaataccacctggatgg

SEQ ID NO: 34363 - DNA, 393 bp, Glycine max
acgaggatccttgaaaaaaaaaacttttaatattcagttttttttaaacttagtttcttttttctaataataatgtgaatatttgtttttcctatatcactcgtttctttctattttagaataaaattgaagacgtctggttgcctaattaatgtatataatttgtttatagtttttttatccaaataaaaatgataattgaaaaagttcaaaaaaatatttgtttcaagagtttaactcattcatacatgatttcaaataaaaataaattttttaactcatggtttgtgacatgaatttgtgacataaattgagcagcaattctactttaaattatttgttatctaaaccttttgttcatgaagtttattttttgataaaaataaattaagt

SEQ ID NO: 34364 - DNA, 365 bp, Glycine max
ttttttttttttttggaatattaaagaaatttatttataaatctcacttttcacggtatagaatgtatccatcaagttgtgacgcaaactacacaacctatagtacctgttacttcgtttctagtttattagagaagagtatatttagttacaatgacgcaaggagcgcaattgctagtatgcaccaagaagataagcacctaaagaggtggaaacaaaaaaaattaaatactagagtggtgcacaagaaaatacaaaaaggattccctgtagaatcttaggcttaggaaggtactgcagtgccagaaatgcctgaaatattcattactctgaaatctcctcttcctccattagtagtgcctttg

SEQ ID NO: 34365 - DNA, 468 bp, Glycine max
atcttccggcttactgctgaggttcaaagactaaagcttgccacagctgaactaagtggcgattcgcatggttctggctgtttgattcctcaacattctgtcaatcctctgatgttccagcaacagcagcagcctcctactgcatcccaacaaaacattcatcttcaacagcagcaacagcagcagcatcagaatggtaatgccaactcaaattccgacttaaaaacaatagtttgggaaggagttcctgcagctgcatggttggctcactgcagtcagtttcgcatatttacaaaaaggttttccttagttgttatggtctcaagtttgatttgcattattacctgtccagctcagacagaaagtccatatacaagttctaattcctgtcttttatctaaattattatagagcatatttaatttcagtatatatattaaattgtaagcattatttggacatgatttg

SEQ ID NO: 34366 - DNA, 484 bp, Glycine max
tttttttgtagggaccaaaaggttataggccgccataccatccactatatgtatatggcaatccattccaagtgggctattaccaataccaacattcaaagacattatatcccacattgagtaaagacaataactaaacttaaaagtcatgagactgctacccaataaaccagttttatgggatgagttcttctcataaggttgattcacaagtcataacattcaagataacaacaaccaaacttatcacatttacacaatactgattgcaaataagcttattactatgaaataacatcaccatttccaccctttaatagttgggtaagaactaagtcacttttggatcttttttattcaagcactgaaatttagctttgatattaaacaataatttttaaacctctggagctatgataaaatattccagagtacttcaggaaatccagttctcaaatcactcaccatttaaggatcagggacc

SEQ ID NO: 34367 - DNA, 321 bp, Glycine max
catgttcgaacatgaagaagcgaataacataaattattcaatgctaagttgtctccgggagattgggtacaacaaaacatatatatgaactactagcatagtgtactaaagcacaatgcagaatacaaactgaacttaattataatatttataacgctttcacatggaataacgttataaatatcaatgggataggatttttaaactaaatgacttatttaaccatgccttccatccaccattgctcttttgagacaccaactcagattggggtgctgcctttgatgactgcacctgctttttgcacagcacaaaattccc

SEQ ID NO: 34368 - DNA, 275 bp, Glycine max
taagctttttttttttgtcaacagccatgaattatattcaccaaagtgtatagagccttgtcctcaaccaacaaccagtgaattcaggttctagcgaagacggacacaacacctcatgaacattaaaaaaaaaataaagaaaatagtatcttcagttcagtagttaactaaccaaaaaaaaaagtaaacgaagtataataatcccacataaaaatctatgcaacactgatccagaaaatgtctaaataatcccatttcttccactaactatcgca

SEQ ID NO: 34369 - DNA, 213 bp, Glycine max
tttttgattcaccaccatagaaaaccaaatcccttattggctagctaattgtactttacagaaccaaatcccaaactctaacttttgagcctattgccaacactatatgattcaaattcagattttaactctgtctagcacagactttccattaagccggttacttttttgcagttgcatatagtctctatgtttcatcccaacatacgctgc

SEQ ID NO: 34370 - DNA, 393 bp, Glycine max
  unsure (1)..(393): unsure at all n locations
acgaggagagtggaagctggcactgggattacaagatagaaggttctcacattcagctagaattagtagaatcataaaccactaaccactttaaatgtctgctgcgtgaatcatggttcacaactggcattggggttcattacctaaataatttcgattaccaagtgacaggttgaacagaagttaagcctttgtcacttttgggtgttttaattgtaatatgttggtaggtttgtaaaatccgtgtcacttccctcgtgttcttctatttttccattctttacccccttttatttattgggatgatctcatgtaaccaacattgttaaactgagatcaattcaatcaatgaatatggatctatttcgttaaaaaaaaaaaaaaaaaannnnn

SEQ ID NO: 34371 - DNA, 686 bp, Glycine max
  unsure (1)..(686): unsure at all n locations
cagatataactagctcaaatgctcaatatgcaccaagaacaccatatttctttaagcacaataaaagtaatataaccccgccactttgtgactcacagtacattatggacatttctgtagcgtgaaaatgcgcaattattctttcttatatataggcatcaaagataggaactagggatttataatgacatgtattctgcttaatcaactgagctaaatcccttggtcaatgcgcaattactcatttccagttgagactttccctggatgttgttccagttagagacatctatatgagtgttttcatccgcaccaattggttcatatggtgaatcttctgcaaactcaactggcattgacttccagtccagactaggttcccagtctgcttctctgaggactttcaatatctcttttgccactatcttgcttccctcatttgacaaatgaattccatccgtaaagcaaacatctaaccagtcatgcctttgccggagtgcagaccagagatcaatggctttcacattcatctcgcggcatagctccaaacatgcttccgagtatgttcgacaagcttcatttgtccttcttagtggccccaatagatcactgagagtttcatgcatttgcacctcattgatgggaggggaaactacgctttaatttttggcctcnagggcccaant

SEQ ID NO: 34372 - DNA, 191 bp, Glycine max
cggactgtcagcctaacaaagtcaacaaatttatctttcacaaaaatgactgttcacaacatgtcagtgcatacactatttattcatcatgaattacaatatatgataaaattgatgactatcatttataattgtttcacagtataagaatttttacagcaaaagtatacactaacaaatacacatacata

SEQ ID NO: 34373 - DNA, 468 bp, Glycine max
gtaacaaactattgtttttttttttttaccctttcttttctgcattagtttctacaaattggtgatgaagaaaatcaataattagagtttacctaaaactaaaaccatacactctcacaagttaatgatcatgacaagaacaaccattaattattacacacactcaccgagccttcttccgggtcttgaatgggaaattcgagggaggtgatggtgagaactcgaacggcaagtgtggtggctcagcctccccactaagcatccccacaacctccttgatggaaggcctcttcccgggggacctctgcagacacaacaaggcaatggtgatgcagagaagcgcctgctccttatccaaggaatggatagaagtgtcaacaagatccaaaagcctcccattgtgagcaagctgccctggccccaggaaatccaaattgggcccctctcaaaactcagaacattggcctt

SEQ ID NO: 34374 - DNA, 243 bp, Glycine max
tttttttttttttttactccagaaaatcgtttattacattacatagtgccaggcaatatatgatggattgtggtatcaacagatgtgcaaaatagtatttgatcatatagcatagaaacagggttaacaacacaatacttaagacaactctgaaactacattctaaccactgttggagaagaatctggctgacccacagaggaagactttgaagcctccaccatcactggtgcctgttccaac

SEQ ID NO: 34375 - DNA, 663 bp, Glycine max
gcacttaggcgcacagcgtgccattggtaatgattctactacggtgccacaaattcgcaaactgatcctaagtaatcgttgttgttcattagattccggaggaactacttcgttaggattggggaattgctgcgattcttcctgaatagcctggattctcccgtcgagagtcactttgaaagtcttacctaaactcttccgactgaatatgatgaagcctataaaacaacgagctactatcatttcttcattatagattgagatcttcttcgaacttaatgcacaaatagatggaatagcagcaaaaagcatctttctagcttgcgtggaactcaatctcatttagttagaaaggttctatctatctttcagcaactgaccgggaaagtggtttaggaaaggactttcgaatcaatcggatgcgctcgcccagcgagaaaggccctgaccctgccaaccaagtcaaaatcaaaaagaagagaacttcgtattttggtaattctctaggagtcatgtttaaccttgaatgctattaataaattctacagcaatagtccctcggactcggaaagtgataacgaaaatggctaacccaatagcggattccgcagctgccaccgttgaaaccaatgaagcaaatgattgacccatcatatcatccga

SEQ ID NO: 34376 - DNA, 229 bp, Glycine max
ttttttgaataattacaagtaaacgaaagacactaaatggtaaataatttttataaagaaatattttcgttaactctcagttactacgtggtaataaaaggtgaacgcactcaagtttgagtgggtttagcaagggaattatcaatttgaaaactaacaacgtgcacaaaatgcaaatggcgtgaaagtgtgaaattgaccaagttcattttgggggtccaatctttct

SEQ ID NO: 34377 - DNA, 281 bp, Glycine max
ttttttttttttttttttaattttaaactagttgaaatcaaatataaggcagacaactacaatcgtctctactcccatttgcaacagtttttttttatagaggaattaccactctaatgtacaagttcagaaaacaatttctgaatgcgacgaaattgtgccttcacgcttcccattgagtgattctccactctcatcccagctaaaagaaagctcaaagtcttgggctaataagcacattcgaatgtttacaatatactccaagtaaacctggtgccgaa

SEQ ID NO: 34378 - DNA, 541 bp, Glycine max
tttttttctctctcattcaagtgcacaaacatgaagttaagtcttcaccttggagctctcctctttttccttttcttcctagtttcctcatcaaaactatctgccagaccactcaccactgaacaagggagaaacagatcaaaactgaatgaggtctcaggggaggactttgttttggagttggaaggaggtgaatctttgaagctgctgggggtggagggctgcaaaagtggagatgaagaatgtttgcagagaagaatgactatagaagctcacctagactacatctacacccagcaccataagccttgaaatcagaaatcttgtcattttatactccaattagtaatatcttttcaatttagcttagataaatactattaagctaggatgtttcctattgtttttattttctctacaacacttggggctttgcaaaagccttgttgaagtggtattaagggtatcatctgtttgataaagcaactgatgaacatatatatatatataacggaagcttatgaattttaagcttgaattt

SEQ ID NO: 34379 - DNA, 725 bp, Glycine max
tactcatgtacatgttcattttgccttaattagatatagatcctggcatcaaattaacatcatacatacatacacacttacttatcttcatacattactctatgttaacaaataacaattgatccgaagtgtttactaggagtaggaactaagttagttatagttagaagcattagtagtatatatttatgtatgaggagatatcatataccagaggaagttaattcatataaaaggaaaataattaaatttaaattgtataattaaatataaatgattaagatttaatatcatttaattacttaaaaaattatatgaatttttttaaaaagtcatataatttttttgcattaaatttcaatctttgatatatatttaaacgatttaaatttaattatctcaatgttatattagatattttgtattaaaatatctatatatatatatgttaggacttattttatttcattttatttttgcataggggtatatagggtacacggaatctcactatcttcacgcgcgctctatgtttgtgagagatattccgattccttggaatatatcatactaatatatatatatatatatatatatatatatatatatatatatataatataatgtattataatataatatagtgtagtatactattacatttgttttatggcaaaggttagcaacttatatgcatgcttgatatggataaattaatattttac

SEQ ID NO: 34380 - DNA, 748 bp, Glycine max
ccatatatgcacaaaaattagcagcttaaaaagaaaaagggtccagggaaattaatttccgaaaacagagcatcaggtagcagcaaacataatttaagggagaaagaaagggcctgactatttcaaactgggtaaaaaagatgccagtaagttagactaacactggactaataatgttgaacaaaaaacactatagtaggacagcaggcataatacaaaatataccaggtatgtttttcttttatcaagataaatcttacacacggaattagtaaggctaaatatatacacctgttaaatttttaagcatttacaaaggaccctctcatatgctgattattgattaattacatacaattggatttaatcagatcatgttttgtatcctctatttcatttgtacagttaatgacttgtgtaaatcacatgattctagcacaagttaacagttaacattaaatcacttggatctcagatttgatgactgtacaactcacaactttttaccataatgaatgcataaaaaaaaaaattttgatcctgctacttcttgacaaaagttcacaactcatgatggttgattctaaatggctggtgatatactacattttaatttatgaatacaactatgagcaaaaccaaatttaatagttgaagggttgtcagggaaacacatagagcacaaagttatatctttcctaagaagatctaaatttgaaaaggtgttcttaaattgtaaagaaaccta

SEQ ID NO: 34381 - DNA, 384 bp, Glycine max
tagctaaacatgatgtctgacttgatgtattgtcgattttcactcacacctgaacattaagctcacaatttgaacatgcatgcaatgtgagtatatgtatatcacatacataatacatttcttgaaagacattgatcttttatgcatcattaaaacttaaaatatttcgggcagagagagagagattagatcaatcatcaggaaaaccaaggaatctgcttatatgcttggccactggtgtagcatcacctggggagtaaggaaggagagaacttaaatccatgtccgctatagtttgatggagtgtttgaggactagcacaatacagatgttttctatcagcaagctcttcagccagctcactctgatgattatccatctcgt

SEQ ID NO: 34382 - DNA, 529 bp, Glycine max
ttttttttgttttttttttgtgcgcaaagcaaagtgcttatggataaaaaaaagttcttaataataaactactaaaataatggactgtaaaactaggttataaactactaaaataattatcaaacacattagactacggtggatagcacaattctctgcaccactgaattccaattactacaagccctgataaccttcaaatcacaaatccaccacctaagccaaacaaaaccacacccagccagagacaaatacagaaaacgtgaaacccaccttgccactgacgcgtcgaacccgcggtgggaaccagcgagcatcgtcgtcgtcgtttacgaagttcttccatgttcccccgcggtctccaagtggcggtcgtgaagcattctcctttccgccaccaccgtccgagttcgacaccacgtggaggcctttctccgccgagtctttgccgcttcaaacttttccaactcttcctctccgacgcgtcgccgagtcgctgttcatcttcttcctcttataacggactcgt

SEQ ID NO: 34383 - DNA, 273 bp, Glycine max
  unsure (1)..(273): unsure at all n locations
nnnnnnnnnnnnnntttttttttgatatcagaagaaagcgtggggcttttattatttcgaaatgacagtccaaatacttgatgaactaggactgctggttatacatactttgaacatgcgatcttaaagattgtaatgattctaggaaataaaatgagctacttttgggagcttgggatttttattttgttttcatgttattctccactctcttcctctcctgcttaaactttttttgttttgttactattgtaagacatggaatgatttatc

SEQ ID NO: 34384 - DNA, 340 bp, Glycine max
tttatggaaatatgctataactaattaatgattgcatggcaagatcgaaattttatttttctgaagttttaccgggtaggtacgaatgtattattacacaaaagcatcaaggttggatggatgaggttgtctgcagataatggactcatcaaaaatcaaaatagatatcttgataccttaaagcgcaacttcaactaatttacacgacccctgtgaccgtgttcctgaatctcagatcatcaaaacttgttgatgaaatcgtatatgtgattgttgatttcctcggcagcttctagattattgaagtgaactactcctttctgcacaaccacttgtagct

SEQ ID NO: 34385 - DNA, 554 bp, Glycine max
attgggttgcataatcctaaaggaccggggtttactaattaccgtttttgtccttctgtgttcttcttcttcttttgcttctgcctcaagctttggtgcatcatgctctgagttttcattcataaactcacccaccatatataaaagtattccaactaatgcttttcgtctgtttctctttgttgcagcgttggtgatgaaacaatcctccattggttgagagattgcataaaaactgttgttgtttggaatgctctcaggttagatgtctcccttcatgacactgatcttgatagctctcattagctcaggtgtttggcaacgggtggtcatggaattatcttctctccattgcgtgctggttcatctggaaggtgcgcaattccgagatctttgaagacaaatcagtcaacaccagcttagttgtgtcccaagttattaaagattgttctaatcgtgttacgagtgcacgttcttgtgacacaactaagccagctctccaattagtgctgcaaggtgtccagtaatggcatccatatgctcccttggtttca

SEQ ID NO: 34386 - DNA, 397 bp, Glycine max
ccccccccccctccccaaaaaaaaaataaaagaaaatagctacaattgtgatgacgccaatgctctaaactaaattcttatattgaaatgtttccagcacgacaataacaatgctagttctatttagtttaattctcaaacttcatatatctctaaaatcacacacacaacaaaaaatgctgcaacctgcttaccagagcagagttaaagaatccgcttgaccgtttatttggggaaccaaactccaccttattgtccagcatcctctcatagggtgctctgtcttgattacttggagatgactgatggccctattagttgctggaaatttcatacaaatattaattatgtctccctggaggatggtgcaggtgagtaactgtgatcacttgagtct

SEQ ID NO: 34387 - DNA, 451 bp, Glycine max
tttttttttttttttttgatttaattatcaattttataaaattaattctacagaactctaatcgagcactgaaagataccgttgtccataatcaatttctaaattaactttattagctgctgattaagacaaaattcatttaaactaagatttgcctctgaagaacaaaacagatcaattcaataatttctaatatcaattgcacaataaaaagccggaaaaaaaatgaacaaacataattcgggcacagaaaataagaaacagcccatgattttgaacttcgacgatcttcacgtatcaacctattttcatttagttctctgtttccctttcttagcagaggcctttgaagatcctttgccctttggagccttgcccttcgtcttagaacctccttttccagccttacccattccatgtttcctagcatccttcttcattctgcgctcgt

SEQ ID NO: 34388 - DNA, 469 bp, Glycine max
atggcatccatttcacggaagcagcgaacaagattgttgcacatgccattctaaatggttctctttttgatccccctttccctcttcatgaacattgtgatctccaacctattggttgatccaatgcttgcggctagggaggggtctttcttctttaccaattaaactattttgaaatgctcagccatcatattgttaaataatgtttttgatttttggggtgtcactttcatgcttgtgtgtaatagtttgaacaaaaacatggtacttgttggtagcattacaatttgatgaaaaacaaaaatcatatacaagttcaagttaagctttgataaatttctgaaagtgctgaactaattggggttcagagttgtcctatcttcatagaaagattgttatatgttgtaatgttttttatttgagtattcacaaaaaaaaatgttttgatttgagttccaataaaaattcc

SEQ ID NO: 34389 - DNA, 240 bp, Glycine max
gcaagtcgtagtttacctgacaacaccatgaagtaacacagatcagataatgcaagtactgtgacaaaggtcattgtcaaggtgcttgaaccaactttcaaggtttcttctttacatgtaatagatagttttcaattagttggttatttctctgttaaccgttaagctcagttagctgtcagtttatccttgatacatacaatgttaatctcagataaaagaactatctgtttgtgcgtg

SEQ ID NO: 34390 - DNA, 428 bp, Glycine max
acgagactggtcaaacaaacggttctgcggataattctgctggaaaatcaaccaaaccagccccgccagccccaactgctgccttgggtgtaggaatatatgctggtcctaccattggacaacctataggaggacccctcgtatctgcagttggcaccccagtgatgaaccttcctcccccagcacacatggcatatggtctcggagcaccggttcctggggcagttgttcctggagcaccaatgaacttaggtcctgtgccataccctatgccacatacatctgctcgtagatgaagttatgttcagaggcctaatgtacaaaaagaaaacagcagattagaaggcttatgaatttaatgtaattctttacctattcctatagctgcttatgtgcaacagttttatgctccatcaattatttcaaat

SEQ ID NO: 34391 - DNA, 379 bp, Glycine max
  unsure (1)..(379): unsure at all n locations
acaagtacagaatccagagatatatggattcggagatacgtgcaattatggctcagtacatgcctttggataatcaacctgaggtctctaatcaagttcatcacaatatctagaatgatctctacagctaaatggagataaatgataatcatcagcatgctcagtttgctgataaaaaaaaaaaaaatcagcatgctcagtttatattatcatcctcttcctctcgtagggggtttttattttattttttcctttgttagtattatttagctttataaattttaacccaaagtggtcgtgacattattttctacatatatttatgatccttttctcccaaaaaataaaatannagganttgtctaaataaaataaaagg

SEQ ID NO: 34392 - DNA, 532 bp, Glycine max
gtctatccacgcgtccgttaccatggaaaagtacttggtctaggtgaatcaaagattcactggagatatgcagaaaacatgcaaagagaatcctcttcttctggtggtggaagaaaccatcttctgggccctgttgctgtaattgttagtgctcttgtttgggcagtatggttcatagttcaaaaaaacatgagcaagagctatccagctccttacactagcactttctacatgtgtttgatggcaagcattcagtgtgtggtcattgccttggctgctgaacacaatgtctcagcttggtcactccacagtactataagactaacctctgctctttatgcggggactatttctactgcgctagcgtatgtgctccttgcgtggaccattgagaggaaaggtcctctctatgtgtctgtgttctcccctttgctgcttgtcatcattgctgttgctagctgggcttttcttcacgagcaattatacgttggcactgtcatagggtctctgctgatagtgttggggctgtatt

SEQ ID NO: 34393 - DNA, 518 bp, Glycine max
aaaaaaaaaaagaggagaattatagggtttaatataagactaaacttagatccagtatcgtatatatttttttataccgttctccaattaaaattttgagttttattttagtgacagatgctggattttaatgcaattagacttggctaaaaaacacataaccgtgtgtatccgtccgaatccgtctcgactttgatgggtaatatccgagttgatcgggtatgagttcggacctcgggtttcctccaataaccaaaagtcgggtatgggtacggtatgagattattagacccgtctcgaccccgaacccgtcccgtcacttaaaatctttagaatttttgcataatttaatcaaaagacaagtttttttattactagttaattctattttagaatttttacataatttaatattattttcttaactatttttatatacacacgcgctataataaatgtattgatatataagtagttaaaaataaatgtttaacaatcaatttatttttctaaaatca

SEQ ID NO: 34394 - DNA, 175 bp, Glycine max
acgaggtcctttcaccgttgtcctctttgtcaccctcgaacaagtcaggaagctcttcaaggacttttgaattttttattcattcggacaccttctcaccattcactaatcgatattcattctctaattggttgacatacatattcattctttttttttttttttagggattagt

SEQ ID NO: 34395 - DNA, 319 bp, Glycine max
cacgaggatgctccatctagtacgttccttttgattccgtcttgtttgtttggctctccacatctgaaactggatattcgcataaagtcacaccattaaaccttggatgaagattgatggaggctgtgctttcgtttattgctgtatgtactggttatcaaatagtttattccatgcagctcagttgacttttgtcaagaaggttgcagtcattaagtagaaactaaagaacgtttttatgcatgcatatcctacaaatatgaagtatgcttaaactctattattacatatggatttgttcgtgtcttaaaaaaaaaaa

SEQ ID NO: 34396 - DNA, 239 bp, Glycine max
tttttttgctttcccaagtaattggcattaattttattgtataataagttcatgatgagcgtatgcactattaatttcaaattaatagcatcgcaggtatgtacacttctatcaccccaactatttgaatatcaataattattatataaacagaagatacacgtaagaaaacttaaagtccttcaaatacttagaaaacacagacattctacaaactacaaaggtagacaagttatgat

SEQ ID NO: 34397 - DNA, 319 bp, Glycine max
caaagtgcttctctcctctgtctttttctctctcttgctatccttttggctagtggcactgctgcaagtgcaactccaagaagcgcagtgccaagccaccatgtttcaacattcaacagaagcctttttccttccacttttctctttggaattggttcttctgcttaccaggcagaaggagcagcaagtgtagatgggagaggaccaagcatatgggacacctacactagacagcatactgaaaagatttgggatcatagcaccggtgacatgggagctgatttttatcatcgatacaagggtgacatacaaatagcga

SEQ ID NO: 34398 - DNA, 183 bp, Glycine max
gccgcttatcaggttgaacttcacctccttaggcaaagctaccgacaaaagtgtttaagctgcaactacagataaaattttataaattaataatgtctggaccagagaaatttattaatttagagagttataatttatcgataaattaataattattaatttaaaaaaaaaacaaacaagaac

SEQ ID NO: 34399 - DNA, 338 bp, Glycine max
aatctctcctctaactccctcgccggagaaatgcctccttccatcggtgacctaatttcactcaaaaacctttccttagcctccaactcattctccggttccattcctgattctatatctgctttaccaagtttgattcacgtggatctgagctcgaaccagctcaatggaaccattcacaaattcatttcacacatgaagtctcttaagcacttgaatctcgccaacatcaacctccaccgagttgttccttttaacctaagttttattaagcgtttggaggtattcaaggttggtggaaatagtaacctttgctataaccactccgtggtgtcttc

SEQ ID NO: 34400 - DNA, 313 bp, Glycine max
accatgttgtggttaactgccatgatacctgacctaaaacctacccgtgaatcagacatgttaggctgcaactctgctacagcagtccaactagctctgttgttcttttcaatgggattaatttctattggagctggatgcgtcagaccgtgttccatagcctttggagcagatcaactgacaattaaagaaagatctaatgatgagaggctcttggatagctactttaattggtattatacctcaattgcaatatctagcatgattgcattgagtgtaattgtgtacattcaagaaaatctaggatggaaaa

SEQ ID NO: 34401 - DNA, 370 bp, Glycine max
  unsure (1)..(370): unsure at all n locations
actcaatcaatgaaaaagaaaattggttaacggttaacggataaaaccatgaaaaaatgaccgaaaacattaccaaaaatggatagaacataaaattccgtgaggttaaagcaaaagatttgtgttgtgtttgaataggtttaagaaagggttttgccgtggttactgtcaatggcgacngcngngttgtatcgacgccttcttccttgtccccccgccgtcgaatttgcttcttcacaaggcaagaatggaaccatggaaggcttctacaagttggtttcctatttccaaacgcaatccgagcccgccttttgcggcctcgccagcctgtccatggtcctcaatgctcctgccattgatcctggcagaa

SEQ ID NO: 34402 - DNA, 414 bp, Glycine max
  unsure (1)..(414): unsure at all n locations
tgtactttgccaactaaatattatgacatcaatagatacttagatagatagatgcctttatttatctttgttttgaactactatgattactggtactttcttctggcagttgttacttaaaacttttgttgtctttggcaaaagggaacaaagaaagacggcagtttgcctgcactgatcagttcttagagcatgaattcagcatccccgcagtttgtttcctcaagaacgatgagtgtgtacgatccgattcaccagattagtatgtggggagaaggcttcaaaagtaatggaaatttaagtgcagccatgcctctaattgatgagacagacatgaagtttgatagtcagtcagaggatgcntctcatggtatactgggagagcctaaatagtatgacaagaagctaacaaaa

SEQ ID NO: 34403 - DNA, 390 bp, Glycine max
gggtgctcgaagctttttctgagagatattatgatcaggctcaaaatatcctagccaataaggatgctgctcttttgttatcatactcaagtgtaatgcttaatacagatcagcacaattcacaggtcaaaaagaagatgacagaagaggattttatccgaaataataggcgaataaatggtggcaatgatctacctcgacagttcctgtcagaactttaccattcaatttgtaagaatgagatccggacaactcctaagcaaggttctggtttccctgaaatgaccccaagtcggtggatttatctcatgcacaagtcagaaaaatctgctccattcattgtctctgattccacagcataccttgattatgatatgttttctaaaatgt

SEQ ID NO: 34404 - DNA, 401 bp, Glycine max
gaacaacaaacccttctccttctttctcattagtgtgagatgatgatgatgatgaagaagaaggacgcagcatactcctccattctcacacgagtcctcattgccacactactctccctaaccgtgtctgcctcttcactctccgacgccgaagcaatgtacgtcaaacaacgccagcttctctactaccgagacgagttcggcgaccgaggtgagaatgtcatcgttgacccttctcttgctttcgaaaatgaccgtctcagaaacgcttatatagccttgcttccggatcgtgcactcttccacgtcaactccaatagattctgcggcaccgtgccgcacaagttcgagaggtgtgaactggtctacgaactggatctcagttacaacagattcgcagg

SEQ ID NO: 34405 - DNA, 372 bp, Glycine max
gatttaccgaacccttctggttggttgcactgcgggaacagattcatcgtaatccacatgattggagcatatcaggtgatgggtcaaccaatggttcgtatatcttgaaataggtgcaagcatctcctggccaaattcagatttcattaacatggaatatcgattcattgtgggcgggttaatggaccgtttcaacttgtttatatgagtttggctgacgactttttgtaatagtggccagaattcttgcgatggcaatgccgttttttagtgacgttccttcccttcatggagcaattgggtatgggcatctagttgacattaggcccatagaactgcacattgctcaaaatagcattatgaaacgatcat

SEQ ID NO: 34406 - DNA, 180 bp, Glycine max
attcttctcaataaacaattaattataaatacaatcaaatttcaattgtatctctaacatctaattcaccttctacatttctacctccatgcatcactactagggatccgcgtttcaacttcaccatcaatattgattcatcttccatcacgcatttcttcttaccttttcttcttatca

SEQ ID NO: 34407 - DNA, 386 bp, Glycine max
tgccttttgagtgtagctagccccatcttcacgtgatctgctcttaacccttttgttttcttctcctcgtttctatatcctattcctatgtgggcagggtcccccatcttcctccacctgcatctccactatattacaattactactttctctctctttgtaacttgtaagcatggagtcctcaaagatctatgcttacctcttcctttgcatgctcttcctctcctccgccactcccattctcggttgtggctactgtggcaaatcccccaaaaagcacaatcctggtaaaacaccaaagacacccacagtacccgttgttaaaccatcagtcacaatccctcccattgttaagccatcagtcacaatccctcacattgttaatc

SEQ ID NO: 34408 - DNA, 193 bp, Glycine max
gaagtatcgcctccatcactctggggtttggctttttccttctttgaacaacaaaaccccaatctgtttccttagccttcaactcactagggcaaggatcaacaccttctttttactttcatattctctcctctttcattatccatctctacaaagttctttcactcaaacatatccttaagatacctttact

SEQ ID NO: 34409 - DNA, 325 bp, Glycine max
cagagagtgatttcagtgaatgatcggtgttcacctgatcacaccataatcgtcaccgtcaattgaagaagatgccgatcagaagcatcgccgtcggaaggcctgaacaggctactcacccggacacgttgagagcggccttggctgtgttcatctcacccttcatcatcgcgttcgccggctcaggctccgggatcgcctacagcaggctcagtgacaacggcgctgccatcccagccggcctcatcgccgccgccatcgcccatgcattcaccgtcatcgtcgccgtctccagtcggcgccaacatctccggtggccacgtca

SEQ ID NO: 34410 - DNA, 356 bp, Glycine max
aacaatataatttgccaaaatttcaatagaaaacatatgtacctcttttcaagctatgtatagaggtttgtatttgcattagaattattgtttccattacattctctatttcatgctacatggtttattatttttctaagggtttgtgtttggagatttggatgatctcgtagtcaaagaaggcttcatctgaactatatgttcttcattcactcccattttccttgcataacgacctgcttcaaagaaacttctaactgcatcatccatgtaatatttcccttgcttaacagtcatgtccctccctattgtacctgggaaactagtgaggatattatcccctttaatcaacgctg

SEQ ID NO: 34411 - DNA, 383 bp, Glycine max
gaaaaaaaggacggacaaatatctactataacaatcaataacaagtacattagcaagtattcaagccaagtacatcagcgagtaggtagggatccaaaaactcgatccccctccacaagagaaaacatcaaaagtccaaaaaaagagctaatgctcctccaacaagtaacaccactggtttcagaaaccgatttattcagacctctcattttttgctcgagcaagacactaaatcgcagctaaacataaacatacggtaataatgtgaagacaagctactttgaagtaacaccttaaagagacttcttggcaacgaatacaagaagatcaatgacacgtgagctgtatccccactcgttgtcgtaccaagaaacaagcttcac

SEQ ID NO: 34412 - DNA, 346 bp, Glycine max
aattcttcggttattccaaaaggtaatggctttatggctattgcttcttcggatttcaccacgtgcgggatcagggaagatgatcttcttctggattgttggttggtcaacgcttcaaaacccgattttgatcctcctttggaactttcgagccctggactctgtatggctagtgagtgtggggttgatgagtttgctttcaatgtgagtgtgctcaatgagctatctttgacgagcgtgtgtgttagagaggatttgaggatttgttcgccttgtgggtcaaattgttccaatcggttcttcttgtctagtgaatgttctacgaatgctgatagagtttgcactg

SEQ ID NO: 34413 - DNA, 390 bp, Glycine max
gaaaaaatggaacctgaaaaattatatgattccgtcgatttcatattgtcacttcaaagtaaaaatggaggtatacctgcgtgggagccagtaagatctcaaaaatggttggaagatcggcaattcaaagtttagtgtttttcaaaagtctatatccagagtataggaagaaagagatagagaatttcattaacaaagcagtacaattccttgaagatgaacaatcaactgatggttcttggtctggtaagtggggagtttactccacttattcttcctggtttgcacttcgaggtctagctgcagctggcaagacttatacaaattgtgtaacaattcgcaaagctgtaaaatttcaacttccaatacagactgaaaatggtggttggg

SEQ ID NO: 34414 - DNA, 396 bp, Glycine max
gcagacttaacaacagcacaaagcgggttactgtctgttcaagctaccatctctctctctctttcttagtgcctccttgccagaagttaagatggcccaggaaactttcctattcacatctgaatcagtgaacgaggggcaccctgacaagctctgtgaccagatctccgatgctgtgctcgatgcatgcttggagcaggaccctgacagcaaggttgcctgtgaaacctgcaccaagaccaacatggtgatggttttcggagagatcacaaccaatgccaacgtggactatgagaagattgtgcgtgacacatgcaggaacattggttttgtctctgatgatgttggtcttgatgctgacaactgcaaggtcctcgtcaacattgagcagcagag

SEQ ID NO: 34415 - DNA, 322 bp, Glycine max
gggttttcttgtggattttctttcacatgctgccttagttggatttatggcaggcgctgccatcattattggtcttcagcagctcaaagggttgctggggcttagtcactttacctccaaaacagatgtagtatcagtgttggcatctgtttataagtcactacataatcaaattgcccctggacaaaaatggaaccctctgaattttgtcctgggatgttcattcttgattttcattctaattacccgatttattggcagaagaaatagaaagcttttctggttgcctgctatttctcctcttctctcagttatactatca

SEQ ID NO: 34416 - DNA, 355 bp, Glycine max
gttttgtacagggagagaattccaaaatattatcgtaaaataaaactttttttttacaaaaaaaaaaaacgtgtgtgtgtgtgttagtgtgagcggaggcagatcggaagcgggaagttaggagatctgtgatagatggagggagttggggcccggctggggcggtcctcgacccggtacggaccggccacggtgttcagtggaccggtgcggcagtggaagaagaaatggatccacgtgtcaccctcatcagcttcctctaattccagcgctaataagcaggcttcgaatgcctcacatcttcacctctacaattggacccctctcacccagagccagaacaccaccaacaacg

SEQ ID NO: 34417 - DNA, 428 bp, Glycine max
aaccaccactaccttatccatttccactcctcaccaagccacaccatggcctcaaccaacgccctctcttcagcttccattctacgctctcccaaccgccagtctctgaccagaagagcgaaccacaacggaagagtaaattaccgtcaaccgaatagccgtttctccgtcaaagcctccgccaaagagattgcctttgaccagcattcccgctctgctatgcaggccggcattgacaagctcgccgacgccgtcgggctcactcttgggcccagggggaggaatgttgtgttggatgagtttggaagtcctaaagtggttaacgatggtgtcaccattgctcgcgccatcgagcttccagattctatgggaaatggcggtgcagctcttaatagagaagttgctagtaagactaacgactctgccgg

SEQ ID NO: 34418 - DNA, 326 bp, Glycine max
gcaaaagagctagatgttgaaggaaaaaaatactatcaatttgagttcattgctcaggctccgaactatactcgtcatgctctcagcacagtctccattggcaatggtaagttttacaccttgacgacaggagcaaacgaaagaagatgggtgaagatgaaagacaggctgcagacggtcatagaatccttcaaaattttcgacgtttgataatgatcattactattaccaccatattagagatattaaactcttcagcgagaatgttcatttgaattttgagctttatagtatcaagttttacctgtttttttattaaaaaagag

SEQ ID NO: 34419 - DNA, 214 bp, Glycine max
ggaagaagggaattgccgttactaatcaggcctatcccttcataatgacagtaatgtcatgtcacggaggcacacaaaagaactgggttcttcgtcgtctgagtggaccgtgtgtctgagtttgggatcactggcctctgcagcactctgtgccatagcacacaagccattggacgtagaatttggctgaaactacctgccaacatgggccgtt

SEQ ID NO: 34420 - DNA, 366 bp, Glycine max
caaccctgacaagattccttttgttcctatctctggttttgagggagacaacatgattgagaggtccacaaaccttgactggtacaagggtccaactctgcttgatgcacttgaccagattagtgagcccaagaggccctctgacaagcccctcaggcttccccttcaggatgtgtacaagattggaggtattggaactgtgccagtgggacgtgttgagaccggtgtcttgaagcctggaatggtggtgacttttgcaccaactggactgacaactgaagtcaagtctgtggagatgcaccatgaatctcttacagaggcacatcctggtgacaatgtgggattcaatgttaagaatgttgctgt

SEQ ID NO: 34421 - DNA, 334 bp, Glycine max
gagaactaacatcagattttaagatgatagcaagagctttgacaatgacaggacatgccttggttaaaatggcgaaatgctctaacgattaccagtctgctattgagacttatcttaaagcactcactgatcaccgtaaccctgatcctttgatcaacacttaatgaagctgaaatggctaagaccgaactagatcatcaagagtatcttgatccaaagttggctgatgatcagatagaaaaaggaacttaactcatcaaacatcacaactatcctgatgctgtcacccattacgcatgagtctactcgaagtcatccatgtgatcctatggct

SEQ ID NO: 34422 - DNA, 353 bp, Glycine max
gtaatctcagtgggtctagttgtggcaataggcctcacatgtcgaaggatgttagatggaaagccataagacatgctcaaatgcagcatggagtcttgggcttgagacacttcaatcttttgaagaagctaggttgtggagacattgggactgtatatcttgctgaactaattggcaaaaattgtttgtttgctattaaggtgatggacaatgaatttttggcaagaaggaagaagacgcctagggctcaaacagaaagagaaatattgaggatgctggatcatccttttcttccaacactgtatgctcagtttacatcagataatttgtcatgtctggtcatggagtattgt

SEQ ID NO: 34423 - DNA, 351 bp, Glycine max
ctttgaacaatcagccttacagacgtcaaaatgacaaagaatttggagatatcttaaagaagactctaagggaaggtggcaatgtattattacctgttgacactgttggacgagtgttggagcttattctgatgttggaatcgtattgggctgatgaaaacttgaactatcctatatactttcttacatatgttgcatccagcacaattgattatgtgaagagtttccttgagtggatgagtgataccatagcaaagtctttcgaaaaaactcgtgaaaatatatttcttttgaagtatgtcacccttcttattaacaagactgagcttgacaatgctccagatggtccaa

SEQ ID NO: 34424 - DNA, 367 bp, Glycine max
gttgtgttgcctaataataacaagccagacaagtcacagccagttttgccaaccgagaatggtcctgacaccaagtcccagttgccaaaactggtattgaagccttcaaatggttctgtgaagccacctaaccgtaaaaaggaagatcacaaggaactgtcatcgaccattcatgggcagcgtttggaggttgcagttcggtggagaccattgaaacttgtttatgatcatgacattaggcttgcccagatgccggtcaattgccattttagagtactaagggatgtagtaagcaaaagatttccttcgtcaagttctgttctgatcaagtataaggattgtgatggtgatttggttactataacct

SEQ ID NO: 34425 - DNA, 375 bp, Glycine max
  unsure (1)..(375): unsure at all n locations
tccaagaaggaattgttaacaatgccattggaaccggcaagtgaaattgggccggtttcatttagaacaaccttcgggttaggtaaacccccggatctggggtccttaaccccccgccggaacggctgcacatccgggttcccaaaatggcaaccaataccctcaacggttccccccttcccaaaacccatcgtaaccgttgcaaaaaaagtgtgtccttcactggaacattcanagatggccaacacagtatcattctcaaaccacangacaaagatcctgcagtttgtgaaccttcagtacaagagaatttggtgggaagcagggaagcgctacgtaaagcttcgtctgtcaactaaggcattgcagacgata

SEQ ID NO: 34426 - DNA, 308 bp, Glycine max
agtgagtgtgttgtattgtacggtaacagcggtgatactgttcacatcataaggtgttcgtttctgaaatttgtggcacaacaagtgagcgatgcggagagcttcaagggatcagagggataactatgaccgtaaagcacaagaagaaggttggcgagctcgaagtgcgtttaaactccttcagatagacgaggaattcaacctttttgatggactgaatcgtgttgtaaatttatgtactgccccaggtatctggagtcacgttttgagtcgtaaattgtatctcgcaaccaagcatgcacctgatg

SEQ ID NO: 34427 - DNA, 197 bp, Glycine max
tccgaatttaatttatttctgattattttatccagagggtacttttttaatggatatttgtaaatcttccacttaaccactgaaaattattttgttttaatcccacccttccatccatacctctgcctccccaaaaagctcctattaatttgcttatccccctcatgtagctagttgaatgtgaataaataacatgg

SEQ ID NO: 34428 - DNA, 446 bp, Glycine max
gggtcgacgcacgcgtccggtctggaggaggcctgattcagcctggggaatccctgagactctcctgtacagcctctgggttcaccgtcagtcgcggctacatgagttgggtccgccaggctccagggaaggggctggagtggctctcacttatttatcccgctgatggcacatggaactcagactccgtatactacgcagactccgtgaagggccgattcaccatctccagagacaattccaagaacacgttgtatcttcaaatgaacagcctgagagtcgaggacactgccgtgtatttctgtgcgagagccacctattattatgaacaacactggggccagggaaccctggtcagcgtctcctcagcatccccgaccagccccaaggtcttcccgctgagcctctgcagcacccagccagatgggaacgtggtcatcgcctgc

SEQ ID NO: 34429 - DNA, 457 bp, Glycine max
ggtcctaaattaccgggtcgacccacgcgtccgaatttaacctactagacaatgatgtgagtacccaggatgatttcctggggcacagtgggtgaggagatggggacaggtgaatggaggagttaggggagaggaaaagtggatggaagtgtctggaaagggcacgagagagtcttccaggtactgatcctgtttcttgctctgagtgctagctagccagctgtgttcacactgtaaacattcatcaagctgtacatttggtgcacttttctgtgtcataccacaataaaaaaaaacctatcatcttacaaaaacaagacacccaagtccaggcccaaggagtaagtacaaatattcctgtttctgaaccattactgtaattggctcttaaggcttgaagtaaccttataggttactcataaggcatatacaaataaacttgtttgttttctttttt

SEQ ID NO: 34430 - DNA, 397 bp, Glycine max
gatcaatgaaacaaggagaaactaacgtgatataattatataaaattgtacataggaagtgataatgtgaatgtgacacggtaataaaattaggtggaaaaaataaatgagaagtatggatgtaacaaagggtagcaataataataataataatagcagtaggaaagtgaaagggagaattttaaatgtcacggtctggtttgcactcaggggagagttgagggtagcgttttctgtcagtgcagtagttgtagatggtgtatttctggcgcacccatctgaggctacgccactgggaagcgtcgaggtcacggaattctggttggtcccaccagctcttgccctgcgtgtcgcagaacttggcgttcaccgaggcctcgcacccgtcgatgtggaa

SEQ ID NO: 34431 - DNA, 462 bp, Glycine max
gtcctaaattcacgggtcgacccacgcgtccgacgggacctcatcagccatggtcagtatgacagaaggtaacattgatgactcgctcattggtggaaatgcctccgctgaaggccccgagggcgaaggtaccgaaagcacagtaatcactggtgtcgatattgtcatgaaccatcacctgcaggaaacaagtttcacaaaagaagcctacaagaagtacatcaaagattacatgaaatcaatcaaagggaaacttgaagaacagagaccagaaagagtaaaaccttttatgacaggggctgcagaacaaatcaagcacatccttgctaatttcaaaaactaccagttctttattggtgaaaacatgaatccaaatggcatggttgctctattggactaccgtgacgatggtgtgaccccatatatgattttcattaaggatggtttacaaatgggaaaatg

SEQ ID NO: 34432 - DNA, 380 bp, Glycine max
cgcgtccgaatcaccagatatctataatactaactcattataataataagaaataagaagttgcagtggtaaatcatgattttttcaacttcatgacttcgtattttttttctggttatttctagttaaatctatttcactactgacatatgtaccaccagatatctgtagtataaactcattatttcacataaaaataagaatttgagtctgtgaagactgtgctttcaaacatcactgcactccagtgtaagcaacacatcgatgtgctgtctcaaaacaagatagaattagaacgaaaggaatgaacaaacggaataaaggaaataaagaaagaaaggacagaatataatgaagaatgaaagaataacgaaggaaaa

SEQ ID NO: 34433 - DNA, 417 bp, Glycine max
gggtcgacccacgcgtccgaaactgctacgaggaggtcaaggaccgctgcaccctggcagagaagctggggggcagtgccgtcatctccctggagggcaagcctttgtgagccccttctggccccctgcctggagcatctggcagccccacacctgcccttgggggttgcaggctgcccccttcctgccagaccggaggggctggggggatcccagcagggggagggcaatcccttcaccccagttgccaaacagaccccccaccccctggattttccttctccctccatcccttgacggttctggccttcacaaactgcttttgatcttttgattcctcttgggctgaatcagaccaagttccccccaagcatcccagttgtgggggagcctgtattttttttaacagcatcccca

SEQ ID NO: 34434 - DNA, 298 bp, Glycine max
gggtcgacccacgcgtccgagaacacatgcgcattggagcacatgttaccacatcctgaagaatgtcatcaaggagaaatatgggaaagatgccaccaatgtgggggatgaatgcgggtttgctcccaacatcctggataataaagaaggcctggagctgctgaacactgctattgggaaatctggctacactgataatgtggtcatcggcatggacgtaacggactccgagttcttcatgtctgggaagtatgacctgtacttcaagtctccctatgtccacagctagtacatctcg

SEQ ID NO: 34435 - DNA, 436 bp, Glycine max
  unsure (1)..(436): unsure at all n locations
gggtcgacccacgcgtccgaccatctgggaagaggtataagtttgtggccaccgggcatgggaagtatgagaaggtgcttgtggaagggggcccggctccctaggcgtcccatctcgcttcctgggtctgcaggtccagccggctggcaccctccatgtacccaggggagattccagccagacacccgccccccggccctggctaagaagttgcttcctgttgccagcatgacctaccctcgcctctttgatgccatccgctgccacctccttttgctcctggaccctttagcctctctgcccttccactctctgaccaccgcccccgccctccccacccagctccgcttcttgttacttgggggaggaaagaaactcctgatcattggccaaatggacttacccctggagaggccaagtgccttccangaagtta

SEQ ID NO: 34436 - DNA, 434 bp, Glycine max
gcgtccgaatattcagaagtgatgagaacagtataatgaattatatgtactcatcactcggcttcaacagtgatcactacgtgactaatcttgttttatctgtatgcttacatccttctcacccttccccttccctattattttgaagtactagtcactcagaatttcagctataaatacttcaggttgtgtctttaacagacttaaaaaccaagcaagcaaaatgtcattattacacctaataaagctaacggtcatgttttcatattatctaattaatacctagagttcaaataaaatgcctagtatttttggggctgaagatacaacccataaaagtaaagccttggtgttataatacccaagagccaatattctaacgtgaggaaacagacaaatgttagtaaaatacgaacacgataatttctgctaac

SEQ ID NO: 34437 - DNA, 424 bp, Glycine max
ggtgaacttgcgacagggtctggctgcacattggaatcacctgagaagctttaaaatactcatgcctggatcccatccctagagactggggtacagcctagttattgggaatttctttaaaagagttcctgggattctgataagaagccaggttgagaaccactacattagaagactgaatggtttaatttacatcctatgttatgattggtctaagggataagatttggggtctaacctttcctttcactctagttagtcatagtccttgacttatgcctatatctttgtaagaaatagtatgtttcatttgtgatagtattggtagggctgaatatggatggcatctactgttaaacaagtctaccttgtcagatgtgcaaaagctttcactcttgttctcaaataaaactttgtgggtttt

SEQ ID NO: 34438 - DNA, 299 bp, Glycine max
aagtaacaaagcacaacctaagaaatattttaagaatcgggaatgaaattccaaaagtaacaaaccacagcatccctgactaaaagataaccccaaattcgcccaaaatggatgggaaaaagaagaaatggacacccaataaattcaaacgaaaggatctaagggggaaaatgaatcaaggaccatgaaaaattgcacgaaactgaaacccacttttccatcaggcgcaccataggacctcaaaaacacccaacagccacatgacactccgaaaaaataaccaattacggcggcttgca

SEQ ID NO: 34439 - DNA, 424 bp, Glycine max
ccacgcgtccggtcctagaaaccacgaccaattgagcagttcctccgaggcaccagggactccaacccatgccatggcggattctgagcgcctctcggctcctggctgctgggccgcctgcaccagcttctcgcgcactcgaaagggaatcctcctgtttgctgagattatattatgcctggtgatcctgatctgcttcagtgcctcgacaccaggctagtcctccctgtcagtgattgagatgatccttgctgctaatttcattgttgtctacatgtgtgacctgcacaccaacatagcattcatcaactggccctggagtgatttcttccgaaccctcagagcggcaatcctctacctgatcatctccattgttgtccttgttgagagaggaaacactccaaaatcgtctcatgggtactgg

SEQ ID NO: 34440 - DNA, 262 bp, Glycine max
ccttcctcaagtcaatgatcacatcaaaaaattacaagagagatttaatggaagaaaggtaatgttaggtgttgatcgccttgatatgattaaaggaatccctcaaaaaattctagcatttgaaaaatttttggaagaaaatcctggttggcattataaaattgttctgcttcaaattgccgtgccgacaagaacaaatgttcctgagtatcaaaagcttactaaccaggtccatgaaattgtttggcgcatcaaatggaaa

SEQ ID NO: 34441 - DNA, 368 bp, Glycine max
ctgagcctcactctcagtctcactctcgtgaaaagtgaaccaagtccccacccatggaagcctggttcataatcctagtcactctttgtgtctgcgtgctgataagagccatactattctctcttcacaagaaaaccataaccatccctccaggccctcctcacatcccaatcatctcaagcattctatggctccgaaaatccatatctgaactcgaagcagttgtgaaaacactccacgccaaatatggccccatcatcactctccgcattggcactgagcccaccatattcattgccgattactccctcgctcaccaagccctaatccaacacggttccctcatcgccatacgccctaacgatggc

SEQ ID NO: 34442 - DNA, 415 bp, Glycine max
  unsure (1)..(415): unsure at all n locations
gaagaagaagaaatggaggaggaggaacttgaagctggtattcagtctgttgatagtttgtctagcactcccactggagtggagacacctgatgttattgaccttcgtaagcagcagaggaaggaacctgaaaagcctctttatcaagtacttgaagagaaggaggaaaaaattgctccaggaactttgcttggaactacacacacttatgtggttaacactggcacccaggacaagtcaggggctaaaagggttgatttacttagaggacaaaagtcagataaagtggatgtcactttactgccagaagagttggatgccatgggaaatgttttaaccgcgaagtatgaagaagcaagggaagaagagagttacganatcagcgtgaggatttcagtgacatggtggcagagaa

SEQ ID NO: 34443 - DNA, 388 bp, Glycine max
gtttctcaacaatgtttttctcacacagagagaacacagtgagtggtcttgggagattggtgctaatcatatggctttttgtggtgttaattatcaattcaagctacacagctagtttaacatccatcctcacagtgcagcaactgtcatcacaaattgaaggcattgacagcttgatatcaggtactcaaccaattggaattcaagaagggtcatttgcacgcaagtatttgacagatgaactcaatatacaaccatcaaggatagttacgttgagaaatatggaggcatatattgatgccctcgagaaaaggacaaaagatggaagggttgtggccgttgttgatgagcttccttatattgaaatattaatgtcaagtaccaactg

SEQ ID NO: 34444 - DNA, 396 bp, Glycine max
actatacacatcactcttgtccgtgagcctgtagaattggggttgtgcgcatggagctgagatcatccatgccagcagttgatgcagccagggaaagagatcaagttaacttggcaagtttttgcactaaaaagattcaaaaaggaaagcttagtgagcttgtagacccatcccttgggtttgagtcagaccaacaagtttaaaggatgctaacttcagtggcaggattgggctttcggtgtgtgctacgagacaatggattaaagccgtctatggatgaagttctggaagcactcacgagaattcaaagtgggaaatatgaatctgagaatctacagaaaggagatgatgttggtggtggtggtgttacctcttccacttcctccaccgaacaag

SEQ ID NO: 34445 - DNA, 327 bp, Glycine max
aaaggtgcagttcgagtggttgtgattctcggggtggcagaggcagttattgtgagcagtgtcttcattagttgccgacatgtattaggatacgcgtacagcaatgataaggaggtaatcgattacgttgcagagatggctccactcttgtgtgtgtctgttactgccgatagtctaattggagcactatcatggattgcgagagggggaggattccaggaaataggggcctatgtgaacctgggaacctattatcttgtgggaattccaatgggtttggtaatgggttttcaaccgcaactaagaaccaagggccttttgatggga

SEQ ID NO: 34446 - DNA, 291 bp, Glycine max
acagcttccaacaaattactaaggagagttatgcaagatccattgcggattacgtacacaatttccagtcgaaaggtgacgctgtaacctcaaatgtcgacactcatcaaccaggtttcagccgtagtatcagctacatcgtcatcatgggctgatcctgccttgttgtagcagttacgacttcctacactggtagccacggtcacacttgctgtcactttgtaggtcctgatattttcactgccatagcaacttgaggatcttgcgccctcttcccacaactgtgatgtc

SEQ ID NO: 34447 - DNA, 401 bp, Glycine max
ccgatctcatctccgacatcgtggtacggtacgagggatcgttgccggatttgttcagggaagggcactccgtcgttgtggaagggctcgtgaaaccgttcacggacgagatcaggaaggaggtgtcggcgaagaacgtttccgagaaggcgaggaagatagagtgctatttttcggccacggaggttctcgccaagcatgatgagaagtatatgcctaaggaagttgctgctgctattgagaagaataagaagattattgaggatgctgccactgccaccgccaccgccaccgtggccatggagggaccaaagacaccatagatcgatggtcgtggacgtggtataagcttagctgttcatgctcaaatataccacttctgaattttaggcaacaattta

SEQ ID NO: 34448 - DNA, 302 bp, Glycine max
ccaaactggggagagagcttttgcagcaaaagggtcttgttcaaagcttttggttttcagtttgaaagcataaaaatgattcttttagatttctaatagcacatgtcatggatctggaccgtgggattgttcagaactctgataagaggaaagaatcatggaaaacggtgttaactctggcatatcagagtcttggagtagtgtatggagagattagcacttcaccactctacgtgtacaggaacacatttgctgaagacattggtcactcagagaacaatgaagagatttatggtgttttg

SEQ ID NO: 34449 - DNA, 367 bp, Glycine max
  unsure (1)..(367): unsure at all n locations
gccagctgccaactgttccagcttctgctcttgtatctcttcaacccaacactacaaattctgggtttaactccggcagttcaactgtccctcagaggaacctggttccatcatcaaggactacaacctcagggaagtcaaaacagcatgacaatgatttggatgttgacccttggacgcttttagaagatggtgctggatcntgtccgtctgcaagtaatactgatatcatangaagtggtgaccgtgttaatattcgagctgccagctggcttaaaggggctgtaagggtgcgacgaactgaccttacatatgttggtgccgtggatgaggataattgattaacaagattttttactggtttgga

SEQ ID NO: 34450 - DNA, 360 bp, Glycine max
  unsure (1)..(360): unsure at all n locations
cttagacaagatgtggagtactttgatttgcatatatgtaacgagcacctcagagatcatcactagcgtctccagcgacagcctcgtaattcaagatgttcttagtgaaaagtatgcattttacttcctggtggtgggggctgctatatgggcttcttcatgggcagagatttcgtgttggatatggagcggggatcggcaatcaaccacgatgagaatcaagtatctagaggctgtattgaaccaggacattcaattcttcgacaccgaggttcggacatccgacatagttcttgtcatcaacagcgatgctatcatggtccacgatgccattantgagaagttggggaatttcattca

SEQ ID NO: 34451 - DNA, 347 bp, Glycine max
gacaataataagcccggtagaataaaagcaaatttagctatatgaggcgccatcttgtacaagaaatatcgtgaagactaaaattaccaactttctttaacttgcaatgttggcatatgaattatgaggtatgattgctagtatataccgaattctgaagctgggtaagtatcctaaggtgcaaaatcaggtaatcttagctctgagacaaagtatggagttccttgagaaatgcaacaacttcatctggtgaagcaagcgtataccgagcattggtctgtgttcgtccaacagcgcacgagaagtaattctccttcttgaggtcaagcacattccaagagatcttt

SEQ ID NO: 34452 - DNA, 394 bp, Glycine max
ttaaatagtccaatgttgacaaatttgtgtcaatactgttattatgttatggcctaaataagagaaatagaagaagatactaacaaaactatacacggttacttaggtgggtgaactagattggccatctaagctcaagttgcgtctccttttcttactcttctgcctaagtatctctttgagttccttttctttcttatccacaaaataaatgaagtccctgaagctagtagtgcttctgaaaagccttttacctttagtaggcctatttggtgaagtttcctcgtcgtcatgctcgggttctgggctgaattttgtgtagtgacatagcactctaatggagaatgcaaccatagcaaggagacatgcaatgccacatataagaaagagaccc

SEQ ID NO: 34453 - DNA, 356 bp, Glycine max
aaagattgttgaattaatacaaaaggggaaagttactacatataaggagagcattgaagctatagacgatgagaaaaagtcagtaacattcaacatcttcgatggagacgttggtgaggattacaagaattttaagctccacttgcatttgattgataaggaggaaggtggtgctatcactgtatggactattgaatatgagaagctgaatgaagatactaaacctccatatcgcttcttggacattatcaaccttgctactaaagatattgatgcccatgctctgaaggcgtagcaacaataatgcaatatagtaaataacttaaacaaataaaaaagaatgtgttcagcatgaa

SEQ ID NO: 34454 - DNA, 381 bp, Glycine max
cgagataaagcaataaaagtttattgatacatttaacggaaaactttcaacttccccagtattaaaccctcacaaatgacataaagcacaacacacagcataaacacatacatggaacaacatacagtaaagacagaacagaacacacttgtttggaatgagagacagcaacaaccaattaaagatctaggcagatatttgaattgacttgacttgaggtttcttgtcttcctccttgggcacagtaacagttagcactccattctccatagcagccttgacctgatccattttggcattctcgggaagcctgaacctcctcatgaacttcccagtgcttctttcaacgcggtgccacctatcatctttctgttcttgttc

SEQ ID NO: 34455 - DNA, 385 bp, Glycine max
atggtaagcggtaaatatatgttatttttttttcatatatagaaatgttagaagtaagaagttgctatgcaatttaacgaatgactttaatatactctgaagttgcaattaacaaagtttcttaactttaatatactctgaagtctcccctgttccacaatgttgccagcttgagaaagagcttcctggctcttgccagagagcttagccaaggtgacagtgtgaatgcctccaatcacagctatcatagggacaacagcaagagtcaccaaagccaattgccacacagcagtgaaacccacaacaaagccagaaacaaaggtggccatgtagtgaatgaaattccccaacttctcactaatggcatcctggaccatgatagcat

SEQ ID NO: 34456 - DNA, 398 bp, Glycine max
acaaaaccggttccatggactgatagtaggcatattaagggtctcagaaggcgaaagcagcaactcatgtatcgaaggcaaaacctggagagtacatacattacgcctcacagaaggcgaaggaaacgaaggacaagacaatggaagacgctggagagtacactgattaagcgtctcagaaggctaacgaaacgaaggacaatacaatggtcaacgctagtgaatatacagattatgcttcgcactcacgcgaacagaagccaaggacatgacaatggggaagggacgggaatataaagactatactgcatcaaaggctaactaaggaaaagatgcaactgcgaataagatgggagagtctaaagattatacggcggataaagcttaatgggggaaag

SEQ ID NO: 34457 - DNA, 272 bp, Glycine max
aattcgggtcaaccttgaaaaacccaaacttctggacaaaacctgctaaggctgtaagaaaagcatatactagaactgattctacattttagaaaatcaggctaaattgcgttcacggggttcaactgcggttacaacaagattgatcaactgttacaagctatcagtagccaatactggggattcccgggctgtcgtatgtaaaaatggcgtaaccaaacaactatcggtgggttatgagccaagcatacaaagtgaagatttaaaaaaca

SEQ ID NO: 34458 - DNA, 354 bp, Glycine max
aagagataaatatattccaaaagaacttctctggccttacattcctgaatttgttgatggagcgcttaaccacattatacagatgtccaagtctcttggggaacagattggcagtgggcatgctgtctggcctgttgccatccacggacattatgcagatgcaggtgactctgctgctcttctgtctggcgcattaaatgttccaatgctttttactggccactcacttggccgagataagttggaacaacttttaaagcaaggtagactatcacaggatgaaataaacacaacttacaagattatgcgtaggattgaagctgaggaattgggccttgatggttctgaaatagt

SEQ ID NO: 34459 - DNA, 291 bp, Glycine max
gacacgaaccttttatctgcgccagactctgcaaatcatcgacgcatctagaatgtttctctcatctcctgcgctggaagcacacgccgttcggctatcacaaggagttccatcagtatttctcacccggaaaattgctatggcaaaggcatctaggccaaacggaccatcgagcagccaaaggcattggtgatagcgtctcagttacgtggctccagtctactatgatcgtcctgcctacctcagtggagaattccacgctaaatgtcagtatgacactgccactcaatg

SEQ ID NO: 34460 - DNA, 356 bp, Glycine max
atattttttctcttaacattatcacaataatgtctacatattttgagttatccaggcacgtttaagttgattcttcaatttactgaggattatccaaacaagccaccaactgtacgatttgtctctcgaatgtttcacccaaacagtaagttttaggtggaaaagattaatcttcatgtccataaattacctatgtagctactaatgccatttttctactctgggaagtttatgcggatggaagtatttgtttggatatattacaaaaccagtggagtcctatatatgatgtagctgctatactcacttctatccaggtattatcttgtatagtatagtctacaattctacatttc

SEQ ID NO: 34461 - DNA, 350 bp, Glycine max
gaggtataatcataatttaataaataaaaatcaataataatgaatggggtcattttgtcaagaagctgaagtcacagcttctacaacatcatctgactcgtcaaccatcatttcatttctgaaaagcaatttcaaatatggaagagccttgggaagcacggacaaatcacctacattgacactcatcatgtcaaatgcaatacatgttttatgcatgtgtgtttcatcgaatacaggaattttaggatatctttggctgaaatgagtcagtatggttcgatatgcattggcagactgtcccatttctatggcttcatttgtggtgctgtgatttcttgctatagcctcct

SEQ ID NO: 34462 - DNA, 301 bp, Glycine max
ttaatctccttcgagataaagctctgctcgattaaaaatttcaattgtacaagccatgaatgacatgatcagaacatactttgtgatgggaaaacgatgattaattagttaagaggattctaggatgagattagtagcttcggctgcagagagtgtatgattgtgctctccttcataggtgactaccaacatagatggatcatccagagccctctctacgtgtttgcgcgctggacaccctctaacacggctgcacttgtaataaccccttggatggggggatcctttaatgggtttcggt

SEQ ID NO: 34463 - DNA, 172 bp, Glycine max
  unsure (1)..(172): unsure at all n locations
tttttcgggacctatttactcgagaaggttatgaatttgattatgtatttgattggactactttaaagtacaagcatgcacaaaagaatacagttcagcctcacatatctacggtccctggaacaagtancagtcctgcaatgccaatggatgtggacaaccatccanggga

SEQ ID NO: 34464 - DNA, 205 bp, Glycine max
cattgccatggatccatataagatccggccaccgagcgccttcaattcacccttctgggctacaaattctgatgctcctgtatgatacaacatctcctctttacgcgttggagctagaggtccaattcagcataaggattatcatcttgtagcgaaacttgcaaactttgacagggaacgtacaccagcacgtgttgtccaggtc

SEQ ID NO: 34465 - DNA, 319 bp, Glycine max
accaagaaattaggcaaaaaggccaccgaacatgtattataaattgaaaaaaaacgaaaacaattacaaacccaaaacgagtttttttcttttttggtgttgttgttgttacaaaccccaccaaatttgaaaagtggaacacaataatgaaacaatatattaggcatcccaaatggccaaactgcacaaaacaacagtttcaatgggaagtccaggtccaaaaccgaacaacacaccccattcaagtccatcacctggggttttaagcccattttcagcaaatttccacctcaactcaaccaagatgaaaagaacacaa

SEQ ID NO: 34466 - DNA, 352 bp, Glycine max
actgaaattcttgatcaacctatagaatgaattgcaacaattattaattattatttatacttgatgaactttacaagtccatttatcctctcaccactctcctacctgcacttcctaggattcctttttaacttcatttagaagaaacaccattattagagaataattaaacttaaaaactctaagattcaagaaatcctttattctccaagtaagtaactacttgtccagccatcatagtaggtgttggacaattcccattttcctgctttatttcaatctcacaatttatgggcggttcataaggatcatcaatgccggtaaaacctttgattttccctgcacgagcaag

SEQ ID NO: 34467 - DNA, 306 bp, Glycine max
  unsure (1)..(306): unsure at all n locations
tagtataattaattaataatgataaataaatatatcaaacaagctgcactcaactgaatttatgaatattcctaatctaaaaatctgtaaatccccgaaaccaaaaatttcctctaaatctaattaacgacaacatttggagcacaggatcaagaaaacaatgagaaagacaatggaagacagcgcaatggcgacgccgagaacaaacttgttaggcccatgatgatgctccttcttgtgcctactcncctctccatcaccctcgtcgtaatcatcgtcgctgctatcatcggcagaagaatcctt

SEQ ID NO: 34468 - DNA, 400 bp, Glycine max
  unsure (1)..(400): unsure at all n locations
tttacaaaatctgaaccacatatatattgcaggattccatttatgtttgacactcaatcaattctaggggcttcaaaaacccaccaaagtgtgccaaagtggttcattttattcaacanaggaagacaataatggccagaaaacacaacaacatggaaccacanagcagtacactgcacactatatagtaactctgccacaagtacacacacacaaacacaaaggagtatgtcaagcatcatcatgtcctaaaagcgccacaagcattttctcatagtcaccggtggtgtccttaacaatagcacgttcaagagggacactgctcctcctttgatactcatctgctatgtttttcaaatcaacctcagcccttgtggccaccactcttgtaagggctcct

SEQ ID NO: 34469 - DNA, 331 bp, Glycine max
aaaatcagaaacgaataatttttattcagcagttaccataagcgttttgttcgttcctctgtcagcaaattgaaaaaacaagaaagccatgtacaataacaaacacaaattaaataactgtctatgtgggaacaacctggggttctagaggtgaagacccaccaccttcctcaggcgtatctacggtgctttccacgaccttttcctcttcctctataaaaccctgcttaaatctatcataattggtgagttcagtagccttgaacggccgctcgcccaaaactcgaagcaagtcgtcctggtgaagtacttccttttcaagcagcaactc

SEQ ID NO: 34470 - DNA, 343 bp, Glycine max
caagacaggactcagacgattacatttaattccaaatcagatatgaacatttttgcctccttacttcttgatgaatgtggaattggaattccccgaagaattccgatcacatttcctttggcttcaggataagcctaataataaatcatataattccaattcatatatgaaaatttttgcctccatatttcatgaaaatgtgcaattgggattccccgaggaactcagatctcagttcctttggcttcaggatacgcctaataataacacaaataattccaattcatatatgaacatttttgactccttatctcttgaaaatgtgcaattggaattccacgat

SEQ ID NO: 34471 - DNA, 342 bp, Glycine max
ggcaaatgtgaagacacttaatattaatagaaaatttatttcagtgatacagattacatagtgccacccatcatttcactttttcaaccattgttactatggataaaccgcgattagagacttaaaacctagaactggagttatcttgtagctattgaaacctgcagacaaaaacaatttagcccagtctttctcatttctctctttcccagtgactaacaccatcatctcaatatcatagaagagctttgtttgatctaattcactgtctcctttctcgtttcctatcagcacgtctatgataatcacctttcctttagccttgtttgcgaatggctcctt

SEQ ID NO: 34472 - DNA, 375 bp, Glycine max
atatttatgttcgacatatgtagtagacgccgagtcatgagcttgcagatgagggtctcacatcttgcgccggtatcatgcatgcgtcaacactcacattgatacaagaactaaggataaacaccaacacatcattcatgcaatgtcataatttgcttaagcatcaggtgtcctatattcacaagcaaaatacagaattcagcattaaagaccggtcctaaccaaacgggttcaaatgggtgctaatttattccagaaatctaaagcaagtttccaacatcagtgtaatagtttaggcttgaataccaatgataccacaagctactctgccatcaacatttccagtaattttgcgaaactcaagaccacctttcc

SEQ ID NO: 34473 - DNA, 391 bp, Glycine max
  unsure (1)..(391): unsure at all n locations
atcacctttaatctacttggacatatcacatatataaacccaagtacgaacacaagcacaaatgaacatagtagatctagcaccaagtgaaaaagggaacagaggaataaaggtacaaattatcaacattgttatttagccatcattttttttttaacttcattcataatataagtacattgcataatttttttaccgatgttgggtacttaagtagtcacgtccaaacagcagactcaattttattaagaataagaattggctggcgcaaatttcagcgaaatgctattgacacaatggcgttcgttagtgggtgttggaaatccttctcctttaaagacgtgacctagatgtccccacangcagcacacgttatttctgtcctcatccc

SEQ ID NO: 34474 - DNA, 387 bp, Glycine max
  unsure (1)..(387): unsure at all n locations
agccaaagatataattttattcgaaaaagagatgagaagatgagcccaaagagtgggtcatacaaatgcattaatttgatttgatcgttcctactacaagctagaattgtaatcagaatgggaaagcacccactgaaagacacatcatctcccaaatctacatcttaatattcttttgcccacttcttcataatcatatatccacatattccaccaacacgcacaagggcttcccgttcaaacgttcacgacccttcaattctggtaattcaattacacatgcacactccactacttctgctcncacacgttctaaatgacagcaagcaagcaaagacatcaatataatcaaaatccanaaatgacataaacaggggggtaataaag

SEQ ID NO: 34475 - DNA, 378 bp, Glycine max
  unsure (1)..(378): unsure at all n locations
acacttccttagttcaatatggggaagcncttcactctctctcctttcttccctttgcttgcaacccttgtcaattgcatgcttggcaataactccaaccagcccaaccaattgcaaatcaacaacctccaagccttgggaacccaacaacggctttaattccaaaggtggttggatcaaacctgggactcccaacaacctgaactcaaatgcgccggtgtgacaggttccaaactcacactcacaagcgaaggggtctacatgtgataccacacacattatacccgggggatcttcacagcccacagggaaagggcacatggggttgcaaatcccggatgtcctgagacatttgtggagccacaagaacaatcaaac

SEQ ID NO: 34476 - DNA, 346 bp, Glycine max
ggtccactctaaaggatacctcggggaattccaattccacattttcaagaaataaggaggcaaaaatgttcatatatgaattggaattatttgttttcttattaggcctatcctgaagccaaaggaaatgagatcggaattcctcggggaattccaattccacattttcaagaaataaggaggcaaaaatgtccaagcataaattggaataattggtttcctaataaggccaacctcagacccaacggaattgatatgggaattccgcggagaattccatccccatatttacaagacataggggggcaaaggtgttcatatagcatttggatatatttgttttcat

SEQ ID NO: 34477 - DNA, 325 bp, Glycine max
tccaaaacaaaatgaacaagttcaaaatcctcctcatctctcctctcttctgcatcgcccaaaattgcaacgcctccaaatgggagcaccaacaagatagctgccgcaagcagctccaaggggtgaacctcacgccctgcgagaagcacatcatggagaagatccaaggccgcggcgatgacgatgatgatgatgacgacgacaatcacattcttaggagcattcggggaagaatcaactacatgacgaggaacgaaggacaagacgaacaccaagaacaagaaggacacatgcagaacatcttcacaaaaatgaactaactcac

SEQ ID NO: 34478 - DNA, 327 bp, Glycine max
  unsure (1)..(327): unsure at all n locations
gagaaacaaagaaaggaaataattgatctttgaaaatgcatggaggaaagaaagctggagagtccatcaaggaaacagctgcaaacattggtgcttatatgcttttcatttgctgttactaattacagatatgcaatttggaatttactcaaaacattttgttttaggaatgtgtacgagctttcataacagaaagcacagatggagatattcttgaactacatattcaggatccttttcatagattgttactgcatggagtttgtgaggtaatataacatatgcttctccctgtgtnaatggtgaaaactcgatgtgctattaact

SEQ ID NO: 34479 - DNA, 398 bp, Glycine max
ggcacgaggtaccatgttgacaattgcggcgtgtgcaaaaaagctgttataatggttaatgattgtgatgtctggaaatgcagcaatcaaagtgagtgattgcgccacactggtacaagtcattttaacatgcagcaacagtacagagcattttgatgcatgtaaatggacacaatcggtcccagattcctgggaattgatcgtcccacatagagggacgtggtcccaataatggttttgaaacgtggagttctgagtgggcagatcaaacttcatggcatttgagtttccttagtgacaatcccagacagtcgacagtttttgatatgctcatgggaatttctcaggattttgaaattgctggtaatactcttatgcgagctttttctgttccacaa

SEQ ID NO: 34480 - DNA, 407 bp, Glycine max
cagtctactctagacgatcccctcggggaattctagttccacattttcaagaaataaggaggcaatcatgttcatatatgaattggaatgatttgttttcatatcaggcctatcctgaaaccaaaggaaatgagatcggaattcctcggggaattccaattccacatttgcaagaaataaggaagcagaattgttcatagaggacttgcaattacttgttttcttataaggcctatcctgaagccaaaggaaatgagatcggaattcctcggggaattctaattccagattttcacgaaatatcgaagcaatcatgttcacatatcaacttggattagttgttttcttatgatgcctatcctgaagccatacgacatgagatccgaattcctcggggggtacaagct

SEQ ID NO: 34481 - DNA, 358 bp, Glycine max
cttgatccttctttttctccttgaactcaaacatggcagatgaggtggttctgctagatttctggccaagtccatttgggatgagggtcaggattgcacttgctgaaaagggtatcaaatatgagtacaaagaagaggacttgaggaacaagagtcctcttctcctccaaatgaacccggttcacaagaagattccggttctcatccacaatggcaaacccatttgtgaatccctcattgctgttcagtacattgaggaggtttggaatgacagaaatcccttgttgccttctgacccttaccagagagctcaggctagattctgggctgattatgttgataagaagatatatgatct

SEQ ID NO: 34482 - DNA, 326 bp, Glycine max
ctcacttttgatggcaaggaatagaagatggtcaaacattgcttgaaaacattattcatagtgaagttacctttcatggtgtcaataaaattcatcttgcggggttctcgaaatcccttttacaatttgttctcagttaccttaaccaaatgtacattgttcaacttaatccttcttctttaaggatctgagcaaactgaatccggtgagtaaattctacacttgcatcccgaattcattcaatacatggggatctatctggaaagactggaagggctttcaaggatgagattcacaaataaattgcgaaatggcacgagacccct

SEQ ID NO: 34483 - DNA, 164 bp, Glycine max
gcataatgaccaagttcacaatcctcctcatctctcttctcttctgcatcccccacacttgcagcgcctccaaatggcactatcatcattatatctgccgtacgcatgtccaagggttcaatctcacgccttgtcatatgtctatcatgttgcatatccaaggc

SEQ ID NO: 34484 - DNA, 390 bp, Glycine max
gtcaactctaaaggatcccctcggggaattccaattccacattttcaagaaataaggaggcaaaaatgttcatatatgaattggaattatttgttttcttattaggcctatcctgaagccaaaggaaatgagatcggaattcctcggggaattccaattccacattttcaagaaataaggaggcaaaaatgttcatatatgaattggcattatttgttttcttattaggcctatcctgaagccaaaggaaatgacatctgaattcctcggggaattccaattccagattttcacgaagtaaggacgcaaaaatgttcatatacgaattggcattaattgttttcttaggaggccgatcctgaatccagcggacatgacatgggaattcct

SEQ ID NO: 34485 - DNA, 332 bp, Glycine max
cactctagatgatcaccttcggggaattctaattctacaatttcaatgaattacggtggaaacattttcacatatgaaattggaataatttgctttctaataaggccaatcctaaagccaatggaaataagattgggaattcctcggggaatatcaattcaaaattttcattatgtaaggtggcatcattgttataatatgaaatggaattacttgttttcatagtacgccaatcctgaatccacatgacatgagatctgaattcatcggggaattccaattccacattttcaagaaataaggatgcacaaatgttcacatatgaattggga

SEQ ID NO: 34486 - DNA, 382 bp, Glycine max
atctaacccaggcgttttctgggttgcaaaggattaccaatttcatacagcatatcattcaattgggttggaaattcaataagagagggaagccaataatcatagatccggggctttatagccttaatagatcagcaatttggtgggttattaagcaaaggagtcttccaacatcttttaagctctacacaggttcagcttggacaatactatcaagatcttttgcagaatattgcatagtggggtgggaaaatttgccaatgaccctcctcctctactacaccaactttgtgtcatccccagaaggatatttccaaacagttatatgcaactctgaagactacaatgacacaactgttaaacatgatcttcactacattac

SEQ ID NO: 34487 - DNA, 285 bp, Glycine max
ctttccttagttcaatatggggaagcccttcttcactctctctctttcttccctttgcttgctactcctgtcgagtgcatgctttgctaatacctccaaccaggttcaacgattgccaattcaacaacctcaacgcgttggaacccgacaaccgcgttgagtccgaaggtggccttattgaaacatggaactctcaacaccctgagctgcaatgcgccggtgtcactgtttccaaacgcaccctcaaccgcaacggcctccacttgccattacacaccttttccc

SEQ ID NO: 34488 - DNA, 342 bp, Glycine max
  unsure (1)..(342): unsure at all n locations
ctagtataccttaataaataatttaagatactatgatgagagcacggttcccattactgttgctgggacttgttttcctggcttcagtttctgtctcatttggcattgcttactgggaaaaagagaaccccaaacacaacaagtgtctccagagttgcaatagcgagagagactcgtacaggaaccaagcatgccacgctcgttgcaacctccttaaggtggagaaagaagaatgtgaagaaggtgaaattccacgaccacgaccacgaccacaacacccggagagggaacctcagcaacccggtgagaaggangaagacgaagatgagcaaccacgtccaa

SEQ ID NO: 34489 - DNA, 296 bp, Glycine max
cagtgaaatccaagtgcacattttcaagatttaaggatgaccttaatgttcatattacactatgggattatttgttttcgtattaggcgtatcctgaatccattggaaatgaaatcagaattcctcggggaaatccagttcctcattttcaagatttaacgacgcaacaatgttcatatatgaattggaattaattgttttcgtagtaggcctatcctgaagccacaggaaatgagataggtattcctcggggaagtcgaattcgacattttcaagaaatatcgaggcaaaaatgt

SEQ ID NO: 34490 - DNA, 346 bp, Glycine max
caagagatcaaggactgtttgagttatgtttacagatattggactgaaaagggtatttgttgggcaagaaattcaaatgttcaagacattgatgacacggcaatgggtttcagactattaagattacacggttaccaagtttcagccgatgtgttcaagaactttgagagaaatggtgaatttttctgctttacggggcagaccacacaagcagtgacaggaatgtttaatctgtatagggccacacaaatcatgttcccgggagagagaattcttgagcacgggaagcacttctctgccaaatttttgaaggagaagagagcagcaaatgagcttgtaaataaat

SEQ ID NO: 34491 - DNA, 348 bp, Glycine max
gacaatgaagaaacctaagcggaagccgaagagcaaacaaattaaacagacacggcgtgtgtgtctgttttagggaacacggcgatggtgttctcttcgaaccccgtatccctgagcgtcaccgaacccgccttcgagtcatggctccgcgacaccggcttcctcgaagtcctcgaccaccgcacctcctcctccgccgcagccgcctctcccgctccctcctccgccgcctcgactctcatctcgcgcctcgtgaccttcctcaccctcttcaccctcaacgccttcgccaagctcgccgccgatgacttcgccaccgacaccctctcctggtcccgctccctcttc

SEQ ID NO: 34492 - DNA, 409 bp, Glycine max
ctccattggtccttaaacactcatcagtcatcaccatggccaagctagttttttccctttgttttctgcttttcagtggctgctgcttcgctttcagttccagagagcagcctcagcaaaacgagtgccagatccaaaaactcaatgccctcaaaccggataaccgtatagagtcagaaggagggctcattgagacatggaaccctaacaacaagccattccagtgtgccggtgttgccctctctcgctgcaccctcaaccgcaacgcccttcgtagaccttcctacaccaacggtccccaggaaatctacatccaacaaggtaagggtatttttggcatgatatacccgggttgtcctagcacatttgaagagcctcaacaacctcaacaaagaagacaaagcaacag

SEQ ID NO: 34493 - DNA, 391 bp, Glycine max
tgcatggatccaggtcgactctaacggatcccctcggggaattcgcaattccacattttcaagaaataaggaggcaaaaatgttcatatatgaattggaattaattgttttcttattaggcctatcctgaagccaaaggaaatgagatcggaattcctcggggaattccaattccacattttcaagaaataaggacgcaaaagtgttcatatatgaattggcattagttgttttcataataagcctatcctgaagccaaagggaatgagatcggaattcctcggggaattccacatccacattttcaagatataaggaggcacaaatgttcatatatgaaatgggaatatttgttttcgcattaaggctatcctgaagcccaaggaaatga

SEQ ID NO: 34494 - DNA, 309 bp, Glycine max
cgggaatgccaattccacattttcaacacataacgaggcaaaaatgttcagatatgaattggaattaattgttttcctaataggcctatcctgaagccacgtgaaatgatatcggaaatcctcgtggaattcccattccacattttcaacaaataaggaggcataaatgttcatatataatttgggacttacttgctttcgtattaggcctatcctgaagccaaaggaaatgagattggaattcctcggggaattccacttccacattttcacgacataaggaggcaaacttgttcatatatcaattgg

SEQ ID NO: 34495 - DNA, 327 bp, Glycine max
ctgtggagcgccaggctcaagacagaattcaccgaatagggcaatataagcctataaggttttagttcttgttctctagcactttcaaattagaacaattaggaaatgaaaaagtagagttaaaaatacaggttggtcctttcttcatgatctgacacttcttatatgcacagaattgtgaggtttgtcatcgagaagacaatcgaggagagaattctgaaactgcaagagaagaaggaactagtgtttgaagggactataggtggctcttctgatgctctggggaaattgacagaggcagacttgagatttttatttgttacctaa

SEQ ID NO: 34496 - DNA, 114 bp, Glycine max
caagtctggaccggtccctgccggcgtaccagccttccctagagtgagtcgtagtacagcgtggcgtcgtcatggtgatagctgtctcctgtgtcaatgtgtgaccctctcacg

SEQ ID NO: 34497 - DNA, 311 bp, Glycine max
cttattaacactttccttagttcaatatggggaagcccttcttcattctcgctctttcttccctttgcttgctactcgtgtcgagtgcatgcgttgctatgacctgcatgacgttcaacgagtgccaactcttgcacctcaacgcgttggaaaccgagcagcgcgttgagtccgagggtggtcttattgattcatggaactctcaagaccttgagctgcagtgcgccggtgtcactgtttccagactcaccgtcatgggaatcgggcctaagttgccagctttatgatcttagctcgatatggatcattgt

SEQ ID NO: 34498 - DNA, 199 bp, Glycine max
ggaaataattgatctttgaaaatgcacggatgaaagaaagctggagagtccatcaaggaaacagctgcaaacattggtgcttctgccaaggctggcaggggtaaaaccaacgccactgtccagtagaaggcagaaagaatgacggcacgtgatccgatccaaaatgagttggcaacccaggcggcgcgtcagcataaca

SEQ ID NO: 34499 - DNA, 325 bp, Glycine max
gtaacctcttgttgggggaagcagttaaaaaatgaaccaaagcaaatgaaagtgccaaataatccgatcgaaatccaaaacctacttctgtacttccccttattaatcatttgtttttgtggctcataatcttatttttattggtatggttaaagcaaagaaatctgaagggaacaatagactttttacaataaaagggacatcccctatacattgcgatgcacgccgctttcgtacgaggtcgtgccgcaaccgcaactatttaaggataagggaatcccaaatgggtttgttgaaatggagaaaaggcaagaacgataaaggc

SEQ ID NO: 34500 - DNA, 227 bp, Glycine max
tcatctcggggaattccaggtctaaatttttacaaactgaagttggacagctcggttcgcaatactgttgctgggacttgttttcctggcttcagtttctgtctcatttggcattgcttactgggaaaaagagaagcccattccagattttcaagaactgccgaggcacgagtatacagagtttgcgtggtgtgagctcttctcctatcacgctcatcgtgacgctg

SEQ ID NO: 34501 - DNA, 269 bp, Glycine max
tctagatgatcaactcggggaattccaattcgacattttcaggaaattaaggaggcaaaatgttcaaaatataaattggaataattggtttcctaataaggcctacccgaaacccaacggaagtaagatccgaatccctcggggaattccaattcaacattttcattaaattccgacgcacaaatgttcatgacatgaattcgaattatttgtcttcttaataagcctatcctgaaaccatatgaaatgagatcggaattcctcggggg

SEQ ID NO: 34502 - DNA, 409 bp, Glycine max
  unsure (1)..(409): unsure at all n locations
gacaaccataaacaatatgtgtacatatgggctcaatcctggtatttcaggttctcgtcttttgggcaccattcctcagtctatttcacagcaaactgtttggaatcaagtggcaccagtgagaacaccattgaattttgattctagcaagcagagcttttgtcaattttccattgaccttctcggtggaggaattttagtggacataactggagattggatcacacttatacaaaattctccaggttagtaacgtgttgagagttgctgcttgggagaaaaggtgtttaatgggtaggattgtggtgtctgggaagtgagcagtcaaaaggagtgattggggctcattggtacaagtgtttttagcaaacagcancagtacagagcattttgatgcatgtaagtggac

SEQ ID NO: 34503 - DNA, 284 bp, Glycine max
tgtcaatcctttaagtggacacatggattactcatttgcatctgcgtggcatcctgatggacgtatttttgctactgggaactaatacaaaacatggcatgcttgggatgttaagaacgtgtcaaaatctaatgcagtgcttaatggcaaccttggggctataccttccataccgtttacatcagatggactgttcatggcaatggctgagccatctgacgatgtgcatgtctatgatgcacatagtgggtttgagacagagcaggaaatcaattttcttgggg

SEQ ID NO: 34504 - DNA, 394 bp, Glycine max
ggggaattagggtgaatggtgtggcacctggcccagtttggacgccaatacaaccagcttcaaagcctgctgagatgattcagaacttggggtgtgaggtgccaatgaaccgcgtggctcagccttgtgagattgcaccatgttatttgttcttggcaacttgtcaggactcttcctactttactggccaagtcctccatccaaatggtgggatggtcgtcaacgcttaagctatagtgtgccttcacctatttcctattgaactggtttttctagctttaccctcctgaataagcagtgttaccttcggatgcatattttacgttgaaatacattgtgtttggaacatataagccttgagattgaataacctttacgtgagttaattaacctc

SEQ ID NO: 34505 - DNA, 345 bp, Glycine max
tgcccatctttcccctaatgctggtggtgggttcagttttttggtgaggaaggataataaagaaggaagctttttttgtgtgagagaaggaagaggagaaaagaaggcatggggagagggaagattgagattaagaagattgagaatttgaacagcagacaagttaccttctccaagaggagaaatgggttgttgaagaaggccaaagagttgtctgttctctgtgatgcagaggttgctgtcatcatattctccagcactggcaagctttatgagttctcaaacacaagcatggagcataccctttcgaggtacagtaaaggcgcagaatcagattctgcagag

SEQ ID NO: 34506 - DNA, 343 bp, Glycine max
ccgagaacaaaaaaaaaaaaaaaaaaaatccgcgattcgctcttctcttggaaaagtgaaaaccagaagtacgaacgaaagagaagagcgatttagaagtgagagaagatggggttgtcgttcacgaagctgttcagcaggttgtttgcgaagaaggaaatgaggattctgatggtaggtctcgatgctgctggtaagacaaccatcttgtacaagctcaagcttggagaaatcgtcaccactatccccaccatcggatttaatgttgagactgtggagtacaagaacatcagcttcactgtgtgggatgttggtggtcaggacaagatccgtccactgtgga

SEQ ID NO: 34507 - DNA, 342 bp, Glycine max
gggattttggatgctctcgtacgatgcctcatctgtatcatgatgcacctgtccatggaggacaacataagaaactatgttcacatataacgtcgagactttagaacagacgctgggaataccatgagcatcgctctaaagattcaatcactagtcactccgttgacactctagacgaatacagcatagattgccgacattcacactacaattgccatggcactttcacaaacatcacactatcagtaactcatctcttctatatgtaatgagcacagagatggcctgtgtgaaagcttggcgaatccaacatgaaaactctccagtactgcgaaaccaact

SEQ ID NO: 34508 - DNA, 334 bp, Glycine max
atccgttcaagctacatcccaccttaaacgggctcactagtcatgaagcaattcaatacacgagattgttcctactagatcatcattacccaagcatgctataggtgaggctagtagttgcaacctccataaacgcttatgctatgagaaccatccgtttcctgaaacatgtcggaacgttaatgacacctgccatagacttgactatgccatatcctcatggagatcaatctggtgcgttcagtcacattattctgcctgcagacgaatgtgttgcacgttcaaattcggtgatatcataggcttatgtaggtgtcaatgactcatgctagca

SEQ ID NO: 34509 - DNA, 199 bp, Glycine max
gttcggctcgtggaacacttggctcgcatttagaacaccatcatcgataaggagattcacgttttgtaaatacatggttcctatgatggtcactcatttcgagcagcttgtggtggttgctatgtattctgtcattaccgctgggaaggttactccgtagggtagcatataatctttgcatgctggatagatggtctta

SEQ ID NO: 34510 - DNA, 380 bp, Glycine max
aggcagttggctaagttgtcctctgagataaatgcacacaacaccaatttgcttgctgttggaggaggtcctgagggtcctgatccacgggaggttgagttgtatttggaagagattctcaaccttatgcagcttggtgaggattacactgagttcatgatttccaagatcaaagcacttacttctgttgaccccgaattgctccctcgcgccaccaaggctttccggagtggcagtttcagcaaggtggcgcaggatttaacaggcttttatgtcattttggagggatttttcatggtggagaatgttaggaaggcgataaagatcgatgaacaggtgcctgacagccttaccacttctatggtggatgatgtttttta

SEQ ID NO: 34511 - DNA, 220 bp, Glycine max
gacgatttagacagatttgtcacgtgatgatgttgacactcctaaaggttccatgttggatcgtaaaatttctcactctaaaattgcagttcccaagaacgcagaatagttccaccaactgtgttcttgggaaatgcaattttgcctagtgatctattggcaaattttctgacagacggcaggtttacagcaagtgttgatttgcagcgcaatcatcgta

SEQ ID NO: 34512 - DNA, 377 bp, Glycine max
gctcgttgtcagtcctgaattcaactgttcaaatgagattctgtccgtttctgccatgctttcagtacccaattgctttgtccggcctagggaggcacaaaaagctgcggatgaagctaaagctaggttcgggcacattgatggagatcatctcacactgttgaatgtctatcatgcgtacaagcagaataatgaggatccctcttggtgctacgataactttgttaatcatagggcattgaaatcagctgataatgttagacaacacttagtgcgtatcatgtcccggtttaatctgaagctatgcagcactgactttaatagccgcgactactatgtcaacataagaaaagctatgctagctgggtatttcatgc

SEQ ID NO: 34513 - DNA, 277 bp, Glycine max
cactgactttatcggcgatagcagatcaagtatttttgatgcaaaggctggaattgcattgaataagaactttgtgaagcttgtttcttggtacgacaacgagtggggatacagctcacgtgtcattgatcttcttgtattcgttgccaagaagtctctttaaggtgttacttcaaagtagcttgtcttcacattattaccgtatgtttatgtttagctgcgatttagtgtcttgctcgagcaaaaaatgagaggtctgaataaatcggtttctgaa

SEQ ID NO: 34514 - DNA, 260 bp, Glycine max
cataattcaatgtgtcgtctacaaatgtcacagttgctggataaagccaagaacctcgtgtctgacaacgtcaatgataaggcaaagccggaggcgactgtcaccgaagtggacttcaagcacgtgagcaaatatcatgtcgagtacttggccaaggtcactgttcgtaacccttattcaacttctatacacatttgtgagatcaaccaccctttcaaaagcggatccagggagatatcatcatggaaaattccagaccc

SEQ ID NO: 34515 - DNA, 410 bp, Glycine max
atttttctcttcaccttttccttctttccacaaaaatggttccatctcagttatccaagtatggtctcctcttcatttcttgcacctttttccttatcaacttcttaaccattcccatttcttccctcaacataggagttgaaaccaccggaatcactgtctctgtgagcaaagagtgcagcagaacatgtgagtcaagcttctgttcagtgcctcctttattgagatatggcaagtactgtggacttctgtatagtgggtgccctggggaaaaaccttgtgatggccttgatgcttgttgtatgtatcatgataaatgtgtccaagccaaaaacaacgactacctaagccaagagtgcagccaaacattcatcaactgcatgcaaaagtttaagaactcaagagctcct

SEQ ID NO: 34516 - DNA, 409 bp, Glycine max
agcattagtactactgttaatgcaactagggttagtgatcttgagtccccaacatctaccttgtctgagaataatgcaccaccaattaatattactagtgttattgagtttgtgggttcttcagagagagggacggtgaaggaagagggagagcaagagtggaacaaattaggttatcatgaaagcttcacccatttgggagaatacaaagatggcaaggagaattcaatgcctttcacgtctagtctgcatgagttgacaatgaccatggcaaccacgtggggttctagcactagtggtgcacatgcacatgcacatgttgctgaggagggttgtttcaccaatcttttgctgaatgctaactccggtgcccggagtttgtcgccacaagacggtggagaatccaata

SEQ ID NO: 34517 - DNA, 386 bp, Glycine max
accaccaccaacccttaacattatattgctcatctgcgtctctcactgtctatctcacatagacaactcgatctaaccatggacctgggtcagatgcagagacagtggatcgactacaccaaatccctcttccatgagggcatcatggatggtcagtttctgcaacttcagcagcatcaagatgagaacaaccctgacattgtggtcgatattgtctctcacttccttgcagattccgatcggcttctcaaagatctcacctttgccataaatgataatagagttgacttcatacaagttgatgatcatgttcaccagttaacgggtaacacttcatgcacaagcgcacatagggtaaacactgcccgtattgctttccgcaacct

SEQ ID NO: 34518 - DNA, 406 bp, Glycine max
ttgatgagtctttttaaagacctattttatattaaagttttatataaatttagcttctctttatattggacattattgacttataaattttttagaaaaattttatataaattatagttttatttatataaaatcaaaattatgattattcaaagcatgaaataaagatgaaaataggtgaactaaattctataaaagtcaagtttagaggactccatcatctgccactatgatggcgttgattggctcagtgtgtgccttgatggtctctatgcacttcaggtctgagattctccacactttcaccgttttgtccagggaagctgtgtatagaatgtcctctgctgtgtttattgccattgccgtgattagccccttgtgcatctgttaagtcatcatgtcaaac

SEQ ID NO: 34519 - DNA, 404 bp, Glycine max
ggagaggaagattctgaagatggtggaccatccgttcctccctacgctctacgcggagttcgaggcttcgaatttctcatgcattgtgatggagtattgctccggtggggacttgcactcccttcaacacaaccaccccaataaccgattctctctctcctctgccaggttttacgcggctgaagtactggttgcgttggagtatctccacatgctgggaatcatctacagggatctgaagcccgaaaacgtgttggtcagatcagacggtcacatcatgctttccgacttcgatctctctctatgctccgatgctatcccagccgttgaatcccctgactgttcactggaccccgcattcgcacccgcgttacgctacactcgccagtactccacccccttct

SEQ ID NO: 34520 - DNA, 318 bp, Glycine max
ctctacccgttcgtctccgtggtggcatgcatatcgtcgtcaataatcacactggtatcttcggtaccctacaggtctagagctctgaaaccattgacaacgtcgaggccacgatgcaggacaaggatggaatcccccctgagcagtaacgtcgcatcttccccggaaaggaacttgaggactgacgcacccatcggagactacaaaatgcgtaatgaatcaagccttcacctcgtcctccgtcacctttgtggcaggcagatccgcgttcgaatcctcaccggcaagacaaataccctacaagtccagagctccgac

SEQ ID NO: 34521 - DNA, 405 bp, Glycine max
gtcaataatgagtaatatgaagttattaaattctgtgctgcaagtgaatcaatttgcaatagatgttgaagttgtaggacaaggcaagccacaaaatggtcttaagggaggaaatgaagctctggattttctggatgttgaaaagctccattccctgtctcagaatgaactgttggaatgttttcattcattgggagatcaattgatctatttatggaaaatatttctaaagttccatagggataacaaatcaaggattttaggatttttacgtgatgcatgggtgaaggaccggaaagctgaatggtcaatatggatgctatattctaaggtagagatgcctcatcattacataaacagtaagagtgaagagtcttcccatcgtggtgtacacagacgagtttc

SEQ ID NO: 34522 - DNA, 402 bp, Glycine max
gattatgcgcagtgcgatgtgttcacgggaacgtgggtggtggacgaatcgtacccgccctatgatcccgccacgtgtcccttcatcgagcgcgagttcaggtgcaaagggaatggacggcccgatctcctttacacccgctataggtggcacccacttgcctgtaatttactcagatttaacgggctagattttctggagaagatgagggggaagagcatcatgttcgtgggagattcactgagcaggaatcaatggcagtccttgacttgcttgcttcattcagcagtgcccaattcaccttatactttggatagagttggagatgtttctattttcacacttacggagtatagggttaaagtgatgcttgataggaacgtgtatctagttgacgttgtc

SEQ ID NO: 34523 - DNA, 400 bp, Glycine max
  unsure (1)..(400): unsure at all n locations
caaaatcctcttttatttatttatttttttctctgcttcgcgtcgttttgtcctcgataatgtcgtcgtcgacgccggattcagacaaaacgacgacgtcgtcgaagaagagcgcgttcgacgcgttagcggcgtcgcggctcgtgacggagctcaggggaaacttcgcttcgggcaaaacgcgtagttatgagtggagattgttgcagctcaacgcgattgcgaaactcgtcgtcgatcacgagcaggagatcgtcgacgcgctccgaaacgacctcggcaagccgccactcgaaaccgtcgcatacgaggtctcgtcgtttacactgttactcgtttgcgttttggtttnaataaatatatagttggtttgactatggtantggaaaaggaatattcc

SEQ ID NO: 34524 - DNA, 384 bp, Glycine max
atttggggattgccaaacgtggaaataatcgatattgagatgaatcagttatcaggttcgattagttcggatatcaaaaccgcgaaagcactcggttcaatattcgccaggcagaaccggttgtccggtgaaataccagaagaaatctcaatggcgacgtcgttagtgattgtggacctgagcgagaatcaaatctttgggaacattccagagggaatcggcgagcttaaacaactaggtagccttcatttacagagcaacaagttatcaggttcgataccggaatctctaggttcctgtaattccctcaacgacgttgacctatctcgaaattcattctccggagaaatccccttctccgtggggtcctttcccggctttaaa

SEQ ID NO: 34525 - DNA, 376 bp, Glycine max
ctcttggattctgggctggtcatcggaactctaaaatcagagttattcttgcacgtgtgtgggaaaatgacacagaacttgatatttcaaacaatagaattagtagggctactgggcatctagtgtaccagaaaagattttacaggagtaagttttgtatatgtcctggtggatcacaggttaatagtgctcggatagcagactctatccattatgggtgtattcctgtgatattgtcaaattactatgaccttcctttcaatgatattcttgactggaacaaatttgccgttgtactcaaggagagtgatgtttaccagcttaaacaaatcctcaaaaatatatcagatgctgagtttgttacacttcataataa

SEQ ID NO: 34526 - DNA, 412 bp, Glycine max
cggctcgagcttgatcctgcccttatgcgttctggtcgattggatcgaaaaattgagttcccacacccaactgaagaagcaagagcccgaattctacagatccattctcggaaaatgaatgttcaccccgatgtcaactttgaagaattagctcggtccacagatgatttcaatgcagcacaacttaaagctgtctgtgttgaggctggcatgttggcccttcgccgtgatgcaactgaggtgaaccatgaggactttaatgaaggcatcatccaagtccaagcaaagaagaaagcaagcttgaattattatgcataggcactcaacgcaaggaaaaacgagcattgaagtttgacttgtttgctagattgatcttactcgaatcatatgtaacatacagcttgctaattta

SEQ ID NO: 34527 - DNA, 411 bp, Glycine max
aacagcacaaagcgggttactgtctgttcaagctaccatctctctctctctttcttagtgcctccttgccagaagttaaaatggcccaagaaactttcctattcacatctgaatcagtgaacgaggggcaccctgacaagctctgtgaccagatctccgatgctgtgctcgatgcatgcttggagcaggaccctgacagcaaggttgcctgtgaaacctgcaccaagaccaacatggtgatggttttcggagagatcacaaccaaggccaacgtggactatgagaagattgtgcgtgacacatgcaggaacattggttttgtctctgatgatgttggtcttgatgctgacaactgcaaggtcctcgtcaacattgagcaacagagtcctgatattgctcaaggtgtgcacg

SEQ ID NO: 34528 - DNA, 334 bp, Glycine max
caaagctacattaataacgtcgtttaatgttccaatattgtagtgtttttgtcctgttggggttggactgctgtgctgtattttggttttgtattctgccccttgatttgttctgttacttttagccgtgttcatgtctccaggaaatgtttatattttctttcaaaaatgtttttccattgtgtttatttgtcttttttgggcatggttcaggctccagtaggtcgcattttctttactggagaacacacgagtgaaagatttagtggctatgtgcatggtgcatacctcgcaggtatcaattctagcacagaactacttgaagaaatgagaa

SEQ ID NO: 34529 - DNA, 315 bp, Glycine max
agagataccacttcgcttgccaactcacagctgatctatttgccacgaaccatacagatttcactatcaccagtatcttccaggagattgctggaagcaaggacactgttggacagtatgagtctgagacagcctttaaccttcgtggacacaatcgtgttgtgcacggcaatgatgtctttgatccagaattcaacattgtcgcccctggagctgattaaaccatttacttccccgccatcgaaactagccatatgttgacctccgtccacctcgacatcgaaaaacttctttatagctctgtggagaatgatg

SEQ ID NO: 34530 - DNA, 405 bp, Glycine max
caccaattcacacacataataaactcactgctcttctctctacccctccctccctcctcgcctccgcctcaagcttccctccttcaccctcccctccccgaacgccgtcttcgccctcctcctcctcacctacttcatggtcgtctccggcattgtttacgacatcatcgtcgagccccccggcatcggctccactcaggacccctacaccggcgccgtccgccccgtcgtcttcatgtccggccgcgtcaacggccagtacatcatcgagggcctctcctccggattcatgttcgtccttggtggcatcggcatcattctcctcgacctcgccctcgatcgcaaccgcgcgaaatccgtcaaggtttcctacgcctccgccggcgtttcctccgtcgtgctagc

SEQ ID NO: 34531 - DNA, 402 bp, Glycine max
cctaattgtttaaacctaattctcatttcttcatcgttcgattcttctcctcctaaagatgcagatcttcgtgaaaactttgaccggtaagaccatcacccttgaggtggagtcctccgacaccatcgataacgtgaaagctaagattcaagacaaggaagggatcccacctgaccagcagagacttatctttgcgggtaaacagcttgaggatggtcgaacccttgccgactacaacatccaaaaggaatccactctccacctcgtgcttcgcctcaggggtggcatgcaaatctttgtcaagactttgactggcaagaccatcaccctcgaggtcgaatcctcggacaccattgataatgtcaaggccaagattcaggacaaggagggtatccctccaga

SEQ ID NO: 34532 - DNA, 300 bp, Glycine max
gcccacccttacttaaactcggaattcggctcaagcttctccctcttactcttacactctcatccaaatcttgcaaaaaaaaaaaatcacaatggcagcgagcgctcacactccatccaaagagttcgtgtacatggccatcctggcggatcatgcccatcgctactaggagatggtagagttcatgagaaaggtctccgcctccgccgacaaccatgagcttagcgttgaggaacgcaacctcctctccgttggcgaacataactttatctgagcttgccgctccacctggcgcatcat

SEQ ID NO: 34533 - DNA, 257 bp, Glycine max
ggaattcagctcgagcagctattgataaagctgtggctgctggagtgaatgtcctttccatctctttgggtggtggaatctccacatattgcagagataattcagcagtggcagcgttttgaccaatggacaggggtgtttttgcttcatgttctgctgtcaaatgcatgacctgaccctgccattctcaccaatgtgtcaccaggaatcaccccacgttggacgactcacaccggatacggattttccactggctc

SEQ ID NO: 34534 - DNA, 403 bp, Glycine max
caatttcacttcccacagcatcaaaaacaagaaaaaaaaatggccgcaaaagagaacgaggtaacccacaagtttcgctttttccgcgtttacaaagacgggacagtggagctttacaaacccaccatccaaaaggttgcccctttcgatgacccaatcaccggcgttcgctccaaagacgcggtcgtttcagacgacccacccgtttccgttcggatctttttacctccaatatccgacccgacccgaaaattcccgatctttttctataaccacggaggcgggtactgcatgcaatccgctttctccccagactaccacagtctcgtcgccaccactgccgccgaagcaaacgtcattgcaatctccgtggaatacgggttgttcccgatccgaaccatac

SEQ ID NO: 34535 - DNA, 325 bp, Glycine max
ggcctacgtaagatcggacttcggctcgagcagcacgaattgcatcactctcgtccgttaccactgcggccctagaccacgtcaagcgatctctcacaacgccctcatccgttagggcaaagatgagtcgaggaactggaagttgaaaccatcgtgacagcactactttctcacctgaacgacgtctctatcaagtggagtaagctttcaatgctgtgaacgtcgcaggaatcacctcgattggtgtccgaagaacggattcaaattgtgtcgttactcagaagaacgtttcggatacgcttttggaccacacaactgttaaaca

SEQ ID NO: 34536 - DNA, 339 bp, Glycine max
actgattcaacgatggacgccaatggcaattgggaagaggatgatgacgaagagttcgagttatcacggaattattttcaggccaatgaactcgcctcctcatccgccaagacatcgaggcatcagctcatctagttctatgtcattgataaacatgaactgagggatgctgcgtctaaaattgaacccaatcatgaatacgagatccctctcttgttggatacgtacaacatcatgtaacctgaatggatttgtgctctaatgttctgttttgggcttctgatgtagtgatttggattactgatagctctgattgataattttgcttcacctgagctg

SEQ ID NO: 34537 - DNA, 419 bp, Glycine max
tcgaggaagttcccaacataaacaactttagcgaaatgctctcagggaagaccaggttatttgttgtcgatacaagtttcaggacgtgcttgcttctgtccttcctattcaagatattgcacaatgggcacatgatgtcggatcacaagttgcttgtagatgcatgccacagtgttccacacatgatgattgatgtccagagccttaatgttgactttcttgtggcttcttctcacaagatgtgtggccctacaggcattggattcctatacggtaaaatatacctcttgtcttccatgcctccatttttgggttgtggtgaaatgatttccgatgtatatcttgatcattcaacttattccgaacctccaaccatatttgaacctggaacaccagctagtggggaagcaattggttta

SEQ ID NO: 34538 - DNA, 324 bp, Glycine max
acttcatccaaaaacatggcacccttaaccatcagaaccatcatggacacctccgctattcagcattcaggattcactgggcaaactgctctgaaccatctcagtcacttcgtccgcaacaccggtggcgcccgcaaaggtctcactaacatacgtcgcactctcaatagtgctcatcacagcaattggtatggccctgaccgtcccaattacttgggtccagtcgctgagcagattccatcggtcctgagcggacaattccctggtgaccaccgttgggacactgcagaatatccagctgacccggaaaccttgtctaggaac

SEQ ID NO: 34539 - DNA, 425 bp, Glycine max
  unsure (1)..(425): unsure at all n locations
gacgtcggattcactcgtacctagaacttcggctcgagaataaaccgaatgagagcattaacctcatcttcttccactttcattccaaagcgttattccttcttcttcttcctctccattctcttcgctcttcgatcctcgtccgggggctgctccgaataccaccaccaccacgcgccgatggccacgataggaggcttacgcgactcccaaggctctcagaacagcgtccaaaccgaggccctcgctcggttcgccgtcgatgaacacaacaagaagcagaattcacttctggagttttctagggtggtgaggacacaggaacaggttgttgcgggaaccctgcatcaccttactctcgaggctattgaggcangtgagaagaagctctatgaagccaacgtgtgggtgaaaccatggttgaa

SEQ ID NO: 34540 - DNA, 293 bp, Glycine max
ctccagaaaaaatggccgtgcctcttctctcgaagaagattgtcaacaagacgctgaacaacttccacccgcctcaaagtgacaggaagatttccgtgaacacaaactggccacaaaccaccgggtatcgattcccgtgttatgagaaagttcaagggatgcactttcatgccaaacactcgttacgcttcacaccacaagacccgccactatctccccaatggcttcacgacatttgtcgttcacaatcgtaacgatctggaactgcccatcatccacaacccgacttactg

SEQ ID NO: 34541 - DNA, 425 bp, Glycine max
cggatttcacacaattgaggatcagagaaacaaagacaaccacaacaataacaataacaacggtgatgactgctcaagtgcatcttcaattactgtttccaatgaggaaagtgggaaaagcacgtctcaagaatcgattatggtgcccaacagcaacggtttcatccaccatgttccatgcatttccactctcccttggccttatccttttccctcagcagcacctgctatgtgccctccagggtttcccatgtcattctaccctgcagcattttggaacattccatggtttccctcacaacactcacaccattctgctcctactccaaggtctcccagttccggtcctaattctccaacactagggaaacactcccgcgacgacgacgcggaaaaacaagaccatttgcaagaagaatcaccct

SEQ ID NO: 34542 - DNA, 358 bp, Glycine max
aagcactatagtacaaaaaggacattcattcatctatggctacccttattgctcccagcaaccactctccccaagaagatgctgaagctctcagaaaggcttttgatggatggggaactgatgagaacactgtcattgtaattttgggtcatacaactgtgtatcagacgcagcaaatcataacagtttatgaggaaatttaccaggaggatcttgtgaatcgccgagagtctgaaatcacaggacactttgagaaagccgtgtaacgatggatactggaacctgcagattctgatgctgtcttggccaatgttgccatcaatactggcaccctctcctatgtcattgaggaaattgc

SEQ ID NO: 34543 - DNA, 378 bp, Glycine max
ctcgagccgaatcggctcgaggacagatgaactggtttttgttttggcggcaacgaatcttccctgggaattggatgcagccatgctccgacgtcgtgagaagcgtagccttgtaccacttccagaaccagtagcaagaagagcaatgttcgaggaactccttccgcaacagcctgatgaggaaccgatcccctatgatatactggtggacaagacagaaggatattccggatcagatatccgattactctgtaaagagacagcagtgcaacccttaagacgcctaatgtcgcaacttgagcagagccaggatgtggtgcctgaagaagagttgccaaaagttgggccaatcaaatctgaagatatagagacagcttt

SEQ ID NO: 34544 - DNA, 327 bp, Glycine max
gacttcaactccactgttactccgtgcaaaagtcacgaactgaacatggatctcttgatgaactgtatggagccagtggataaatgtttgaaggatgctagcatggacccaagacgtgttgacgagcttgtacctgtaggtggttcaacaaggaatcggagcgttcaggaactgctgcaggacttcgttaattgacaggagctgtgcagcatcaacaatcctcatcaacctgttgcatactgtgctgcagttcacgcttccattgtaagtggatacggcactcacagtgttcaagatcgtcacatccgtgatgtaacgccaccatct

SEQ ID NO: 34545 - DNA, 402 bp, Glycine max
ggccttttagaaataaatttttcttatatttctttcattagtagtacctataatggatacagtaagagagttggcatcaaagagtgcagcagttagattcaccaagagttcatgttacatgtgccacagcatcacgcaactgttctatgagcttggtgcaagccctgcagtgcatgagctatacaaagatggctatgggaaggaaatggagtgggctttgaggagcatggggtgcaacccttcagtgccagcagtgttcattggtggaaaatttgtggggtcttcaaaggatgtcatatccctccatgttgatggctctctcaaacaaatgctcatggctgcaaaggccatatggttctagctagtactcatccacactccaataatataatataagaagct

SEQ ID NO: 34546 - DNA, 333 bp, Glycine max
ccaaattccattttccaattcaaaaccctaactccgttcgaagcaccaaatcgtgatggcaccaaaggcagagaagaagccagcagagaagaagcctgtggaggagaagaaatcgacggtgggagacaaggctccggcggagaagaagccaaaggccggaaagaagcttccgaaggagggaagcgccggcggagaaggtaagaagaagaagagaaacaagaagagcgtggagacatacaagatctacatcttcaaggttctgaagcaggttcaccctgacattggtatctcaagcaaggccatgggaatcatgaacagcttcatcaacgacat

SEQ ID NO: 34547 - DNA, 388 bp, Glycine max
gtcatgcagaaattgcatggattctttattgtgtctgttcaaccaggtggcagagccaagctttagtgataacaaagaacctgtagtaaaacatatagctcttgaagctgataacttgtcatggttgcttgagattttagttgacaaacaagctgctgaagattttgcgctgatgtgggcaaaccagcaggaattggcagccctccatggaaagcttccgattgcatttcgttatcatgtcagttgcatttcaggaagactatatgttggcattggaagaggggaggttttgccatcaaagaacacgcgccagttgttgttgcagacatggctacagcctctaatcaatgactataactggttgcagcacgggtgcaggtcatttgat

SEQ ID NO: 34548 - DNA, 389 bp, Glycine max
caagtgataaaattggaatgtctgattcaaaaaataaaatcgatgaagatgagactaatcctatcagtgcaggtagattttgtgaaaccatgcagggtgagacatctgtggaaaatatagttcttcgaaggcatactaatcctgatgctgcagctagaaatgggaaatcactaccaccagtgtatttttatgccctagaaagtgatcagcctatactggatatattaaagccgtctatagtcattgtttaccatccagatatgacctttgttagggaaattgaagtctacaaagctgagaatccctcaaaaaggttgaaagtatattttattttctatgaagattcaagtgaggttcagaagtttgaagcaagtatacgtagagagaat

SEQ ID NO: 34549 - DNA, 406 bp, Glycine max
tggggttcttgcacttgctgtgtcctcttcaagcttttgaactggggtgttaggggttcgaccattcctcgagcctagtacaagttgtggttgggatttcaatgcattgtcaaggtcttgtaatgcttcattgaggttgtttgagagtgtttgaggggagaattgacgtttgttccttatgctgttggccagttcccttaatacttttgacacttcctctccaagtctgatgcaagaatctttgtacaccgcacgaattgactttggtgtcttaagaatcaaatgttaataaattaataaatcagtcaatggaatatataataaaatcatgataataagcatcaaataagaagctgcacttataggcttaactaatcctcctattattgttgttgaaattcgattt

SEQ ID NO: 34550 - DNA, 397 bp, Glycine max
gtggaacagctcgttgataatgcagatgaacgcagggttttggagaacgaagcgctcgatgaggtctgcttccgcacgcttaagctcagtagaccaagctttggggatcggaaacgacgactttcagctaccatgagtggtgtgacatgttgtcttcgtttcgctgggcaagtcaactcagatcttcgcagacttgctgtgactctcattcacttctggcgtctgcactttttcacggtgggtcttgccccactcatatctcgtggttcccaacactacagagctctgacagtacccgaactgagataccagttgtgggatgataggaccatgatgtgtgcagctgatgtacgccatggtcgacacttgacagcatctgcgatgttccgtggtaaca

SEQ ID NO: 34551 - DNA, 378 bp, Glycine max
  unsure (1)..(378): unsure at all n locations
gaattcggctcaagaaacactcataacacaaaccacaaaccaaagctcacccttgatttaaaaaatggaaccagcttcttcaatggttctctcatcccaatccttggctggaaaggccttaaacctgggccaatcaccccaaaaagtgggaagggtgagcatgaggaagaccgtcaccaagcaagtctcctcangaagcccatggtacggcccagaccgagtcaagtacttgggcccattctctggcgagcccccgtcctacctaaccggtgagttcccaggcgactacggctgggacactgctgggctttccgcagacccagaaaccttcgccaagaaccgtgaactcgaagtgatccactccaggtgggccatgct

SEQ ID NO: 34552 - DNA, 281 bp, Glycine max
gtgaggtagaacccttccactgtcgtgaatctgctatgggtgcctacaactatgtttcagagcgatggcgcaagaaacagtctgatgtcatgcgcatcttgcagcgggtgaggtgctgggagtataggcagcaatattccaatgttcgtgtgacagggtctacccgctctgaaagtgctcgtcgcttgggcttcaatgcgaagcaaggctatgtgagtaccgtgttcgtgttatgaggggtggtcgaatgagactaattcgcaacagtattgtctatggga

SEQ ID NO: 34553 - DNA, 292 bp, Glycine max
cccgggattcatatgggtctaactactgttaagcttgttctagctcaattggtgcattgttttaattgggtgcttccattggacatgtctcctgatgagttagacatgaatgagatatttggactcacaacgccaagaagtaagcatttgctagctacaccagtttatcgactagttgattaagttaagagatcgaggttaataatgcgcagtaaggtttatttacatatatttgtagtttgtttaaatttcaatgagtcatgtgaaattaaaattaacaatttttctaaaa

SEQ ID NO: 34554 - DNA, 416 bp, Glycine max
gccgacgtggtatcgacaaagcaaggttccgccggagacgccgcaacgccatgaaccactccccgttcaggctctgaggatcgggggaggactaagagagtagcttcgagctatactatgatggcttcgacaataattaaggggctccgcccgctgtcgtcgaggatgtcggagtttctgctcggatcgggattcgacggactgctacagtatgtttcgtagattgagatcaacaacttgggtaaggtggagaatctgccggtgttgaatgtggcgctagagtcaatgccaacggtggaaattactgagtctctggttgcgacggagacgcacagcgccgtgtgcaaggaacattggcgcgcgagatgtcgtgcaagcacctcttacactctaattgcttgtgtccagtgtgctgc

SEQ ID NO: 34555 - DNA, 335 bp, Glycine max
atagattctcaactaatgagaacactctcacccttggttcccactcttctcaaaccctaattcctcatcttgagcatgatagaaatcttgcacatcgaaggagggcagtgcgggaaccagattggagcgaagttctgggaggtgatatgctacgagcactgcatcgaccataccggaaagtatagtggcgactctgaactccatttgggacgcatcaatgtttagtacaaggatgcgattggcggaaggataattccacgctccgtcctcattgatctagaccccggaaccatggactccgtcagatccggcccctacggccatatcttccgctc

SEQ ID NO: 34556 - DNA, 474 bp, Glycine max
agagctaagacgtcgcaggcccgcgtacgtaagctacggaattcggctcggaaagaatggcacgcatcaaagaggatccatctctgaaacatattttggaggagatagagactggcggtcctgctgctatgatgaggtactggaataatgaggaggttttgcagaagttgggacaagccatgggtcttgccaattcgggagatgcaggtgcctctgctgaaaattctggggcagatgagaccgaagatttgggaaatgaagatgaatcaattgttcatcatactgctagtgttggtgatgtggagggcttgaaaaatgcactagcctctggtgctgacaaggatgaagaagattcagagggaagaactgctttgcattttgcctgtggatatggcgaggtaaaatgtgctcaagttctcctcgaggctggagcaaaagtggatgctttggataagaataagaacactgctctcc

SEQ ID NO: 34557 - DNA, 314 bp, Glycine max
ccctacctctcctttcaagatgcagatcttcgtcaagactctcaccgggaagaccatcacccttgaagtggaaagctctgacaccatcgacaacgtcaaggccaagatccacgacaatgaaggaattcccccggatcagcagcgtctcatcttcgccggaaagcagctcgaggactgccgtaccctcgccgacgacaacatccataaggagtcaatccttcaacttgtccttcgtctccgtggtcggcatgcacatcatcgtcaagacgctcactggcaagaccataatcctagaagtcgaaagctctgagacc

SEQ ID NO: 34558 - DNA, 360 bp, Glycine max
gtgatggacacgcttaacatgcttggccttgcgaaaagaattggggctaggtttctgcttactagtactagttaggtttacggtgatccgttggagcatcctcagaaagagacttactggggaaatgtgaatccaattggtgagaggagttgttacgatgaagggaaaaggattgtggagacgttggccatggattatcatcggggtgctggtgttgaggtcaaacatatgagaggcaatccatccaaaagtggcttgatcatgggttgaatgtttgtccaaaaactcatcagagacttactcttacaaatgtcattcctaattacactgtcaaatctcatgttattagattgattgaag

SEQ ID NO: 34559 - DNA, 344 bp, Glycine max
aacaacttctgctacttcctactccaaccgcacttccggcccgccattaaccagggccaaggccagattcggatccaacggattgggaaaattttggccgttgggaacccaaattggctctgcaaagacacaatgttgaactcgtcgccgtaaacaaccctttcatcaccaccgattacatgacatacatgtttaaatacgacagtgttcatggacactggaagcatcacgatgtcaccgttaaggacgagaacactcttctcgtcggtgacacgccagtcactatttgtggacacaaaccccctgaaaatatcccaggggggtcaactggacctgacatcatt

SEQ ID NO: 34560 - DNA, 413 bp, Glycine max
gtgaggctatagaggcgctctgacgtcgcatgcccgcgtgcgcaagctaggaattcagctcgagaagaggtgccggagcaagtttcgtcacgccggaacgatgaccggcggcggatccacggggaggttgccgacgtggaaggagagagagaacaacaagaggagagagagaagacgaagagcgattgcagctaagatctacactggccttcgagcccaggggaactacaagcgtccagagcactgcgacaacaacgaggtcctgaaagctctctgcgccgaagctggctggatcgtggaagaagatggcacaacttatcgaaagggatgtcagagacccacgagtgagattggaggaacaccactgaacttaagcgcgtgttcttccattcaggcaagtccacaatcctcgt

SEQ ID NO: 34561 - DNA, 434 bp, Glycine max
ctgaggatgactatgatagtcagcaagaaatggataccagtggtgaattgagagagaccaagtcagatgatgatcatgatcatgatgttaactacagtcatgccagtgaagaagaaggggaagctgatgcatcagtaagcgatatagtggaatgcttcttgaagcgtttggatgagaaaacaaaaagattctcagaagaacctgcagggtatttgcaagagaagttagagagccccaagagttgctccggctacaacttggaatctgctttaacatttactgatatcaaaactgtggattcgtgctcgagtccctcctatgaaaatgactcaagaacaactttgactgctgaggaatcaaatgctgacacaagtagtccatcaatagaaagtacaagcaccaatgatgtggagatgattgataagtttacagat

SEQ ID NO: 34562 - DNA, 324 bp, Glycine max
gaaaaataacacacatttgaaactcaaactgaaatgggtgcatagctttggggcaaaaactacacaaaactcctcattgcccccaagttttttctttcaaagcaattttgcacttttttgctttcattgtcttcaatttgtagtaagaggaaattgttgtttcctacttagcttgattattattatcaatggcttctttagtatcttcacaatttacactaccaagttctaaacctgaccagcttcattctcttgctcagaagcatctttttctccactctttccttcccaagaaggccaattacaatggtagcagctcaaaat

SEQ ID NO: 34563 - DNA, 421 bp, Glycine max
tggagcttcaaagccagaacaaccctttctctattcacttgattaccttctttttgtttctcttgttcctgttattcaaattagttaagaaatcgagttccaacaacaccagcaaattacctccaggaccaaagacactacctctcatagggaacctacaccagcttgttggttcaaagagtcatcactgctttaaaaaattggcagacaagtatggtcctctaatgcacctaaaactgggagaggtatccaacatcatagtcacttcaaaagaattggcacaagagattatgagaactcaggatctcaactttgcagatagaccaaaccttgtatccacaaaaatagtttcctacaacgccaccagcatttccttcgccccacatggagactattggaggcaactgcgaaagttgtgcac

SEQ ID NO: 34564 - DNA, 368 bp, Glycine max
gtttatggcatattcaatgggaggccaaatgcagggttcaggcaaatgatggttcagcttcttggcattgtgtttgtgatacttctcaatgtcaccacaactagcattgtgtgcttgttggttaggatcatagttccacttaggctgagtgaagatgacttgcaagttggggatgaagcagtccatggcgaagttgcatatgcattgtggggtgatggagagaagcttgagactgctactgagcctttgacatctgaaaagaatcttgaatggccaactgtggaactaagaacttaattcgagtgatgctcaattaatggaatgaactcaatgaaggataaaatattctagctcttttgttggttttg

SEQ ID NO: 34565 - DNA, 310 bp, Glycine max
atatgtcctaaactttctgcagcatcgttctccatttttggctttacagaatgactgtgtctgattaagggttctttagtatttccaatatttcttgtagtgaataagttgttagctaaatcaagatcaagtttttggtgttgtagaaggaagagaagaattaacatgagtattcactgtgaagtgtgtgagacagctccaggagcagtgatttgttgcgcggatgaagctgctttgtgtgccaagtgtgacgttgaagttcatggctcaaacaagcttgatcgcaagcatgaaacacctcttcttcaat

SEQ ID NO: 34566 - DNA, 213 bp, Glycine max
  unsure (1)..(213): unsure at all n locations
taagctaggaattcagctcgagtttctcactccctgtgtatgcngctgaggattccgaacgagtcgaccttcttcgtttcccgcaaagtttaagttaacacgggtaaggaaaaggtcacaacaacattgccgtcattggccatgtcgacccgggaaagtcaactagcactggtcacctgatctacaaactttggggtattgacaagcgtgtga

SEQ ID NO: 34567 - DNA, 372 bp, Glycine max
gcgtgcctaagctaggaattcagctcgagattcactttgcgcagttccctacctctcctttcaagatgcagatcttcgtcaagagtctcaccggaaagatcatcacccttgaggtggaaagctctgagaccatcgataacgtcaaggccaagatttaggacaaggaacgaattcccccggatcagcaacgtctcatcttcgccggcaatcagctcgaggactgccgtagcctcgccgattaaaacatccagaaggagtcaacccttcaccttgtccttcgtctccgtggtggcatgcagatcttcgtcaagactctcactgggagtaccataaccctataggtccaaagctctgacaccattgacaacgtcc

SEQ ID NO: 34568 - DNA, 363 bp, Glycine max
caacaatccaccaaccatcaagcagactcttccacaaatttgacaagttgatccttcttggaaaagggagccttctttactttggaaaagcctcagaagcaatgacttacttccagtccataggatgttcaccacttatttccatgaacccggcagagtttttgctagaccttgctaatggaaacataaatgatgtttccctaccttcagagttggaagataaagtgcagatgggaaatgcagaagctgaaacacaaaatgggaagccatcaccagctgttgtacatgagtatctggtggaggcatatgaaactcgagtagcagaaacagaaaagaaaagactaatggttcctaaaactcctg

SEQ ID NO: 34569 - DNA, 220 bp, Glycine max
cattcctttactgaagtcttacttgaaggatgggtgagaccttgttttcctcgtcactagaattttcgtagcatggaaaggccatgcgtacgatatgtgccctctccggatgaacactggctatggtgccagtactcctgaggtgaaatgcgcaggttggtagcgtgctgtggatgcacacaagatctttggctttcagatcaatcctgaccattgcgtt

SEQ ID NO: 34570 - DNA, 415 bp, Glycine max
gagagtgatttcagtgagtgatcggtgttcacttgatctcatcataatcgtcagcgtcaattgaagaagatgccgatcagaaacatcgccgtcggaaggcctgaagaggcgactcaccccgacacgttgaaggcggctttggctgagttcatctcaaccttcatcttcgtgttcgccggctcaggctccggcatcgcctacaacaagctcaccgacaacggcgctgccacccctgccggcctcatctccgcctccatcgcccatgcattcgccctcttcgtcgccgtctccgtcggcgccaacatctccggcggccacgtcaaccccgccgtcaccttcggcgccttcgtcggcggcaacatcaccttcctccgcggcatcgtctacgtcatcggccacctcctcggctcaatcg

SEQ ID NO: 34571 - DNA, 397 bp, Glycine max
  unsure (1)..(397): unsure at all n locations
gtacgtaagctcagaattcggctccaaggtggcaaattttggtcctgcaaaacctgttggaaaggaatttaacaaggtcctcaacaacaataaaaggaaaagaaggcatcctgctccctgagtggatttcaggtgtggctatcactgccaaagctgatgtctacagctatggaatgatgctttttgagtttgtgtcgggtaggaggaactccgaggcatcggaagatggccaagtgagattctttcctaccattgctgcaaacatgatgcaccaaggagggaatgtgctaagccttttggaccctaagttggaggaaaatgctgacattgaagaggtcactagagtcatcaaagtagcttcatggtgtgtccaagatgatgaatctcatangccttc

SEQ ID NO: 34572 - DNA, 296 bp, Glycine max
agcaggtgtttgaaggaaccaacattcaagattctggaacagaggcagctgttgttgctgctgctgtggctgcggctgcccgtttgactgatgcagacttagtaagatgaatttagatctaaaagccatagcaatgtcttttaacggtacccagcacaagtgcaaggcttgtgacaaaacggtttatcccgttgatcagctttctgctgatggtactgcttatcacaaagcttgcttcagatgctctcactgcaaaggaatattaatgctgaataactattcctcaatggaaggtg

SEQ ID NO: 34573 - DNA, 211 bp, Glycine max
attctcccatttcctctcagaaccctcgatcactcccacgcgctcctatatcctctccttcaccgtcgctctctccaacgatcacaacaacatcgtcatcccatggcaaacgccgcatctggtatggcagtccatgatgactgcaagttaaggtttttggagctgaagacaaagatgacacaccgtttcatagtttttacgattgaggagc

SEQ ID NO: 34574 - DNA, 356 bp, Glycine max
  unsure (1)..(356): unsure at all n locations
cttgttttggggtttcgccacgccaaaggtgttgtttctgtggggatgttttccctttcaattanggctgaatgctatcccaacattgacccatttggctcctttgagcatttttgctgattttgttgacattgtagccaagagtgtggtgatggtggatgatgtctttgtgttcatgaagaataggcctcctttgaaagcctttgggggctggtccgtgtttctctatggtttaggtgtggctgtgtatgcatttgaggggattggattggttttgcccttggaagcagaggccaaggataaggagaagtttggtggggttttgggtgtaaggatgttccttaattctttgttgt

SEQ ID NO: 34575 - DNA, 359 bp, Glycine max
gaaatttggaaaaagggttctgaaatcttagctactgactgcgtaatcactgagatctgccgtcatcctgggttggttttgttgacgggtgcttgctggagtaataggattaagtctgtgagtccttccaatacagggatcacttctagaagtgtcagcaggagtggccatgacgtcagcttaaatagcaggagctcatcagcctccatatccgtcgcttctcggagtgagggtgagatcttgcaatcttccaacttgaaaagcttcagctataatgagctaagagcagccacaagaaatttccgcacggatagcgtcttgggggagggtgcgtttggttcagtttttaagggctggat

SEQ ID NO: 34576 - DNA, 364 bp, Glycine max
ccaagccccagtcaaccaacacaccactctcactgctcttgatcgatctttcaagtcttcagggtattatgatggcaaatacattcatacttacctcagactcagtcaccgaaggacaggctgacaagctctgcgacgaaatctccgacgctgtcctcaatcgcttggcgtgaacaggacccagacagcaaggttgccagcgagacatgcaccaagaccaacttggtcatggacatcggagagatcatgaccaaggccaacgttgactacgagaagatcgtgcgtgacacctgcaggatcatcggcttcatcacaaacgatgtgggacttgatgctgacaactgcaaggtccctgtgtacattg

SEQ ID NO: 34577 - DNA, 360 bp, Glycine max
  unsure (1)..(360): unsure at all n locations
atcggagacatgcaacggccatttgcatcctccgaagaagaccgcatccaaactctgagattttgaattaaaggtgccgccgggatggaacagttccggcatataggagaggtggttgggagtctgaaagcgcttatggttttgcgcgatgaaatccaaataaaccaacgacaatgctgtttgatcctggacatcttcggtttggcgatggagacgatcgcggaggagataaggcagaacctgaagctggaggagcgtaacacgaaatggaaggctctggaatttccgctgcgtgagctatgcanggttttgaagganggagagctttacataaggcagtgtttggattccaaagactgg

SEQ ID NO: 34578 - DNA, 339 bp, Glycine max
attccgctcgagctgctttgtgcacttcctgtcagatgcttgtggtttggattcagaatcaactataacacaagaacaccatcgagatagtattcacctgggtggatcagctgtcacaaagcttgccatgtcgatctttgatagtcattattagattgtacatagcatttatggattgccaaacatcacgtttactgttggtcacaaacctttcaccctcacccctgagcagtatattctgaaaactggacaaggcattgctcaactttgccttagtgggtttattgcttttgacattcctcctcctcaaggtcctctctggattcctggagatgtttt

SEQ ID NO: 34579 - DNA, 173 bp, Glycine max
aggtttaactgccaaagtgattgaccccacaatgattatggatgatgtttatggtgatttttttgattttgcatctatgttggtatccaacgttgacaataactatcccaatgcatcaaatagatttatcaagctgctagctattgagaaaacttgcagacaatctggtctct

SEQ ID NO: 34580 - DNA, 391 bp, Glycine max
gtgccgcagaagttcgcatttacggggatcctgattttacttttccgtatgttccagctcacttgcatcttatggtatttgagttggttaagaactcgctgcgtgctgtccaagagcgttttatggactctgacgaagttgctcctcccattagaataataatagcagatggaatagaggatgttaccataaaggtctcagatgagggaggtggaataccaaggagtggtcttccaagaatttttacatatctctacagtacagccaaaaactcatcgtcagttgaacatgaaccttctgatattggaacaatggaaaatgtaactatggctggatatggttatggacttcctatttgccgcttgtatgctaggtattttggtggtgatct

SEQ ID NO: 34581 - DNA, 443 bp, Glycine max
  unsure (1)..(443): unsure at all n locations
atagaagagtactgacgtcggacgcacgcgtacgtaaactcgaaanttngggctnnngggnaggatttgtgtttagggggggtgtttggggggttctcttcagcttcggttaagcgagtacttttcgttcttgatctgttggttacgatgtcgtattcaaggagatctaggtattctccttctccttctccttctccatacaagcgatacggtaggtctgtgtccaggtctctctcaatatcaagatccagaagccgttcaaggagtttatcaagagatgcagaaaatccaggaaacaatttgtatgtgacaggattgtctcctaggattaccaagagagaactggagaaacattttgctgctgaaggaaaagtgatagatgtccatctgatagttgatccttggacaagggaatcncgtgggtttggctttgtgacaatgga

SEQ ID NO: 34582 - DNA, 308 bp, Glycine max
gtcctctcgacatgagtcacatttggctaccttcagatactgggatactaagcagtcatgtccagtgcagacacagctactcgcatagcgctgctatgctatgacagtgagacatcctctgatggctgttggcactgctgatagatatcatactgtttacaacttgcagaaacctcaggttgatttcaagagaaatgtttcacccttgaagtatcaaataaagtgccatgctgcattccctgaacaacaaagtttcatggctcgattcatagcatgtacagttggggtggatcacttgggccatagtc

SEQ ID NO: 34583 - DNA, 429 bp, Glycine max
cccttacttaaaccccggaatccggcccaaggaatcccccttattcacgattttggaaaaactgttgatatagaaaggtaggatataccactggccacagaatatatggcgcttttctatggtttcattgttagcaacattatgctgcttttcagttcagcatttgccaaaactgctactcctccctctctgagcccaactccatcaccagccccggcacccgactacgtgaacctcaccgagttgctcagtgttgctggtccatttcacaccttccttggataccttgagtccatcaaagtgattgacactttccaaaaccaagccaacaacactgaagaatgaattaccatctttgttcctaaggacagtgccttcaatgctgtaaagaaaactgtcctatccaacctcacctccgaccaaccaaag

SEQ ID NO: 34584 - DNA, 363 bp, Glycine max
agcaagagtaattctgtttgacattccagcacctgaggctgatgctgctcttgttagaaggtcaagttcactgttatcacatgccggggatcatcctcatagatctttccgtcgaaaacatagtggtcttatgagttggcctgaacatttctacaaacaagaccataagcagagatctgaaggagctgggcgacaaaccaatagtttatctgcaagggcaatgcagctgagcatttatgggagcatggtggacatccctccccggagtagaagtttgttaaccaatgatggtagaccacctcatagcttgtcctatccaaccattgtgtcacatcaaggtcgtcctcttgtttcagtcaaatc

SEQ ID NO: 34585 - DNA, 364 bp, Glycine max
agaaaatgtccaatcatctgacttgaacactggaggttctcatgttcttagtcatgtgtctccaccaaagtcatcaagcttctttgcagactttggaatggatggtggctttccaaagaaatctgggccaagttcctccaaagtgcaagtaagccatatgcttgcaactttggtctctgcaatgttatctcttatgcatccagttagcatacaggattaagttatatataaatatctagtctacattcacttcaacatttttttacatcatacagatccatggaacaaaacatggtcaacattgggagaaagtgttttcaagtgttttgtaaaaaataaatgctagcatacacatagaatgata

SEQ ID NO: 34586 - DNA, 369 bp, Glycine max
tacgtaaagctcaagattcggctcgagctaatactatatgtctagctgatggagtccaattcagagttcgacgtgattatcatcggagctggcgtcatgggcagcaccaccgcctagcaggccaccaaacgcggccttaaaacacttctcctggaacagttcgacttcctccaccactgtggctcctcccacggcgaatcccgcaccatccgcctcacctatcgccaacagtagtactaccctttagtcatggactcttaccgcctctggcaagatgcgcatgcccaagtcggctaccagatctacttcaaggctcatcacatggacatggcccatcactaggagcccgccatgcgcgccgtcatcgac

SEQ ID NO: 34587 - DNA, 264 bp, Glycine max
attctgatcgagatttctacattcttccgtttccccaaaacacttaagatccgtgacaatctttaatgcgccagcgaacacagcaatttgctggtgacttattgctacgagatgctccattcctagtcgtctggtttctctgtgtgagacaataattatgttcacgggtgccaggtggtacaccacaatgtatcaaactggaacattttttgtttggacttccacagtcttagtctcattcattgccagcatgtagttactcat

SEQ ID NO: 34588 - DNA, 370 bp, Glycine max
gcgaacaaagagtctaaacgaacacagaacgcgttgtgaagaatcgccgaagagggacaagtcatctgtgtccacagccgtacacgactggaaggaacatctcacgaagggagaagagtccacgacattgactgtggtggattttactgcgtcttggtgcggtccatgccgtttcactgccccaattcgtgcagagtgtgcaaggtagttgccaaatgtcatcttcgacaaggtcgatgtgtgatgaattggagactgtgtacaacgagtgcggaactgaggctatgccaaccttcctgttcgtgtacaacggcaagctggtgaataatgttctaggtgccaagtcagaggagcttcaattgactctaac

SEQ ID NO: 34589 - DNA, 357 bp, Glycine max
gtcaaagcacttcgcgaagcgtgacaagcagtcaataaagaacctggcgtcgtcgccgaagctctaggaggctggcaacgccccctcactggccattaaagccagcgtggataagaccaatatgaggttcgacagttatgcgaagcaggggttgctgtgcagcggtgcatggttgccgcacctgatcgtgaacggataccagacgcactcaggtgagttcatcacacccggtatactaatcctgtacatctccggatggatctgcagggttggtcggacccacttgattgctatcagggaccataagaatcacaccatgaatgagatcatcatcgatgttcctctggcttctcgctt

SEQ ID NO: 34590 - DNA, 348 bp, Glycine max
  unsure (1)..(348): unsure at all n locations
ctcgttctctgaaattttaattgacctttcccccctcattgcgaatctctatcaattgctcacgcatccgctcattattcaccctctgataagaaaccggcatcaaacggcccaacttgagaagaagccggcttgtcgangtgaaggtatcgatggaacgaggatcccagaagatgaagcagataataaaggacaacgtgtgagacctacaagattcacatcgtcaaagtgttgaagcaagttcatcccgacatctggatcttcatcaaggctatagggatcatgaacaatttcataaacgacatcttcgagaaactctctcaagagtcatcacgtctcgctaggtac

SEQ ID NO: 34591 - DNA, 386 bp, Glycine max
ggcagtggtgattccacagttcgattgtggaatattgactctggagcacttctagagagaagaaggccttgagggcattcctgagcctgaatgaaggcaaggccggctcgagattgtttgttgttgtaactcgttcttcttcttttgttgttttgtgtttgtgtttgttttttctctcacctgaaaatgtcttgctgcggtggtaactgtggttgcggaagctcctgcaagtgcggcaacggctgcggaggctgcaagatgtacccagacttgagctacactgagtcaaccaccaccgagaccttggtcatgggagtggcacctgttaaggctcaatttgagggtgctgaaatgggtgtgcccgctgagaacgatggctgcaaatg

SEQ ID NO: 34592 - DNA, 375 bp, Glycine max
cgtcgatgtacacgtggagacgcaaagcttgtctgagccattcaaagtcatcatggagcaaagtacaagatctcattgaagacacagactgtaaggacaaatactacaccttatccgatagagctgagtccatattgctttgcctgaagcaaagatgtcctgaactttcacagacttctttggacacatgcaagatctaatacaatcgggatgtggggaaggcagtactagagagttattcaagagttttgggaggcctagcattcaacatggttgcatggattgaagatgttctttatgtagataaatcaatgatgaaccgagatgtctagacacctcaacttggtaatcgcatcctaacagtgttgctttcca

SEQ ID NO: 34593 - DNA, 306 bp, Glycine max
tcgagatgagagccagggttgctgattttggactttcaagacatgacatggtggatagacatgcagctattccgggtacctttggctatcatgaccccgagtataaaccctccggaacattcactaagataagtgacgtatacagttttgaggtgttgctcgtcgaaattacagctggcacgaatcatcagcaaggtcatatggaagacgttgagcttgcagcaatgaacacagacggaaaacttgggtgcgaggaaaacgtggaatctcgctatcaacgaaacgttgatgtcaaggaattgcatt

SEQ ID NO: 34594 - DNA, 338 bp, Glycine max
gtatgcgcgatatctatcacagctacttatataaattcggcatagataacaccgtactctctaatatcccataccatgaaatacatggatatggggtggacgaacttaatggcagcttatctgaagagagggttagtcatggcgacgcagcagcattgccaaagacacttaaaagttacaacacgctgttgtcacatggcatcaacattgtgaacttagtcagaagatatcttgacagataggtcgttccatagatcaatctacataaggctggcatccacacatcggagcagttaattctcaaagatccacatcttatcactccaaatgcactttca

SEQ ID NO: 34595 - DNA, 356 bp, Glycine max
gcaacgcgtgtgatgacgcattcagcaagatgtgcagtggaggctgtaccacttcttcggcaggaggaggtcgagcacaggcgtgaagctgtgaaatgcacccccacagcattgggtcagtttcttccaggactcatttacagtgctgagacttccaacgcctgatgcacggtcctgatgtatcacatatcatgcctgtgtggctacctcaaagaggctagcgtgacgcagtatgttaactctccgaacgcccgattcaccgttgcttcttgtgggattcccattccaacgtgttacttcattaagccttcgtacaattaacgtgtgcgagatatctagatctatagatccacagt

SEQ ID NO: 34596 - DNA, 210 bp, Glycine max
ctcgaaggttggcgtttaacatgggtcgtttagtttcggagggtgacttgttcaccgttttggccccaatgaactaagcgatggcgaagttgacaacggagcaattaagcgaaccgggggcgccggagcagagaaggtactatcacattataccggagtactagaccgacgagagcaagtacaatgcggttagaaggttcgggaaggttc

SEQ ID NO: 34597 - DNA, 281 bp, Glycine max
gatggaagcacttgcaattccacaatcaaagtgttttcaaagcgctatccagtttgccatgtctaaaaggttgatagcagctcctgaaccaattcatgctatagctacactcatttgggaacctattcattgattagaggctggagaagccaaagttattctgacagcaatgtgtgaacatggacattttgatctgccagcttacgaaaagtccttgcagagtaactcgtttgacctctcattcacaaacgaccaaatgaagccttcattggccattattc

SEQ ID NO: 34598 - DNA, 404 bp, Glycine max
gggaatcttttgctgtgtttgtcaaggaggaagaaatccctaatttgaggaacatactgctgtccatctcagaagaaagatacttagagatgcataagagggcgaaaaaggtgcaagagcattttctctggcatgctgaacctgtaaagtatgatttgtttcatatgcttcttcattcaatttggtacaatagacttttccatataagccggacatgacgatatgaattttggagacaagtcactgtgattgatagcttgatgatgtatagattgtttgagttaacaaatgaagcaagaacaatatggttagagaaaaagttcattgattctagagaaaatgttattgtttgattcatatccctagagaataattgattcataataatgttagtgtttgatcat

SEQ ID NO: 34599 - DNA, 289 bp, Glycine max
gcaaaggcatatgaaaaatcttcaatcaatgagtccatgcagcttggaaaatgggtagcaagtggcgacaacactcttgttaaagatagtatcatctcccttgaagaggggaaggtcaaacaggagatctcagtgagacttcaacatgttgaaagaggagtgttagagattgaactcgaatgtgttcctctaactcaatagttgagatagatgttaagggtcaaaacttagcataacacaatttggagcattatcactatagatgtcctttctctgttctcctttgtac

SEQ ID NO: 34600 - DNA, 254 bp, Glycine max
agattattggagcagtgggaattccagtggaacatttatgtagtggaacaagagttgagggctttttccccatccttggtgctaatgggaaaccatgtaagggtggatcagtgttgagtttatccattcagtaaacccctgttgaaaaggtgcctctttatagccatggagtaggtgctggccctgattatgaaggggtccctggaaccaactttcgccttagaaaaggtggaaaagttacactttatcaggat

SEQ ID NO: 34601 - DNA, 290 bp, Glycine max
cccaattcgaaacccttaatcctctcacactcacatgttgattgatcttttgggtaccatttggacacaatctgccaccgttcaagattcccgcgggggacacattttcgacggcgggagacaaagttccttcggccattttcccaaaggcccgtttgaagcttccgaatgatggatcgcttcggcggtcatcggacaacaaccacaagttccctcatcaccgttgagacatacaggatctatatcttcaaggttctgaagtatgtccatcctgatattggtatctcaag

SEQ ID NO: 34602 - DNA, 347 bp, Glycine max
gatgaaatatccatgaatcccatgtcaaatgggttctgcacatgttgagacctgcaggcactttcatcggaaatgtcctcaaaagcagtggcctccttctggaccgctgatgatgtagagctggcgcatgagcttagttcataggcaatactacactcttgggagctccgctccttttcaatggttgggccgatcggtaccaggtgggctggtatcatcagagcaggctgtgtcagcagtgtccctatctttctcaacatcacgctcgcaggaactgatgttgggtacccaggtggggtttggtttgatccacttagctggggaagtggctctcctgagacgatcac

SEQ ID NO: 34603 - DNA, 326 bp, Glycine max
atcacatacagcagaaaacagttgacatgaatggcatacagctgcatgttgcagagtaaggagatggtccaatggtgttgttcctctacggcctctctgatctctggtactcagggcgccatcaaattctcatctctcagctccctcggataccgcgccgtctctcgcgatctccgtggctactgtgataccgattcaccacgttcaatcttcagctacaggagcttccacatagtggatgatcacgttgagcttaatgactcactggtggtcgactaaatgttccttgaggatcaggactgcagaagcatcataggttggtatct

SEQ ID NO: 34604 - DNA, 291 bp, Glycine max
atttgatgctctactggaattcttaactgtccgcaaacatcttgaactttatgcatagaataaaaggtgttccacatttagcaatagacagtgtcgttatgggaaagttgacatcatttgacatattgaagcatgctaataaaccagcattttcacttaatggagggaatagacgatgactgtcagttgcaattgcaatgagtggagatccacctattgtcaatcttgatcatccatccacatgtatggatcacattgccaaaaggttcatgtgggaagtttgatctacga

SEQ ID NO: 34605 - DNA, 370 bp, Glycine max
ctcaaaggagggtcacaataaggtggccttctttagctacttctacctagcttttaacattggccaactcttctcgaacaccattctggtctattttgaggacgaaggaatgtgggctcttggtttctggctgtctgcaggctccgcctttgctgcattggtcttgtttcttgtatgcaccccaaggtatagacacttcaagcctagtggcaaccctctctccaggttcagccaagtccttgtggctgcatcaaggaaatccaaagttcaaatgtcatcaaacggagaggacttattcaacatggatgcaaaggaggcttccaacaatgccaatagaaagattctccacactcacgggttcaagttcttg

SEQ ID NO: 34606 - DNA, 366 bp, Glycine max
tggcggtattaacattgatggcatttccactaagccttcttggaggaacttcagttacgctgaccttgccgttgccacggacgatttcagccctgagaacttgcttggaaaaggtggtcatgctgaagtctacaaaggatacttagcagatggtcaagttgtagcagtaaagaggataatgaggaatgaaaaagaagccgaggacagagctggtgatttcttgacagaacttggaatcattgctcacattaaccaccccaatgcaacacgcttgattgggtttgggatcgacaatggtctctactttgttctacaattggccccacatggcagcctttcctctttgctctttggttctgaatgttt

SEQ ID NO: 34607 - DNA, 406 bp, Glycine max
gcttacttaaactcggaattcggtccaagggaaccaaccaacaattttcaaaaaaaggatttggaattggaaaggcgagggattgcgctgcgtctcttcctcttctctttcgattcatccctcattcataatcttccaatccaacaacctcagcctcacactcacacatacacacatctgaacgcgtatcgtccctcccatggcttcaaagcgcatcctcaaggagctcaaggacttgcagaaagacccaccaacttcttgcagcgctggtccagtagctgaggacatgttccattggcaagcaacgattatgggtcctgctgatagtccttatgctggaggtgtattcctagtcactattcactttcctccggattatcctttcaaacctcccaaggttgccttt

SEQ ID NO: 34608 - DNA, 378 bp, Glycine max
gattgaaatacattggctatcaaattttgcctagagagagcactttgtatgagaaatatgataaaaatgatcctattctgagagaccctacaagcattaacaagaaggggtgggaatacacaaagaagatctatcttgacagccaaaatgtcatgttagacctcagaagattcagaaaaaggttgcatcgagcgtatgagtatacactctccaaatcaaaactgagtctccaacatcaaccaatgtgaatttcaatggtttcttttggttctccgtattcattgatgtgaaaaaaaattaaaattttcttaaaatctagaacattcttatatgcatataaaggcgcacctgaaaagttcttagtgcgatatgttgttg

SEQ ID NO: 34609 - DNA, 367 bp, Glycine max
cataacgcacaaagcaagctcatcctacagttttaaaaatggcatcatcctcctccatggctctctctgctccatccttggctggcaatggcgtcaatctgagcccatcagcccacgaactctggagggtcagcattgagaacaacgtcatcaagcaggcctcctaccggatacccatggaagcgcccaaaccgcgtcaagtacatgggcccaatctctggcaagcccccgtactacctcataggctagttcccatgtgactactgctgagacactgctgggctttcggtagaaccagaaaccttcgccataaactctgagctcgagctgatccactccacttgggccatgcacggggtcttgggct

SEQ ID NO: 34610 - DNA, 361 bp, Glycine max
ccaaaatctgacatttatgcttttggaatggtgatcttacagttattgacagcaaaaccagcaatagcacttgctcataaggttgaaacagctattgatagcgggaatttaacagacatactggatccagaggctggagcttggccatatcaagagacactagacttggctttgctaggattgagctgtgcagaacttcggcgaagagaccggcctgatttacaagatcatgtccttccaacactagagagattgaaagaagttgttgatagggcccaatgctcagcttcaattgttactattaaatccaaacctcctaatcactttatctgtccaatacttcaggatgtgatggatgacc

SEQ ID NO: 34611 - DNA, 380 bp, Glycine max
ctctctcgacctcctttaaattacatatataattatgactcataggttctggatgaatttgctttgcgttgcattattaacattgatcctattacatggggcatcaagaggacatgatgatgtcgtcaaaatcggtgccatattcacattaaaaaccataaacggacgagtttccaaaattgccatccaagctgctgagaaagatgtgaattccgatcctcgcatccttgggggtcgtaaattgtccataaccatccatgattccaacttcagtggttttcttggctttattggggccctcaagttcttggtgaccgacacagtagctataattggtccacaaagttcagtaatggcccatgtgctttcgcatcttgcaa

SEQ ID NO: 34612 - DNA, 254 bp, Glycine max
attttgtttcttgtcacattgtcagcactgtgtatgatacaaacttcataagtaaatcgaaagcataaatggtttctgacaaccattagttactctgtgagggattgcctcagattaaagtactagtatgttggcattcacttcacccgtgaaataaagcttctgtctacaaattcctaccaaagggcagccgcgttgcaggcgtttatccataggctccgcctcccagacgagcatcacaaacatcgaggctc

SEQ ID NO: 34613 - DNA, 320 bp, Glycine max
  unsure (1)..(320): unsure at all n locations
gagcgttttaacagaagtaaggctgaacatgagaagcgggaaggcgaggaggagggtgctggtggaggaaatgaacctggaggcagggatggtgaacaggaaaaggttggggagaaaaacacggttcgcatatttgtgcatagcggaaccgtggccgaaggtgtcgggggtggcgaaggtggacctggagagtggggaagtgaagaggcacgagtacggagagagaaggttcggtggagagccattcttcttgccaacacgtggagggaatgggaatgaggatgaanggtacgtgatggcttttgtgcatgacgagatga

SEQ ID NO: 34614 - DNA, 266 bp, Glycine max
ggagttgtccactaagagcatggctgtacaagctcttgtatcatcagcatctctgaccttcgcagccgaggttacaagacaaagtcttggctcaacatcactcgaatctcccattggcgtctcaagatgagccacctttcgtgtcatcgcagctgggccacgccatgtcaaacaaggatcagctagacccttgtggtttgcctcaatctcgagtctgtctcacgtgcatgggagccttccgggtgcctacggctttgagcctccgg

SEQ ID NO: 34615 - DNA, 241 bp, Glycine max
gctagcaaaaggacacatcgcacatgctctgttttgatgcatacatttccatttctctatttaacacttgttaccaaattctcgctacatccgccttcttttttctctctccatccaacatcgaaacgaggtcgttttgtgttccgccgaaggcaccggaggttgtagcaggctagcagcgatggctttggcatccaatctcggtggcaagattgacaccgccgaagttctctctgccgtt

SEQ ID NO: 34616 - DNA, 302 bp, Glycine max
gttgaaaagagaaaagaaagagaatgggttctgctctgtggacctgtctgagtttgttaacacttgcgtctgcatccttcgccgccaaaccaataacatgaattaaggtaccaattgccagaaacaagatgccgacctgtgcctttgattacatcaggaaccggaatggtggtacggaaatgcagcgtcagctggacacatagccacgtactggcatccagtcatcacggtcctacctagtaggtcagctcagcatgtacatacaataggtagctggagaatcagctggcacagtcatcgcc

SEQ ID NO: 34617 - DNA, 251 bp, Glycine max
gtacactcaaaacagaaagcagaaagcatagctcatccttgagttaacagatggcatcagcttcttccatggccctcccatccccatccttggctggcaaagccgtgatgctgggcccatcagccccagaagtgcgaagggtgagcatgaggaagaccgtcacggaacaggtctccgcaggaagcgcatcgtatggactagatcgagtcacgtacctgggcccaatctctggccagcctacgtccgtacct

SEQ ID NO: 34618 - DNA, 385 bp, Glycine max
ggtaaagattcatgggaatacgcccagaattgcgagtcagccaatgacggttcatgcgccaggaatccaagcaacctttatttcagcggaaacagcaacttggctgtacagactatcagatcagtgaatcccaaaggcgttcacatattcgttacaaaatgtataaacgtcaggttgagaaaacttaagctggttgcaccgggaaccagccccaatactgatggcattcatgtcagccactctgacactgtgataatgtccagaaataccattgcaactggggatgactgtgtctctctgataccaggactcagaaacattttcatcaacaaactcacgtgtggccctggagatggtatcagtatccgtagccttgggaagtatg

SEQ ID NO: 34619 - DNA, 377 bp, Glycine max
ttaaactcatatactaataataaagtcttattgcatattttatatataaaaatatgcaataagactttattattagtatatgagtttaatcatcaagtactaacaataaagtcttattgcatatttttatatataaaatattttactctatgaaagaaattaaagtatgaataatggagacatgctccctatgacttaatgagttatttttggattgggcttgttttgcaggaggaaggttacccatgacatggtacccacaagggtatttggctaaagtgccgatgacaaacatggacatgcgtccaaacccagcaacaggatacccaggaagaacctacagattctacaaaggaccagtggtgttcccatttgga

SEQ ID NO: 34620 - DNA, 230 bp, Glycine max
gcagatatcactaaaacctctacaagaactaactgatatatgatcattatgtggctctttcacttgttgttttagcaaggtatatacagtgcttgagtttgttacttttaacagcactaacaggcaactgcctgatattgtatttgttaccaccaacaacgtcactttaccctgcgtcatacaaccttttcgactggaaacatgcccctccaattttgacgggcaatttc

SEQ ID NO: 34621 - DNA, 371 bp, Glycine max
agccaagtgaatgtgagagaacataaagctcaaagagcataatgtcgatggatcattcacatgattggggatacccttcatgtaggagggcacaagaaggatgaggagcatgacggtgagcaccatgctggagaatacaaaggggagcaccatggtgaacacagtagtgagtacaacggagagcatcatggtgaagacaacactggatagtagcatggtgagcataatccagagcacatagaggggttcctagaccatgtcaatgacaagatccatggtgagggcggcgccgccgatggcgagaagaagaatattgagaagaagaagaatgagcatggccatgagcatggccatgacagcttcagcatcac

SEQ ID NO: 34622 - DNA, 373 bp, Glycine max
gctttggatgatgagagggtcaaggttgctaatcaggtgggaagtattccgcttgattgggctttgggagcttttattctgcaaacagcagctgatgcagatataccgaaccataactggattggcaccattttcagcgatgaatcacataccctcctctcaattattggaatttttataatattgttaacggcatggtctatatctaggtggaggaaacctcagttgaagacataatacattctaaaaaagggccaattaataacacgccagttgggaaattatacctgatgggagaaggaattatgggtcctgggttaatcatgtggaagcactgctgtgattaagatgaaaatatttaacccttaaaact

SEQ ID NO: 34623 - DNA, 366 bp, Glycine max
gacgtcggacgcacgcgtacgtaaacactcgggttcgacggaagcttggcgtggaagcaaacgtagtcaagtggcaaactgttcctgcagcttgcggagagtacatagctgactacgttctaggagaccaatatagatcagattccaaaacagttaaccaacaagcttatttctatgctaaatccctcaaactcaccaacaaagatgtctttgtcttggacgttgacgacactactctctctaatctccagtattttgctaaccatggatttggtgtggaaccacacaatacgacggcgtttaagaactgggttcttgatggcgaggcattcgcactgccagagactcctaaaatgtacaacaaac

SEQ ID NO: 34624 - DNA, 355 bp, Glycine max
actcattgctgaattcattcaagagggtgtgcaaataaatcttgatgccaaaagtttggtctcaggaacgaagctccacaattttttggagtttgtaacatcctccgaatttcccttgggagagagcgtatcaaaattgcgtacgaaagttgatccccttactactcagtatcaaataaccggagtctaagtgtatccgcataatgaatacgtaaaactatgacgctgttaacatattttgtccaataatcatgcgtcgatgtgtgttgctaatactatgttgtcacattttatggcatctcaagttccaactgaatggcatggatggctccacttcaatcactgatcacacagg

SEQ ID NO: 34625 - DNA, 414 bp, Glycine max
ttcatggctgatcggtggaatcctgccaacttaagagactcgagatatgtatggttgcctttgatagtggcaggacctgttgatcagcctcttgagtacagttttgaattcccattgtggtcaagagtgtctatctattggcacagaaaatggagactgcctcaaggctggaacggcttcaaataatgtagcttctctttgtacattgtaatatacaaagatttggtatacggttatatagaaacccgagtctcaataatatgctcactttaatttagggtaagctgagaatagtttgagggagcgcatgtatacgagaaagattatccacttgattgggattttgctaaaaatccagcattgtttatgaattgtgtcatgacatcatgttatgaaatggtagttatgtaaaaa

SEQ ID NO: 34626 - DNA, 145 bp, Glycine max
ggtccaagggccttgaatccaggtcccaacgggttggaaattttttgggaaccttatggttgctgggaatttgtccgtttccggggaacacaattttggaagaggttctgataacatccgtgacaaacatggcatctgggcggtc

SEQ ID NO: 34627 - DNA, 403 bp, Glycine max
gttcttcttttgtggcacaagaagaagcatgcatcaacagggtgataagtgatgaatctcgtattgctctctcttctgacagtacacaaaagggagataaagatgagttcctcctacctgaatttaatgatcttgttaaggacatggactttggagccatcattgtcagaaattcttttaaagaagatatggaagcaccatggttaaaagtaggatcttctatagcatatgctagtcccgagaaggacgactatgagcaagagataagtcaactcaggagcatgattagaatgcttcaagacagggggcgaagtcttgaggttcaactgcttgagtactgtcgtcttagagagcaagaaacagcagtgatagagctccaaaatagattgaaagcaagtaccat

SEQ ID NO: 34628 - DNA, 400 bp, Glycine max
gtccgtcgttttgctcaatacaaatggcttgcaacaagaggagtcaatgaagaagccatacttctttcactacctttggatcttcgtcgagaaattcaacatcacttgtgtctttctcttgtgcgccgtgtacccttcttctcacaaatggatgatcaacttcttgatgctatatgtgaacggcttgcgtcatcactgagcaccgaaggaacctacctatttcgagagggtgatccagtggatgaaatgttgtttatcattagaagtcaattggaaagctccacaaccaacggaaggaaggtctggattcttcaattccatctcactccggcctggtgacttttgtggggaagaattgttgacatggggcttaatgccaaactcaaacctcaacctacct

SEQ ID NO: 34629 - DNA, 391 bp, Glycine max
aaaaaaactatggctagattctgctggagaccagctgcggtgggtgatgatggagatgtgaatggtccacttgaacggctgctatggtacaaggatttggggaaccatccttatggggatttctcaatggctgtgattcaagctaatagttcattggatgatcgtagacaacttgaatctggaccattgacttcggactatttgggtcctcaaggaaccttcataggtgtatatgatggtcatggtggcaccgcagcctcgcaatttgtcagtgacaatcgtttctgcaatttcaagaattttgcaggtgaacatcaaagcatatcggagaatgttatacaaaaagccttttcagcaacagaagagggttttctgtccgttgtgaagaaac

SEQ ID NO: 34630 - DNA, 357 bp, Glycine max
ctgagacctgataaagattccatcttgccacttgggtatgtcccattctgaaattttcccccaatccccaatagcatgtgctttgttacattagtatcaatcaagtacaggaccaaaccaatttagttgaagcatattgataaatatagctctagccctcaaaagcaactgggcaagcctgttttggacgttgaggcatatgacttcgtcagcaccacctataagttgttgtccaatgaacactgctggtacagttgggcggcaaccaacctgaatcagtgccctctctatttgctgaccatttgtcattttgtcaatctcgataaccgtatggttggcaccaaagctgcatatgag

SEQ ID NO: 34631 - DNA, 395 bp, Glycine max
ctccggaatccccgccgtctcccttggtccctctcccggcccttctctctccgccaccggcaaccgcctctctgacttcgccaggctcctcgacttgaacttcgtgttcacgcccattctcactcccattcaccagctcgaccacaacagcttctgcattgacccaaacgaggtcttggccgttaacttcatgcttcagttgtataacctcttggacgagcctccctccgcggttgacactgcgctcaggttggccaagtctctcaaccctagaattgtcacccttggcgagtatgaagcaagtgtcacacgtgtcggggtttgtcaaccggttcaggactgcgttcaagtacttctctgcggtgtttgagtctctggagcctaatttggccgcg

SEQ ID NO: 34632 - DNA, 373 bp, Glycine max
ataatgttggagcattaattatggaaccagttatccaaagtgctggtggaatgcatatggttgatccactttttcagcgtgtgcttgttaaagaatgtcggagtagaaaaattccagtaatctttgatgaggtttttactggcttttggcgtttgggagtagagactgcagtggagctaatccattgtgtaccagatatagcttgctttggtaagctgttgactggcggaattataccattggctgtcaccttggcaacaaatgctgtttttgattcaattattggagactcaaagctcacaacccttttgcatggacattcttactctgcacatgctatgggctgcgctgctgctgttaaatcaatccaatg

SEQ ID NO: 34633 - DNA, 161 bp, Glycine max
agagaaagctatggtcgagtctagattcagggaacgtctcctccactccaggtgggttttgaaaaagaagtgggtgtttgggaggctggatgattttagcaagaagcaacttccacataatgtgacgtggggcttgagcttgagaggggccatggaacaca

SEQ ID NO: 34634 - DNA, 395 bp, Glycine max
aatatgaaaaacgccaagaaatggctgcagctgctttggcatataaatgcttggaggtggtatacatgagactggtttactgtaaacattctagcataaacagggatcggcatgagttgcaatcaactctacaaatggtttctcaaggtgaatctccttcgtcttctgcatctgatattgataatttaaataacctggcggtagcggacaaggctactttgacaaggggttctaatactcatgttcctagcaatcaagtcatatctgctcggaatcgcccaaatattgtcaggcttcttgattttactcaagacataaatcttgcaatggaggcttctagaaaatgcaagaccacttacatggctgctagtttgaacatggaagattcatggaat

SEQ ID NO: 34635 - DNA, 161 bp, Glycine max
gggaatttggccaaggggatgtcaattgttgcatcacgagctacaagattgccgagatatgcttcagttgcgagagaaggggatctaagtgacctattggctggaggggaggctatttcaactctcgttaatgttgttggtgttgggagtggaattcaatt

SEQ ID NO: 34636 - DNA, 399 bp, Glycine max
tctggaagtaattattggaactaaggatctatagctttagtttttacttggttctgtatgtttgtttaacaatgcaagctagattctgtcaataaaaaggtacatttcagtccacaaatacagattgatgcaagacagaatccatttcaaaccagaacccgttttcaatcttcaggtacccctgcagcgaaaactctttcatggcatttagcatcagagacaaagtctaccttaaaagggtcttcgcatgcttccccttccccaaagtaagtttaggaatttaatagtctgtgaccgtaccaaaactgctgcattttgtgtttttgatactcagcatagagggtattatatcagcatagatggtattatattacactttcacattgacttttgcagcac

SEQ ID NO: 34637 - DNA, 280 bp, Glycine max
gtcctcccacctcagtgattcatgtagccagcgattcctctccaattatttcttcgatataggttcatgaatgcaggcatttagggcaacagaagtgagtcagatcctaaagcatttgaagttcaaaagcttgcatcttattgagaagtgtttccttacaatattcgcgtgcgaagtcgcgacgcatgggggaacggtggggtgtgcgcgtagctggcatcaagaagacatcaattgctggaaagcaggcagcgtccaaagcggtggaggttccaaaggg

SEQ ID NO: 34638 - DNA, 188 bp, Glycine max
acttaaactcagaattcggctcaaggtcagtgaaaatggcggtacccttgctctccaataggatcgtgaattaacgcctcaagatgtttatacgcccccacagtgatcgcaagatctccgtcaaaccaatctggcgcagacccaagggtattgattctcatgtcatgacaaagtgcacatgatgcact

SEQ ID NO: 34639 - DNA, 345 bp, Glycine max
gtgaatgcaagcttgatatcacgccattggccacggggatcagcagcacctggtgccaatggcgtgaatgcaagcttgatatcaaaaactgctcacctaatcaactcagtgtaatgcaaggattcaggacagatttcttaagggcatttagtgtggttggcaacgccgcatctaaagggcattttatagatggttgctatgcacactgccaaactggaatacaagagacatggctgagaaatgactccccagtggtggccaagacatcaattgcaaaggcagtgggtgattggttttatgatcgaaggcccttccgtgagatagattgtgcctacccttgcaacc

SEQ ID NO: 34640 - DNA, 432 bp, Glycine max
gtcgcacgcacgcgtacgtaaactcagaattcggctcgaagctactttggcttggctttctgaattttgggttttcagtgctgagagctgaacaagaagatggggggtggaaatcaagaggcagtcaagcagctgcagaccctgatggaaaatgtggatgatgagcagctgaagaatacattccagattatgcaccagggttatcaaacggaaacgttaatacggtttctcaaagctagggactggagtgttgccaaagcccataaaatgttaattgattgtttgaactggagggtggaaaatgagattgacaatgttttaaggaagcctatccctacggatttgtacaaagccatacgggattctcaacttataggaatgtctggttactcaaaggaggatctacctgtcattgctgttggtgttgggctc

SEQ ID NO: 34641 - DNA, 352 bp, Glycine max
  unsure (1)..(352): unsure at all n locations
tccatgtacctggactatggtcacatgnttcttctgagaaacttggtcattgggcggggcactcctagtcaaagtttatctggggactctatctccaagcatggggaacttaaccaacctccagattgtgcttctacagaataacancataagtggaccaatcccttcagagctaggcaaacttcctaagcttcaaacgcttggtgtcgctgacaacttcttcaaaggggagattcctccctctcttgggcacctggagaagcctcgaagacctgaggctcaataataacagtcttgttggtgaatgcccagagtcactgggtggcatgacccagcttaagtttcgtgattt

SEQ ID NO: 34642 - DNA, 365 bp, Glycine max
attttcagttcagtgttggctcacttcatattaaaagagaaattgcacatttttggcgtgcttgggtgtgctctgtgtgtggtgggatctacgtctattgttttgcatgcaccgaaagagaaagacattcattctgtcaaggaagtgtgggaacttgctacaggaccaggttttattgtctacatttgcgctatagtgatattagtttgcgtccttcatttccgttttgtgcgaagccatgggcagactcatatgatggtgtatctcggaatatgttctcccaccggctccattacggttatgggtgtcaaagcagtgggaatcgctttgaagcttacatttgaagggacgaatcaatttgttta

SEQ ID NO: 34643 - DNA, 364 bp, Glycine max
aattcatatcatatcatatcttgttcgctatattctctctgacaccccccggaggattgtgttgaggacaaacacaacaacaaacatataacattccgacaggatggtctttcggagctccacctccctaattggcctcctgtccctcctcttcctcctctccgtctcctccgccattcgcctcggccttgtccgccgtccttccccggagctccctctcttccgggaggcccctgccttccgcaacggcgaggactgcggctcctcgccttccgccaccattaacgtagccatgaccctggatactaactatcttcgtggcaccatggccgcggtgctctccatgcttcaacattcaacgtgt

SEQ ID NO: 34644 - DNA, 383 bp, Glycine max
  unsure (1)..(383): unsure at all n locations
aagctgttcaagctacactctcttctctgccagacgaggttgtagatactgtgggggtgacaactttgccatctgaagattctgtttcagaaaggaagaggaagttggaatatcttgaaatgcaagaggagctgatcaaggaggaggaaaagaaagaggaggcagagcaggccaaaatggtagaatctgttggtagtgaaggggatttgggtattatgaaagagagggcttctgtggcgccgtttgaggtgtgcttcagtanggagaacgtgctcgccacgcggttgggggcggcggtgccaactattgagcttgtgctgcagaaccagaagacggtttggaggatttttggagcgaactcgatggttagtgtgagcgatgat

SEQ ID NO: 34645 - DNA, 376 bp, Glycine max
ggcttctccctatccttcaggcaaataacgttcacttttacatgaacgggcatgattattgccttgagcacaatagtgacaccgagagcccattcagttcctggactaccggggcagggtcaaaaggctggagaggagacatttgaaggaatgaaccgaagaagggtaaatttcttctatgatggacaaggcttcatgtcagtgaaattgactcagacggatgccaccattgagttctatgatgtttttggcaacgttttgcacagattgacttcttcaaaacagctacattcttccatgtaaagtttagagctagatactagacattgagattaaatagaccaatccaaattggttgaataaatttcaaaccaat

SEQ ID NO: 34646 - DNA, 363 bp, Glycine max
ctcccggattaaacatccttgcagcatggtctccagcctcagctggaatgaagttcaatattatatcaagaacttcgatgtcttgtcctcacataactggaattgcaaccttggtcaaagctgtgcatccttcatggtctccgtctgctatcaaatctgccatcatgacaactgcaacacttttggataagcaccaccaacccattagagcggatcctgatagaagacgggctaatgcttttgcttatggatcagggtttgtgaacccttcaagagttctggatcctggtcccgtctacgaatcacatccagactattttgttgcattcctaagttcacttggctatgactagaggtcactcc

SEQ ID NO: 34647 - DNA, 357 bp, Glycine max
atcagcctggcggaacatcttggtacccgaatatctgatcatattccagatacaccaaataggctttctgaggatatggtcaaatgtatatcagctatatattgcaaactcgcggatccatctatgacaaatccaggcctttcatctcccagttcatccttgtcttcaactagtgccttttctattggagatcaaggagacatgtggagtccaggtttgaggaataattcctcattcgatgtacggttagacaatcctttccatgtggaaggactcaaggagtttagtggaccatacagcaccatggttgaggtatcatggatttacagagaaaatcagaaattgggtgatactgag

SEQ ID NO: 34648 - DNA, 290 bp, Glycine max
attcagctcgagggatattcggcaagacgaccctttggtgtttggatcttcaaaaaaaaatacccttgggatttcgtcacaagaagtctcatcggcactgtggaagcaggtgaccgactaatcatttcggtcaaagcaagaattggccctccaggaattaagggtgctcaacttcaaaaacacatcgatgccacgttgggtactgggaacttgagggaggctgttaaactgcctcccggtgagaatattaatgaatggctaccggtaaaaacgttggactccttaaacca

SEQ ID NO: 34649 - DNA, 317 bp, Glycine max
tttttgtgatattgagaggacgaccctttggcgtatggatcatcaagaaagagagacccttgggatttcggcgcatgaatcgcttcgttcatggccacaaggtgaggactacattacatctcaagccctatgcaccatctagatgtaacggtgatccatctcaggcacacatcgagtctagggtaaggtaatgcgaacttgaaggacgtggtcagattggtacatcgctagggtaccccaaggctagcataagcacgtttgtgtcgttagtgagcaattggaattacctgggacgggttctttcagggtttgtatct

SEQ ID NO: 34650 - DNA, 379 bp, Glycine max
cacacaccttgtgttctgcaccacttcaggcgtggacatgcccggagcagattaccagctcacgaagcttctcggcctgaggccctccgtgaagcgcctcatgatgtatcagcagggctgcttcgccggcggcaccgtactccgcctcgcgaaggacctcgccgagaacaacaagggtgcgagggtgctcgttgtctgctccgagataaccgccgtgacgttccgcggcccctcggacacgcacctcgactcgctcgtgggacaggcactgttcggagatggcgccgcagcgttgatcatcggatcagaccccgacccagacaatcctgcccgactctgacggtggtattagatgggcaccttcgggaggtgggactca

SEQ ID NO: 34651 - DNA, 376 bp, Glycine max
attgaatttgtctacgaatcggttgacaggaaacatgcctgattctatgatgaactgcaccaagctcttggctcttgacataagccacaatcacttggcaggccatgttccttcatggatttttaagatgggtgtgcaaagtatctctctttctggggatggcttcagcaagggcaattatccttcactgaagcccacacctgcatcttatcatggtcttgaggttttggatttgtcatccaatgcattttctggtgtgcttccatctggcattgggggacttggtagcctccaagtcttgaatttttccaccaacaatatctctggttctattcctgtgggtataggagaactcaagtctttgtacattgttgac

SEQ ID NO: 34652 - DNA, 379 bp, Glycine max
ggtctccagcctcagctggaatgaagttcaatattatatcaggaacttctatgtcttgtcctcacataactggaattgcaaccttggtcaaagctgtgcatccttcatggtctccgtctgctatcaaatctgccatcatgacaactggtattacatgagtgtttggtttcacatcttgctctgaatgtattacatgagaaattaataactatagcttctacatccaaacatgatttcttattttttgacaaatttccaaacatgttttacatatatatagaggcatatattacccaatgcagtttgtctgagattcttcttaacagacattaaattttatgtcacttattgcctagatatacatactgaacaccaccac

SEQ ID NO: 34653 - DNA, 373 bp, Glycine max
tggtatcccccttaatgcaaccgattacaaggtggcctttctatgccttcttaggtggggccatgttctgcttgctagccagcagcacatgccacctccttacttgccactcacagcgcctttcctacatcatgctcagaattgactatgctgggattgctgcattgattgcaacttcattttaccctcctgtgtattactcatttatgtgcaacccctttttttgctacctctacttaggcttcataacattaatggggattgctactattgtcttctctcttctcccatttttccaaaagtccgagttcaggaagtaccgcgcttccctcttctttttaatgggattttctggtgtggcgcccataataca

SEQ ID NO: 34654 - DNA, 373 bp, Glycine max
gcaaatgcgggtctttgcaccatctccatctgggtttcggaaggtgatattggcaactaatattgctgagacatcagtaacaattcccggaatcaagtatgtaattgatcctggatttgttaaagcacgttcttatgaccctggaaaaggcatggaatccttgattataatacctacatccaagtcccaagctctgcaaagaagtgggcgtgcagggcgtgaaggacctggaaaatgcttccgtctatatcctgaaagagaatttgagaaacttgaggactcaacaatgccagagattaagcgttgcaacctttctaatgtcattttgcagcttaaggctttgggtgttgatgacatactaaggtttgatttc

SEQ ID NO: 34655 - DNA, 370 bp, Glycine max
gctgagtttggaattgtgactcagcaagattcttcttcttcgatggaccataaagatcagaatttttcctcgcaggaagcagacaaagaagaaactgaggagccccaggaagaagaagaatcttgctgagtttggaattgtgactcagtgtatagctccgacaagggtcaatgaccaatatttgactaatgttctgttgaaaatcaatgctaagcttggtggtctgaactcaatgttaggcgttgagcattcgccttctattcctattgtgtctagagcgcgaaccatcattattggcatggatgtgtctcatggttcgccagggcaaacagatattccttcaattgctgcggtggtcagctctagagaa

SEQ ID NO: 34656 - DNA, 342 bp, Glycine max
attgattccaagtggctcccgccgagcttgaagcaatgttaagtgctcaacaaggcatatccgatgctgctgttgttcgcatgagagagtaatctgcacgggaaagtcaagtttcatttgatgtaatagtcaaatggctctgatatagccgacgatcatatcatgaactacatttcacaaccaggtggttttttacgagtagaatatgtaaagttttcttcacggactctattccttagacaccctcaggtacggattcgagtatcaggtattatctgcgagacttaaggaatgtttagtagtgggtatttacgtccaagtatgatacacacgaacatcgtg

SEQ ID NO: 34657 - DNA, 265 bp, Glycine max
cgcgtacgtaagctcggaagtcggctcgagctctctctctctctctctagcgtgcacacaaaataatggacatgaaaaccatgcgactcatctcatgatccagaagtgagaaagggaccatggatcatggaagaagacttgatcttgagaaactatattgcaaatcactgtgaaggtgtttggaattcgttagccaaagcttctggtcttaatcgaacgggaaagagttgtcgactccgttggctaaacgaccttcggcctgatg

SEQ ID NO: 34658 - DNA, 386 bp, Glycine max
  unsure (1)..(386): unsure at all n locations
gtggtgagtatcatacctgtgctttgacagattctggcgaagtatatacttgggggaatgatgtttgttgtgcacatttattgattgaacggagaactacaagtcagtggataccacaaaaacttggtggatccttagatggtattagtatctcaagtgttgcctgtggggaatggcatactgcaattgtctctagttgtgggaagttatttacttatggagatggtacatttggggttcttggccatggcgatcttcggagctattcaagtccaaaagaagttgaatctcttagtggtctacgggtgaagtctgctgcttgtggatcatggcatacggctgctattgttgaagtcatgtntgaccgtttcaagtacaatactgct

SEQ ID NO: 34659 - DNA, 319 bp, Glycine max
  unsure (1)..(319): unsure at all n locations
cctgcactaaggggcattgagttccctacacgttcggatgttgatgtatgaaagctgggtagcttataggtttgaacatttttttcattaaatgatgtcatttatgcttacttcatgacagtgcagcgtanggcatgaaagtaatactctacttgattgctgatgttttaaattatagaattgtccagtagatgtatatatgtaatgttcgattcagattgttttgattattcttataatctaagaacctgtgatcttaangggactaaatgtagatttgctttcgaagaacaaaattcattccaagtgtttgacctgt

SEQ ID NO: 34660 - DNA, 343 bp, Glycine max
  unsure (1)..(343): unsure at all n locations
ctccaggatcatattggtggcctgcagaagcactgtgaggaaacaattatcagaatgcttctccaggatcatattggtggcctgcaggttctttaccagaacatgtggattgatataaccccagaacctggggctcttgttgttaacattggtgatcttctacagcttataacaaatgacagattcaagagcgtagaacatagagtacaggcaaatctcataggtccaagaatatctgttgcatgctttttcagcgaaggtcttaaatcatcaccaaaaccctatggacctataaaagaattattgacagaagacaatcctcgcanatacagagaaaccacag

SEQ ID NO: 34661 - DNA, 344 bp, Glycine max
gctaatcctagttccttcaactcctcgctggcaacaacagcaatactaccaataatggcgctccacaatcatgatgttcgacaacaagctctgtgacataacatgtgaagtgatagatccccatgccctggggctcatgttggtaacattggtgatcgtctacagcttataccaaatgacaaattcaagagcgtataccatagagtacacgcaaatctcataggtccaagaatatccgtcgcatgctttttcaccgaacgtcttaaatcatcaccaataccctatgggcctataaaagaattactgacagaagacagtcatcccacatacagataatccacagt

SEQ ID NO: 34662 - DNA, 346 bp, Glycine max
ggtcgactctagatgataccctcggggaattccaattccacattttcaagaactaatgaggcaaaaatgttcatatatgaattggtaatatttgttttcttattaaggctatcctgaagccacaggaaatgagatcggtattcctcggggaattccatttcacaatttcagaaagtatagaggcaaaaatgttcatatatcaattggcattaattgttttcctattaggcctagccggaagccatgggaaacgatatttgaaatcctcggagatttccaattccacattttcaagaaataaggaggcaaaaatgttcaaatatgaattcgaagtatttgttttcgt

SEQ ID NO: 34663 - DNA, 416 bp, Glycine max
caaaagcaaaagatgaagatccagtgtgatgtgtgtgacaaagtggaagcctccgtcttctgtcctgcagatgaagctgctctttgccatagctgtgatcgcaccattcaccgcgccaacaagcttgcaaccaaacacgcccgtttctctctccactaccccacctccaaagacttccctctttgtgatatatgccaagagaggcgtgcatatctattttgccaagaagacagggcgttgttatgcagggaatgcgacgttcctatccacagagccaatgagcatacccaaaagcataacaggtttcttctcacgggtgtgaagctctctggtacttgtttagattctgcttcgtcctcaacaatttacacaataataatagagtcactggctctgaaggaagaaacgacgctcga

SEQ ID NO: 34664 - DNA, 412 bp, Glycine max
aaaaattgatctgcagatcgtctctgatccgttgcttcaaaaatcgacgttttcactacatttgggacaaacaattgtgatgctacagtaacgctggaacaagggatggtcctgctatcggaaacgactagtcaactacataatcctgctacagcgtgtgtgatcaatactcgtggttgaatatcaatagccaaacgactctacaggtaagtaacatactgaccaccaatcggtactgtggcgtttcacctgaaatagaaccgttgataggttatacggtcacaaaccaggtcgctatgaacccaatcattactgtattagatgcaacacctatgattggtatacgtatttctgaagcatccgtacaaagtgacatgactcagtcgccgttcaaggttaatcctggacctgc

SEQ ID NO: 34665 - DNA, 380 bp, Glycine max
  unsure (1)..(380): unsure at all n locations
tagagaactggtactacaagatattgctacttatgactggccagttggagaatgccactatcgctgtcgatgccttgtctgtatgtatgaccatcaaacgggtgggaaatgatgattcccctggctttcttcgcgggtactggggtaagggtggcgaacgagttaggcgcangaaatggcaaagcagcaaaatttgcaacgcaagtatcagtggcacaatcaacaatcattgggcttatattttgcgttctgataatgatattccatgagcatatagcatacatattcaccaccagcactttcgttctacaagccgttgacaacatgtcattactcttagctatcaccattcttctcaacagtgtacaacccgttttgtc

SEQ ID NO: 34666 - DNA, 397 bp, Glycine max
aacactcataacacaaagcacaaagcaaagctcatccttgagttaaaaaatggcagcagcttcttccatggctctctcatccccatccttggctggcaaggccgtgaagctgggcccatcagccccagaagtgggaagggtgagcatgaggaagaccgtcaccaagcaggtctcctcaggaagcccatggtacggcccagaccgagtcaagtacttgggcccattctctggcgagcccccgtcctacctaaccggtgagttcccaggcgactacggctgggacactgctgggctttccgcagacccagaaaccttcgccaagaaccgtgaactcgaagtgatccactccaggtgggccatgctcggagccttgggctgcgtcttcccggagttgctg

SEQ ID NO: 34667 - DNA, 408 bp, Glycine max
agaataattatcttcttcaaaataaaataaaaaaaaataaaaaaaggaagcagataggaaagggttgaatccaaaaaaaaataaaaaatggcatttcttgacgtacggaaaaaaataatgggtagggtttggacttggacgatggcactgatgctttgcctgatggcagcatcggttaggagcgaggacccttatatttactacacatggaaagtgacatatggtaccattgcccctatgggtgttccccagcagggtatcctgatcaatggccagttccccggccctgaaatcaactccaccagcaacaacaatgttgtcatcaatgtcttcaacaacctcgacgagcccctcttgttcacatggcatggtgtccaacacaggaagaactcctggcaagatggtaca

SEQ ID NO: 34668 - DNA, 338 bp, Glycine max
ttagaatatcgtgggcagtgttctgtgaaccccccaaggagaagatcatcctgcagccacttcccgagcttgtcactgagacagagccagcacgctttccacctcgcacttttgctcagcatattcaccacaaactattcagaaaggatcaggaaggtctcccaaattgatcactgcaggcatcacatttgtatttgtttgcttgtcttatgaattacttcttagttcttatgggttgtactaataaactaggccttgcatgtcggtgtggcctcatcaatcatcatgctaagtttgttttatcctttattaaatactattgatattaatcgtgtttg

SEQ ID NO: 34669 - DNA, 354 bp, Glycine max
cattttcattggcacaatgcctgatgccaatgtgataatcaagaagcttagagaagctgaaggattaacttttggcaacagagtctattgggtgcgttttgatgaagaattttctgataagaaatttaaatcttccagcccttttggaataaagtacacgttccatttggaggacgctgttgattgtcctgaatggattgtccccttccatgtagtcaagtcattagctgaagagaatgactttgagcttgttttcgcaaagaactcacatgaatttgtgcatgagtatatgaaaaaaccggaatttgtggagctcatgcgaagacttggtgcattgggagatggcaaccaaga

SEQ ID NO: 34670 - DNA, 402 bp, Glycine max
tgatatagttgttgatgaccaggacagaccattacggacttctcagctgcatactaaagatgttcaagctaaacctctcagtggttctgctaggagttgcactaaagtaagatccttcactatttgattgaaaaatgagagctagaagtttactgggaaaattaaccacatggtatttgttttaggttcacaagaagggcattgcacttggtagatcagtggaccttacaaagtacagtggctatgatgaattagttgctgaattggatcagctgtttgaatttgggggtgaattattgtcaactaaaaaagattggcttatcgtctttactgataatgagggtgatatgatgcttgtatgcgatgatccatggcagtaaggatctgtattttaattataca

SEQ ID NO: 34671 - DNA, 416 bp, Glycine max
caattaaggaaacatttgataaattggttgaagatgggaagatcacaccaatcaaggaaatcacacctccaccaatccctgaggaccttagtactgcaattaagagtggaaaagtccgtgctccaactcatattatttccaccatttctgatgacagaggagaggagccatgctatgctggtgtacccatgtcttccattattgaaaaaggttatggtgttggtgatgttatctctcttttgtggtttaaacgaagccttccccgttactgtactcaatttattgaggtaggctattcaacagcagagatttcattgaatactttcctttcacagtgtttgtctggagtatgtgaaaatattctacactctacagacaaacttttatgttgtcagttttccttttagatttttttt

SEQ ID NO: 34672 - DNA, 368 bp, Glycine max
gggaggtactacaaacttctattctaatctcgcagttttagcaattatcacttggcaaatcttgcttgtctgtgtaccaatggtttacattacaatacgcttgcagaggtactatttttccactgcaaaagaagtgatgcgcatgaatggcacaacaaaatccatcgtagctaatcatgtagctgaaactactgctggagttgtgacaataagagcctttgaagaagaagatcgtttctttgagaagaatcttgatctaattgacatcaatgctagtcctttcttccatagttttgcctcaaatgagtggctgatccaaagattagaaataattagtgcaatacttctttccttcacagcactatgca

SEQ ID NO: 34673 - DNA, 336 bp, Glycine max
ctttttcctgtcgacagtcaatgcatagagctcgtgcagatctagagcagatgcaaactgtgtcatactgagaagcttagtgacatacagtgtcagcctgagtcacagctttagttcataactgatgcctggcgacaaataattgaatgtacaacagtgctgaaatggtcatatgcatatgggttctatttgccggatcatgagcatgcaatcaagcagttctttgagtacttaccaagtgactcagaatctggtctggcgagacttcatcaatgcgcagaagaggaactacagccattcttaactgctgatgattcatctagagaatttaatgac

SEQ ID NO: 34674 - DNA, 387 bp, Glycine max
tgataaggttattgttgaagcctttaagatggtgaatgcagatgacaccatgacagttaaagaatacgaattcaagagattgataaggttattggtgaagcctttaagatggtgaatgcagatgacaccaagacagttaaagaagacgaattcaagaaaattttaagtgaaatacgggtagtatcacgttacagttagaggcaaatcccatatctgtttcttccaattcagttgtgcatgagcctttaggctcatcttctacactcttgcagccatctagtgaaacagcataattgtctcaagtttgtgacgggtcaaaaactaagtacaataagattttttattcatggaaattgttactgacatagtttatcttttaagaaatca

SEQ ID NO: 34675 - DNA, 398 bp, Glycine max
tcggcggcaattgccagattgccatcattattcatagacaatacaggaggcaatgatgtgcatagatgaattggcattacttgttttcttaataggcctatcctgaatccaaacgaaatgagatcggaattcctcggggaattccacttccacattttcaagaaataaggaggcacaaatgtccatatatgaattggcattatttgttttcttattacgcctatcctgaagccaaaggaaatgagatcggtattcatcggggaattccaattccacattttcaagaaatacggaggcaaaaatgttcatatatgaattggaattacttgtattcatattaggcctatcctgaagccaaaggaaatgagatcggaattcctcgggggtaccgagctcga

SEQ ID NO: 34676 - DNA, 307 bp, Glycine max
gtccaagccctatacaaccaatccctaacacacactcatttgattcaatttctatggctagcctcatcgttgcatttttggctgcagtgctctgcatggttgtggtgagtgcacccatggcacatgcaactatcacgtgcgggcaagtgaccaatagcctgatcaattgcatctgttacctccagaacggaggaacgccgcacgtcaggatgctgcaacggactgaacagcctcaatgccgcagccactgacatcgcagatcgacaaacggcgtgcaaatgcctcaagtcggccgccattcaaatct

SEQ ID NO: 34677 - DNA, 289 bp, Glycine max
caattctgtaggaaactacatctggaaggttaatcgcaacggagatgcttcgactttatcaaattcgccgaagttcaccgtacacgccgtggtacgcgacacaatgtagatcttctgccgcctaaacggcatcgtttacaacatcaagggctaactattggaggtgcaatccaatacgggaaacatgtttaaaatcgataaggacgatgggactgtgagacaagtgcttctcaacgaggatctaatgggcgctgacggagttgccttgaggggagacggagtcgttttg

SEQ ID NO: 34678 - DNA, 312 bp, Glycine max
  unsure (1)..(312): unsure at all n locations
tcagcttttcccatcgtgaaatgagtatgggttcttcattgaggcacttgtgtctaactttggattcactagtctcttcagcattctgtgcctttccacggcagtcagtcgatgttccattctgcatanactacgttcctacctgggcctctgatcacatcacatacttcagtgcaggttctgacaatcaagttcatctgtgacagtacactggtaatggcttctagtgcaaagggtcatacgtgtatggtcacttcagcatgagcatgaagatggttcctggcgattcagctgtgcaagtcactgcatttt

SEQ ID NO: 34679 - DNA, 358 bp, Glycine max
ctttagatgctttgatgatggacaaatcacatcaaatcgcatcttctacacgctcagactaatgtctgcatcatggacttgttgacactgatacttccatggtcttggcagcttatgagtactacaggcatgacggtgttgtacggaatgtgattgacatgtatgttggagaactataaatgattagattcaagcacgttctcaaagttgatcaagcctagcttgacactgtgactccagatattatagggcgtgtcaaaatagtcatttcagcatatccatgatcatttgctacactgttgcgggtggatacattcactttttgtgctaatgtgcagattgacaatcgagcttatga

SEQ ID NO: 34680 - DNA, 409 bp, Glycine max
ggactgcacaaacttgcttactgcaataactggtgataactgctgcctcaattcttcagtttttgatcaattcattacgaatgaacctcagccaacagcaacaaagaacatgatgcacttggctcagattgttagaagtggggttctggcaaaattcaattacggaggaaaatctcctcaaatctataacctttccaatatcccccacgacctccctctcttcataagctatggtggcgaagatgcactcgctgatgtaattgatgttaggaatatgctagctgacttgaagttccacgatgaagacaaactaagtgttcagtacatcaaggaatatgctcatgtagactacattatgggagtcaatgccaaggacttagtgtacaatggtattacttcatttttcaag

SEQ ID NO: 34681 - DNA, 393 bp, Glycine max
aagagctatgaaatcgcatgcacgcctacgtaagatcggaattcggctcaaagttaatctctctctctctggagcgtcctcgcttcgtcacggcacacaaccccttttcggatcggcggagcaatgcctcaccggcgagattcccgacgctgttcaatcagccatcgaacacctgcgaaaagccgcaaatatgaacgttttcgttaaaactcgcaatggcacgcacttcgaaattgaagtgaaaccctcagacacactttctgaagtgaagaataatatagaaaccgttcagggtgaacatgtctatcctgctgcacaacacatgcttagtcatcaaggaaaagttcaaaaggatggtactactttggcgcaaaatatactagctgaaaatag

SEQ ID NO: 34682 - DNA, 379 bp, Glycine max
ggaattattaattggtgtttactgggattaatgaaacctagctagaaaggaaaatgatgggagaacaagggagtgtattttatatatatatatgtaaaaatttgtgtattgtttgtagtggttaaatttgtgaaaaaggtaaaaggttttttctttctttctgggtatacatactaaagggtttttgagagttcagtctgctttgagatttgtgttttggatgatggaggaagctcagggcagttctagttccctgccacctttcctcaccaagatttatgagatggtggatgatccttcaactaattccattgtttcatggagttccaccaataggagtttcattgtttggaacccaccagagttttcaagggatttg

SEQ ID NO: 34683 - DNA, 382 bp, Glycine max
cttttaatacctttgctcccaataaggcagcaggagatcacagaactccaattaaactaaaagaaatttctccagatcaatcaaatcaaactgcagcagatacgtggaatccatggcagcaaccagaccagacaggaggaggaggagcctctcaaactatccatgaaacacaactcaaggcatctcgcgacgtggcaatggcaacagctgccaaagcaaaattacttcttcgggagctaaaaaccgttaaagcggatttggctttttctaaagcacgctctgctcaactagaagaggaaaacaaaatgctccgggaccgcgagggtaccgacaagggacaaaacgttacccgtgcagatgatgatttgatccggcttcaact

SEQ ID NO: 34684 - DNA, 423 bp, Glycine max
gacgtaggacgcacgcgtacgtaagctcggaaatcggctcgagtgtggttgttccaattttcctacctgattgtggggagtgtatcgattgcaaatcaagcaagagcaacctttgttcaaagtttccatttgaggtgtctccctggatgcctagatatgccacttctagattcacagatttaaaaggagagatcatacatcatttcttgtctgtttctagttttagcgagtacactgtggtcgacattgcccatctaatcaagattgatccggcaataccacccaacagggcatgcctcatcagctgtggtatatcagcagggataggtgctgcttggagagcagcaagtgtggagccagggtctacagtagctatttttgggctggggagtattggattagcagttgctgagggagctagac

SEQ ID NO: 34685 - DNA, 178 bp, Glycine max
ggggatttgaaggataagccagggtggcaaaagatgcaaactcggggagaggtggggtgaggcttcggctagcctcatagtggagtgcgtcagctcttcaggctgggggttaactttggacagtatccagagggaggtgtaagcgtgaagagggcggctattagcaggagattcatgc

SEQ ID NO: 34686 - DNA, 380 bp, Glycine max
gctagaaacactcatctgaaaatgaccatgcttgttttgtttgttgctacagttttggtagcatatgaatgccatggctcagactaccagaagttccctctccaaatgaaaactgggtttggtgggcaatacagcagtgaggtggcatgtgccagttggaggcttggcgttgcagcacataacgtagtcaagtggcaaactgttcctgcagcttgcggagagtacatagctgactacgttctaggagatgaatatagatcagattccaaaacagttaaccaagaagcttatttctatgcgaaatcgctcaaactcaccaatcaaagatgtctttgtcttggacgttgacgacactactctctctaatctccagtattttg

SEQ ID NO: 34687 - DNA, 364 bp, Glycine max
cgaagttcctgactcaatgagaagcatacgaatggccttgtatcttactgtacttggagtacgatttttcttaagtaactttttactcagcagtgtggaacatgtcacggggaaaactggcagaagttggattggaaaggagataaattcaagccgtatggatacgttttagtggatgcgagctgtcataaatgcttttgttctgtgtgtctttctcttggtgtcgaaaaggtacacctataagactgtacagagaagagctatggaaactgattcatgtaagagtgatggggttgagatggtggcatgatgagagcttcacagctgtacctctcactgcgatattttcagctgaatcaaatgt

SEQ ID NO: 34688 - DNA, 333 bp, Glycine max
gtaagatgattaattcaatgtcatgacacattctcatgttaggaaaatttggacatcatctggacatcaaagagaatctgacatcatcgactacagacatacccttcacttgttgaaagaatagctgagagacaatacttattatggtggagacagtctaagtttcgtcgatatagcacttgtgccaatccacacttggttcaacacccattaaacttttggtaacctcaacaaacacagtgagtgccacaactctattgcatgggctaacatgcgccatcacaccaattgcgttgccaattcccttcctgattagcaggaggtttattagtt

SEQ ID NO: 34689 - DNA, 350 bp, Glycine max
atgtattacgctgtcaggaacacattgaggtgatggcacacatatcagatatgaagaagattcatttgcgggtagaattgaaattgacggaacattttcagaatgccaatacaagtgagtcttaccggaaacgagggtcatgtttgccctacttctaaattggaaaacaggactacttaacggccattgttcaagtaatgtgcaatgctgcaaacaaatcaacgaatgaatagagaatgcacgtgggtccatggaggaagagcagcttcactgcacatgaagtggtcaagattcaatcaaagatgcaattctaatacatccttgggtacaattgcgacatagccccatgc

SEQ ID NO: 34690 - DNA, 354 bp, Glycine max
cgcctctaagctcgcagttccatgatctcgcgactcaagatgcatatattcgtgagaactttgactggcaggaccatcacccttgaggtgaaaacttccgacacgattgaccacgtaaaagctaacattcacgacaatgaagggatcccacctgaccagcagagacttagctttgcgggtaggccacttgacgatggtcgcacccttgccgattacaacatccagaaggaatcaaccctccatctcgtgctgtcgcctcaggggtagcatgcacatctttgtctagacttgaaccgggaagaccatcacccttgaggtgcaatcctctgacattactgataacgtcaaggccaa

SEQ ID NO: 34691 - DNA, 406 bp, Glycine max
aggaagcctaacttaactccggaattcggtccaacctttcaatggactccatttcccccttcttggcaaggaactctggtcccggtaaccggtgattttggttcgggacaatgtctcgtgtttatgttgggaatttagaccctcgagtcagtgagagggacctcgaagatgaatttcgtatatatggtgttcttaggagtgtctgggttgctcgaagaccaccgggatatgcatttattgagtttgatgataggagggatgcacttgatgcaattcaggccttggatggaaaaaatggttggcgtgtagagctttctcataattccaagggtggtggccgaggagggcgtgggcgtggaggtgaagacacaaaatgctatgaatgtggtgaacctggacactttgc

SEQ ID NO: 34692 - DNA, 327 bp, Glycine max
ctttggcacggcaaaatgtatctcaacagcaaaaactcacgcatcaacttatagcctatagttccaaggacataagttgatgcgtgagtttgcccgaacatctaggctgaatgaaaaatcagatgtgtatagttttggaatacttctgctggagctacttactgggaagaaggccgtggacaatgagtccaatttgcatcaattgatattgtccaaggcagataacaacactgtaatggaagctgtggattcagaggtctctattacctgcactgatctggctcatgtcaagaagacctttcagcttgctttgctttgcacgaaaaa

SEQ ID NO: 34693 - DNA, 382 bp, Glycine max
gaatattgaaggtgaatatggacggattgttcaaaatccaactgaagaaatcaaggtgctttgtgttaacactttggaggccggagtttttagcagtggatttccgacagtttctgatcctgtggaggcatacacttaccctgaatatttgaaatctggatggaacttgaataatatactttcactctcaggatcccttctttgttttgaaagctctgaagcttcacgtaattttgcccccaagattcacatgggaatgtgcttctctccactcaactggaaagttgaagagcaccacttatactcattatattacgtgcatttgggtgaaccaaaagtgtggtatggcatcccaggaaaatttgctattaactttgaaaca

SEQ ID NO: 34694 - DNA, 381 bp, Glycine max
cgctctctcagtttcttttccccaaattgtttttcatctaacaatttactttgcagaaccctaaccctagccccttcgcctaccttgtaaccttcctttcgattcttcatctcgcagacaatgggtgaaactaaggacgaagcatacgaggaagagcttctcgattacgaggaggaagacgacaaggcccccgactccgccggagctaaagtcaacggcgaagctaccaagaaaggctatgttggcattcacagttcgggatttagggacttccttctgaagccagagcttcttcgggctattgtggactcgggatttgagcatccatctgaaggcaaactatctatttatctgaatcttttatttaatttgcagttgttg

SEQ ID NO: 34695 - DNA, 386 bp, Glycine max
atggcctcagcatcaggggaggcaccaccaccccaacccacttcaacagaagcagctccagcatcaggctcttcagctccagccatatcagcagcagcaccacaacccggaggatcatcgccggcgcctccgagccgctacgaatcgcaaaagcgtcgagactggaacacgtttctgcagtacctacagaaccacaagcccccattaacgctggcgcggtgcagtggcgcacacgtcattgagttcttgaagtacttggaccaattcgggaaaaccaagggttaaatcacggggtgcccgtactacgggtaccccaaccctcctgcgccctgcgcttgcccactgaaacaagcgtggggaagccttgacgccctgatcgggcgact

SEQ ID NO: 34696 - DNA, 401 bp, Glycine max
tgcatatttgccgaacttgtaaccaaacaagcactctttcctggtgattccgagctgcaacaactcctgcatatattcaggctattgggtactcccaatgaagatgtgtggccaggcgtgagtaaactaataaactggcacgaatatcctcaatggaaccctcaaagtctatcaacggctgttccaagtttagatgagcttggactggatttgctatctcaaatgttgaaatatgaaccttccaagaggatttctgccaagaaagcaatggaacatgtatactttgatgacctggacaagaggcacctttagaaagaacaaattgatccaatatttggacgtagaattttatgactaccaatttactctatgcttctctcgagcgtgtattctaatccgtt

SEQ ID NO: 34697 - DNA, 372 bp, Glycine max
tgttgagcttttttgcgagtccatttggcaaaagggttgaatgggcattgaaactgaagggtgtggagtatgagtacatagaacaagatatcttcaacaagactagtctccttctccagttgaacccggttcacaagaaggttccggttcttgttcatgcccacaaacccatcgctgagtcattcgtcatcgttgaatacgttgatgaaacatggaagcagtatccactgttgcctcgagacccttatcaaagagcacttgctcgattttgggctaatttcgctgagcaaaaggtaatttctaaatccccttttagtttttgttttccgcacctggatttgggagatggatatttttttagtttttcataaa

SEQ ID NO: 34698 - DNA, 335 bp, Glycine max
tggaaagggatacaagccgtccacgtggctttgggtttagcacatttgcagaccgtatgggaatggttgatgcaatcaacgaaatgcattgcccggaaattggtgatcatttcatctcagtcaacaaagcacagcccacaatcgggggtgatgatacagaccaatgttacagatgtggctactcatcacgtggtacgggaagctatagtgctggatatagggtatgacatgatgactgcttcatatgtgggcgtctagtgcattgtgcccaatattgtcctttggcaagatgtggtcgttgtcacagtggtagttcatatccttcacgtcctaag

SEQ ID NO: 34699 - DNA, 372 bp, Glycine max
gtatgaatacatgccgaacaaaagcttagaatttcatcttttcaataaagcatatgatcctcttccttggaaaacaagacttgaaataattcttgaagcagctcaagggttatcttatctgcatgaagaattagaaattcaggtgatatatcgagattttaaagcttcaaatgtactactggatgaaaactttaagccaaagttttctgatttcggacttgcaagggagggaccagtagctggtgatactcatgtttcaacagctgtgatggggacatatggttatgctgcccctgattacattgagacaggccatctcactgccaagagtgatgtgtggagttttggggtggtgctatatgaaatacttac

SEQ ID NO: 34700 - DNA, 328 bp, Glycine max
gtcgaagcttcttaaaatttgctggataaacgagactgagaatgcattgcactggatatgaccatggtgaatgctaagggcaataactccaacgccaagactaatggtcttaaacaaaatgccaagaagatagtccgaattcatgtttctaaaaccaataaatctttcttcttctacctcaatcacgcatataaatacttagtccagggcaatgacgtctagctctctgcattgggcatggctagtccaacggttgtaatcatctctgacattttgaaaagcaacggctgggcatttgggaataatattacaacatccactgttgctg

SEQ ID NO: 34701 - DNA, 255 bp, Glycine max
cttccgaggtaaaatgcgcaagttttaggcttgcagtggcagcacacaagatccgagccttgaaaaccattcctgatgaatgcgtagaacgaatcaaggactacattaagggcgaacagtttagatcagactctaaaacagttaaccaacaaggtttcttttatgcaagggaacggcaagtccatcacaacgacatatttatattctgcatagataacaccgtactctccaatatcccatactatgagaaacatg

SEQ ID NO: 34702 - DNA, 336 bp, Glycine max
cgccagggtttcctccatctgaacgaacatgccctcctccacgttctagaaggagattgacaacaaccacactgttgtgcgacgcgatggcccactgcatcgaccttctcagtaacgctggcgatgacatgcatcaatcctttcgcaacttggaccactctgaactagacaagtcgagcaattacgcctatgatctcaacgtcaggatcgcaggtactctcgctcacgaaaagacatgtttggatgagttcgagaacatcaacaccgaggctggcagcgacaaggtcagggttcgcaacacttctttggatctcacatgatcccattggtcatagt

SEQ ID NO: 34703 - DNA, 398 bp, Glycine max
gagaaagggtgggtattgcttcacacagacacaacagtgtctgctgcaccttgcaatggtttcgctatcaacatggtttcgctacattgcccacaagctcgaatactccttctccctcagctggaagaactacaaaggaggtcaaattacagacagagaggtacgtgatgttgtttggaaaaacttctttcaaggaaagctgacgtacttgcactggaataaaggagaggagatggcccctactattgatggaaaagcagtaactcttgttcggaaattaccagttgtagacccaacgcgtgtttttgtaggagatgttgtggttgtgaaggaccctgagaagccagataactacctactcagaagattaactgcagttgaaggctatgaaatggttt

SEQ ID NO: 34704 - DNA, 368 bp, Glycine max
atgattgtcaacgtccttgtattcatcgttgctacacatttggtagcacggcaatgccatgcgtaggacatgtatccaccccgaatgaacactggtcatggtgcccgtactccggaggtgaaatgcgcaagttggaggcttgctgtggaagccacaccatctttggctttgagacgattcctgaagagtgcgttgaagcagaaaaggaatacgtccgtggcgaacaatatatatcagacgccaaaacagttaaccaacaagcgtacctttatggcagagacctcgaagtccatctcaaggacacatttgtgttcagtagagatggcaccgtactctctaacattccatactacaaagtacatggatat

SEQ ID NO: 34705 - DNA, 397 bp, Glycine max
ttccttcatttccatccccttctctcttttaaacctcacgcacaacgaaatcgtgattctgttgttcttttgaaatggaaaacgctccggtggtgtgtaaggaagatgatcagatggatttgcctcccggatttcggttccacccgactgatgaagagcttataagccattacctctacaagaaggtcattgacaccaagttctgcgccagggctattggagaagtggacctcaacaagtctgagccttgggatttgccatggaaagccaaaatgggagaaaaggagtggtactttttctgtgttagagacagaaaataccccactggcttgagaaccaacagggccaccgaagctgggtactggaaaggcacaggaaaagacaaagagattttcag

SEQ ID NO: 34706 - DNA, 325 bp, Glycine max
atctaggcctctttgtttggtcaagcaccaaaggcgggggggaaccactatgggcgagaccccccggcctccattcttttgcatagtccgggggccggacgctgcatagctgcagggcataacggcgccctcgcctgacaccattcccggatctagcatcacacgggcgggccgggcctgaattcacaccagactcttctttatttgagctgctcccacgcacgcagaccggaagatctcagttgtcctggactggacaactacgtacagatcttcgtgggaccggggagggagtcgcaatcgatcatttctaggattccttatc

SEQ ID NO: 34707 - DNA, 375 bp, Glycine max
cgccgagacggtctttgccttcttcgactctgcattcgtcttcctcagattcgaacaatggcaacgttcaataaaaccctgttttatgaatgaaagtgcttttaaatttggatggtttttcctgttttatctgcttcacataagattctgcatcttagctgcagttgctcctcctatagttatcaaaggcaaatccctgacgtacgtctatttcatatatgttctctatttaacatgctaatattgctcatatggctttatttttgtcacaagaagactaagcattcaaattcattttccttgcacaagatagttttttttttcattcccttctcaaaaatagaagtaaatgacaaatctattggtcattgatat

SEQ ID NO: 34708 - DNA, 389 bp, Glycine max
ataaccatgggtatctccaccatcgcttctccttttgactccatcatcttcggtttgtacttcatactctttctttctttcttttcctttacaactctttcttaattatcttctccattaatcagatttggacgacaccttgtacccctccagcaccggaattgacaagtgcgtcaagaaaaacatccaactctttctcatccagaaatgcggattctcagaatccaaagccttgacccaacgagttgagctcttcaaaacctacggaagcacccttgccggcttaagagcacaaggcctcgatatcactgcagaggactaccacggtttcgtgcacggaaggctaccttacgactccatcgacactgatcatcagttacggaacctcc

SEQ ID NO: 34709 - DNA, 378 bp, Glycine max
ctgaggtgcaataaggttatgagtgctgttttctcttcttgaacttctctttaatcctcagatcctggattaaaggaaaaacataaacatcagccagaaaattcctgagccttgttttacatctttcttcaggaaggaaaagaagaagcacaatgtcattcacaggaactacaggtaaatgcaaggcttgtgataagactgtttatgtggatgacatgtgaactcttgaaggtataccttaccatagaaactgcttcagatgcagtcactgcaagggataccgaacgatgaatacctacgccacagtggatggtgtcctctattgcaagccacactttgaacagcttttcaaggaatctggcaatttcagcacgaact

SEQ ID NO: 34710 - DNA, 378 bp, Glycine max
gatgtttttagatctaaagaaatcaaactagcattcctcgtcggagctgggctgcaggctttccagcagttcacaggaataaacacagtgatgtactacagccctaccattgtccaaatggctggtttcaactctaatgagttggctcttcttctgtctctcatagttgccgccatgaatgctactggaacaattcttggcatttacctaattgaccatgccggccgcagaatgttagcactttgtagcttacgaggagtgtttgcatctttgatcgtcttgtctgtctcatttttacacgaatcatcatcttcgactggatggcttgcagtgctgggtttagtcatatacattgcatttttctcgccggggatgggg

SEQ ID NO: 34711 - DNA, 297 bp, Glycine max
ctttcactcttcttcgtctcaaacctcttcgttccttcgattcattccatttcttccaaaatggccaaagacccagttcgcgttctcgtcactggagccgcagggcaaattggatatgctcttgtccctatgattgctaggggagtgaagctgggtcctgaccaacccgtgattctcacatgctgaaattctcaacacaaatcgttatggggtaaaaggaattggtgagcgcatcctctctaaggtgtgtgctaaacgattggttaggcagatgggtatatgcttatggtgtgattc

SEQ ID NO: 34712 - DNA, 325 bp, Glycine max
gcacgcatacgtaatctcgcgcattctgctcgactaagcatatacaacctcagaatgacgacaccttaagaaacatcactgggccatctaaaatgccttacactctgctctatcctactaatgaggatggattgactttcaaatgaattcccaacagtatcgctaactaaaggctctcgcattgaggttgctgtactacacaaggtgtttttcaataatggtaaatacgaggaatatgattctgtcatctacctacctatggtcaagttacatttggggtggttgaaagttctcgtgtttgctgtactctgtttatataacagat

SEQ ID NO: 34713 - DNA, 324 bp, Glycine max
gctagtttatcgtgaggagaatatgaagttgtttgttttctttgttgctgcagtagttttggtagcatggccatgccatggcgcaggctaccaaaggttccctctccgaatgaaaactggctatggtgagcgttcttcggaggtaaaatgctcaagttttaggcttgctgtggaagcacacaacatcgcagcctttaaaaccattcctgaagagtgcgttgtcccaacagcggactacattaatggcgaacaacttagatcaaaccctaatacagttagccaacaagcgttcttttatgctagtgaacgcgaaatccatcacaa

SEQ ID NO: 34714 - DNA, 227 bp, Glycine max
agaaaatagctgttgattatatatatgcatttcttaggaagatatgcagggaaaattgtgtaatcttcaatgtccctcatgagagtctcttaaatgttggtcagattttctatgtatagcatagccccatatccttgtgattgccattttttttgcaaaatgagctgagtgtagcatatgaacaacactttgcttatggtaatcaagatacaattcggaattgactt

SEQ ID NO: 34715 - DNA, 437 bp, Glycine max
ttcagactgttttggacgttattaactcataccgcaagcatcatcagtgtagcaatgtcatctacatgaaggctgttaactagtgagtgagtacatgcaccgttgacaacatgaatcccaatcttctcagctacggtgatggcctctcaaagaccagcatcactgtgacgcatcaactttcacgatggtaccaataccatgagaagggccaccttcacgactgttgctgaacatttcatggccaaatcagttgcattcgagaacaccgctggtgcggttcgacaccgatcaatgacactccgcatgcaaggtgatcgttcactgttctttgattgccctatgcgtggttatgagtacacattggaatcccacgcctatcgtcaattctaccgcaactgcgaaatctctggaacaattgtcttcagcctcggctactc

SEQ ID NO: 34716 - DNA, 373 bp, Glycine max
agaagccagagtatcacttttgggcacagagtttatcaaagttgcaacgaacattgatcctgactgttaaatgataatcaacgaaaaagggcgaaatgcaaaatgcgcaatgaggaaggcctttgtggatgaataaaatccttaactgccaaagcatattttatataaggaacatcaacaaatcactgatagagatggctaaggttgagactgatagccttaaagctcatgctgagaaaccttgacctgacagaatgattgcacaatgctgccaacattttccccttcaatactccaaccagcaagagaaacataccactatacaatgatcattgataggttcttccctcagaaatcaccaaggctcactgtt

SEQ ID NO: 34717 - DNA, 128 bp, Glycine max
atctcatgatccagaaatgagatatgcaccatggatcatggcacaagacttgatcttgatcaactatattgcaaatcacgggggaagtgtttgaaattctttaaccaatgcttccggtcttaatccac

SEQ ID NO: 34718 - DNA, 320 bp, Glycine max
caccatggtaaacggaatccgtacaacacacatgaaactcaacatctcacatgtgtcatttctgtgtcatgacctgaactcttctttcctgggaatctcatgaggctggatctccgttctgtgagtcataatgctcgcagaagtatgccaaagcttgggatcaggacacatgattgaagttttgcgggatatgctgcgacaagtgcaactgtgtcccatctaggacttatcgaatcattgaccacagtccctgctacacggacatgattaataccaatggcaatgacaaatgcacttggacaagatacaagttcatcatc

SEQ ID NO: 34719 - DNA, 396 bp, Glycine max
ggggggaagtggtcaagggtgcacctttggttgagccaggagatgaattgttctggttcaatcgaccccgcctcatcctctttttgattcatcttgttctctttcagaatgcatttcaactagcgttttttgcttggagcacatatgacaatgggttcaaaataaactcttgtttccacaaaactactgcagatattgtcattagacttacaatgggggttctcacacaagttctatgcagttatgtgactttgcctctttaggctctagtcacccagatgggttctaccatgaaacctactattttcaatgaaaatgttgcagtagccctgaagaactggcatcacactgctaaaaagcacatcaaacacaacaaggattctacttccaatacac

SEQ ID NO: 34720 - DNA, 356 bp, Glycine max
ttgaaagcggaaaacatattgattaataggcaaaatgaaacgagcagaacatgttatgttatactagaaattgttcttaactcgttgaaatacaggttgtaatgtatctaagagactgagtattcacacttgacagggattaggtaattaaaataagaataaatttggtggcctaaaaaagagacgcccaggtatgtggtgagaagctaaggccaaacatctccttcagccctgtaaagctcaataactttgcaacaaccgcagcactctccacgatgtgattcatatcggtgctgctccatatgcgattcgccagctgcttcctccggcgctttgaatccaattcaatgccccac

SEQ ID NO: 34721 - DNA, 309 bp, Glycine max
cgtagcgtatgatcaggtccagtaacgtacaaatcacatacggttccacacagtcataaaggcgttgatgttaggggacatcattttgatctattaccaattgatggcggtggaaatctgtctcctgtaaaaggacttagccttcaaatggttcaattgcgtcttgctagtcgttctcaatcatatgcagtcctaaaaccatcacagtgagctatacggaggactgatcccgttgtcttacagcaatgcgtacagccactccacatttagagtttactttcaccaacgagttaccaatcgatgtggtat

SEQ ID NO: 34722 - DNA, 338 bp, Glycine max
  unsure (1)..(338): unsure at all n locations
gtttaggatgtatacattcaaagtgaagccttgttcgagggcgtattctcatgattggacagagtgcccctttgttcatccaggggaaaatgcaaggcggcgtgatccaaggaagtatcattacagctgcgtcccttgtcccgagtttaggaagggatcttgcagcaagggcgatgcctgtgagtatgcacatggcatttttgagtgctggcttcaccctgcccagtaccggactcggctttgcaaggatganggtggatgcacaaggagggtatgcttctttgctcacaagcttgaggagcttcgccccttgtatgcttctactggttctgctattc

SEQ ID NO: 34723 - DNA, 339 bp, Glycine max
caagcgcacagctagcacctacattgatgatcaaggcaactggcacagaagcaccacgggtgcccctgagcatcttagtgaactttgtgaactcaagggacaggttttgaaacatgcccacaaggtcattgatgagtatgctactcgtggtttacattcattgggtgtttcacgccaaactgtttcaaaggagaataatgagagtgcaagggaatcatggcaattcgaggaacgcttgcgcctccttgatctgccaatgcacgacagtgctgagaccattcggcgagcacatgatcttggagtcaactttaagatgatcactgtatgaccaccttgcca

SEQ ID NO: 34724 - DNA, 339 bp, Glycine max
cgcaattcccaaattcatttcaatcctaattctgcacttcttgataattcgacttttctcctcaagatgcagacactcgtacaaactttgaccggcaagactatcacccttgaggtggaatccgccgacacgattgacaacgtaaaagctaagattcaggacaaggaagggatcccacctgacaagcagagacttatctttgcgggtaaacaacttgaggatggtcgcactcttcccgtgcaaaatctcaaaagggactcagctctatatcgtgtgttgcgacacaggggggacatgcatctctgtgtcaacattgtgagcgggaagaccatcaccctt

SEQ ID NO: 34725 - DNA, 341 bp, Glycine max
gtttgttgttgtaactcgttcttcttcttttgttgttctgtgtttgtgtttgttttttctctcacctgaaaatgtcttgctgcggtggtaactgtggttgccgaagctcctgcaattgcggcaacggttgcggaggctgcaaaatgtacccaaacttgagctacactgattcaaccaccaccgaaaccttggccatggaattggcacctgttagggctcaatttgagggtgctgaaatgggtgtgcccgctgagaacgatggctgcaaatgtggaccaaagtgctcctgcaacccgtgcatttgcatgtgatgtgttgagagagcaagcttcacgcagata

SEQ ID NO: 34726 - DNA, 253 bp, Glycine max
acgcgtacgttagctcggaaatccgctccaagatgcaattgtgaaccggggggggccaagtcacaatgggaaattcaactacgggtaagccaactcccctggcaagagatcctcaatgggagaattttaagaaaccaggatttgaggggttgaaagggaaaatggtgggcctttcgcgatttttgatgggatggttaaaccatcctggcctcctcaactccaggttgggcactgaatgggaaacatgcccaaa

SEQ ID NO: 34727 - DNA, 339 bp, Glycine max
tttgaaattatctctaaaatggctcattgatcattcaatgtgtatatgtgactttttttattcctgggaacccaaaccatttgcactatctcaatcattattcaatataacctaataatgaatgaacatattaattgaaccatgccagcacacattattgcaatgttttacccttcaaaagtgagtgtcctccaacgctttctccgccttttaacgcacaatgggttctttgcaaaaacaatattgccgtcaaagaacggtgtagaaggaggagaagaaatagcgtatgctcttactcctccttcgaagcttctaataagaaacaagtcaatatgtttg

SEQ ID NO: 34728 - DNA, 370 bp, Glycine max
tacgtaaaccggaatcggcccaaggcaaggtaggccttaaagcaatccattgtgtggtgggttttggcggttgggtttgggtttggaggatgggcaaccatgaccaacttcattaggcaaattgacacatttgggccctttgccaattgctacaaatgcaaggcccaaactcaacaacccatggaagcagcacaacccccgcatgctcaacatcatcactgagtagtacaacccactcatgactcacaacttcaccaaaatattaatgaaactatgattcaattaaaattttgtatcaaacatgggcatccttagtaacaccccccttaaatttaaggtgtgccggttgtgttttgctgcaattttcttt

SEQ ID NO: 34729 - DNA, 308 bp, Glycine max
  unsure (1)..(308): unsure at all n locations
ctggaaaaggcatggggaacaatgaagaaggtaaaaaaaatggtaccaacttgaatgaaggcaaagtccccggaaaaaaagtcctaaaaattggtgggaaccccccctttgggttccctcccgttggtaaaaatttggcgcgccctgaattccaaggttccggaaaaaactgttgggttcgcaaaggtggtgcttataccggttaagttagtgctgaaatgcttgttaatttgggaatttcttgggttantattggtcactctgaaacgaagcagcttttaaatgaatcaaacgaatttgtgggaaat

SEQ ID NO: 34730 - DNA, 352 bp, Glycine max
gaacttttgatgatgcactgttctgcatgatttccaagccacgcaacaatgaccatactccgatcgttgggcatgctgatttgaatacattgattgctagtcttaatttgggggccgacatcccagccatgcaccacaacatggttgctaatgatcagtgcttgtcaggtactggatcctcacaagttggcgatgaacattaggttccacacaacaaacaacggcacatacacatgccagcattcacctggggcaatcacccgcaccgttttcaacttagcagcgcttgcctgtcaccctataccgcgactatgcactatgcagacgatgacttaactttcattgacgtctg

SEQ ID NO: 34731 - DNA, 334 bp, Glycine max
gacagtactaaacactatattgacacgaagaataggattcttgtagttgggggaactggttacattgggaagtatttggtgacggcaaatgtctctttaggccatccaactttggtatatacacgccctcttattgcacaaactccgccctcaaaggcacaactttgcaatgaattgaactccatacgggtcaaacgtgtccatggagaacttgaacatcagcagattctggctgtgattaaacacgtagacattgtgatatgtcctctggcatcaccaccacgtgattgatccacctcaaaattatatatgctatcacagttgctgggtaata

SEQ ID NO: 34732 - DNA, 276 bp, Glycine max
ctcctatgcagatgggactcctcgctacctacgtccactcgcagccgtacgctctgaaagcttccgtcgtcgccgctatctcagcgacgagccgtgcgatgtgtcaaaccaaatggacagcagagttcaaattggtagcagcatttcagccctcattgctaggattgcatacgatgagaatgtagttgggtttgtgttggatggagtgggaaatggtgacatacgtaggaatacaatgtacctcattgtggattcaaacagcactgtcatgcaaat

SEQ ID NO: 34733 - DNA, 380 bp, Glycine max
gcaataaagacagggtgggttcatcccaatatcaatttagaaaacccagatgaaggagtggataccaatgttcttgtcggctctaagaaagagacactagatatcaaggcggccatgtctaattcattcggctttggtggccaaaattcctctatcatatttgcccctttcaaatgcaatagattttagaaaatattacttgtttattactttaaagaagaataaccagacaatgtattggatactcacactactcctttggttgaacaaaaatgattataggggggattgctttcttggatgatcacttatgttcaaaaacattgaagtaatcctctagaatcaatatttctagacttgtttgttcaaggttttagtgt

SEQ ID NO: 34734 - DNA, 341 bp, Glycine max
gtctcttcgttggtggcattcctctgcttacttgcagcatcttacataataggacaaaccatttgtgttgatggcggcctcaccgtgaacggtctctacataagctaggcctactgtgacagtttcaatgttttgtttagtctgttacacgctacttgtaataatttcactttaagttgtggacagtgcacaccccatatctgtttttaatgacctgataagaatgagtactcagtgataagtttgtttttcgtgtcatgatttagtcacatgtcccatgagtctaggagcactataatcgtgggcagtttatcctacttcccgttggttgtaacgctttc

SEQ ID NO: 34735 - DNA, 322 bp, Glycine max
acgcctacttaacatcggaatccggtccaattccgggtcccaaggaaaacaaaaccggacctccagaagccaaggaaaagggggccttgctaaccttccattctccggaatacaaccaaaattcgaacggtccacccaaaaccaatcaaagcaattaatccctcctccgtccaacacgacatcatgggacgcgtggctccattctacgaccggtggtctcgcgcgtatgggaaaactttcttgtactggttcggttcgacgccgcggttggcggtaaccgaaccggacatgattaaggaggtgctcatgaacacgcgcgggg

SEQ ID NO: 34736 - DNA, 404 bp, Glycine max
  unsure (1)..(404): unsure at all n locations
gcaggttgtggggtcgcctgaggaaactagtagactcttgctatgtgaagcgacggtgactgtgatgagacactgcttttatctccttggaattgaacctgtatacaggctatgacatataagagcttcatatgcaaattatttatcagatttttttgggatatacaagtataggaaacttcacaatgaaaattgttcaggcaaattcgatcacctcttcccctcttccattttgttaattgtatttgagttgtaacttttacgaaggaaagtaaataatttatagcaatattgttgacaaggtcncatgaaatttatttagatgagttatattttgctttacttgtgttccaagagaaattactagaaaatggacgttatggagtccattgtacatttgtact

SEQ ID NO: 34737 - DNA, 395 bp, Glycine max
ctggcctttgttacggatatcaatgtccaggttcaagaggctataaactactactcaattgagtcatcagttgcacttttagtaacattggtgatcaatctgtttgtgataaccgttttcgctagggtgttctacggtacagaacaggcgaaaggcataggattggtaaatgcagggcagtatcttcaggagaggtatggaggagggttgtttccaattctctatatatggggtattggtttgttagcagctggacaaagtagtaccatcacaggcacatatgcagggcagtttataactgagggctttcttaagctcaatataaagaagtggttgagggcattgatcactagaagttgtgcaattgttccaactatgatttgtgcaattgtttt

SEQ ID NO: 34738 - DNA, 328 bp, Glycine max
  unsure (1)..(328): unsure at all n locations
ggtccaacaaaacctcaaataaaccaagaatccccccaaacctaaaagtggcttccctcctggcntcgcttctcctcctcaaccttgttaaggcggttcaaccggaacatgtacaaacgcaggggtcccttctgcaaaaaataaattgtaatggaccatgtgctgcaaggtgtcgtttatcacctcggccacgtctctgcaaaagagcctgtggaacttgttgtagacgctgcaactgcgtgccacctggcactgctggaaaccaagaagtgtgtccctgctatgctagtttgactactcatggtggcaaaggcaagtgcccttagac

SEQ ID NO: 34739 - DNA, 320 bp, Glycine max
cctacgtaagatcggaattcggctccaagcaaataattctttgtttgagcatttaaaatttcaaggttacaaagagggctttgttcttatggaacaatgatcacattgagaacctaatcaagcagaactgcaaaattattcttcctattgtattgcctgctctagagaaaaatgctcgaaaccactggaatcaggcagtccaaagtttgacaataaatgtacgcaagatctttgctgataccgatcctgaactcttggaggagtgcctgcgcaagttcaaggaagatgaagcacaagagaaagctttgaagttgaagcga

SEQ ID NO: 34740 - DNA, 377 bp, Glycine max
ggtagggttcaggacaatgcttttgatgctgaggttgaaactttgggtaaaatcaggcacaagaatattgttaagctgtggtgttgctgcaccactatggattgcaagctcttggtttatgaatatatgcctaatggaagtcttggtgatttgcttcatagcagtaagggagggtcgttggattggccaacaaggtacaagatagctgtggatgctgcagaaggcctctcttatctgcatcatgactgtgttcccgcaattgttcatagagatgtgaaatctaacaatattttgttggatggggacttcggtgcgagggtggctgattttggagtagctaaggcggttgatacacaccgataggaactaaatccatg

SEQ ID NO: 34741 - DNA, 372 bp, Glycine max
gtacaactcaacatgcaaagatgtaatcttagcacaaaccaaggctaaggagattaaccaatggaaggaggaacgtatagctgaggaagctactaagttgcctaaagaggcagctctagaactggcagaaaaggagaaagttaaagctcaagctgccttggaagcatatgaggaagccattaagatggttgaaaaggaagcacaaagaagaattcaggcagaggtgaaggctaggagagaggcgcaagaaaaggatcgagcattaaatctgttgattatcaacgatactcggtacagaaaatacagtataaaggatattgaagaggccactcagaagttttccccatcattgacagtaagtgaaggtggata

SEQ ID NO: 34742 - DNA, 378 bp, Glycine max
cttctcttttctctttctgttttttcctggttactttctatgcctgctgtacgtcagggaaacgtgttatccattctgagttaactgaaagaaaattcattgaagtccagaaagctctaagtgctactgaagctatggatgttgatcactgtgaaccaaacagcaagttcaaaaaaactggtttccatttaaatggaagcaactatgacgtgtctacatgtggggttctccactccattggatcagatttaacaagaatgaaagtgacatctgagacaaactatagtgactccgggagtggacagaaaactataaaggcaaaagagcccgggaacactcccataagcatgccagttatctcaagagagagttttgcgc

SEQ ID NO: 34743 - DNA, 376 bp, Glycine max
ctcatgacacggtacttaccccctatcaatttgttgaatgtatgattaacataggaattcgcgtggcacgcacacggcatatgatcaagaataaggacaacaatgataagacaattgagctgctacatgagtttgcacgcacacactttccatccgcgacctacatggcatatgctgttcaagttgacacctacacactcacacaggcacataatttaattcctaacgtagattgtgcaattggatctcgtctcctggatctccatgctggtagttcgctgttcaccagacacaatattgacgaaactctcgatattggctatctgaatggcctctttgtgctggaactctccattggtctcattggacacacctt

SEQ ID NO: 34744 - DNA, 390 bp, Glycine max
acaagagcgagtcatcatcacagctcaacgtcaagtgaccaaaaaagcttcaattttcgcatccaattcgcatacccatttgacttttcttctttccctcttctccattcttcgcattttcaagatccattcagaaatagcacaattgttaaagttggttgaagttcaatataattgtagctttattagcaatggaagaagaaaatgccatagagcttctccagagataccggagggaccggagagtgcttcttgattttatactctcagggagcttaatcaagaaagttgtaatgccacctggtgcagttacactggatgatgtggatctagatcaagtcagtgttgattatgtcctcaactgtgccaaaaagagcacattgcttgagc

SEQ ID NO: 34745 - DNA, 239 bp, Glycine max
ctccagagagaagaagaaacttaatcgatcatcacttcacttcactaatacatcatggcagacgagacccagaacaagtatgagagctctgaggttgaggtccaggatcgtggtgtttttgactttctcggtaagaaaaaggatgaagaagacaagcctcatcctcaagaggagggcatcgccaccgagtttcaaagagtcactgtctcagaccaatgagagaattagcacaacctctt

SEQ ID NO: 34746 - DNA, 395 bp, Glycine max
  unsure (1)..(395): unsure at all n locations
agttcattctctttgcgcagttccctacctctcctttcaagatgcagatcttcgtcaagaccctcaccggaaagaccatcacccttgaggtggaaagctctgacaccatcgacaacgtcaaggccaagatccaggacaacgaaggaattcccccggatcagcaacgtctcatcttcgccggaaagcagctcgaggacggccgtaccctcgccgactacaacatccagaaggagtcaacccttcaacttgtccttcgtctccgtggtggcatgcagatcttcgtcaagactctcactggcanaaccataaccctagaggtcgaaagctctgacaccattgacaacgtcaagggccaagattcangacaacgacggaatccccccagaacagcaacg

SEQ ID NO: 34747 - DNA, 292 bp, Glycine max
ttaagaatggcactttctcctattcgttcttctactttctcttcatcatcagctattggtacattacctgtgtaattcctcctaacagggactccttaactatcctcccaaaggacttctaatccaagacatgtccaaacgttttcaacacggtgaaatctgtattaaaatctgctgtggccaaagaacctcgcattggagcttctattgttcgcctcttcttccatgactgcgttgttcaaagttgtgatgggtcaatactacatgatgacactccaaacttccacggggg

SEQ ID NO: 34748 - DNA, 383 bp, Glycine max
ggcggggctacccgctgagtttaagcatatcaataagcggaggaaaagaaaaaaaaaaaaaaaagaagggaacttattgcaagcgagggaaagaaaagaaaaagaagcaaagtcaacttttgctatgtttggtttggctgggacctttgtggaccaaaagaatcgtctactagatggatagggaccttttctgtaaatttgacacaaaaaaaaaaaactatgaaatagtagtactatacttactttttttttattcttgtttttccaacttaatttactagacattcatttactctcagcaatcaaaaaataatttaaatttttataaaattggataaatggcatgaaattggttggactttaggccacccacctatttattg

SEQ ID NO: 34749 - DNA, 352 bp, Glycine max
gtaactgaaaagtttgagactgtcaagaatgaagatagggaaaacacacaaacattcaatggtcgttaagcaaataacgtaccacttgttcatggatgccttcacccatatatccggcaatatacatcaaatttacaaacaacgtacaaagagcaacacacatccactgggtggaacagcatacctaaacttgataaatgatgatgatccctttctacatggcatcaactacactgctatgcgcccatcatagcgcttccgtgatatggatcatctatctggtggggaaaagacagttgctgcacttgcattgctattctccatccatacttcatagccttcaccattcttt

SEQ ID NO: 34750 - DNA, 305 bp, Glycine max
ggaaacccacgcggaccccagcaacaacaacaacatataaacactggtcaaatgcaacatctcacccctatgggaagaggttcacggaggagaaccaccaggggcgactttgtgccagggaaaaacttcctgacgcactagttgttcaccagtgtggtaatagtaattgcctgcatatttggatccgaatctcaactctagtgatcttgttaccggcgtctgctttgcctccggtgcttcaagatacgatcctttgacacccaaaataacgtcagttctatcgttatctactcaactagacatgt

SEQ ID NO: 34751 - DNA, 372 bp, Glycine max
acgcgtacgtaaactcggagtttcagcgccacatagtcggcattttctcatcggcgctcttcgacctgactatgcatcacatttcgacttcttctccattgtcattaagtaggatgtttgggaaggcaccgaatgatatcaatcgtttcacgtagtaagatctcttctgcgtctccaagaacgcatcgcacgatgttctggataacgcttagactatagccgctattgaaactcagcgctatatggcggtgatgccgataagtttatagatctggtgcaagcttatcacgttctgagtgactctgagaagcatgagatatatgatcactatggttaagatgcacttagtgaatgaatgcgtgatgtcagtgg

SEQ ID NO: 34752 - DNA, 387 bp, Glycine max
ggaggtttatgcaatagaaattcaaatgtacacagagatgaagaacaacaaaaaactcaagcaactttaccagaaagcactcactattaagtcagcaattccccatccgcggataatgggaataatccatgaatgtggagggaaaatgcatatggcagagcgccagtgggctgaagcagctacagatttttttgaagcttttaagaattatgatgaagctgggaatcataggcgtatccaatgcttgaagtaagcaacaaagtgttataatttttaatttagctattagttttaaacaattttcctaacaatatatgtctgcatttcataattgttaattacaaaaagatacagttaactataaatcattaattttggcagtaactt

SEQ ID NO: 34753 - DNA, 295 bp, Glycine max
gtgagtgtttgtgtttgttgggttgtgccggggagatggaagtgtctttgctggaggaagtagagaatattctaaggtacagatttcgaaacaagaagcttttagaagaagccttgactcactcctccttccttgacggtgtctcctacgagcgtctcgagttcgtgggagaccccgttctgagtctcgccatcagtaactacttgtttctcgcgtaccctgatctagattccgtgcagctctccggcctccgcgccggcaacgtcagcaccgagaagctcgcccgtgtcgctgt

SEQ ID NO: 34754 - DNA, 359 bp, Glycine max
gtttgggtggcttttttcattgttcagattgttaaggaatacaccaagccctgttccatccagttctggcttcttaattttttgcaggttcctgtcgcagtctctgttacactttttgaagccataggcttatacaaaggaactagagtgattgcatcaaagggaaaggaagtcaccaattggaagattcatcagatttgtctctactgttccactggaataatggctggtatggttggtggactgcttggtctaggaggtggtttcattttggggccattgtttctagaattgggaattcctcctcaggtagcaagtgccacatcaacttttgccatggttttttcatcctcaatgtc

SEQ ID NO: 34755 - DNA, 332 bp, Glycine max
ggctcttcaaccactacattcactttattggcctagacccaaccaccaaagcaccaagagaccttaggtgaaccttttctctctagctctgtttgcagaaattcaagcgcaagaatggaggttgcaacaaacacaaccgcgaccacgtcaaattcattcgatgctctaactgtggaaaatgctgccctaaggtttttttattttactttcttatacctttaaagttttgtgcaaggcatttcagttaaagtttttgcgctttgtggattttttttttcttcaaattaataacaggacaaagctattaagaggtttctggtgaggaacattgt

SEQ ID NO: 34756 - DNA, 332 bp, Glycine max
gattgctcttttctccttcgctcttccctttcccattcccattcctattcctcctttccctctcctctccgctcctccaattccccccaaactttctccctccgccgcttcgccgccgcctcgctcgcttgccctcgaccggcgccgccgcccctcgacgccataggccagaaaatcggaaagtcgaggcgccgccccgggtgcccttcaagggccgggttaaggcgaagtgtaagtctttcggcccaagggatattgggacaatgaatctctcaacgtccagttgggggagcaagatgattatgaggtggtgagaaaggtgggtacgggga

SEQ ID NO: 34757 - DNA, 399 bp, Glycine max
cgtctcgcgcacgcgtatgtaaactcggaattctgatatcgtctccagccatgtcttggtggggattccaaaaccttgatgtttgtgagcatctcacctgatgtatcttcaactggagagtcactttgctctcttcggtttgctgctggagtgaatgcctgcgagattggtatcccgcggcgtcatacatccacacggtcccttgattctcgtttgagcagcggctataatagaggccacactcattatccataataaccaaagttactggcaattgtaatgccttggatgggataaaaattgtctttgacccacagttctgtgttaacttttatagaaatgagcttgtataaaattgaatgtataggctaagctttatcctcacgggtgtaacaactg

SEQ ID NO: 34758 - DNA, 463 bp, Glycine max
aattgctcaccattcattgtgcctattatatctcccttttgggttaggatgctcaagcaggaagatataattgctcaccattcattgtgcctattgaagagattgctgaaattatttcagccaaatacccagaatatcaaataccagcactagaagaggtgaaggaaattaaaggtgccaagttaccacatttaacctcccagaaacttgtggatgctggttttgagttcaagtatagcgttgaggacatatttacggatgcaattgaatgctgcaaggaaaagggttacctttaatcgattttagccacgaagttgaaaaaataaaattgtcgaagatgattgttagttcgtactattttcagattcctggcaatgatgcctcttgacatgtactccatttaatgcatgatgttttcttaataaattgaccagggaaataattcttttggtttgtctgaata

SEQ ID NO: 34759 - DNA, 589 bp, Glycine max
atgcacgcgtacgtaagctccgaatcggctcgagctccgcactccgtcttcatcaatcagcatcaccaccgctccaacacaggggaaaatgagggagatccttcacgttcagggagggcaatgcgggaaccagatcggttcgaagttctgggaagtggtgtgcgacgagcacggcatagatccgacggggaagtacgtcggaaactcagatctacaactcgagcgcgtgaacgtgtactacaacgaagcttcctgcgggcggtttgtcccacgcgcagtgctgatggacctggagcccggaaccatggacagcgtgcggactgggccgtacgggcagatattccggcccgacaacttcgtgttcgggcagtccggcgcgggcaacaactgggccaaggggcactacacggagggcgccgagctcatcgactccgtccttgacgtcgtgcgcaaggaggccgagaactgcgactgcctccaggggttccaggtctgccactcgctcggcggaggaaccggctccgggatggggacgcttttgatttcaaagatcagagaggagtaccctgacagaatgatgctcaccttc

SEQ ID NO: 34760 - DNA, 232 bp, Glycine max
ctttagatgaggctggcgatatagatcagttagaactactgagactgaaagctgtacttcaaattactcagcagcagcccaagcaagcaattgagacctacagaatcttgctagctgtaattgaagcaagaaaagagcattgggttcaagcgaagacattcaggcacgaggcattagcagagcagaagttggaaatggaagcctggcaagatttgggtaccatttatgcaga

SEQ ID NO: 34761 - DNA, 396 bp, Glycine max
cacatcttaatccccaaactgaacccacccctcttcgtccggttcactagcgttcgattcgtttctatctctctctctctctgtcatgggttcgctcgaggcaccaaccgccgcgggagcccgacgcgtcgaagcggcgcagatcgtcggtgctcccgttggaggtgggtacgcgcgtcatgtgccgttggagggacaacaagtaccaccccgtcaaagtcatcgaacgccgcaaggttcccaacgccatccccaacgattacgagtattacgtccattacaccgagttcaataggaggcttgatgagtgggtgaagcttgaccagttggatcttaattcagtggaggctgttgttgatgagaaagtggaggacaagggtgcgacagggttgaaga

SEQ ID NO: 34762 - DNA, 301 bp, Glycine max
tttgaaaccaaaaatcaactcttttcacaaactctagttatatttacatttagttttcttaatttatggttttgttatgaattggaatgaacttgatttcaggcttcacagaagaaactttcgaacccaatgagggagatagaggtgcagaaactcgtcctcaatatctctggttggcgagagtggagatcgtctcacgagagccgccaaggtgttggaacaagtgagtggccggagcccagtgttttccaaagaggggagagtgttcgtgcctttgggattagaagaaatggagaagatt

SEQ ID NO: 34763 - DNA, 284 bp, Glycine max
aaccacttgtcgattttcttccacggaatagcggattaggttgaagatagaagatgttaatacggataaagttgcagcacctgtgagggacttcatggaacgggaacagggtaatgagatgaacgtaagagctttggcatggcagacattggcacacgatgctgcatcgagtccacatgggtcttcgtttgtcaacatggacaacgtggatcgtcacgttcttatgaacaaaattgcatacacagtagtgtttacattattacaattctcaatggcatgaattc

SEQ ID NO: 34764 - DNA, 376 bp, Glycine max
gcctcgaatcattgtcaaggtaacttgtccaaatggtattgttatttactgtagtctttgtgatttgatatttggtttttgttatgggggtggacagagtatagtgttggagaacttgtatgttcagtcaggaaacgatggaactggggtaccaactgatatgttgtcgttgaactcaacggtcagaatattgtacagaaatcctgccactttcttcggcgttcatgtcacttctacccctcttctcattagctattaccagcttgcaattgcctctggccagatgcagaagttctatcaatcgaggaagagtcggcggagtttggctgtagtggtttcaggacaccagattcctctctatggtggcgtgtcagtt

SEQ ID NO: 34765 - DNA, 378 bp, Glycine max
aaggacagcaccttttttgagagctgtggtgtagctgaccttatcacaacatgcttgggtggaagaaataggaaagttgctgaggcttatgcaaggaatggagggaagaggtcttttgatgagcttgaagcagaaatgctacaaggccagaaattgcagggtgtctcaactgcgagtgaggtttatgaggttctaagccatcgtgggtggctagagttgttccctctcttctcaacagtgcatgagataagcactggcctacttccaccatcggccatagttgaatacagtgagaagctacccaggtccttctaattcaaagcatatttgttgtataagaaaatataaattatagtgacagtatcaaggatatacaaa

SEQ ID NO: 34766 - DNA, 176 bp, Glycine max
gtgtctgcggacgacaaaaccactggacagaagaacaagattacgcttaccaaccacaatggcaggctttctaaggaggacattgagaacatggtgcacgaagctgagacatacaggtctgaggacgacgagcatacgaagaaagtggaagccaaaaatccattggaaaattatgc

SEQ ID NO: 34767 - DNA, 385 bp, Glycine max
caaattagttcaatctctttgcgcagttccctacctctcctttcaagatgcagatcttcgtcaagaccctcaccggaaagaccatcacccttgaggtggaaagctctgacaccatcgacaacgtcaaggccaagatccaggacaaggaaggaattcccccggatcagcaacgtctcatcttcgccggaaagcagctcgaggaccggcgtaacctcgccgactacaacatccagaatgagtcaaaccttcaccgtgtccttcgtcaccgtggaggcatgcaaatcgtcgtcaagacgcccactggcaaaaccataaccctagacgtccaaagctctgacaccattgacaacgtcaaggccagaatcaggacaagagggaatccccc

SEQ ID NO: 34768 - DNA, 149 bp, Glycine max
catgtcacagccatcccgtgcggttctcaaactttgcacagtgaatggacaacattttgaggagatcaaagtcgatttagccaaacgtgagcagttatctcgcgaagttcgaacggttaaccctttacggcaagtctctgccagtgttg

SEQ ID NO: 34769 - DNA, 387 bp, Glycine max
caaagcacaaagcaaagctcatccttgagttaaaaaatggcagcagcttcttccatggctctctcatccccatccttggctggcaaggccgtgaagctgggcccatcagccccagaagtgggaagggtgagcatgaggaagaccgtcaccaagcaggtctcctcaggaagcccatggtacggcccagaccgagtcaagtacttgggcccattctctggcgagcccccgtcctacctaaccggtgagttcccaggcgactacggctgggacactgctgggctttccgcagacccagaaaccttcgccaagaaccgtgaactcgaagtgatccactccaggtgggccatgctcggagccttgggctgcgtcttcccggagttgctgtcc

SEQ ID NO: 34770 - DNA, 300 bp, Glycine max
gaaatttaagtgaggagctagagaatgatgatgaagtccgctaagtgtgcagtggtggttgtaccacatcttcttctggcggaggtcgggcccatggctgaggctgtgacatgcagcccaacaaagttgagtctgtgtcttccaacactcacttccggtgctataccttccaatgcgtgtagcacgaagctgaagcatcacaaatcatgcgtatatggctacctcaaaaacgctagcttgaagcagtacgtcaactctcctaatgcccgaagcaccgttgcctcctctgggattcccttt

SEQ ID NO: 34771 - DNA, 230 bp, Glycine max
gaacgaattctggtccagcaaggacatgagaccttcatatcaagttgttttcttgggcaacactccaccgttggcggagataaaggcgaaaaggacttctctggggttgccattgatcttgctagtaatgacaatgcagtcatagatgttgcaattttctcagtagcaattggtggtgtgccaatcgggtcaagtcaacattctcactggggtgcatcgttcttgacacg

SEQ ID NO: 34772 - DNA, 232 bp, Glycine max
gtttcttacaaggctctactctactgcttcaccttctgctctagaaaattcagtggtgatatatggcttcggcgactctctctgtagccagagcagcccttcaggcaaatgggaaaggcttctctgaattctctggcctccgcagctcaacaggcttccttcccttttccagaacatcttcagaggatttccattccgtcattgccttccagatgtatgcagttggaagcag

SEQ ID NO: 34773 - DNA, 298 bp, Glycine max
aatcacagccaagcctcccatgggacttgctcacatagttaagaaggcaattgaaaagggtaggtttgaagagattcttgaccctgtggtcactgattggccagtggaagaggctctatcatttgccaaattaccattgaagtgctcagaactcagcacgaaggataggccaaaccttgcaacagttgtgttgccagagcttaataggttcagcgaacttgaattgacctttacacaatgatgaagttttttacagtagtgaaggtatgatcaatacctatgccgcttgccctcccac

SEQ ID NO: 34774 - DNA, 322 bp, Glycine max
gaaattacctctaggttgttaggaaggaaaggaggttattctgggacgattgttcttctcacaaactcagccatcggatacattctacaggaacgttcttcatgactatttggtacaaatgatacctcaacataacacctgtgtgtagacactctctgtctgatgtggtgtgctgaatctgcgagactgttttgtgccaactaacatggggacgtgccaggatacgcgaatgttgctcatttatgaagaacggacatctgatggtttgttatacacacttctcgttgtcaatgatttgacattttcggttgttaagtttttg

SEQ ID NO: 34775 - DNA, 361 bp, Glycine max
tcgacgcatgcatacgtaagctcggacttcggctcgagcgcacgttagcacagcgtatcattgccatggcaacatggaactgcgcatctctctccttgacgggacgcgtctccttgacgtggactcgggatcaagctggagtcatcagccacacaggtgcgacgggtgcgcatgacgaacaccgtcaccaggcacgtctccacaggaagcccatggtacggcccagactgagtcaagtacttgggcccattctctggcgagcccccgtcctacctaaccggtgagttcccaagcgactacggctgggacactgctgggctttccgcagaccagaagacttcgccacgaaccgtgaactcga

SEQ ID NO: 34776 - DNA, 267 bp, Glycine max
ggagggtgccaatctggtaaagttgtcgatcataattataaggttattggtgttgaagctttgagggtaattgatggatccacttttcatggctcaccgggtacaaatcctcaagctactgtaatgatgcttggaaggtatatgggagaaaagattataaaggaagattcttccataggcggaagtgaagggatcaattgagttcatactttccgttgttccatatttgtgttgttcttcgcaataattctctcacgaatcacaatt

SEQ ID NO: 34777 - DNA, 331 bp, Glycine max
gagttattgacagcatatgactcgcaacgtagggagttgccaccaccagtaattgtgtgggaatggggatggaccaaaagtgctgaaacttggaatggaagagcagctatgcttgctgtgcttcttctgttgtttttagaagtcaccactggtgaagggtttctgcaccagtggggaatattgcccttgtttaggtgagtgagtcctcagctaccctccatggcaatggaatttagttatgcttgtatatgtataccattagcatcatatgcgccttgacggaacgcattcaggagttctcacatgtagtttagacacagtaatttgtgga

SEQ ID NO: 34778 - DNA, 253 bp, Glycine max
caaattagttcattctctttgcgcagttccctacctctcctttcaagatgcagatcttcgtcaagaccctcaccggaaagaccatcacccttgaggtggaaagctctgacaccatcgacaacgtcaaggccaagatccacgacaaggactgaattcccccggagtagcaacgtcgcatcttccccggaaaccacctcaaggacggccgtaccctcgccgacagcagcgtcagaagggattcacccctgcacct

SEQ ID NO: 34779 - DNA, 152 bp, Glycine max
  unsure (1)..(152): unsure at all n locations
agcaggctatccagagcaagaagttgttcatcttagatcacatgactatctcattccatatttgaggaaaatanatgcaactacaacaaggccttaggcaacaggaaccaaattttccttgaaaagtgatggaaccttgacgccatgggcca

SEQ ID NO: 34780 - DNA, 374 bp, Glycine max
aaaactttctgactttggtcttgcgaagcttggtcctgttggtgacaaatcacatgtttctacccgtgtcatgggaacttatggttactgtgctcctgagtatgctatgactggacagctgactgtgaagtctgatgtatatagttttggggtggtcttcttagagctgattactggccgtacaagcaattgacagcacccagccgcagggagaacagaaccttgtcacatgggttttcctctattctttctcttgtcattttaattagtttggcaagcataaactaactgcagttttatatgtatgtttgtgcaggcacgtccactttttaatgaccgcaggaagttttcaaagttggctgatcccaggctgc

SEQ ID NO: 34781 - DNA, 177 bp, Glycine max
ataaaagaaatatgacgtcgcacgtacgtaacccggaatcggtccaattaaaatccaagagaaaaacaatgaaggacctgacggaggaatttctgaaagaaaacccgaacatgtgcgagtacatggcgccatcgctggacgtgagacacgacgtactggtgatggaagtgccgaagc

SEQ ID NO: 34782 - DNA, 352 bp, Glycine max
caacagcaagcagccgttcttgtgggtgattcgacctgggctaatccatggttcagaatggtttgaaccattgccaagtgggttcctagagaatttgggaggaagaggctacattgtcaaatgggctcctcaagaacaagtgcttagccatcctgcagtgggagcattttgggatcataatggttggaactcaactctagagagcatatgtgaaggggttccaatgatttgtatgccatgttttgcagaccaaaaggtcaatgccaaatatgcaagcagtgtttggagggttggggtgcaattacaaaataagctagatagaggagaggtagagaagacattaaaacactca

SEQ ID NO: 34783 - DNA, 341 bp, Glycine max
catgaaccctaacctaaacccctgagaaatcattgaagttgatacatggcggaagttaacactctggtggtgcggaagccctgttttggtcttccaaacggttgccctcaatgcctatctgcttacatctatctcaaattcgctcaatttccattccaattggacatccatctcaacaaccctcagtctgatcaaatcccttactttgaaattggtgactatgtggcttattacaatgagaaataagggattaattaagtgtttgaagaaagatgttggggttgttgaattggatagtggggtttcttcactccctgagtggatttcaactaaagcaattc

SEQ ID NO: 34784 - DNA, 352 bp, Glycine max
tgtttccatatacctaatagctctaggaaatggaggataccatcctaacattgctacatttggggctgatcaatttgatgaaggagatcccagggaacaacattaaaaaattgtatttttcagctatttttatttggctttgaacattgggtcactcttctccaacaccatattgaattattttgaggatgatgatggactatggactttgtggttctgggcttcagctggctcgatctgctgctctggcattgattttgtttctttgtggcacacgaaagtatagatactttaagcctaatggaaaccctcttcctagattttgccaagtttttgtggctgctacaagaaa

SEQ ID NO: 34785 - DNA, 144 bp, Glycine max
tggaggaacccacttccattatggcgctggcaagtatattgcatcaattgccaatatgctcaactttccaaacaatgtgattaacattgaaggaaaacttcgcaatgtttttgatgttggctgtggtgttgcaagctttggagg

SEQ ID NO: 34786 - DNA, 371 bp, Glycine max
  unsure (1)..(371): unsure at all n locations
actgggtccagaagacaccagcaagaacatagtagagataatattccactccagctggctgaagaagcaatcaccagtgtgcaaaatagaccgcatcctcaaggtccacaacacacagaaaaccataaccaaattcgaagagtacagagactccataaaagccaaggccacgaagctctcaaagaagcaccctcgttgcatagcagacggcaacgagcttctcaggttccactgcacctccttcaattgctccctgggtctaaacggctcctccaacttgtgcaactcgataccacagtgcaacgtgtgcagcataatcaagcacgggttcaaggtcaccggaggangagccggcatcttgacgacggcga

SEQ ID NO: 34787 - DNA, 380 bp, Glycine max
taaccccgaattccggtccaaaaaaaggttaaaccaagacaatccccaaagggaatcaagaatttgggctcctccaactccaaaggaaatcaaagtctcctctacctccagacctcatctcttgcatcctttttctttctccagatgcttgtcctccgtcctggatggacttaagtatgcagattcacacgaatgggtcaagcaccaaggctcagtctccaccattggtatcactgaccatgcccaggaccatcttggagaggttgtgtacgtggacctgccacaagcaagtggcacagttacccagaagtccggcttccgatccgttgaaactgttaaagcaacaagtgacataaactctctaatctccggggagattg

SEQ ID NO: 34788 - DNA, 366 bp, Glycine max
caaattttctaaaggtgaaacacaaaaagttaaatctgttgattgaaacaaatataactatcttagctaaatttctaaagcagtaaatatgactttccataatcttttgagcgaaaataagttcttattatatggctttgaacagagctcaaaagaatacttggaaaaacagatggcagaggtggaagccaatttgagagaactgctacaacaagatcctggtcttgctaggcaaatcatgtctatgaatgtaatgtaaactttccgttagtgaaattaacttaaagtggcagggttttctggtgcatttgagcaaatagaaaattcaggacttggtgagatgtgaggaaggatgtgtactgcctg

SEQ ID NO: 34789 - DNA, 324 bp, Glycine max
agtagttgagaactaacaatgagaagcacatggcttcctcaatgatctcttccccagctgttaccactgtcaaccgtgccggtgccgggatggctgctccattcactggcctcaagtccatggctggcttccccagcagtaaagaccaacgatgacagtacctccattgctaccaacggtggataagtgcagtgcattcatgtgtggccaccaattggcaacaccaagtttgagactccttccgacctgccagaccttgatgatgcacaagtggcaaaggaaatctaataccttcttatgaatggacggataccactgcctgga

SEQ ID NO: 34790 - DNA, 395 bp, Glycine max
gctggtgcatgtttatttgaagagcttgggttattctacattggcccagtagatggccatgacatagaagaccttgtgcacatcctgaaaagtgtcaagggtatgccgacacttggacctgttctcattcatgtaatcactgagaaaggaaaaggttatcatccagctgaagttgctcctgacaagatgcacggtgttgtgaaatttgatcctaagtcagggaagcaattgaaatccaaagctagtacgcggtcttacacgcagtattttgcagaatctttgacagcagaagcagaagttgatgagaaaattgttgccatccatgctgcaatgggaaggggcacggggcttaacttgtttcaaaagcgcttccccgaacgatgttttgatgttgg

SEQ ID NO: 34791 - DNA, 383 bp, Glycine max
ccgcatttccttcccgacgataaccttttcggctctaactcttggaatcagacttggcaatgttgggtggaaataaaagttgagaactcaacacaacaattacgagaaccaaaattgagctgggcaggaaaggttcaggactctaaccagtttttactataggggagcacaaggaatcattctagattggatgaccccaaattgaaatagagtctgttagtcaaggatctcaccatgcaaacgacatcgtatagtcatcctctattctgtttctcttgcagaaacatcagtacaaatgggaagagtaagggttctgtgaaattccgtgcaccatatccctctcaactgggtcggaaatgtggattcaatgggagacctcgtgt

SEQ ID NO: 34792 - DNA, 395 bp, Glycine max
aggtctactctaaaggatactctcggggaattccatgttccacattttcatgatataatgaggctaaaaggttcatctatgatttggattgatgtgttttcttattaagcgtatcctgaacccgaaggagatgagatgggaattcctcggggaattccaattcgacatgttcaagagatggcgatgccaaggtgttcatagatgaagtggacataattgtctgcctcgtcagggtatctggtgaccaccggaattgagattcgaatgcctcggggaattctaattccacattttccctgcgtgcagatgcattagtggtcatgtatgcttcggcaatacttctcatgttattacgctgaacatgatcccttgggcaatgaggatccgatatccgt

SEQ ID NO: 34793 - DNA, 380 bp, Glycine max
aaaaaaaatatccatagtataaattaatgacaattatttagaacacatggcttaaggtcaaacagaatgatacaacttacagctgatctggaaagacaacaaagcaatgaatcgagagatccctaaaaacacagaaaaaacgtcttccctagtatataaagtgcctcaacatcaaacacgactctcgcctcgaaggcctcatcaagatggcagatctcactattaatctggctgcgatttgcactcccgcggattacaacactcgccctctcgacaccatttacagcaatttcatcgacgcgctccccgtggtgaaatactgttccgagaacaacaagcgccttatccatttctccacttgcgaagtgtacgggaaaacg

SEQ ID NO: 34794 - DNA, 349 bp, Glycine max
  unsure (1)..(349): unsure at all n locations
aaatagcaagagagaaagggttggaattggaaatatcttaccggagaatgggcgacggcagcatcgtgggccacctgccggaggagattctgttgaacgtgttctccgccgtgtccgacacgcgcacgcggaacgcgttgtcgttggtgtcctggagcttctaccacttagagcgcaagacgcgcacctcgctcacgctccgcggcaacgcgcgtgaccttcatctcatcncgacctccttcaagcacgtcacgcacctcgacctctccttcctctcgccttgggggcacgcgctcttttgctcctcctctgccaacggtcggcaacagagcctcctcgcgcaacaact

SEQ ID NO: 34795 - DNA, 408 bp, Glycine max
  unsure (1)..(408): unsure at all n locations
gcgaaatatcttcgcgtgatactggaaagacaatggtagatgcctctttaggagaaataatgacaacatgtgagaagatcaattggctactgtcagagggtgagcagtggttaaagcctgaataccggtcttctggaagatcaatgcttcataagagagctaaagtagaatttcatcnccttggtgttattggagccattgtttcatggaattatcccttccacaatatttttaatcctatgctggctgcaattttttctggaaacggtattgtgattaagatatcagaacatgcaagttggtctggatgcttctacttccggatcatccaatcagcccttgctgccataggagctccagaggaccttgttgaggtgataacagggtttgctgaaacaggagaagcat

SEQ ID NO: 34796 - DNA, 381 bp, Glycine max
attatgctaattcgaatcaaatttctttttgactacaaactatataaaggatctttttattttattttaatttcaatcataatacacacacattttaagtagaccttcattttttaggtagttcttttgttcatttttgtttagatacttacttggattccacaaatgcttgttctttttaacagcatcttgaggagcttcttgaatattttcgctttggactgtggtgggttgcccttggggttgcttcttcaattggtctaggatctggtttgcacacatttgtcctatatttgggtccccacatagcactgtttacaataggagcagtgcaatgtggccgagttgatttgaaaagtgctccttatgatacgatacaat

SEQ ID NO: 34797 - DNA, 175 bp, Glycine max
tgaattcggttcaatacaaatctacacccttgaccctggggactggatatatatacaatctggaaccccactgtcaatcgttaccataaatgagaatgataagctcttccgtgctatgctccatatacctgtctcagtccctactcctggaaaatttgaggaatttttcgggcct

SEQ ID NO: 34798 - DNA, 298 bp, Glycine max
agaaataagagaagaagatgggtttgaagaacaacatggtggtgctaaaggtgtgtttggtgcaacatttccttgtggggggtactacaaatgccaacttgaggcagattaagcttggcctgcgcactacaactgatcatcatcaatacgcaaatgatgatgattcttcaaaagcatgctgtgatcaatgcacatgcacaatgtccaaccctcctcaatgccactgttcagacatcatgctgaactcatgccattcatcttgcaaatcttgtaattgcgcattaacgtatcctgcaca

SEQ ID NO: 34799 - DNA, 358 bp, Glycine max
gtaggtgcacacgtcaacatctgaattgacatctgcagtcatgtctgtgtataagctcactaatgtcatatacacgcaaaggctggagactctgtgggattcaatgttaaggttgtgtcagtgaaggatttggtgcgtggtcagtttgcactcgcagtcacaggatgacactagccatgacgttacaaatttcagagctcaagtgatcatcatgaaacagctttgtcaggatgcagatagctatgcgcatgtcatccactgactcacatcgcacattaccgtcatatatgccgaactgatgtccaccattcagaggagatttggcactaagcttgagaaagaaccgaaatttttgaca

SEQ ID NO: 34800 - DNA, 377 bp, Glycine max
gcatctaaagtcactgaagcggatcaccattggatttctgatcgtgaatttggccatgggatctctaatggggcctcagtgaataccgcatgcaatcaatttggtattgggagtagatagcggatgcatggtccgagtaatatctggaagcagcacttacgatgagacacaatgtcagaacatgatgtttattgttaatgaaagtgatgcatatctgctgcctatgtctcatccagaggcatcatatgtcagtcaaatcacgaccacttgtttttctcggcttaagcatctcatctcagaactatcatcctccaattttggcaggataggcgtcaatgcttcagactctatgacaaaagatactggccaactccttc

SEQ ID NO: 34801 - DNA, 348 bp, Glycine max
gggaatccatctgctgcatctatgcacgtgctcatgtcactcgtctagttccatcatattctgacagcgtaccacattggtcacttgacttgcctttctttacagacagtcccaagtattctacaggttctaacaatcgcatggtaatcacggacgtgtctaccattgccactaatactctgcagccagacttgacagtttcacaagtaacttgaactatatcagggacatgaatgctcctcagcatgctccgcaatcccagcgttcatgagcgagcacgtttgctgacatcactcctcaggagttcagcatgaagtacttgcaaactccgaacgatctatctcaaca

SEQ ID NO: 34802 - DNA, 339 bp, Glycine max
atcaacatcactcacgtgcatgacataactatcggatgcttgaacattatcatcattacagattgtcattttcttaacatacacttatgacaaatgtccaatgatatattggctactcgtgaagacaaagacagttcaacgtcacaagttcattatgtttcgtgcaatatgactgcgaaatgtaagaaacttagcatgtcagtctcgtcaacgagttaccagacctatatatgcacaatcaacacgaaggttcccacattagacggaaagctctctctcggattgattggctgcatcatgctaagattgatactatatcacacactcaccagttccatt

SEQ ID NO: 34803 - DNA, 386 bp, Glycine max
gttctggacaagtacagctttctgtcgaaggagaaactgaagggggttggaggtgttgaattacggtttaacggtggcggcgaagggacaagagagggtgctgagggaactggacgaggttctggacaagtacagctttctgtcgaaggagaaactgaagggggttggaggttgggaagttttggatggttcagtttcgacggagacatcgccggaggagttacaaggatcggaagagaggaaggaagtggtggaggagcgttctggggcatactggacgacgttggcgccaaacgtggaggattacagtgggagtttcgcgagatggattgcagcagggtcggggcaagtggttagggggattctgtgggctggggatgtgactg

SEQ ID NO: 34804 - DNA, 412 bp, Glycine max
ggtccctggagcttgaaaagggggaattcttgcttggaaatgtcataaatgcagttgttagccaagtaatgctactgttaagagaaagaaatttacagttgattcgtgatattcctgaagaaatcaagacattggctgtttatggtgatcaattgaggattcaacaagtgttgtctgatttcttattgaatatagtgcgctatgcaccatctccagatggctgggtagagattcatgtacatccaagaataaaacaaatctcagatgggctcactcttctccatgctgaatttaggtactgtggcaagatcttccaagtatttttcattattattgtcttcaagtaagtgtctatggaagataatcaaaacctcaaataagtgtttttaagagcctcaggtataaatctgtc

SEQ ID NO: 34805 - DNA, 408 bp, Glycine max
aaaaaatggctgatacaggtggaggagatgcagtgagaccagtggtaatatgtgataacaagtgtggctgcacacttccatgcactggtggttccacttgcaggtctcttaagttcatgatttcaacaaagtaacttgcttaaaatagttcctttttttttttacatcgtactgatgttctgatattcgaatttatgatctcttacattttaatatactattctaattctcttccgttaggccgacctaatgttctccttgtttgctttattgctacccgaatctctctagtttctgggttcgatagatgcacaatttctttggttcgagtttttaatttcttctaaaatcaaatacttgtgttgttgaaaaattaccatattgagacttttatcaattttctgttaa

SEQ ID NO: 34806 - DNA, 324 bp, Glycine max
atcataaaattcttccaccaagttatgggtttccttgtgttgcttcttttctccctcttaagtctctcctccagttccagcatatcaactcatcgttccataatggaccttgacctaaccaagtttaccacacagaaacaggtgtcttcactggtccaactaaggaagaatgagcatggacgtgtctaacataaccaagaagaagaggcaaagagacttgagattttcaagaataactttgactatatcagggacatgaatgcaaacagaaaatcaacccattctcatcgtttaggattgaacaagtttgctgacatcactcct

SEQ ID NO: 34807 - DNA, 166 bp, Glycine max
aaacaaccttctttctttttccgtgaacctttctttcaaggtcctaacttgattagtgtgcaatgtccaaatcaaaagggtaatttcaaaattgcaagggcaaagcatgatgtttaagggtggttccttccctgcaaaggactaccatgatcctcctccagcaccg

SEQ ID NO: 34808 - DNA, 280 bp, Glycine max
atacacacacacagacatacttcgaaaagtggcgtctccccgaaggactttttagaactcacgcgttcgttctctttccttttcgatcttagccgactccgtccccattcgccaacatgacactaagcctacataacctatacaccttctggttctagccgttcaagatgatgcttcgacagggctccattgggccaacctccaaaagaggactcctctaatgcaagtagcagtcctgggggagctcaatggaaacgacttgtgggttaactgtgagcag

SEQ ID NO: 34809 - DNA, 191 bp, Glycine max
aacgaactatacgtagcggatgcttattctgggcttatcaagattggacccaatggaggggctccaacccaatgctttaaagatatacaaccacaacaagagaatgtgaacactactcttcagtttctcgatggcttggatgtagacgtcaacactggaatcgtttatttcacccaagctagtgctaacta

SEQ ID NO: 34810 - DNA, 377 bp, Glycine max
caaaatgaccaagttcacaatcctcctcatctctcttctcttctgcatcgcccacacttgcagcgcctccaaatggcagcgacagcaagatagctgccgcaagcagctccaagggggtgacctctagccctgggaaaacccattcaggggaaaatttcaagggccggggaataccatgatgattatgaccacgacaatcacattctcaggagcatgcggggaaaaatcaactacataaggggggacgaaggggaagacgaagacgaagaagaagaaggagacatgcagaagtgctgcacagaaatgagcgagctgagaagccccaaatgccagtgcaaagcgctgcagaagataatggagaaacagagcgaggaact

SEQ ID NO: 34811 - DNA, 363 bp, Glycine max
ggtttcaaggtttacgggatggattggcttggccacggtggaagtgatgggttgcatggttatgtccattctcttgatgatgttgtttctgatacgaaaatatttttggagaaggttcttaacgaaaatcctgggcttccatgtttctgctttggacactcaacaggagcagccattattcttaaggctctgcttgacccaaaggttgaatctcgcatagctggtgctgttttgacatcaccagcagttggtgtttccccttctcatccaattttgctggcacttgctcctatagcttcaattttgctgccaacgtatcaatgtagttctgcatataagaaggggtcaccagtgtctagagac

SEQ ID NO: 34812 - DNA, 344 bp, Glycine max
cagtggctgctgcttcgctttcagttccagagagcagcctcagcaaaacgagtgccagatccaaaaactcaatgccctcaaaccggataaccgtatagagtcagaaggagggctcattgagacatggaaccctaacaacaagccattccagtgtgccggtgttgccctctctcgctgcaccctcaaccgcaacgcccttcgtagaccttcctacaccaacggtccccaggaaatctacatccaacaaggtaagggtatttttggcatgatatacccgggttgtcctagcacatttgaagagcctcaacaacctcaacaaagaggacaaagcagcagaccacaag

SEQ ID NO: 34813 - DNA, 364 bp, Glycine max
gttgtgcttaatttgtctcagaatcagttagaggtgattcctgattcaatagcaggactacagaggcttgtggagctggatgtttcatctaatgttttagagtccctacctgactctattggattgttggttaatctgaagatctttaatgtgtcagcaaacaagctaactgctcttcctgaatccattgctctttgcaggtcactagtcgaattggatgcaagctttaacaacttaatgtgtctgccaacgaacatgggttttggacttgttaaccttgagaagctcttgatccatttgaacaagatacgatttcttcccgcctccattggagaaatgaaatctctcaggcatcttgatgttc

SEQ ID NO: 34814 - DNA, 329 bp, Glycine max
  unsure (1)..(329): unsure at all n locations
acaagagctatgacatcgcatgcacgccttacttaacaccggaatccggtccaagtaaaatttgaaatttggaaaaacggcaataaaaggttgccgaaccttaaaaacggganacaaaaagcaatccgttacttgaattcaagaatctctcaatttcttcctacttctttgtgtacgatttcttaagggaaagaaaatcactctctgtgctggccacagacttcgtgaatcattttcttttccactcttagtttatttgctgaacactctcctatttgatataggacttcgtgtcagatttaaacttcttctgtttctttctcagttct

SEQ ID NO: 34815 - DNA, 426 bp, Glycine max
taaccccggaatccggtccaaaatcgggaatttgggtttccttccgctggtccgttggttaaattcaataaaggaaattaggcatgacgtttgaaatgtggagttctgagtgggcaaatcaaacttcatggcatttgagtttccttattgacaatcccaaacagtctacagtttttgataatctcttgggaatttctcaagattttgaaattgctggtaatactcttatgccagctttttctgttccacaggctactgccagatcttctgaaaatgcggaatcctctgcatgatctggaatttgtgttttctttcgcttgttcgtttgtttaattcaataaaggaaattatgcatgaccctcttgttgagtatgctctgcctatttgaaaatttccacacctcttttaattgtcgtaatgatgtgt

SEQ ID NO: 34816 - DNA, 378 bp, Glycine max
  unsure (1)..(378): unsure at all n locations
atgcacgcgtacgtaagctccggaatccgctccagaaacaaaggttcccaagaaaaaaaagtgctggaaattcatgttgagaaaggcatgcagcagggtcagaagattgtttttgaaggacaagctgatgaagctcctgacacaatcacaggagacattgtttttgtattgcaagtaaaggatcacccaaagttcagaagggagcaggatgacctctatattgatcacaatctcagcttaaccgaggcactctgtggcttccagtttgctgtcaaacatcttgatggtangcaactattgatcaaatcaaaccctgnggaagtcatcaaaccaggtcaatataaagcaataaatgatgaaggaatgccacaacacaat

SEQ ID NO: 34817 - DNA, 384 bp, Glycine max
gaagaacatgggtttgacgaacaccatggtagtgctaacggtgtgtatggtgctacttttccttgtgaggggtactacaagtgccaacttgatgctaagtaaccttggcctgcgcatgaaaagtgatcatcatcagcactcaaatcatgatcagtcctcaaaaccatgctgtgatcaatgcgcatgcacaaagtcataccctcctcaatgccgctgttcatatatgaggctgaattcgtgccattcagcttgcagatcttgtaattgcacattaacgtctcctgcacaatgtttctgtgctgacataagcgcattctgctatgaagcttgcagacccagtgaggatgacaacgatttctactaatgaacaagtgttacgcatgt

SEQ ID NO: 34818 - DNA, 333 bp, Glycine max
gctgtctgcagggcaatattgatgtttttccaagagcttgaggtggactctgcaaaatgcctggaaaatggagaaagtggaacgttgattgctccgcaggacgcatgcaatagaattgctgaagtggtgcaggaggctataagaaagatggaaatggtagctgatgagaagatgaggatgttcaagaaggctcgcttggctcttgaagcttgtgaacatgaactagctgacaaggccagggaggtgacagagctcaagatggagagacagaaaaagaagctgcagatagaagagctggagaaaattgtgaagctgaaaaatgcaaaagctgat

SEQ ID NO: 34819 - DNA, 352 bp, Glycine max
ccaaccccaacaacaagagcaacctcaaggaagaaaaaggttttccacaggaagttccagcacccaaagcacggttcactgggatttcttcccaggaagcgtgctgctcgtcacaggggaaaagtgaaggcattccccaaggatgacccatccaaggcacccaagctcactgcattcttgggttacaaggccggtatgactcacattgttagagaggtcgagaagccaggatcaaagcttcacaagaaggaaacttgtgagcctgttacaattattgagacccctccaatggttattgttggtgttgtgggttatgtgaaaactccacgtggtctccgaacattgaacactg

SEQ ID NO: 34820 - DNA, 373 bp, Glycine max
gtttcccaatttccattgcctccgcttccacctcgcaaccatgatcatcccggagaagaaccgcaaggagatctgcaaatacctcttccaagaaggagtttgcttcgccaagaaagacttcaatttgggcaaaccacctgaaatcgaccttgcgaatctgcaaggtaataaagctgatgcaaaattttcaggtccccccaatacgtgaaaaaaaactttggcttggatgcactattactggttcctcaccaacgatggcatcgagtttctcagaacttaccttaaccttccttccgaaattgtccctgctactttgaagaagcaagccaagccacctggcaagccctttggaggcccatccggtgatcgccct

SEQ ID NO: 34821 - DNA, 416 bp, Glycine max
ggctgtctaatggttaacattgtgatgtctgggaatgcaacagtctaagggagtgattgggcctcattggtacaagtgttttgtaacatacaggaccagtacagagcattttgatgcatgtaagtggacagaatcggaagcacattcctgtgaattgatcttcgcaatataggtatgcggtcctaacaatggttttgaaatgtggacttctgagtgggcaaatcaaacttcatggcaattgagtttcattattgacaatcccaaacagtctacagtttttgacattctcttgggaatttcgcaagattttgaaattgctggtaatactcctatgccagcttcttctgtgccacaggctactgcgagatgctctgaaaatgcggaatcctctgcatgatctggaacttgtgttttcc

SEQ ID NO: 34822 - DNA, 381 bp, Glycine max
attgctggggggtttcaaggagaacttatttgcaaggtacttcaattattatgggggttgtactttttatttttattccctataatgattagtattttttactttgttattgtttattggatgtgctattgctgcccaccatgatacttagtcactgtcatttattgtgctcaatattttatttctgctttggatgctcaaattagattgtgtattattttgtattcattatatatgttagatgttttacattgtttttaaatggtatagagattattttgcctttatatggatataaataatggaataattattgatcagccaaactgaataatatgaattcattctcaattatgtcaacttggtttatccaatccatat

SEQ ID NO: 34823 - DNA, 378 bp, Glycine max
tgaagatgccaaacgcgggtcctgcaaagtggagacagattgttggagatgccatgattgaggtatccaaattgactacgaccgacacaagcgtgtaattctctctcagcacagcacattgagatggttgagctgcagacatcatcgattttcgaggcctttcaccataagctggtacattctggcgagattcaagagacagttgtacggaagatttcacaagaggaatggcttacagcttggtcgacacaggtgcgtcctgcaacaaccctgtgggcggatcggtgtccagagctgtacgacacggtgcatgacagtggagtgtcaacagtagcaggtgatcttgtcacaggtgtgaacttgacaacccttggccat

SEQ ID NO: 34824 - DNA, 273 bp, Glycine max
atgcaacatactgctgccatggctctctcatccccatccttggctggcaacgccttcacgctgggcccatcatctccacatctgcgaacggtcagcattacgaaaacctttccaattcagggctcctcaggaatcccatcctccagcccataccgaatcaagtacttggactcattctctggcgagccaccgtcctacccaacccgtcagtacctacgctattaacgtcgtgacacagctggactgtccgcatatccacacatcttcgccaac

SEQ ID NO: 34825 - DNA, 367 bp, Glycine max
atggttcagcggatggtgtagattactggatagcgaaaaattcatggggagagtacagaatcagagacagagcaagcgttcttaagcgccatccttgagcaaccaattagtgtctccattgatgcaaaagattttcatttatacaccgggggaatttatgatggagaaaactgtacaagtccgtatgggattaatcactttgttttacttgtgggttatggttcagcggatggtgtagattactggatagcgaaaaattcatggggagaagattggggagaagatggttacatttggatccaaagaaacacgggtaatttattaggagtgtgtgggatgaattatttcgcttcatacccaaccaaag

SEQ ID NO: 34826 - DNA, 389 bp, Glycine max
ggaaaatagaagagaattattgaatagtgaataataataataataataataataataataatagtagtgtggaattggatcagatctgtttgttagagagagatgtcacgggggagatctgattccggaaggtggttgaagggctgtccggtggttttcccaatggtctcaacgttgggcctgtgtggccctgctccttactggcgaatcaagaacgccatcaatctccgcaacaacaacaacaaactctcttgcccttcctgcctctgtgactggcctccccctctctcgctcttccaacttgctcctgggctggccaatctctctgtctcagaatgtggaagtaatgacccggattcaaaggacgagatggagaagcagtttgtgga

SEQ ID NO: 34827 - DNA, 323 bp, Glycine max
ttcggctcgagtgagatgcaccatgacgacactggattccgacgttaccagggttccggccggcgaaccctccatcatcgccggtccttcgtcatccaccaagatgcctaagcgattccagatcaacaattggggtggcgtttctctcagggcttgggatattgttgtggataactgctctatttgccgctgccagatcatggatctctgtcatgagtgccgggccaagtattctacctccattagccacgaattctctgtaacctgtcgattgtgtcatcaagcgttgcagctttattgcataagcttatgggccaataccc

SEQ ID NO: 34828 - DNA, 391 bp, Glycine max
cataagtttcttatcgatggcttccctagaagccaggagaaccgtatagcttttgaacaaattattggagctgaaccgcatatggtacttttctttgattgtcctgaagaagaaatggtgaaacgtgtgctgagtcgtaatcagggtcgaattgatgacaacataaatacaatcaagaaccgtcttcaagtatttgagtcattaaatcttcccgtgattgactattatgctaagaaagggaaactttacagggtaactctatttagtttcattaagtcttttttaggtttgacttgaatgaagattggtctccggattcacttgtatgcttgttatactttatatatagatgtgatggtatatgcaatggaaaatatttgaaaaaaaaaca

SEQ ID NO: 34829 - DNA, 377 bp, Glycine max
aaaagtcatcattttgggcgctctttttctatggagtgctttcacaaagtgtggtaacctcgattggaccatcacgcttttttctctttccactctaccaaacacactcatcgtgggcgtccctcttctgacggccatgtatggagactcatcaggtagcctgatgagtcaaatctttgtcatgcagggcgtcgtgtggttcactctaatgttgttcttgtacgaatacagaggcgccaagagcctaatttcgaaccaattccccgagaatggaggctccatcgcctcgtttactgttgattctgatgttaactctctcaacggtaacgagccgctgcaggccgacctggaaatgaaggaaaatggagaacttcatg

SEQ ID NO: 34830 - DNA, 391 bp, Glycine max
  unsure (1)..(391): unsure at all n locations
taccttaataaataatttaagatactatgatgagagcacggttcccattactgttgctgggacttgttttcccggcttcagtttctgtcccatttggcattgcttactgggaaaaagagaacccaagcacaacaagtgtcctcagagtttcanttacgagagagactcgttcaggaaccaagcatgccacgctcgttgcaacctccttaaggtggagaaggaagaatgtgaagaacgtgaaattccacgacgacgaccacgaccacaacacccggagagggaacctcagcaacccggtgagaaggaggaagacgaagatgaacaaccacgtccaatcccattcccacgcccacaacctcgtcaagaagaagagcacgagcatagagaggaa

SEQ ID NO: 34831 - DNA, 201 bp, Glycine max
cagataactacaataggagcaagtttcctgggcaaagtggctaagggacaattgttcaaaggaatgttaccacatggaacaatagttgcagttaaaaagtcaaaagagattgaaaggaaccagataaagacttttgtcaatgaagtagtcattttatctcagatcaaccacaggaacattgtaaaactattaagttgttgt

SEQ ID NO: 34832 - DNA, 300 bp, Glycine max
  unsure (1)..(300): unsure at all n locations
agcagattgtgattttctcaagagaaactttaagcagatgtctaatgttttgtgggtggctcctgaggacaaggcgagtttatggtcacaacttcattatgtttcgtgtaataatctggaaatgcaagaagcttatcttgtcaatctcggtanatgtgtttacgagaaattgtatttgcacattcaagaggaacctcgcaatttgaaaaggaaagcccccccccgtattgattggtggcaaaaactgaagttgctaacaatacaaaaattggaaaatttcaatccaatccaaaggataat

SEQ ID NO: 34833 - DNA, 377 bp, Glycine max
taagattcttccaccaagttatgggtttccttgtgttgcatcatttctcactcttaggtctctcttctagttccagcatatcaactcatcgttccatattggaccttgacctaaccaagtttaccacacagaaacaggtgtcttcactgttccaactatggaagagtgagcatggacgtgtctaccataatcacgaggaagaggcacagagacttgaaatttccagacataatttgaccaaaacaagggaaatgatgcaaacaagacatccacccaattccaacctttaagaattgaccagtttggtggcattaagcctcaagaattcaacaaaaagttactggcagctcccaaggatgtgtcccaagaaattaaaa

SEQ ID NO: 34834 - DNA, 349 bp, Glycine max
  unsure (1)..(349): unsure at all n locations
atgctatggtgcatgatagttaatgtcacaatacaggtgattgcattggggtaattaaacataaaatagttttaaagggctaatccggtattcaggttccgtcctttgggcaccattcctcagtccatttcacagcanactgtttggaatcaaatggcaacagtgagaacacattgaattttgattctagcaagcagagcttttgtcaattctctattgatcttcttggtggaggaattttagtggacaaaactggagattggatcacacttatacaaaattctccaattagtaacttgttgagagttgctgcttggaagaaaggctgtttaatggttaagattgtgat

SEQ ID NO: 34835 - DNA, 339 bp, Glycine max
ctcgaatctggaaagccgctaacacgaaccgttgccgagaaccggcccggttcgtgtcccggttcggtttcgctttccggttcggatgttgttgacgtctcgggcgtcgtgccgttaccgtgtgggctcacattggggtcccacataacggtcgttgggaagccgttggcggcgaagcccgatttcgagccgaagataacggtggtgacggagaacgagcccgtgatggtgtcgcaattcgtggtggagttgcaggggctgaagaccgttgacggtgaagagcctcctagggtttttcatttcaacccgaggttgaagggggattggattggtaaacct

SEQ ID NO: 34836 - DNA, 349 bp, Glycine max
cttgttggaggagcattagctcttttttggacttttgatgttttcaaggaggaatcagagggcaagttgaagggaattcttggttacactgaagatgatgtggtctccactgactttatcggcgatagcagatcaagtatttttgatgcaaaggctggaattgcattgaataagaactttgtgaagcttgtttcttggtacgacaacgagtggggatacagctcacgtgtcattgatcttcttgtattcgttgccaagaagtctctttaaggtgttacttcaaagtagcttgtcttcacattattaccgtatgtttatgtttagctgcgatttagtgtcttgctcgagc

SEQ ID NO: 34837 - DNA, 477 bp, Glycine max
  unsure (1)..(477): unsure at all n locations
cgtcgactgcacgcgtgcctaagctcagaattcagctcgagattctcttaacacttcgggaagtgccctgggggaggagctggtgcaaagaatgctattctcatgaatatgccaaatgctgttctttcaatgtggagatattttgttggagatctcgtctttgaagtttctaagatgacttctccctacattaaatgtacagtctctttcttcatagcatttggaaatttggctgatgataccatcaattttgaggcttttccccacaagctggtgcagtttggagagattcaggaaaaagttgtantgaaattttcacaagaggaatttcttacagcttggtcaactcacgtgcgtcctgcaacaactctgttggcggatgggtgtccatattggtatgcaatggtgcatgatagttcagtgtcaacaataccaggtgattttgtcatgggtgtcaagttgacaaccataaccaat

SEQ ID NO: 34838 - DNA, 370 bp, Glycine max
gttcaatatcctaatataccttaataaataattttagataacatgaatagaacaacggttccaataatgtttccgggaactgttttcctggcctcaatttccgtcccaatttggcatgcttaatgggaaaaaaaaaaacccaaaaaacacaaagtgtctccagaatttgcaataaccagaaagacccttacaagaaacaaccatgccacgctccttgcaacctccttaaagtggagaaagaagaatgtgaagaacgtgaaattccacgaccacgaccacgaccacaacacccggagagggaacctcagcaaccccgtgagaacgacgaagacgaagatgagcaaccacgttcaatcccattcccacgccc

SEQ ID NO: 34839 - DNA, 361 bp, Glycine max
attggtccttaaacactcatcagtcatcaccatggccaagctagttttttccctttgttttctgcttttcagtggctgctgcttcgctttcagttccagagagcagcctcagcaaaacgagtgccagatccaaaaactcaatgccctcaaaccggataaccgtatagagtcagaaggagggctcattgagacatggaaccctaacaacaagccattccagtgtgccggtgttgccctctctcgctgcaccctcaaccgcaacgcccttcgtagaccttcctacaccaacggtccccaggaaatctacatccaacaaggtaacggtaattttggcatgatataaccgggttgtcctagcaca

SEQ ID NO: 34840 - DNA, 375 bp, Glycine max
aaaacacattgctaccagtggaacacatactgcagcaatcacagaatcaggggagctttatatctggggtcgagatgaaggggatggccgattgggccttggtcctggtcggggcccagatcatgcaggtggacctagtatcccttccaaagtaaaagagttaccttaccctattgctgctgtatcctgtgggggatttttcacaatggcattgacagtggatggacaattatggaactggggagccaattccaactatgaacttgggagaggtgataagattggtggttggaaaccaagaccagtacccagccttgagaatgttaaaataattcaattagcaagtggtggatatcactcccttgcattaacaga

SEQ ID NO: 34841 - DNA, 354 bp, Glycine max
  unsure (1)..(354): unsure at all n locations
agctaagaattcagctcgagcagcattttaatgtacttatttcctcatttcaacaggtttctccatgacaaggttaagccacaagttgtgcatcgagatatacgcactagcaacgtactgctggatgaggaatttggagcacgccttatgggggttggtctgtccaagttcgtgccatatgaggtaatgcatgagaggactgtgatggcaggtggaacttatggatatcttgctccggagtttgtgtacagaaaacgagctcacaacaaagagtgacgtatatagtttcggtgtgctactacttgaaatagtaagtggacgtagacctgcacaggcantggattccgtgggttg

SEQ ID NO: 34842 - DNA, 395 bp, Glycine max
  unsure (1)..(395): unsure at all n locations
acccatatatatattactataagcctataagttgcatttaatttacagccttgcacgtgtgaagtgaagaataatcttgtgcattgcctaagctctctcaactcaactgaatcagggtcacaattaatcgtcttgaaattaagaccagctgggtcattgatcacaatctcatcaagggaaagtagtgaaaaaataaaggtttattgatcatcanggatggcaactcgaagatatgagtttggaaggatgaatgaggctagccacccagactccatcagagctgccttggttgaattcctctccacttgcatctttgtctttgctggagaaggctctgcccttgctttgcgacaaatttacaagggaacaaggtcatcagcgggtgagttagtggt

SEQ ID NO: 34843 - DNA, 390 bp, Glycine max
gtatccttctcacaatcaaccatatgctcctccaccatatggaaactatcctcaacatatggctccaagaagcaactttggttctggttgggaacaaaagcctcaacacagctttcaaggggcatcgccacataattgtggttatgagtattatggacgacaacggggtcatttatcccaacctcaccatcacacagcttcccagttcagcccccccacatggtgcggggtccttcccctgtaccttctatggtatcaaccccagctcatgtgaattacaactatggacagccacaatgccaggattatggtcatcagacagcttattctcaggcacgacttccccaacaaagttatggacacggatatgatcagtcaaagtatgaaaat

SEQ ID NO: 34844 - DNA, 400 bp, Glycine max
ccaccctcaccattactatcctcaccaccccaaaaaaaaacaaacccctcgtttccactctcctctcctcccacccttcgattcaaaccctaatcctccccttcccctctcacccttctctccctcccggcatcgaaaacgccaaagacatgcccctctccattcgccccatcatgctctctctctccaacctccaccaacctctcacgaactggttccgctcccacccttcccctccacgcttcatcatctccgacatgttctgcggatggacccaacccctcgcttccgagctcggaattcaaagactcgtcttctccccctccggcgcctttgcgtactccaccatgtgctttctctggaaggaaactccaaaacgcgaaaacgaacaagaccaaaa

SEQ ID NO: 34845 - DNA, 430 bp, Glycine max
tgacgtcagacgcacgcgtccgtaaactcggaaatcggctcgagcaaactttccccatcgtcatctttttcctcatttcagtctcagattctctcctttgacaatcctaacccaacctcatcttccaacaccaccacccagttttatgggtttgactgtaccttaaacccaacacagaacgagatggtgtcagtgtcagtccccaacatgagaaaaccacggttcccaactcaaaccgcaaaaggttcaccgaaaaatcaaaactttgaaacaaaaacctcacatggtaagaggtctccagctcatgctcaagatcacatcatggctgaaagaaaacgaagagagaaactcagccagagcttcattgcccttgcagctcttgttcctggcctaaagaagatggacaaggcttctgtgttaagggacgcta

SEQ ID NO: 34846 - DNA, 395 bp, Glycine max
gtggaataagagcagccccaacgggaaatgaaagatgccctctcactgtggtgccttcaccacctcatacctaccttcagccatcgctgatttcgtgctcgataatgaaggtaaccctcttgaaaatggtggcacatattatatcttgtcagacataacagcatttggtggaataagagcagccccaacgggaaatgaaagatgccctctcactgtggtgcaatctcgcaatgagctcgacaaagggattggaacaatcatctcgtccccatatcgaatccgttttatcgccgaaggccatcctttgagccttaagttcgattcatttgcagttataatgctgtgtgttggaattcctaccgagtggtctgttgtggaggatctaccagaaggac

SEQ ID NO: 34847 - DNA, 157 bp, Glycine max
attggtccttaatcactcatcactcatcaccatggctatactacttttttccctttgttttctgcttttcactggctgctgcttcgcttgcagttccatagagcatcctcagcacaacgagtcccacatccagctcctcaatgcccttataccggtt

SEQ ID NO: 34848 - DNA, 364 bp, Glycine max
gattttcagaggaacaatggcgggtaaggttgcggcttgctgcgtgcacgagtttgctcgttgtcgcgctcctccgtttgagatcgccagctgaggaagcatcgtgataacgagttcgtactcacattggatcaggctaacttacaggagactgctagcaatcacgatttcatcctcgtcgatttctaggcacgatggtgtggctactgatagaagcctgctctggattatgagaatgctgcttctacctagactagacaggattctccggttgtcatggctacaggtgatcctgatgaagagacgagtatagaccatgcatctcattctgatgttaggggatgaccaacaattgggattctga

SEQ ID NO: 34849 - DNA, 385 bp, Glycine max
gaacaccattgaattttgcttctagcaagcagagtttttgtcaattttctattgaccttctcggtggaggaattttagtggacataactggagattggctcacacttatacagaattctccaattagtaacttgttgagagttgctgcttggaagaaaggctgtttaatggttaagattgtgatgtcagggaatgcagcagtcaaaaggagtgattgggcctcattggtacaagtgtttttaacagacagcaacagtacagagcattttgatgcatgtaagtggacataatcggtaccacattcctgggaattgatcatcccaatagaggtatgtggtcctaagaatggttttgaaatgtggagttctgagtgggcaaatcaaac

SEQ ID NO: 34850 - DNA, 370 bp, Glycine max
ccgactctcattagcctttcagtgatagagatcttgtcgacacatgcttctgatgaggtctaccttggccagagggacaacccacattggacctctgattcaaaagcattacaagcctttcaaaagtttggaaacaagctcaaggaaattgaggaaaaacttgtgaggaggaacaatgatccgagtctgcagggcaatcgacttggcccggttcaactgccatacactttgctttaattgttctcaaataagccttttcatggttattaatcatttcttcatattctggggtgcctttctcaggaagcaaccttctagaagcagttgggcggttcattatcaaacctcccggctcgagcggctcgagaac

SEQ ID NO: 34851 - DNA, 394 bp, Glycine max
gccatggataattttccttgcacatcgcgtacttggatattcttcttgtatctgttatgcagaagagggatcatttgctgaaccaatggggagagagagttttcaaaagctctggcagaaatacaaggtggacattgccatctatggccatgtgcacaattatgagaggacatgccccatatatcagaatatctgcactaatgaagagaaacaccactataagggaagaaccttaaatgggaccatacatgttgtagctggtggtggtggagcaagcctttcagcatttacttccctcaaaaccaaatggagcatctttaatgactatgactatgggtttgtaaaactaactgcttttgattattcaaatttgttgtttgagtacaagaagagc

SEQ ID NO: 34852 - DNA, 394 bp, Glycine max
ggcctcagccgcatcacccaccactttctctctcctccactccgctacgccttcctcctcctccaccgccacctccgcctccgcctccccctcgcgcgtgcagctcatctcctccctccgcgcccgcccgcgtgcgccgcctgggtttcgccgcagcggacccgctgctcgcggcgagtgtagcggcgcgcgtggcagcggtgcgaggatgatgaaagggcgctaggggggtggtgtcgatggcgaagaagagcgtgggggacctgagcgcggcagacctgaaagggaagaaggtcttcgtcagggccgacctcaacgtcccgctcgacgacacctagaggatcaccgacgacaccagaatccgcgccgcgattcccatcatcagagatctcat

SEQ ID NO: 34853 - DNA, 394 bp, Glycine max
ctcgagccgctcgagccgtttctgtagagaaaaaatgtatctattagcttatcgaaccatgaaggacatgcatagtaaaggccatcaacctgtggaggaactctgctcctctttaatatcccaccttggtcaggtaaatgcttattcagaggcattctctgtttacaatatgttgaaatatagcaagagaacaatgtgcaagtcacttcatgagaagattctgcacattctcttagcaggacagcttttgaaggatgcgtatgtagtagtcaaggataatgcacaatttatttctcgtccagccaccaaaaaatttgctagtgcatttatgaagtcaggtaacctcaactatataaatgatgttctaaagaccctccatgattgtggctacaag

SEQ ID NO: 34854 - DNA, 345 bp, Glycine max
gtcaaaaggagtgattgggcctcattggtacaagtgtttttaacagacagcaacagtacagagcattttgatgcatgtaagtggacaaaatcggaaccacattcctgggaattgatcttcccaatagaggtatgcggtcctaataatggttttgaaatgtggagttctgagtgggcaaatcaaacttcatggcatttgagtttccttattgacaatcccaagcagtctacagtttttgacattctcctgggaatttctcaagattttgaaattgctggtaatagccctatgccagctttttctggtccacaggctacagccagatctgtccgaaaacgcggcatc

SEQ ID NO: 34855 - DNA, 251 bp, Glycine max
  unsure (1)..(251): unsure at all n locations
atgggttgtgtaattgcgcctctcaaattctggatgtgttggactgcccttgatattggctcacctgatggcccttancaagcaccacacgctgttaaattcatggaaattgtcatacatggcgtacagggattctcagagcttccgaagtactgcctgcaaaggtgtggtggtttcgttttggcacccatagttatcagccttctaacggatgtcactcctaagaaattctcacagtatatagctaaccc

SEQ ID NO: 34856 - DNA, 394 bp, Glycine max
gaagcttacaacggaagcctctcgggaaaccctggtttatgcagcgtcgacgcgattaactcgttcccgcgttgccctgcttcctctggcatgtcgaaggagatgcgcgcgctcataatatgcttcgcggtggcttcgattttgttgctctcgtgtttgggcgtttacttgcaactcaagaggaggaatgaagatgcggagaaatacggagagcgttcgctgaaggaagaaacgtgggacgtgaaatcgttccacgtgttgagtttctcggagggagagattctatattccatcaagcaggataatctcataggaaaaggatgctcggggaacgtgtacagggtcactctttccaatgggaaagaactcgccgtgaagcatatttggaacaacg

SEQ ID NO: 34857 - DNA, 387 bp, Glycine max
  unsure (1)..(387): unsure at all n locations
ccgggactttgatgggggcaaggacttttaaaattcagccaagaatgggttcggccctaaaaaacctttttgatggatgtgtggtaaagcgtgacgacttatggatcacttccaaactcaggtttgttgtcctttantaattgtgatatcgttttgaacattgagaaagaatggatgtgtttggaccagtttgggtgctgaaggaaggatcctttgatttgttcgggaaacttttaagtgttcagatcatgcaccacaagatgtgccaaaagcaatggctagaacattacaggaagtgcaacttgactatcttgacctctatctgatccacaggacagtccgcatgaaaagtgggacatttgggcacaataaggaacatcttgagca

SEQ ID NO: 34858 - DNA, 319 bp, Glycine max
tcttcgtctccctccaaaaaccctaaaacctcaaaccccaattttcgcgccacccactaatcccaaacccgacaacctcggaccgtggcctcttattccacaaaaaattgctctaccttgaagccctcaaagtgaaccctgacaaggccttccgcgtaaacaccaccctccgttcctctcatctctcaacccttaaatcggtgacgcgctccctttcttcattgggtattcaactcgcttccatgggtcgaatcctcgacatgctccccgtgctccacatgtgcgacgcctatttccaattcgagcccctcctcgaatt

SEQ ID NO: 34859 - DNA, 360 bp, Glycine max
tccacttttgccattgcaatggcttcctcggccttgacccaaagcagctccttttcgtatgacgtgtttctcagcttccacgctacagacacacgcagcaacttcacagactttctttttcaagctctcataagaaaaggcatcgttgccttcaaagacgaatccagagcacccgaccaagcgattgaggattctcgccttttcattgtggtcctttccaagaactatgctttctccactcagtgtttgcatgaactatcacagatcttccattgcgttgaattttcgccaagacgtgttctgcctattttttatgatgttgatccatcagatgtgcgaaaacagactggatggtacgag

SEQ ID NO: 34860 - DNA, 251 bp, Glycine max
ggacagacccgtgagcatgcttagaaataccagcttcagaaccaccattggtggagtcaattagatggacagcacagtctgcctgggaagtaccagtactcatgttcttgaccccaccactggtggttatgaagctggtatttctacagatggacagatccgtgagcatgcgcattctcgctttcaccacaggtgtcaaccatatcatgtgttgctgtaacattatcgacgccactactcccaagtatcac

SEQ ID NO: 34861 - DNA, 398 bp, Glycine max
tgcgcatgtttgttggtcttatctgcttcagatcctaacggtccattgttttacatggggtggtaccatgtattttaccaatacaatccggattcagccgtgtggggcaacataacatggggccacgctgtatccagagacttgattcactggctctaccttcccattgccttgtttccagataagtggtttgacgtcaacggtgtatggtcaggttcagcaacccttttgccagatggcaaaatcctaatgctctacacgggtagcaccgatcaaaacgtgcaagtccaaaatcttgcctaccccgccaacctatctgatcccctcctccttgattgggtcaaatatgctgataaccctgtcttggcccctccaccaagcattgggccaaaggattt

SEQ ID NO: 34862 - DNA, 117 bp, Glycine max
ggttcactgattctgcaacgaagttagcccaaacaatactggatttcaacagagaagagctcccgcatttcattcttgcaaactggacaggcttttcacgagggcaaatggaccttt

SEQ ID NO: 34863 - DNA, 388 bp, Glycine max
  unsure (1)..(388): unsure at all n locations
caaacaatgaaagcatactgagttctatgcatgtcttgaaccgtgataagcaagatttccagtcaagttactttttgactactgatgctgtttctttcagtgacggtttctttatgaaagatgatcttttacagggaaatggtctttcatgggtattatctgatatggtcgatgtgggaaatcaaagggaaagtcaaattaatatagagcagagatcagaacctgaggaatcaggtggaggttgtagggtggaggtcnctttgcctaaacttttggcatcaagaatagaggcagaactcttcaaactgtttggaggtgtgaataagaagtacaaagaaaaagggaggtctcttttattcaatttaaaagatcacaataatcctgaact

SEQ ID NO: 34864 - DNA, 330 bp, Glycine max
cctttttcccactctcactctaacaaatcttcttctcacttcggtccgtcccaccccaaaaaagggtaaggtaccatgaagctgagtaatgtaagtttggctaggcagggaacagataggatggtcatgcaaaaggaaatttgtgtgccaattgaaacgatttggataaatacagatcaagtaatcacaatgtccttcagaggtacgccaacgaagatgtgtcactaggatcgtggattatgggacttgatgtggatcatataaatgatataagactttgttgtagcagtccgcctgattgtcattggaaggctcaagcatggaacattt

SEQ ID NO: 34865 - DNA, 383 bp, Glycine max
agagacgttgtttcctggacctccatgattggcggccttgttaatcatgacttacccgttgaggccatcaatttgtttgagagaatgctgcaatgtggtgtagaggtgaatgaggccacggttatttctgttttgagagcctgtgctgattctggagccttgagtatggggaggaaggtccatgctaatttagaggaatggggaattgaaattcactctaagtccaacgtttccactgctcttgttgatatgtatgccaagggtgggtgcatagcgagtgcgaggaaggtgtttgatgatgttgtccacagagatgttttcgtttggactgcaatgatttctggcctcgccagccacgggctttgcaaagatgccattgacat

SEQ ID NO: 34866 - DNA, 383 bp, Glycine max
cacagactctctaccattaggaatgcagatatgattgctgttgtgcagggagggaagattgtggaaactggtaaccatgaagagctcatggccaacccaactagtgtttatgcatctcttgttcaactccaggaggctgcttctctgcatcgcctcccatcaattggtcctagcatgggatgccaaccaagcataacctactccagagaattatcccgtacaacaacaagccttggtggaagttttcgatcagataaagaatctattggccgggtttgtgctgaagaaacagaaaatgcaggcaagaaaaggcatgtttcagcagcaaggctgtactctatggttggtcctgactggttttatggagttgctgggaccttatg

SEQ ID NO: 34867 - DNA, 401 bp, Glycine max
  unsure (1)..(401): unsure at all n locations
aacctcttcatctcccacgcttcactttctccctccccctccctctccctctcgctctcgccagcccgagacgtcaccctcccctccttcgccctttcgccaccacaacgcccaacgtccacataaggaacaaccagctatcattttacattgaactagaaattcatttagaagatcaaagacaaaattttccgattaaaacgtacttaaattgaagaggggttgttgggattgggcaccanaaagggaaaaaaatgtggaggttaaagatagcacatggagggaatgatccctatatatttagcacaaataattttgtggggagggaaacatgggagtttgattctgaggcanggtacgctgaggaacgagctcaaattgaagcagctcgtcaaaacttt

SEQ ID NO: 34868 - DNA, 390 bp, Glycine max
ggcctggtggctgccacaggattaagtccactgatagattgttcagttattactggcgatcctggacttatatccgcatttgtggagaggtggcacagtgagactagcaccttccaccttccagtaggagagctgacgatcacattggatgatgtgtcgtccattctacatttgcccatcactggcgccttgcacagtttccacgctctttctacggaggaggccagattcttgctcacggagttgctggaagtgtctgcggaggaggccagagccgagacagcgctcacacgtggagcatatgtacgattaggatgggttcgtgacatttatgagaccagatgtcaggcccggcggtggattgtcgcagctcgcgcttatttgctgcac

SEQ ID NO: 34869 - DNA, 350 bp, Glycine max
caaaacactcataacacaaagcacaaagcaaagctcatccttgagttaaaaaatggcagcagcttcttccatggctctctcatccccatccttggctggcaaggccgtgaagctgggcccatcagccccagaagtgggaacggtgagcatgaggaagaccgtcaccaagcatgtctcctcaggaagcccatggtacggcccagaccgagtcaagtacttgggcccattctctggcgagcccccgtcctacctaaccggtgagttcccaagcgactacggctgggacactgctgggctttccgcagacccagaaaccttcgccaagaaccgtgaactcgaagtgatccact

SEQ ID NO: 34870 - DNA, 381 bp, Glycine max
aattcggtccaaaattggaacaatggcttgcaaatcccaagattcgtaagccaaaacaatttattggaactcataaatctcaggttcattctaaaaaagaggctgatactctttcaaagtacaagcctaccattaattctacatcattgctggctgatttgaaggatatggaaatgagaactgcaaaagcgttggaatacttcaacaccactcggcatatgatcctgtactatgaggatcttatacaaaatcgtactaagctaaaagatgttcaagagtttttaggattgccacagatggaattaacaagccgtcaggttaagatacacagaggaccattgtcagatcacattaaaaattgggatgatgtgaacaagacac

SEQ ID NO: 34871 - DNA, 413 bp, Glycine max
  unsure (1)..(413): unsure at all n locations
gggagcttgatagggaagggaaagttgacaagtgggggattaaactccatcccatatggcccaatcatgtaaccaaggccttcttctctggaatgagagcaggcttcagtgggttggaagtggcaaatctaggaagcatggccaacaaaaaagagaacccagactaaattggaatgcaacttatgaaagtttgcttggaactagacaacctttccccaagcccatacctttatctgaaatggttgaattcctggtggatgtttgggagcgtgaagggatgtatggttgaaacttgataggttaaaatgctgagtgccttcaagtttgtttatactttcaatgatgtatttgactcctganaggttttcatgtatagttgtgcagagaagattaanagatcaaacacaagtttg

SEQ ID NO: 34872 - DNA, 347 bp, Glycine max
caagaatactgggcagaagtgagcaacaagttcaaagaccattgtcaaaaggggggcagatgtctttgtcttggctttttctttagttagtcgcgcaagctatgagaatgtgctgaagaagtggatccctgaactccagcattttgcccctggcatcccaatggtattacttggcacaaaattggatctgcgcgataacaggcacgatttggctgatgagcctgtcgtggtgcccgtgactactgagcagggtgaggaactctgtcaaaatattggagctacctacgataatgagtgcagctcagagactcaacagaatgtggaggcagtttttgatgctgcgatta

SEQ ID NO: 34873 - DNA, 435 bp, Glycine max
tgacgtcgcacgtacgcatacgtaagctccggattcaggactagattgtattgcagactgatcaaatatccccaagtattgttattatcatcatcattgcatctatctatctatctatcttctattcattttctctcattgtatctgatttgtgttgttttttgctaacacaagcaatggcggttgtagagaaggggaaaaagaagtacatcacctcagaggagctgaagggtcacaacaaggagggagatttatggatctcaattcaaggtaaggtgtacaatgtctcagattgggtgaaggagcaccctggtggtgatgttcctatctcaaaccttgctggccaggatgtcactgatgcattcataggcatacatcctggcacagcatggtcacaccttgacaaattcttcactggctaccacctcagtgact

SEQ ID NO: 34874 - DNA, 370 bp, Glycine max
cttaactctcttcttcttcttcttcttcgcagttctctttcaatattggcatcctctctgtctttggtcacttggaagacaattatagagaccagcttaaggaaaactactgcatagtggagaaagggtacaattctttccctaacaggattcccggaactgtatactccaaagcactcttggcaaggaggagaatcagggagattataagtgagatcatttgtaaaagaaaggagcagagattgatggagatggatctattaggccacttgctgaactacaaggatgaaaaagaacaaacgctaagtgatgaccaaattgctgataatgtaattggggtactatttgcagctcaagatactacagcaag

SEQ ID NO: 34875 - DNA, 231 bp, Glycine max
atcaatcctaagctcagactttcaaagtttcttcgatcgtcactgtgccatggatcgctccaaaactgcctcagaatccgacgtctctgtccacgcaatattcggttctcgctatgtcagaacttcgctgcccaagttcaagatggcggaggaatcgattgcgaccgaggcagcataccagatcataaatcacgagttgatgttgggttggaactcaaagttgagtttggt

SEQ ID NO: 34876 - DNA, 360 bp, Glycine max
acgggcctgattggggaagaagcgttctcttctctatcattcagaaaagacgagcgagatcttcatttattttatttctatttcaaataaaatcgtgtcttctcctctgtactgagacatggccgaagaagaagaagaagaagaatcagagctcagcgataagcagaaagtggaaatcgcgaaatggttcctcctcaattctcctcccggagaaatccaatacgttgccaaagatgtgaaatccattctcaacaacgacgatttgtacaaggaagccgcttccgaggcttttctcttttacaacaaatcgcacttgatttcccttccaatgttcaaccgaagcggagacgtactggttac

SEQ ID NO: 34877 - DNA, 374 bp, Glycine max
ctcacataaagcatcttcctatggatccccctttaaatgatggtcgtccaaaagggatcatacatggatgtccaaactgcagtaattgtgtgaaggtatgtacctttcactttacctttccacattggaacagtcatgactatgtctcctttttgtttgtttgtttacccaaaaagactataagagaggttataaaaaaggatctcgaaattaatggtttgaatagaagtatggtacttgatagaacattatggcggaagttgatccatgtagccgaccccacctagtgggataaggcgttgttgttgttgttgttgttgttgtttgtttatcaaagtcttgaaccaggtaacagcaaggtggcatcctgaaga

SEQ ID NO: 34878 - DNA, 392 bp, Glycine max
ctctgtagtatcaaacatacatacagcaaagtggagagtctttacagataaagcgagagaattttttctacagggaaaactagatgaagctgaaagactcttcctttctgctatagaagaagctaaagaaggtttcggcgagaaagatccgcatgttgcttctgcatgcaacaatctggcagaattgtagagggtcaaaaaggcatttgacaaagcagaaccattgtatttggaagctatcaacatattagaggaatcttttggtcctgatgatgtacgggttggggtcgctgttcagaaccttgggcagttttaccttggacagcggaagttggaagaagctcgtgttagctatgagcgtgctttgaagatagaaaggcgtgttctggggt

SEQ ID NO: 34879 - DNA, 376 bp, Glycine max
tcatttttctcactcttgttagttattcctggtacccattttgaacagtgatgaagcgtcatcataggtcaccacaccaccaacagagaagttgggctgaaatatgttgtttcggttggtcctgcttacagctcttctgggcaagggtggtcatgcgcaagtggtttaacatggggagctatgagtctgattacagtgctgaccctgttgatgatgattctgaaagtggttcagacaatgaagagcggggaagacagtcgcagtttgcggacaacagatgtaatgaagatgaagcttcatctgaatcaacagaatttcttccaaagttaaggaagcaaaagtcatcaacttatagatttcaattaattaaccaaaa

SEQ ID NO: 34880 - DNA, 378 bp, Glycine max
gtcagcatctatttcaaggtttcgtcttttttgtgccttttttcccccagaaattcataaattcgtggaagttcgaggctcgatttgtccaagcatggattctgcaagggatgcgagtggtgtggcagggaccgtgctaattcccatgcggtttgtgtggccgtacgggggaagaagtgtgtatctaagtggttctttcacgcggtggtctgaacttctacaaatgtcgcctgtggaaggctgcccaactgtgtttcaagttattcatagcttggtacctggtcatcatcagtacaagttttttgttgatggagaatggcggcatgatgaccttcaaccttgtgaatctggagaatatgggattgttaacactgtttc

SEQ ID NO: 34881 - DNA, 359 bp, Glycine max
agaatatattagtcgttttgggaatgaagtgtgtgttttgtgtgactcaggtggatcctagtaagagaccgttgccggattatgttcagaaagttcaaagggatgttaatgccaacatgcgtggtgttcttgtggattggttggtggaagttgcagaagaatataaacttgtttcggacacgctttatttttgtgttgcttaaatagataggtttttgtccttgaatgctttgtcgaggcagaagttgcaattgctcggggtcgcttcaatgctcattgcttcgaaatacgaagagattaagccgcctgatgtggaagatttttgttacattaccgataacacatactccaaaggaaaa

SEQ ID NO: 34882 - DNA, 378 bp, Glycine max
ccagaacgaacaaaaatggagaattcgacccaagaatcccacttccgatccgaaaactccgtgagctacgaatccccctacccaatctacggcatgtcgttctccccttcccacccccaccgcctggccctcggcagcttcattgaagaatacaccaaccgcgttgacatcctctccttccaccccgacaccctctccctcacccccaacccttctcgctcctttgaccacccttaccctcccaccaaactcatgttccacccccgcaaacccccctcctcctcctccgacctcctcgccacctccggcgactacctccgcctctgggaggtccgcgacaactccgtggaggccgtctcccttttcaacaacagcaag

SEQ ID NO: 34883 - DNA, 384 bp, Glycine max
atagtaacactaagagtagttactactatccctaaatataatagccatgcaattagtactattgtgtctactgatactgaagctcactccagcctttgcaaccaccccgaatgatgcctatggtggtgatagtagtggctgtccattagggactgacatataccaatacacttgccctgaagctgaggccatcatattctcttgggtggagcaggcagtgtctcaagactcaagaatggcagcctcacttcttaggctacatttccatgattgctttgttaatggttgtgatgcttcagtcttgctagatgacacacaggactttgttggtgagaaaactgcgggtccaaatttgaattccctgagaggattcgaagtaatcga

SEQ ID NO: 34884 - DNA, 391 bp, Glycine max
  unsure (1)..(391): unsure at all n locations
ttctcctccttccttgttgagagaagaattgatttggtctatggaggtggtagcgtgggtttgatgggtctagtttctcaggcggttcatgatggtgggcgccatgttctgggcgttatcccaaaaagcctcatgccaagagagataactggtgatcctattggggaagtgagagcagtatctgatatgcatcaaaggaaagctgagatggctcgtcaagctgatgcattcattgcccttcctgngggatatggaacactcgaagaattgctggaaatcattacatgggctcagcttgggatccacagcaaaccggtgggcctattgaatgtggatggattttacaattccttgttgtctttcattgacaaggccgttgatgaaggcttta

SEQ ID NO: 34885 - DNA, 299 bp, Glycine max
aattcggttcaaggtcggcaaaaagcagatttctattgataagatggttaaacttggacgtttgtgggacgtcccttcttccatttggatttcgcttggtcattaggtcaggtttcatcatagtaactggtgcccttgcctggagcacagagggtcatgtcatgagatgccaatttgaacacgcacttttagagcctgaggcatcataagccgtgtacgatttgttacctgactatgtgaaaggtgacttatcatccctatgcatatggcctgacgaaattagacactggtacaaatat

SEQ ID NO: 34886 - DNA, 376 bp, Glycine max
  unsure (1)..(376): unsure at all n locations
aaaggagaaatggtgagctgtgaagaccaatatggagaaaagcttccacttgtccaaccagacccggtggtgttggagattaatcgtttgcaaaaccaactaaaagaaaaagaaaaggaactagcgacttgtcagggtgaaatcaaagctttaaggtcaactgaagctctaaaggataaggccatagaagagttgagaaatggagtcagtaaactggacgaaagacttagaattacagaggatcatcttaaacaaaagaatctagaaatcaaganactgacagatgaaaagaaaaatgcattggcttcgcaatatgctgcagaagcaacacttagaagggtacatgcaaatcaaaaggatgaagattttgttcaat

SEQ ID NO: 34887 - DNA, 391 bp, Glycine max
gcatgatgcataatataagcagtgagtccattgcttttccccacagaagaggaaacctgtttacaattcagtacctgatctattggaaagaagctgacaatgacaaaagcagcgattatgttgattggataagagggttctatgctgctatgactccctttgtttcatggggtccaagggctgcatatattaattacatggactttgaccttggagtgatggaggggattggtaatggtgctaatatgaaagatgctgtggaacatgcaagggtttggggtgaaaagtacttcttgagtaactatgacagattggtgagggccaaaactctgattgatcctaacaatgttttcaccaatgatcagggcattcctcccatatctttgaccag

SEQ ID NO: 34888 - DNA, 367 bp, Glycine max
  unsure (1)..(367): unsure at all n locations
cttctgcgaagataactagaatgaggaaccaggatgatgttgtgaacagtattagggcgatgctggagaaggcagaggcacccgtaactgatgagtgttgcatctacagagtcccctttgatatccgcaagctcaacgaagatgcctacacccccaaggtcgtttccataggcccttttcaccacaaaggcaatcctcgccttcaaaacatggagaaacacaaactcatctattgcaacgcatttcttaaacgttccaacacaggcttggagacctggatccgctacatacaggacgtagagccccgattccgtagctgttactcagacgcccttgagttcaccaatgangagctgctgaaaatcat

SEQ ID NO: 34889 - DNA, 385 bp, Glycine max
tgatttcattagtaatcttcccaaggaaattattgtcacttatcctcaaatcaattttctggccacattccaacagagattgggaagttgaccaatttagaaaaactcgttctgtcatccaatggattcacaggagcattgccacccgtgctttccaagttaaccaagttgattgatttgaggataagtgacaataatttccttgggaagattcctgatttcattagtaattggacattgattgaaaagctgcatatgcacggttgctctcttgagggtcccataccttctagcatttctgccttgacaagattaagtgatttgaggataactgacctaaaaggtagtaaaagctcagctttcccaccactaaataacttgaaat

SEQ ID NO: 34890 - DNA, 391 bp, Glycine max
aaaaaaaattcataaatttcataattagggatgatgcataattgaaagaaattaaattatttttaaattttataattagggttatgcataattgaaagaaattaaatcatttttggagaattataaatttcataacacacgctctgatatcacatgtaaaacttgaagggttttctagattatcaattatagaaaaccaatagaatcttgaaacttattattctcacaaacaatagataaacaaataatatagataaacaaataatgcgtacctctccggtgtaatttgatttccttggaagaggagagaaataagatttcacttccttagacttttttttgtctgcctctctctgttcgtgatgattataagtgagagagaacacttttc

SEQ ID NO: 34891 - DNA, 422 bp, Glycine max
gctagagtgatacaacaggtacatcaggtagactcagacggcacgatggctcctgcaagcgcctacctcatatgactcgatcttctagtgcacactatgctgaggtcgcactgcatcactgcgtcttcagtcttcgaggttcaacgtattcggctgcatcgccagtagacttcaccatcgtaggccatctcgagtcgcagtccgagttccacacctcttactgctcattcgcctcctgggagaagcaggtccgccactcctccacccctcgccgccccaacggcctcaccgtcctcgtcaccggcgccgctggcttcgtcggcagccactgctcccttgccctcaaaaaacgcggcgacggcgttctcgggctcgacaacttcaacagctactacgatccctccctgaaacgctcccgtcag

SEQ ID NO: 34892 - DNA, 391 bp, Glycine max
gctgagttgagttccgtgttctcgctcagcatggctttggttaacctttcttacatcggcattgtgacccttataacccttctggcttccaccgaggccagggtcccgggcgtgtacagcggcggcgcgtgggagaccgcgcacgccacgttctacggcggcagcgacgcgtcggggacaatgggcggcgcgtgcgggtacgggaacctgtacagccaggggtacggcgtgaacacggcggcgctgagcacggcgctgttcaacaacgggctgagctgcggtgcctgcttcgagataaagtgcgcgaacgaccccagctggtgccacgctggcagcccctccatattcgtaaccgccacaaacttctgccccccaaactacgcccttccga

SEQ ID NO: 34893 - DNA, 378 bp, Glycine max
attggctaactgtgtcagtcagaataatgtgaagaaagcagaggaagtttttagtaaaatgaaggacttggattttcctattacagtatttacttgcaatcagttgctatttctgtataagaggaatgacaggaagaaaatagctgatgtgttattgttgatggaaaatgagaatatcaacccttcttctcatacttactcgatcttaatagacacaaaaggccagtccaaagatattgatggaatggatcaaattgttgataggatgaaggctcaaggcattgaaccagacatcaacacgcaggctgttttgattaggcattacatctcttctgggcttcaagataaagctgaaactttattaaaggagatggaagg

SEQ ID NO: 34894 - DNA, 378 bp, Glycine max
gtttttggatgcttttcaatgctgctttgaaggtgttttgatttcattgtggtttttaagagcaaattttaggattcagttgagttctatttgcaaagatcttgtcaaaacacatcttgatatcctggatttgtatgaatattatttacatttttcattagcttggcttcaaaaaaactcggaagcgcttttgtatatgttggaaccattcttggttgcacaatctaatgaccgtaatccttacaacattgatattgtgaatctgaagaagcttatcccaaaaattgggcagttgttggctcaaacttctttcatgtctaatatacaaaaccttcaactatccgaacgtgcagaagataaactagttgcagatataaa

SEQ ID NO: 34895 - DNA, 370 bp, Glycine max
aggtgatgctgtcatttatcctcatgctcttatggagctgtgtagaatgcaagaaccatcctcacccacaagaccctctaaccccgtctgagttcaacgatgtacgaaccattgtccaaaacgcatacccaacctcccataatctcaccttccactacgtagccttggacgaacccaacaagtccgaactcctctcatggctatcctcaaaccctaaaaccaaacctacaccatcttctccgccagcagctcgccgggccttcgccatagtccggtcccaaaaacagttccacgagatcacagtggacctttcaactccgtccatcgtatcaaccagagtctaccaaggaaatggataccctatgctgac

SEQ ID NO: 34896 - DNA, 340 bp, Glycine max
  unsure (1)..(340): unsure at all n locations
gaagaagtaatacatgacaaagaagctcaatttagcagcccaaatctgaacgttgcttacaaaatgaatgtccgagaataccaaagtctaactccctatgccacagcattagaagaaaactggggaaaacctcctgggaatctgaattcagatggagagaatctattggtatatgggaaacaatatggtaatgtattcataggtgttcaacccacatttggctatgaaggcgatcctatgcggttgcttttctccaaatctgcaagtcctcatcatggatttgcagcatnatactcttttgtttgagaaattttcaaagctgaagcggttcttcattttg

SEQ ID NO: 34897 - DNA, 353 bp, Glycine max
gtaagctcagaatacggctcgaggatcttatagagagtacaacagtcgcccaatcaagcctcagcaaatttgccaaggacaaccccgggattaaaaccgggcaatggatacttgcaatcaacgtgacaaggaatgataataaaagcttgaaccccccagtgatgagcccttttgcaaaatacagactgttcatgaatccaagatctaagaatgctgggacaatgttggcgttatcagatttcgtgtccatgagaaataatcagacgtctctatcaagtgtcgctagcaatggtgacaatggagcctatcttgcagacaagcaaggattaagtgtgactgatgccgtcatcggt

SEQ ID NO: 34898 - DNA, 397 bp, Glycine max
cgtcacatgcccgcgtccgtaagctaggaatacggctcgagctcgagccggctcgagaatacaatgaataaaaatcaacccttagtcaacacaatcatcatggccacctctgctattcagcaatcagcattcactggtcaaactgctctgaagcagctcaatgagttcgtccgcaagaccggtggcgccggcaaatgtcgcactaacatgcgccgcaccgtcaagagtgctcctcagatcatttggtatggccctgaccgtcccaagtacttgggtccattctcggagcatattccatcatacctgaccggcgaattccctggtgactaccgatgggacactgctggattatcagctgacccggaaaccttcgccaggaacccggagctggacgtga

SEQ ID NO: 34899 - DNA, 161 bp, Glycine max
tttttgttgctctatcttttgctttggttcagagatttgctgacagctttgtgttcattgaaaaggagctggtatccgtcgaacggttgtgggatttgggggagagatggatgagacaccacactgtttctcgaagcctcgatttgaagcacaaccgcttc

SEQ ID NO: 34900 - DNA, 388 bp, Glycine max
gccattttagcccaggacaaggataggttgatggatatgctaacatatccgaaagttgaagaggaaaacatgataagagtagaggaaaaggccaaaaaatttggcctagtagtggatttaaatgcaaagaagcctcgagctgagccactgtacataataaatccaagtgtggtttctgatctgtatggccattgggtcatgccattgacaaaggaagtgcaagttgcatatttattgaggaggctggactaaacatatagtaagagttcttggttatgttggtggtagagaaccaataattcatgtatataaataaagcttagactgagtaataatgtctttgaatggacttgaatttgatagaaattaacaaacaccgttttctttc

SEQ ID NO: 34901 - DNA, 441 bp, Glycine max
gtgatttcagtgagtgatcggtgttcacttgatctcatcataatcgtcagcgtcaattgaagaagatgccgatcagaaacatcgccgtcggaaggcctgaagaggcgactcaccccgacacgttgaaggcggctttggctgagttcatctcaaccttcatcttcgtgttcgccggctcaggctccggcatcgcctacaacaagctcaccgacaacggcgctgccacccctgccggcctcatctccgcctccatcgcccatgcattcgccctcttcgtcgccgtctccgtcggcgccaacatctccggcggccacgtcaaccccgccgtcaccttcggcgccttcgtcggcggcaacatcaccttcctccgcggcatcgtctacgtcatcgcccagctcctcggctccatcgtcgcctccctcctcctggccttcgtcaccg

SEQ ID NO: 34902 - DNA, 412 bp, Glycine max
cgtaacatgcacgcgtacgtaagctcggaatacggctcgaggctttttctgtattcagaatgtggaagctcaagttcgccgaacgacggaatccatggcttcggacattgaccaatcacgttggaagacaggtgtgggagttcgatcctaagcttggatcgccgcaagatctcctcgagattgagaaagcccgccagaattttcacgataaccgctttacccagaaacacagcgctgatctacttatgcggatgcagttcgcaggagagaacccaacacgtgaagtcttgcccaaagtcggagttaaagatattgacgatgtgacccaagagattgtgacaaatacattaagaagggccgtaagtttcgattcaactctccagtgccatgacggacactggcccggagatta

SEQ ID NO: 34903 - DNA, 466 bp, Glycine max
cgtaacatgcacgcgtacgtaagctaggaatacggctcgagccagattctattggtgaatttgttgtgtgtattgccttggttcttcaaggtgaaagagtgttgggtttaatctcacgcttcatgcaggccagagccagagcacgaaagggtagtgatcatggaattaaggcacaaggagaaggatggatgctaactgtggccttaattgaaggaagcaatttagctactgttgattctagtgcattctgtgatccatatgtggtgtttagttgcaatgggaaaacaagaaccagctcaattaagttcaagaaatctgatgctttatggaatgaaatatttgaatttgatgcgatggatgaccctccttctgtgctggatgtggaagtttatgattttgatggaccctgtgatggagctgcatctctcggacatgttgaaatcaaattccttaaaacaaacatctc

SEQ ID NO: 34904 - DNA, 459 bp, Glycine max
gtaagctaagaaatcggctccaaggaaacaaaaaagggcccctgtgggaaatgggcaaattgcttaacttaaaattgccaaccttttggcaataatccacgtcggattcttggactttacagatcatgtttggacagagtgcttctctcaatacttgggaagatggatgcatcttgacccatgtgaaggaatctatgacaagccattattatatgaaaaagggtgggggaaaaaactaaattatgtaatagccatagcacaagatggagtttatgatgtcaccaaacgatacacaaggaagtggcatgaggtcctatctcgacgtactatccttacagagccttctttgtcaactttactccccaatataacaaaagaaagtcgaagaggctttgcatcccaactactttcaattattgaatcccatgatatggaggaaaacacagaacttgagaggag

SEQ ID NO: 34905 - DNA, 444 bp, Glycine max
  unsure (1)..(444): unsure at all n locations
cactgctctaatgggtgtcactggtgcaggcaaaacaactctgatggatgtacttgctggtagaaaaactggaggatatgttggaggtaacatcaaaatctctgggtatcggaagaagcaagaaacatttgcaaggatttctggatactgtgagcaaaatgacattcactctcctcatgttactgtgtatgaatccttgctttattcttcttggctccgattgtctctagatatcaatgttgaaaccaggaagatgttcattgaggaagtcatggaacttgtggaattgaaaccactaaggcatgtattagtcggatttcctggtgttactggtctctcaacagagcaaagaaaaaggttgactattgcagttgaacttgtancaaatccttccataatattcatggatgagccaacttctgggttagatgcaagagctgctgc

SEQ ID NO: 34906 - DNA, 411 bp, Glycine max
gaactaacaaatgggtgcttctacggtgatgaaggcaaacctgagattattctccccactccaagatctgaaggggacatactttcttccccgcatttaaaacccttcacattgcatgatcttaagaaggccactagaaatttccagcttgatagtcttattggagaagggggatttggttatgtgtataaggggttgattaatgatggtaaatcctttgggcctacaatgcctaaatctggaactgttgtagctgtgaagaagcttaagcctgaaggttttcaagggcataaggagtggctgtctgaagtcaactatcttggacaacttcgccatccaaatcttgtcaaacttattggatactgtctagaaggagataaccgacttctagtatatgagtacatgcccaac

SEQ ID NO: 34907 - DNA, 427 bp, Glycine max
atgcacgcgtccgtaagctaggaatacggctcgagaatatttgtgactcggtcgcggggttggtcttatgttgaacgtcctggtattttgctagtgacagcttttgtgattgctcagctgattgccactttgattgcagtatatgccaattggagctttgctgcaattgaaggcataggttggggttgggctggtgtaaaatggttatataacataatattctacattccacttgaccccatcaagtttttaattcgatatgctttgatcgggagggcttgggagcttgtcatcgagcacaggattgcattcacaaggcaaaaggactttggaaaggaacaaagggaacttcaatgggcccatgcacaaagaacattgcatggacttcatccacctgacaccaagatgttcaccgagcgcacacatt

SEQ ID NO: 34908 - DNA, 262 bp, Glycine max
cgtacgtaagctagggattcagcgctaatgtgccacaaacttaatggttaacggccaccaaaacttcctccaatgggtttggaacttcagaaacgccaattctgccaatccaagaaaattcctccttggcaaaagtaaggggtttgagaactcaactggttctgaaaaacatcaagcaattgccctgaaggttcaagccgacaaggccaacctttaaaaatgccgaatggaatggttacaggacacactttacgcccaaaac

SEQ ID NO: 34909 - DNA, 362 bp, Glycine max
  unsure (1)..(362): unsure at all n locations
aacggccacagccatagtcgcctgaaaccgattgttgttgcacggaaaacacagagatccgggtcgacccgttgcagatccgatccaaataagaaaagatgaatattttcaggttagccggggacatgacccatttggccagcgtcctcgtccttcttctcaagatccacaccatcaaatcctgcgccggtcggtaccttcctttccaatctcaacattcatcgctcgctctgttttgtttcgttgaggatatgtcgtanattttcattgtaataatgctgacgtgtgtctgccagagctattattgcttagcgctgtggggttgggttgggtgattttgttatgtgttactgtgtttttgt

SEQ ID NO: 34910 - DNA, 327 bp, Glycine max
cgcagcaaacggtcaagatggctaacactgacgctctcagctttttcaaggatttcatggccggtggcatctctgccgctgtgtcaaaaaccgccgtcgctcccatcgagcgtgtgaagctgctcctgcaggttcaggcagcatccacccagattgccgccgacaagcagtacaaaggcattgtcgactgctttgtccgtatccccaaggaacagggattcgctagcttctggcgtggtaaccttgccaacgtcatcagatacttccccacccaggctcttaactttgccttcaaagatatctacaagcagattttcctccgtggtg

SEQ ID NO: 34911 - DNA, 361 bp, Glycine max
  unsure (1)..(361): unsure at all n locations
gaagatcatggcttctctagcaaccttggctgctgttcaaccagctacgatcaatggccttgctggaagttccctctctggaactaagctctctttcaagccctctcgccacagtgtcaaatccaagaacttcaggttccattccatgcatttccataaattgctatatatatatatatatacacacacacatacatacaagaattttgcataaaagaaatatccttgtatattatgattcgcatgtgttgtaattgtatgctaaaacagtgtaactaagcattacaggagtggtgccgtggtagcanagtatggtgacaagagtgtgtactttgattttggaggatctgggcaacactac

SEQ ID NO: 34912 - DNA, 410 bp, Glycine max
cgtcacatgcacgcggacgtaagctaggaattaggctcgagggactccaagctcctattgtcatggatccggagagtgtgtggccaacagaaaccactcttgtttggagtgagttgagccaagccatcgtgaacaaagactgggaaaaagcaacagaagcaaagaaaacagtggaggaaagacaaagggagctccaaagagaaagagagtcaaaagggaaaacttggattcctaaacactttagagtgtcttatagcaaagaagagggttgggactgttcaccaattcaaaagtcagtcccaaacgcccctatcgtcaccttgtaatgtgctaattatatatgtatggtttatgtgtgctaattatatatgtatggtttatgtgtttgagtaagtgttaataaaattgat

SEQ ID NO: 34913 - DNA, 293 bp, Glycine max
gaaaagtcaaaaattatgatggtgatatctcatcacttggctctgcaaaaagatttcttaaagcagtgattgagatcgctttcgccttcaaagagttgaagctatgggaggtagaggcaaatttgatgcataagttaagtaccttagacagtcttggcaaacgatggaggctgaacgtgaggaattatggatcagccggttactcggcatactcattgacactgttctaacgagaggaaacatgatgaatgttggaactaccagacgggatgctaacgcgttcaaattggtga

SEQ ID NO: 34914 - DNA, 296 bp, Glycine max
tgataaataccgtggcacatggaattcgcagttttgtcagccgagagttgtgctgcgaaaacagcgtatatagattagccaaaatcgcagtggattgtccgagtcactataaccttgcacatgggtccccactcccacaaaaaagttgagtggctcaaaacagtggatcagtactacgtcggagccaacaacgccattccgggtgcatgtgtgcacaatgtgctggattctgtgacatcagctctcttgaaggacaacaatcccaagtttatctaggttgagatggcatttttcca

SEQ ID NO: 34915 - DNA, 297 bp, Glycine max
gattcgcagcagaagataagggatgtttgggttaatcggaatgaaaggccaatttgttggtaggatcgggaacaagaagaaggtgtgttgagcttcgcaacaacatgccacaaccacttctaatggtggtgcgcatggaggagggcttttgccattgaaggacattgatgaatgtgggtatgagagggatagtgggtttgtgtggctgaagcagaagaacagcacacaccacaagtttgagaacattgggaatctggtttcctatgctcgtgagatcactgcctatcttgacgttcg

SEQ ID NO: 34916 - DNA, 329 bp, Glycine max
ctcccccaccaccttcaccatcaccaccatcaccttattattatcattcaccacctacatctaaagagcatgtataccctccctactaatacaggtcacgtctagtaccaacgtcgcatcctccagcggacaactatgtgagtcctctatgacgttctctaactcctcctctaacataccattctacagcaacacctccgcattctgcagctcccgcgcccaagtatatttacaaatcatctcgacctccagtttacatctatgctcacccacctgcatttatctccagttgagttgtttctacgacgtcaccattctcgatctgtcat

SEQ ID NO: 34917 - DNA, 408 bp, Glycine max
attggatgctttagttgggcttgtttcgtgatcctacaagctattacgcttaaaacctaccctgctgaactctctctttctgcgtggatatgcttaatgggcacaattgaaggtgccgcagtggctttgattatggaaaggggcaacccttcagtttggtctctaaaattggacatgaaactgctatgtgcagtctacactggcatagtgtgctcgggaatgggctattacttgcaaggagtagtgatgaaaactagaggcccagtcttcgtaacagcttttagtcccctctgcatggtaatcctggctgtcatgagctactttattctggccgaacaagtgtttcttggaagaatgatcggtgccgttattatttgtttgggcctatacgttgtggtgtgggggaaa

SEQ ID NO: 34918 - DNA, 148 bp, Glycine max
caagcagaagcctatttggatgatgaaacctgaacagattacgaaggaagaatatgctgctttctaggagagtcttaccaatgacggggaacagcatttggctgtgaagcactttgctgttgagggtcagctcgagtttaaggctgtc

SEQ ID NO: 34919 - DNA, 259 bp, Glycine max
caataactatcttcttccaaataaaaaacaaaaaagaaaaaggaatgagatatgaaagggttaattgaatccaaacaaaagaagagatcatcagaatgggcacggtttggacttcgatgatagtattgttgcgttgcctgaacagatcatcggttctgggcgaggacccatacatctactacatatccaacgttacctacggcaccattgccccattgggtgataaccaacagggtatcgtcatcaacggtcattttcc

SEQ ID NO: 34920 - DNA, 185 bp, Glycine max
ctcctgtcaatgaccatggatgctgtgcgatctgttgggcattctcagctatcggttcagtctaccgcatccatcacatactcacacgcgacctgactgcgttatcacagcatcaactggttgattgtgggacgccatattaccagcgatgcagtcgacgacttatggactatgcatctgcgtcc

SEQ ID NO: 34921 - DNA, 319 bp, Glycine max
gtagttgcgaagtaagaaggacatccaaatggcttcctcaatgatctcttctccagctgttaccactgtcattcgtgccggtgccggcatggttgctcgattcactggcctcaagtccatggctggcttccgctccagcaagaccatcaatgacattacctctattgctaccaacggtggaagagtgcattgtatgcaggtgtggtcaccagttggcaacaagctgtttgagactctttcctagctgccattccttgatgatgtccaattggcacatgaattataataccttcttatgaatggatggattccttgcttg

SEQ ID NO: 34922 - DNA, 389 bp, Glycine max
attttgctaatcaatggactcccatttggtgtggtgataacatgggcctgagatatgaggtccacatgtgggggaataaggttgaggtcaatttaggtgaatggacatgcacttgtggagtatggcaactaacagggatgccatgccgacatgccattgcaacaataactcacaaaggacggaagcctgaggacatgtgtcatgagtggctgtcaatagaagcttataataagacataccagcattttattgaaccagtccaaggaccacaatattgggcccagacacagtatacacaccctgttccaccacatacaaaggtccaaagaggaaggccacacaacaatagaaggagatccgtacatgaggacaatgtcacaggacataac

SEQ ID NO: 34923 - DNA, 353 bp, Glycine max
aaacccttgagtttgttcgtcatgcatggatcaatgtttgttctggaggaattatagggcttggataagcagaggaggatcgtgtacgtttgttacagacattctctacacttctcacccatccagagagtgttcctattaacgcacttgttgctctaaatggaacccctcttaacgatcaaaatcctgttgaagtatgggagatgactcgcatcatatcagctgaacgtatcgtaatctcaaactcattggtcaggttatcagctgacacatttcgattctccatgccagagcaagtattgttctcacttccaggagcatattcaattttcaccggtcaaacctgtctcact

SEQ ID NO: 34924 - DNA, 411 bp, Glycine max
taaaaaatcaactaccttagaaaaggagtgaaaggaagaaaagagaaacaagaatggaagtgacacaagtactgcacatgaatggaggctcgggagaaacaagctatgcaaacaattccttagttcagcaaaaggtgatttttttgacaaagggtatgagagaggaagccataagcagcctctaccgcagcatgctcccaagaagccttgcagttgcggacttgggttgctcttctggaccaaacactttcttcgtgatatctgaagctataaaatcggtggagaagctttgtcgagaactgaatcatcagtcaccagaataccagatctacatgaacgatcttcccgggaatgatttcagcaacatcttcaagttccttgacagcttcaaagagaaactgtgtaatgaaa

SEQ ID NO: 34925 - DNA, 443 bp, Glycine max
ctcgaggagatgtgcacacgagaattatgaagagaaactatgaacaagtacctgaatggtggtttgttagcattttgcttctaatgattgttgtatctttgataacttgtgaaggctttggcaagcaactccaattgccatggtggggagtcctaatgtctcttgtaattgcgttagttttcactttgccaattggggtcattcaagcaacaacaaacacgcaagtcggactcaacgtgattacagagttaataattgggtacatttacccaggaaggccacttgctaatgtagccttcaagacttatgggtacatcagcatgtcacaagcactcgggttccttcaagacttcaaattaggccactatatgaaaattcctccaaaatctatgttcgttgtgcagttggtaggtaccatagtggcttcaggtgtgtactttggc

SEQ ID NO: 34926 - DNA, 425 bp, Glycine max
gacccccaaactctgcatcggaagaaaccctagccactctcccggcgtcacgatgcagatcttcgtgaaaaccctaacgggtaaaacgatcacgttggaggtggagtcttcggacaccatcgacaacgtgaaggccaagatccaggacaaggaaggcatccctccggaccagcagcgcctcatcttcgccgggaagcagctggaggacggccgcaccctcgccgactacaacatccagaaggagtccacgcttcacctcgtcctccgcctccgtggcggcgccaagaagcgcaagaagaagacctacacaaagcccaagaagatcaagcacaagcacaagaaggtcaagctcggcattcttcagttctacaaggtcgacgattctggaaaagtccagaggctccgcaaggagtgccccaacgccg

SEQ ID NO: 34927 - DNA, 413 bp, Glycine max
  unsure (1)..(413): unsure at all n locations
gaatccggtagaaaagggttttatttctttttcctttcaattattttctctgtcttgtctttgttattcagttcggttgttgtgttgtgttgtgtgctgcaacacatccagaaacacaatcggtgtcgtgttgggttgggtttttttgttattaaaagaaaagaaaaggggggatggctcggagagcagaggaagagtacgattatctgttcaaggttgtactgatcggtgattctggtgttggaaaatccaatctcctgtcncgattcactcgcaacgagttttgcctcgaatccaagtccaccattggagtcgaattcgctactcgcactcttcaggtctttcttttcttcagatctgatcaagagatgtctggaattccaactttggatttcaacccctcgctcgcatca

SEQ ID NO: 34928 - DNA, 437 bp, Glycine max
  unsure (1)..(437): unsure at all n locations
ggcacaagtttgttgagatagctagaagcaataagatgaaaatgaaagtgcttgttttgtttgttgctacagttttggtagcatatgaatgccatggctcagactaccagaagttccctctccaaatgaaaactgggtttggtgggcaatacagcaatgaggtggcatgtgccagttggaggcttggcgtggaagcaaacaacgtagtcaagtggcaaactgttcctgcagcttgcggagagtacatagctgactacgttctangagaacaatatagatcagattccanaacagttaaccaacaagcttaattctatgctaaatccctcaactcacaacanagatgtccttgtcctggacgttgaagacactactctctctaatctccagtattttgctaaacatggaatttggtgtggaaccacacaatacgacgg

SEQ ID NO: 34929 - DNA, 215 bp, Glycine max
cacgcatccgtaaagttccaagacgacagaaggggaaggtgcaatagtttggtgtgagctataagctagtttaacgttaggagaatatgaagtcgttggtttcctcggttgctgcagttagttaggaagcaattgcatgccatggcacatgttaccacacgttccctctccgaatgataactcgcgttggcgagcgttcttctgaggtaaaatgc

SEQ ID NO: 34930 - DNA, 384 bp, Glycine max
  unsure (1)..(384): unsure at all n locations
ggcacaagtttgttgagatagctagaagcaataagatgaaaatgaaagtgcttgttttgtttgttgctacagttttggtagcatatgaatgccatggctcagactaccagaagttccctctccaaatgaaaactgggtttggtgggcaatacagcaatgaggtggcatgtgccagttggaggcttggcgtggaagcaaacaacgtagtcaagtggcaaactgttcctgcagcttgcggagagtacatagctgactacgttctaggagaacaatatagatcagatttcaaaacagttaaacaacangcttaattctatgctanatccctcagactcaacaacaaagatgtccttgtcttggacgttgaccacactactctctcca

SEQ ID NO: 34931 - DNA, 351 bp, Glycine max
ggcacaagtgaatttgttggtcgaaatatgtagaatcagtgtgagtgcttatgaacgtccttgttttctgcgttgctacaattttgggagcatgacactaccatgcttacgatatgtaccatctccgattctccactgcccatggtgaacgtactccggaggtgaattgctcaagttggaggcttgctgtggaagcacacatgatctttggctttgacaccattcctgaagagtgcgttcaatcaacaaaggtatacagccatcagcagcattatagatcagcatcctgaacagttaaatccaaggcttatttctatgccatagatctcgaagtccatcccaaggacacat

SEQ ID NO: 34932 - DNA, 279 bp, Glycine max
cgtccgtaaagctgcaaaaagaggggagcagggggcacatgtgaatttgtcgatcgcaataactagaatcagtgctgtcgcttatcagcgtccctgatttcttcgttgctagacttttggtagcatggcattgccatgcatacgatatgttccctctccgaatgaacactggctatggtgcccgtactccggaggtgaaatgcgcaagttggttgcatgctgtggaggcacacaacatctttggctttgacaccattcctgaagagtgccttgaatcaa

SEQ ID NO: 34933 - DNA, 380 bp, Glycine max
cacgcgtccgaaaggagcaagaaaagggatcaatggggcaaatttttggtgatataactatacgcatgacgatgagaatgggagtgcttgtcatgattcagtgtgctacattttgggaataattggaatcccatttgctcacacgactaaaaattgcccctccatttaagggatttgtttggagggcaatacatcaataatgtggcatatgccatttgtacgtctcgcgtggaagcaaacaacgtactcaagtggaaaactgttcctgcatcttgcggagagtacatagttgactatgttctacgagaccaatatagatcagattccaaaacaattaaacagtaagcttagtttcatgccaaaacccttatgctcaccaa

SEQ ID NO: 34934 - DNA, 280 bp, Glycine max
ggcattatatttgagttcaaacaaatcaaagccatggccacctccaacttctctattgttctctccgtctcactagccttctttttggtgctacttaccaaggcacactcgaccgataccgtttctttcaccttcaacaagttcaacccagtccaaccaaacattatgctccaaaaggatgctagtatttcatcccctggggtgttgcaactcaccaaatttggcaccaacggcttgccaacctcgggatctctcggtcgtgcccttaacgctgccccaa

SEQ ID NO: 34935 - DNA, 433 bp, Glycine max
ggcacaagtttgttgagatagctagaagcaataagatgaaaatgaaagtgcttgttttgtttgttgctacagttttggtagcatatgaatgccatggctcagactaccagaagttccctctccaaatgaaaactgggtttggtgggcaatacagcaatgaggtggcatgtgccagttggaggcttggcgtggaagcaaacaacgtagtcaagtggcaaactgttcctgcagcttgcggagagtacatagctgactacgttctaggagaccagtagagatcagattccagaagagttaagcaacaggcttatttctatgctaaatccctcaaactcaccaacaaagatgtctttgtcttggacgttgacgacactactctctctaatctccagtaatttgctaaccatggatttggtgtggaacacacaatacg

SEQ ID NO: 34936 - DNA, 432 bp, Glycine max
ggcacaagtttgttgagatagctagaagcaataagatgaaaatgaaagtgcttgttttgtttgttgctacagttttggtagcatatgaatgccatggctcagactaccagaagttccctctccaaatgaaaactgggtttggtgggctatacatcagtgaggtggcatgtgccagttggaggcttggcgtggaagcaaacaacgtagtcaagtggcaaactgttcctgcagcttgcggagagtacatagctgactacgttctaggagaccaatatagatcagatccaaaacagttaacaaacaagcttagttccatgctaaatccctcatactcaacaacaaagatgtctttgtcgtggacgttgacgacactactctcgctaatctccagtattttgctaaccatggatttggtgtggaacacacaatacg

SEQ ID NO: 34937 - DNA, 431 bp, Glycine max
tactgggacttgtaataattcttatgacacatgataggccatgggcaccagctccgcattcctctctccttctgctcctcttgctgctccacctcgccatcgccgctcacggtatcagcatcagctacggcacgctcggcgacaaccttctaccgcccgcggctgtggcgaacttcctgaagatgaggaggatcatctacggcgtgacgatctacgacgtgaatccggacatcctgcaggccttcgccggcagctgcatctccatgacggtgagctgggctatcggtgagatcgccaccttatggactatcgactctgcgaggcagtgggtggccacgcagatcaaaccctttcaggctgggacaggggtaaatacatcctcgttcgcagcgaagtccccactggggcgacaccgacatgattcgcgggct

SEQ ID NO: 34938 - DNA, 242 bp, Glycine max
gacagctattccgcgtaagcttgctactgagtttcgacactgcatggcttaggtcatcggaattcgaagctacgttgcaacatggctaatgaaaaggctcagatcaacattgtagtggttggccatgtggatcctgaggaggcaaccaccattaacgagctgaagaagcctgttgtggagaaagaatctcgagggcatgccagatgagggcatgcatgtacagactcggaggggaaccagag

SEQ ID NO: 34939 - DNA, 357 bp, Glycine max
aggtgcatgtgtttatgatggcagataggtatcacaagcaatcagatgaaatatataaaaagttggatgcggtagtcagtcaactgaagctggttggctacacacccagtacttcgggcatattggttgatttagaagaggaagagaaaaaagaagtagttctttggcatagtgagaaattagcactgtgctacgggctaattggtgagagaaaagaatcatgcattcgcatagttaaaaatcttagaatatgtgaggactgtcattcctttatgaaattggtctcaaaggtgcaccgaatagagattgtcatgagagataggactaggtttcaccattttaatggtggaatatgtt

SEQ ID NO: 34940 - DNA, 444 bp, Glycine max
ggaatcataaggcaagttgaagggaattcatggctacactgaagatgatgtggtctccactgactttatcggcgatagcagatcaagtatttcttgatgcacaagctggaattgcattgaataagaactttgtgaagcttgtttcttggtacgacaacgaatggggatacagctcacgtgtcattgatcttcatgtactcgttgccaacaagtcgctttaacgtgttacatcaaagtagcttgtcttcacattattaccgtatgtttatgtttagctgcgatttagtgtcttgctcgagcaaatcatgagaggtctgaataaatcggtttctgaaaccagtggtgttacatgttggaggagcattagctctttattggacttttgatgtattctcatgtggatggggatcgagttattggatttttatatactcgctgatgtac

SEQ ID NO: 34941 - DNA, 354 bp, Glycine max
aggggcacaagtgagtttggtgatcgagataactagaaacaatgtgatgaaaatgaaaggccttggtttcctcggtgccacaattttgggaacaagggaatgccaagcgtacgaaaagttccctcccccaatgaacaatgggtaaggggcccgttatcccgaaggtaaatgcccaagtttgaaggcttccgttgaaacaaaaaacaaccttgggctttgaaacaatccttaaaaattgcgttgaagcaccaaaggaatacatcaatggcgaacaatataaatcagactccaaaacagttaaccaacaagcttacttttatgccagagacctcgaagtccatcccaaggacacat

SEQ ID NO: 34942 - DNA, 389 bp, Glycine max
ggctagagcatgatattgaacggcgagaatcaacactgttctaatctagacgcgcgtgactcacgctcactctcacgcatcatcgagggtttgcctgatcagctctcagtgtgatatgctagattcatcctcatggtcgtctgtgagtgcggtagtggagatagatcgttcgtgatttaggcagcttaccggtgacttcgaggaatcaatatgatgcgtgcagtggtgtggaggttcacccattggatctcttcactcactgcggataaattcgcttctcctgttgggatactgctggacaagacaagtttggtggcctcacagatggatattacatccatggccgttgtgcgattataatgtctgatcttattgcgcgtctaacagac

SEQ ID NO: 34943 - DNA, 390 bp, Glycine max
aaaaaaacaacaaaagggaaaggttcaaaatttggttgtaaccaaaaaccaatttaaccttgaggagaatataaatttgttggtttcctttgttgcggcattatttttggtatcatggcaatgcaatggcgcaggctacaaaaggttccctctccgaataaaaacgggctatggtaagcgttccttcggaggtaaaatgcgcaatttttaggcttgctgtggaagcacacaacatccgagcctttaaaaccattcctgaaaattgcgttgaaccaacaaaggactacattaatggcaaacaatttagattagactctaaaacagttaaccaacaagctttcttttatgctagtgaacgcgaagtccatcacaacgacatatttatattcg

SEQ ID NO: 34944 - DNA, 246 bp, Glycine max
aaaaggggcacaagtgagtttggtgattgaaataactaaaaacaatgttatgaaaatgaaagtccttgttttcatcgttgccacaattttggtaacatggcaatgccaagcctacgataagttccctctccgaattaacactggctatggtgaccgtactccggaagttaaatgcccaagtttgaagcttgctgttgaaacacacaacaaccttggcttttaaaacaatcctgaaaaattccttta

SEQ ID NO: 34945 - DNA, 159 bp, Glycine max
ttccgggtcgccccacgcgtccgggatgcaaaaagaccacaaaaggtggcaaaaatttttttacggatttcacttcctacttgcacactgtatgacacaaccctgacaagattccttttgttccgaactctggttttcagggacacaccctcattgaaa

SEQ ID NO: 34946 - DNA, 426 bp, Glycine max
cgcgtccggagagtcggtccatgatgacattgcgggagtgcggaggagtcttgttgtcgaacatctgccccttctacagtcaagaggctgtgacgttgctggaactctcagttgtcactttaatattagtagtcttggaatgagaagtcgcaggggacaaaatgcactggcttagcattttggcagtctatagtgacctgtcttcggacgtgcaatgcacaagtttcaagcctactctgaaatcaagatgttcataacctgtatcaccattcgttaacactgcctataaccaactcaggactacatatagtggctagcaatttagatcagactcaagatcagttaaccaacaagctttcttattacggtactgaacgcgatgtccatcaaagcaacatatttacaatcggccatacataacatcgt

SEQ ID NO: 34947 - DNA, 328 bp, Glycine max
gggtgtcgcgtcagctagatgttcgacacgaatttctgcattttccttcttccatcggtccgtgacatatacacagacacatttcgtctgacagggaagggtgattcgcgcacagcgtacgggcgcggagtcagtgttcacgtcgcagacccatcatccgcaacggtccgtgcaagttctgcaggctcgatttcggcgaacacaacagctatctcataggggtcattactgatatcatccatgaccctgcacgcggtgatcttcaagccaaagtggcgttctgacactccatccgcgttaagcagcagacggacctctacgtcaccga

SEQ ID NO: 34948 - DNA, 342 bp, Glycine max
ggcacaagtttgttgagatagctagaagcaataagatgaaaatgaaagtgcttgttttgtttgttgctacaattttggtaagcaaataaatgcaatggtccaaacaaccaaaatttccccccccaaatgaaacctgggtttgggggccaatacaccactaatgtggtatgtgccactgtggagcttggcgtgaaagcatacaacgtagtcaagtggcacactgttcctgcatcttgcagagagtacatagctgactacgttctaggagaccaatacatatcatcttccaaaacagttaaccaacaagcttacttcgatgctaaatccctcacactcaccaac

SEQ ID NO: 34949 - DNA, 287 bp, Glycine max
aggggaacttctcaagttcatttctacaaatccctagctctgtcggatccgtcattagaaatggggtttcgggtaggagaccctgacctccgctctcactatcgtcactctctcgtggacatcacttccgctaatgtcatcttataagatgttatcaataatgggtgggaaaagctattgattaagtcagattgccaaaatgatgacaacattgctggggaatgtcatcagactgccgggcagtggaatggtgactctgatgacatatgtagtcacagcagtgaaga

SEQ ID NO: 34950 - DNA, 360 bp, Glycine max
agcaaggggaccttctaacgtgatcgcagtccagtcagcctccaattcgtgccactctctttacaatggccgttaccttctcatctctccacagagaatcaggtctcatgtctctcgaggacttcctctctggggaagtctacgtatctggggatcagttcacaaaggacgacatcaatgtgtcaggtgctgttttggagatgtcaggtgactcatttcccaatgctgccaagtgggactaagttgtctcaacacagcttgcagtaagcttcattggcaatgctcagcgggtgagattcactggaatggcatctgctccattcgaagctgctcctgtcaaagcggttgcctctgctgtcg

SEQ ID NO: 34951 - DNA, 434 bp, Glycine max
  unsure (1)..(434): unsure at all n locations
gggtcgacgcacgcgtccaaagtaaatcgataggggtcttgcaggggaaaaaaggcacgttcaaggcagctcgtgtgggagatcgtcaagatcaacaattccttcttggtcaagcagtttggaaggggcagccagagcgtcgaattcagcagagagagcaacaatctctacaacctcaattcgttcaagtactctggtttggcaaacaagaaaactgttactgttcagcctgagggcaaagatcaggctgtgttgttggctacaaccaagacaaagaagcataacaagcccgctgcattgctccacaaatctgtgatgaagaaggagttcacgangatggcanaagctgttgacaacgaggtggccaacaattactacaggcctgatctcaagaacgctgcccttgcaatgttgagtgcctgtcacagaagcct

SEQ ID NO: 34952 - DNA, 404 bp, Glycine max
  unsure (1)..(404): unsure at all n locations
ggcacaagtttgttgagatagctagaagcaataagatgaaaatgaaagtgcttgttttgtttgttgctacagttttggtagcatatgaatgccatggctcagactaccagaagttccctctccaaatgaaaactgggtttggtgggcaatacagcaatgaggtggcatgtgccagttggaggcttggcgtggaagcaaacaacgtagtcaagtggcaaactgttcctgcagcttgcggagagtacatagctgactacgttctangagaccaatatagatcagattccanaacagttaaccaacangcttatttctatgctaaatccctcaaactcaacaacanagatgtctttgtcttggacgttgacgacactactctctctaatctccattattttgctaac

SEQ ID NO: 34953 - DNA, 254 bp, Glycine max
ggcacaattgattttgttgatcaaaataactagaaacattgtgatgaaaatgaaggcccttgtttccttcgttgcaacaattttggaagcatggaaatgccatgcgtacaaaatgttccctctccgaatgaaaactggcaatggtgcccgtactccggaggtgaaatgcccaatttggaggcttgctgtggaagcacacaaaatctttggctttgagaccattcctgaaaattgcgttgaaccaacaaaggaat

SEQ ID NO: 34954 - DNA, 192 bp, Glycine max
ccacggggaaaacctgatcacacagaaattactctgaaagatgatcttcctgaccaggatatgactgatctttacaagacatagggaccttactgtccaactggtgaactgacaacggttccatttggctgctcacatcactactaataaggatgattctgagtatcttcttcaaaatcagcttgctgggat

SEQ ID NO: 34955 - DNA, 397 bp, Glycine max
gactcaccacttcaaaacactcataacacaaagcacaaagcaaagctcatccttgagttaaaaaatggcagcagcttcttccatggctctctcatccccatccttggctggcaaggccgtgaagctgggcccatcagccccagaagtgggaagggtgagcatgaggaagaccgtcaccaagcaggtctcctcaggaagcccatggtacggcccagaccgagtcaagtacttgggcccattctctggcgagcccccgtcctacctaaccggtgagttcccaggcgactacggctgggacactgctgggctttccgcagacccagaaaccttcgccaagaatcgtgaactcgaagtgatccactccaggtgggccatgctcggagccttgggctgcgtc

SEQ ID NO: 34956 - DNA, 241 bp, Glycine max
ggtacgcaccttcatccataactcgtgcatactaaactcagttacagacacgcagccatggttcggggaccggccaggtatgacacgcaaattatttacaaaccataccccacgtcaattttctgccgtcctgttcctcatcccatgatcagtatttatgaagttggtatgaataagaaaggtgtagatgactttcctttctttctctatctggctcattgagagatagacatccatttca

SEQ ID NO: 34957 - DNA, 445 bp, Glycine max
cccgggccgacccacgcgtcaggaagacgacagaaggggacacactagtaactaaacaccatcctttttttccggtgcgcgactccatctattattcatccacactccctcccttccagatccgatcctcgatggcggcggcgtcgcggaggctccgggacctgcagtccgaggccgggaacaagatctgcgttgactgctcccagaagaacccgcagtgggcctccgtctcctacggcgtcttcatgtgcctcgaatgctccggcaagcaccgtggcctcggcgtccacatctccttcgtccgatcggtcaccatggactcctggtccgacatccagatcaagaaaatggaagccggcggcaacgacaagctcaacgcattcctcgcacagtactccatccccaaagaaaccgacatcgttacgaagtacaacaccaacgccgc

SEQ ID NO: 34958 - DNA, 370 bp, Glycine max
ataaggggatactattatcagtcattctcatctttctctcttctctctccacacaaaccctaattcacgaccctgttcccctctcgtatccgtcatgaaaggaggaaagtccaagaccgaatctaagagagccgatcccaaacttgctgtgaataagaagggagccgccaccatcgctatgaaacccgccggcaaggggaaggcatcgaaagaccctaacaagccaaagaggcctccaagtgctttcttcgttttcatggaggagttcaggaatgtattcaatacagaacatcgtgaaagcaaaccagtgtctgctgtgggcaaatctgctggagcaaaatggactactatttccgatgctgaaaaagca

SEQ ID NO: 34959 - DNA, 378 bp, Glycine max
gaggtgcaagagtttgttgtgagctataagctagtttatcgtgaggagaatatgaagttgtttgttttctttgttgctgcagtagttttggtagcatggccatgccatggcgcaggctaccaaaggttccctctccgaatgaaaactggctatggtgagcgttcttcggaggtaaaatgcgcaagttttaggcctgctgtggaagcacacaacatccgagcctttaataccattcctgaagagtgcgtttgaacaacaaaggactacattcatggggaacaatttagattagactccaaaccagtttaccaacaagctttcttttaagctagtgaacgcgaagtccatcacaacgacataattatattcggcatacat

SEQ ID NO: 34960 - DNA, 384 bp, Glycine max
gaattgagcggcggggcagaggaaggggcagagttttggagtttgaaagagaaaatattgattgcagttgagttctaatgagtaacgaatacgattacctgttcaagcttctcctaatcggagactcttccgttggaaaatcctgcttgcttctcagattcgctgtgagtcatcacttcccttcactttcatctctcttgttcttgttcttcacctcctttgtttcttcatttcgtttcaggatgactcctatgtcgacagctacataagtaccattggagttgatttcaaaatcagaacggtggagctggaagggaaaaccgtcaagctgcagatttgggatacagctggacaggagcgattcaggactataacaagcagtta

SEQ ID NO: 34961 - DNA, 388 bp, Glycine max
aggggcacaagtgagtttgttgatcgagatacctacacacaatgtgatgaaaatgtaagtccttgatttcttcgatgctacaattttcgtagcatgggaattccatgcgtacgatatgttccctctccgaatgaacactggctattgtgcccgtactccggacgtgaaatgcgcacattggaagcttgctgtggaagcacacaacatctttggctttgagaccattcctgaagagtgcgttgaaacaacaaaggaatacatccatggcgaacaatatagatccaactctagtacagttaaccaacaggcttactttttatgccagagacctcgaaaatccatccccaagaaacatttgtgttcagtatagatggcaccgtactctcta

SEQ ID NO: 34962 - DNA, 206 bp, Glycine max
gccaaaagctaagcacaacaagaccacaatccaaataagtgttgacaaaaaaatgcgtttggttggttggaaattagttattaaggattttggaatcatccgaggaaacaaagggcacaagataaatgggaacttggtgattaagccaaaaaatgtgttggatatcaacagcatcaccaatgttaaaggtgtcaatgggaaccgga

SEQ ID NO: 34963 - DNA, 210 bp, Glycine max
ggaccgagaaagatattaggggttttgagtgcggtgcggggatcctagcactctcttctgcagctttcgccgacagcttcattcaccatggctgagcgaaacgaaaaggcttttttgaaacaaccaaaagtgtttctcaacctccaagaaaactgggaaaggaaagagacccggaaaaggtgggaaccgcttttgggaaatccattgggc

SEQ ID NO: 34964 - DNA, 264 bp, Glycine max
taatgggatcgcaagccacgtcagataaaatcagggtacctctgctctcgagcaatatcgtcgacaagacgatgaaggggttcaggaggcctcagggtgacaggaaaagttccgtcaacacaaactggcgtagaccaaagggtatacattcccgtgtgaggacaaagttcaatggatgcactttggggccaaacatcggttatgggtctgacaacaagaccgccagtatctccctaagggttttaagaaatttgttgttcacaa

SEQ ID NO: 34965 - DNA, 355 bp, Glycine max
gaacacctcctaaagttttatagagagaaattttcccaacagaaattcccattccctaacaaaattttagaaaaattatgttactataattgtctttgtgtacagatttgagagactaacactatattttactacaattatcttattttggttcaacccgattttgccttgtatgtactccatatctgccgtattagttgttggatttgggaacatcctttccttctctggatcagcttttggctcaatggcaacatttatcccatcctggttgaacccgattctggcttgtatgtcctccatatcttcagtaactgttgcattttaggacatccatttcatctcttgatcagca

SEQ ID NO: 34966 - DNA, 240 bp, Glycine max
gctgccagaagaccactgaaagggaagcaaaaccctaagccctctttcttcctcttcctcaatagtgcgattttcgattctcttccctgcatctatgcctaaccccaaggtcttcgtcgacatgaccatcggcggtcaatctaccggccgcatcgtgatcgaactctactccgatttaactctcatcaccgccgagaacttacgcgcgctctgcattttcaacaaaggcacctggcggat

SEQ ID NO: 34967 - DNA, 237 bp, Glycine max
gaaggtgcaagagtgtgtgtgtgagctataagctagtttagcgtgaggagaatatgaagttgtttgttttctttgttgctgcagtagttttggtagcatggccatgcgatggcgcatgttaccaaatgttccctctccgaatgaaaactggctatgagtgagcgttcttcggatgtaaatatcgcacgttagaggcatgctgtggaagcacataacatccgagcctttaagaccatt

SEQ ID NO: 34968 - DNA, 360 bp, Glycine max
ggtcgacggacgcgtccgtccagacgtcagacgactacaaaacggggacaaaatgaggatgctgatcgatgtgaattcaattcagtttgatttcccactattgtcttcgccacctttgtgcgctgcaacctcaggttggcgaggagggttcatgctacaatgaacttggtttcggtgttcaaagttagttagatgcattgatgcttgcagagatctctgatcttaagatgagtgcgtcgaagttcagtaagttcatcagcgtcggggacagtgctgtcgacaaaacctgcttgttgagttcctacaccagcagcaattttcccacatactatgtgcccaccgtttttgaaaatttcaatg

SEQ ID NO: 34969 - DNA, 333 bp, Glycine max
gctccgaaacccgccccgagaatgcgatccatatcggatcccccggtgccccctcgctcctcctccggcggaagcgactcctcctcgggcgcatccatcgatccgatcttccacctcctccgcgtcctccccttcagcttcctccgccctgctcgcctccgcctcaagcttcccgccttcagcctcccctccccgaacgccgtcttcgcactcctcctcctcacctacttcatggtcgtctccggcattgtttacgatatcatcgacgagccccccggaatcggatccactcaggacacctacactggtgccgtccgacccgtcggcttcatg

SEQ ID NO: 34970 - DNA, 385 bp, Glycine max
gggtgcaagagtttgttgtgagctataagctagtttatcgtgaggagaatatgaagttgtttgttttctttgttgctgcagtagttttggtagcatggccatgccatggcgcaggctaccaaaggttccctctccgaatgaaaactggctatggtgagcgttcttcggaggtaaaatgcgcaagttttaggcttgctgtggaagcacacaacatccgagcctttaaaaccattcctgaagagtgcgttgaaccaacaaaggactacattaatggcgaacaatttacatcacactctcacagtattcgaagtactccatcaacaccctcaggtggaaactgtggatcatcacctccacaacatcatgatccaacaacaccctcaac

SEQ ID NO: 34971 - DNA, 338 bp, Glycine max
ggagtacaacttcacattttagactaataccccctcttttgctgcatcagaagagttgtgaatgaagaccatggctgcacaagctcttgtagcatcatcttctcttaccgtctcaggggaggctgcgatacacactcttggaacaagatcataccaatctcgatctggcgtcgccaaatgagcctcctttcttgttaatgtagctgctaacccccctgtcaagcttggatcagatcgacctttgtggtttgcatcaaagcaagatcattcttacgtggatggcatcctatcaggtgactatggaattgaccctctgggaccttcataccctgaaggaa

SEQ ID NO: 34972 - DNA, 350 bp, Glycine max
gaaggagacttggtgcgaaagttgaaagcacgaaaatggggtgggtttggaaggatgacaacagcgacgatgttcgacgcgataactcttcggaacgatgcgccaccaccaaggtcgtcaaatctcagtgcagaacagaggaggtcgaaactggaaagttcgtcagaaagtgcgagaaaaccgaagagattctcaggaattgcatcggaaagcccgccgaagtgttgcaatcaaacatagagtatactgaagatgatatcacagaagaagtacttaagttacggtatgttcatgccaacggaggtgctcatggatctggagccagggaccatggacagcgtcagatctgg

SEQ ID NO: 34973 - DNA, 341 bp, Glycine max
agggggcacacgtttgtggaggtagctagacgcagtaacatgacattccaagtgcttgtatttgtttgttgccacagttttggtcccacatgaatgccatggtccatattaccatcagttccttctccaactgaaaactgggtttggtgggcaatacatcaatgacgtggcatgtgccacttggaagcttggcgtgagagacacaaccgtagtcaagtcgcaagctgttcctgcagcttgctgagagtacatagctgactacgttctacgagaccaatagacatcacattccacgacagttaaccatgacgcttatatctatgctatatcctcatactcac

SEQ ID NO: 34974 - DNA, 341 bp, Glycine max
ggggcacaagtgcaatttgcttgatcgtagataactacaatacagtgtgattaaaatgcacgtccctgcattcatcattgctacaactttggtcgcatggcactgccatacctacgataagttccctctccgaatgaacactggctacggtgcccgtattccggaggtgaaatgcgcaaattggaggcttgctgtgaaagcacacaacatctttggctttgagaccattcctgaagagtgcattgaatcatcatacgaatacatccatggcgaccaatatagataggctccaacataattaaccaacaagcttacttttatgccacagacctcgaagtcca

SEQ ID NO: 34975 - DNA, 295 bp, Glycine max
gacccacacgtcaagctgggagaacaacagaagggggaacctttgcattcaattcattcaaaattcagcaagtgctttttggaagcatagaccgagatacttcgagatggcccgtataaagcagggtgggcgtaagtcaactggaggaaaagctctcacgaagcatcttgcaacaaatgctgcacgtaagtcggcagcaataatcggtggtgtgatgaaccctcatcatgattgccgtggaagtgtagaacatcctaacattaagaactattccagtagcactgatctcctaatc

SEQ ID NO: 34976 - DNA, 394 bp, Glycine max
cagggaaggtgcaagagtttgttgtgagctataagctagtttatcgtgaggagaatatgacgttgtttgctctctttgttgctgcagtagttttggtaacatggccatgccatggtgcaggttaccaaaggttccctctccgactgaaaactggctatggtgagcgttcttcggtggtaaaatgcgcaagttttaagcttgctgtggaagcacacaacatccgagcctttaaaaccattcctgaagagtgcgttgatccaacacaggactacattaatggcgaacactttagatcagactctaaaacagttaaccagcaagctttcttttatgctactgaacgctaagtccatcacaacgacatatttatattcggcatagataatatcgtact

SEQ ID NO: 34977 - DNA, 237 bp, Glycine max
tccaaaagggtgcactcgtcactctgctgctcgcgatatctagtaacagtgtgatgcgaatgaaaggccttgttctcatcgttgatactcttttggtagcatggcaatgccatgcgtacgacatgtaccctcccccgatgaatgctggctgaagtgcccgtacaccagaggtgacatgcgcaagttggaagcgtgctgttgtagcacacaacatctttggctttgagaccattcctg

SEQ ID NO: 34978 - DNA, 374 bp, Glycine max
ggaaggcagtaaaatgggctggctgtaaggcccaatttgaatagaaggaacagtcgcggagaggttgcagtcggcgacgaaggaagcggggttaactctccggaccagaaggaacaagaaagatcatctttaatgatttgttactagtgagaagacctcaaagctcttataccagacatttgcgagttatgaacaatattttgtctttgggaatatgcatggattctcccctgttgatggttttgtggagataagcaattgcttggcagaagtgattaaatatgtgggtaatgaatcgtctactggtctcttctttatccaacatcacacccaaaacgcagtccccaatgtcatcaaacttaagaacaacatta

SEQ ID NO: 34979 - DNA, 290 bp, Glycine max
ggttcagtcgatgattagccagatggaatatcagtattaagtttccacatcatcgtcatcacactgacaggtaacactacacccttccaggtccagagcatagataccaccgacacagtgactgacaagattcaagtgacggaatgcattcctccggatcagcagcgtttgattttcgccggaaagcagcttgaagatggaacgaccctgaccgattagatcatccagacagagtcaacacttcatctcgtgctcacgcatcatggtggcatcatatgaacttctctcat

SEQ ID NO: 34980 - DNA, 300 bp, Glycine max
gaatgcacaggatgatttgaatagatgactctattaacatcacagtacaagtccagtagatactgtgtctggagatttatgcgaacgatgcattcttcgacgatcaattcggtctggccgtcgatctctactctgaatccatactattggatcctagtgacgccaatctctttcgtggccatagcccaagcacagattaagctcaacgctttcactgacgccgtttccgatgccaacaattccatccacataaacccttctgtgcccaatgcctatcttcgtacatccatcgcatgtatc

SEQ ID NO: 34981 - DNA, 291 bp, Glycine max
gaaaagttattttgttgatccaaataactataaacagtgtgatgaaattcatggtccgtgttttcctcgatgctacaaatttggtaacatggcaatgtcatgcgtacaatattttcctcccccgattgaacactggttatggtgcccgtacaccggaagtgaaatgcgtcaaatttgaggcttgctgtgtaagcacacaacatctttggctttgagaccattcctgaaaacttcgttgaagcaacaaacgaatacatctatggcgaacaatatatatctgactctaaaaca

SEQ ID NO: 34982 - DNA, 408 bp, Glycine max
  unsure (1)..(408): unsure at all n locations
agggggcaacttcaattgcaatcaaattagttcattctctttgcgcagttccctacctctcctttcaagaaattgttcagatccgttgataaaagccttattcgttgattctgtatggtatttcaagagatattgctcagatgcagatcttcgtcaagaccctcaccggaaagaccatcacccttgaggtggaaagctctgacaccatcgacaacgtcaaggccaagatccaggacaaggaaggaattcccccggatcagcaacgtctcatcttcgccggaaagcagctcgaggacggccgtaccctcgccgactacaacatccagnaaggagtcaaccttcaacttgtccttcgtctccgtggtggcatgcagatcttcgtcaagactctcactgggcaaaacataa

SEQ ID NO: 34983 - DNA, 365 bp, Glycine max
gatcactctgctgcctcgctctgtttctgtctctgtgtttgcggctgaggattccgaacgagcgaccttcttcgtttctcgcaaagtttaagtcatcatgggtaaggaaaagactcacatcaacattgtcgtcattggacatgtcgactctgggaagtcaactaccactggtcatttgatctacaagcttggaggtattgacaagcgtgtgattgagaggttcgagaaggaggctgctgagatgaacaagaggtcattcaagtatgcctgagtgcttgacaagctcaaggctgagcgcgaaagaggaatttacattgatattgctttgtggaagttttgaacaacaagtactactgcacagtcat

SEQ ID NO: 34984 - DNA, 373 bp, Glycine max
aaggggaaggtgcaatagtttgttgtgagctataagctagtttaccgtgaggagaatatgaacttgctttgttttctttgttgctgcagtagttttggtagcatggccatgccatggcgcaggctaccaaaggttccgtctccgaatgagaactggctatggtaagcgttcttccgaggtaaaatgcgcaagttttatgcttgctgtggaagcacacaacatccgagcctttaacaccattcctgacgagtgcgttgagccaccacaggactacattaatggccaacaatttagatcagactctaaaacagttaatcaacatgctttcttttatgctagtgaacgcgaagtcgatcacaacgacatatttata

SEQ ID NO: 34985 - DNA, 220 bp, Glycine max
gggggggcacaagtgagtttgatgatcgagataactagtaacaatgtgatgaaaaggaatgtccgtggcttcatcgttgctacaattttggtagcatggcaatgccatgcataagatatgttccctcaccgaatgaacactggctatggtgcccagtatccaggtgtgaaatgcacatttttgacgcatgctgtttgagcacacaatatccttgggtttg

SEQ ID NO: 34986 - DNA, 371 bp, Glycine max
ggagtgagtaattagaaaggggtttccaagggttaccggaaggttgcattgcaataaaacccccccgaataagcccggcggacttttgtaggttttcctccgaaccaaaaatttcccttccggccgttaatccggccccgttgtggaaacgttttctcccttccgattaccattccatcatttccaagtctccttcgcctctcaactatccttccaagaaggagctctatctcgctctctcggatcgccctatcatcatcgatcagggtaaaaagagctttcaattggagaaaaagagtgggaagaagtgttacatgcttgctgctagagctctcagcattatttggggtgacactgagcaatactggaac

SEQ ID NO: 34987 - DNA, 383 bp, Glycine max
gactcaccacttcaaaacactcataacacaaagcacaaagcaaagctcatccttgagttaaaaaatggcagcagcttcttccatggcgcgctcaggcccatccttggctggcaaggccgggaagctgggcccatcagccccagaagtgggaagggtgagcatgaggaagaccgtcaccaagcaggtctcctcaggaagcccatggtacggcccagaccgagtcaagtacttgggcccattctctggcgagcccccgtcctacctaaccggtgagttcccacgcgactaccgctgggacactgctgggctttccgcagacgcaggaacctttcccaagaaacgtgaactcgaagtggatcactccaggtgggccatgctcggag

SEQ ID NO: 34988 - DNA, 384 bp, Glycine max
gggcacaagtgagtttgttgatcgagataactagaaacagtgtgatgaaaatgaaagtccttggtttcctcgttgccacaattttggtagcaagggaatgccatgcctacgaaaagttccctcccccaatgaacaccgggtaatgggcccgtaatccggaagttaaatgcccaagttgtgaggcttgccgtggaaacacaaaacaacctttgcttttagaacattcctgaagagtgcgttgaagcaacaaaggaatacatccatggcgaacaatatagatcagactccaaaacagttaaccaacaagcttacttttatgccagagacctcgaagtccatcccaaggacacatttgtgttcagtatagatggcaccgtactctct

SEQ ID NO: 34989 - DNA, 351 bp, Glycine max
ggtacacatgtgtgtgtggttatagagatctctagacagagtgtggtgaatgtgagtgtctgtgttctcctcggcgctacattttggggaacaggacagtgacatgcataagatatgttctctctccaagtgaacagtggatagggcgcgtatactcggggtgtgatatgcacattttaggcgtgtgctgtggacacacacaatatctgtggttttgacaatactcgagaagagtgtgttgacacaacaggagtatatatatatggagaactatatatatgacactccaacagagttacacaacactcatatttatatgacagagatctcgatctatatcacagagacata

SEQ ID NO: 34990 - DNA, 338 bp, Glycine max
gatgcacaagtttgttgacatagctagaagcaataatatgaaaatgaaagtgcttgttttgtttgttgctacacttttggcagcatatgaatgccatggctcatactaccacaagttccctctccgaatgataactgggtttggtaggcaatacaacactgaggtggcatgtgccagttggaggcttggcgtggcagcaaacaacgtagtcaaatggcaaactgttcctgcagcttgcggacagtacatagctgactacgtactacgagaccattatcaatcagattccagaacagttaaccaacaagcttatttctatgctaaatccctcaaactca

SEQ ID NO: 34991 - DNA, 212 bp, Glycine max
agagaggtttgcgacagtgaatgcctcactctgctgccgtccctaatctgaacgctcccgccatctgcgataggatttcatggctccaaagatcgacaatgatctcctaccctcatgtaatcctgacaagtctggtcgtgcgaatcagaacaagaagaagtggagcaagggtaagcaaaacgaaaaggtgaataacatactgctcctccatc

SEQ ID NO: 34992 - DNA, 312 bp, Glycine max
gcgtccacggctacgacaaaacgggaaaattcagctacgcattttccttgttgctgttctaaaacaatcatccacatattcaccgtcgccactataacagtagctccaatcaatcgtgctatgggttgagttgtaccagcacttaacaatgttcaggacacggtaaccacccctttgttcaataagcgtccgaatcagttctggatctgaagcccgctgccgccttagcgggacctgacacgcttcgtgaagtggccgattaacgtccaaatccaacgcatgaagcgcatcctcaatcaaaggctcaaggtc

SEQ ID NO: 34993 - DNA, 357 bp, Glycine max
ggtgaaggatcctcaaaaggcatatctgagaacaatcacacccaagttcgagacgcttattgacatttcagtgatagagatattgtcaaggcatgcttctgatgaggtctaccttggccaaagggataatccaaattggactacggattcaaaggcattggaagctttcacaaagtttggaaacacactggcagaaattgagggaaaaatcacacagaggaacaatgatccaagtctgaaaagccgacatgggccagttcagcttccatacacattgctccatcgttcaagtgaggaagggatgagtttcataggaattcccaacagtatctccatctaaaatgtgtgtgtggtttg

SEQ ID NO: 34994 - DNA, 310 bp, Glycine max
ggttgtgtgagtgacacaacacagggagtaccggcattacaaatgcagatcatcgagaaaactctgacacggaagactactatcttcgaagtcgagagcagggacactatcgagaatgtcaacggcaagattcaatacaatgaatgcaatcctccggatcagcagcgtttgaatttcaccagaaagcatcttgaccatagcaggaccctgatcgattacaacatccagaacgaatcaagccttcatctcgtcctcaagcatcgtggcagcatcaatgaaccttccctcatagctttggctcgcaaataca

SEQ ID NO: 34995 - DNA, 381 bp, Glycine max
gagacaacgtttgttcgattcttaacacaacttcagctactcactctcttcttccaggtccagccatgctcttcgctacagtcatgggcacagtcaagatcggaatcaacggatttggaacacttggccgtatggttgccaaagtcgctcttcatcgagacgatgtgtacctcgtttccgtgaatgatgctttcattaacaccgactatatgacatacatgtttcaatacgacatgtgttcacggacactggaagcatcacgatgtcaacgtttatgactagaagacccttctcttcagtgacaagccagtcactgattctggacacatgaaccttgatcagatcgcatgatggtcaaccagagctgatagcattgttgac

SEQ ID NO: 34996 - DNA, 303 bp, Glycine max
gaaggtgcacaagtttgttgtgagctatccactaatttatcgtgaggagaacatgaagttgtatgcattctttgttgctgcagcacatttggtagcatggccatgccatggcgcaagctaacacaggttccttctccgaatgaaaactggctatggtgatcgttcttcggaggtaaaatgcgcaagttttaggcatgctgtggcagcacacatcatccgagcctttaaaaccattcctgaagagtgcgttgaaccaagacatgactacattaatggcgaacaatttagatcagactccaaaac

SEQ ID NO: 34997 - DNA, 380 bp, Glycine max
ggcacacgtttgttgagatagctagaagcaataacatgaatatgaaagtgcttgttttgtttgttgctacagttttggtaacatatgaatgccatggctcagaccaccacaagttccctctccaaatgaaaactgggtttggtgggcaatacagcaattaagtcgcatgtgccagttggatgcttggcgtggaagcagcatcgtagtcacgtcgcaaactgttcctgcagcttgcggagagtacatagctgactacgttccaagagaccaattatacattagattccaaaacagtttaacaacatgcttacttcgatgccaaaaccctcaaactcaccaacaaagatgtctttgtcttggacgtttacgacactactctc

SEQ ID NO: 34998 - DNA, 379 bp, Glycine max
gagagagtgttggtacgaaaaatgtcgaagctgatcttcgtgttcctttcgcttattcctcgtctctgcacctccttctcccgagagagaccctcagatcgacgcgtcctcgttttgctcgatgacttcgcgatcaaatcctctcattctctcttcttcaactccctcaaatctcgcggcttcgatctccaattccacctcgcagacgacccccaaattgcgctccagagatacggccagtacctctacgacgccctaattctcctttccgccagcattgaacgtgagttttccacttctcacccccccattgatatgttttttctttttccttttttcctgaaaactatggagatcgtgatttgtgttaaattgtttc

SEQ ID NO: 34999 - DNA, 410 bp, Glycine max
agacgtcagtagagcagagaaagaggaaaccacgctattacacaatgaattaggtggtagagatagatgaacggagggtaaaaaatgtcaacgacgttcaatacgaccatgcaaaagatatggcacgtcagcgcctgtcacggtcgtaacaggaagcatcgcaagcatcccagtggtcagggtaaccccagtcgcatgcaccaccaccgcatcctcttcgacaactatcatcccagtttcttcggaaaggtgtgtaagcactacttccacatactccgcaacaacttctactgccccatcgtcaacattgataagctatggtccctcctaactcaagaagccaacgacaatgtcaccgacgacaatgcaccattactcgatgtcacccagttcggttactttaaagtttt

SEQ ID NO: 35000 - DNA, 323 bp, Glycine max
ggcatcaattcaggatatatcatcaattataagcatgggtttgtggaacacaacgaatgcagtgtcctgccgctttcacaagtggtggtgaggaccaaaagaatctggtcttccaaggtgatgccacgtcttcatccatgggcatagaactcacaaagttagacagtggaggaaaaccactgggtggcagtgtggggagagtgttatactcgtctccagtgcaactttggaaaagctctacagtggtcgcaagctttgaaaccgacttcatcttttccatcacaacagactctactactccaggtgatggccttgccttcttc

SEQ ID NO: 35001 - DNA, 383 bp, Glycine max
cggggcacaattgagtttgttgatcgagataactagatacagtgtgatgaaaatgaaggtccttgttttcttcgatgctacaagtttggtggcatggcaatgccatgcatacgatatgttccctctccgaatgaacactggctatggtgcccgtacaccggaggtgaaatgctcaaattggaggcttgctgtggaagcacacaacatctttggctttgagaccattcctgaagagtgcgttgaagcaacaaaggaatacatccatggcgaacactatagatcatactccagaacagttaaccaacaagcttacttttatgccagagacctcgaagtccatcgcaaggacacatttgtgttcagtagagatggtaacgtactct

SEQ ID NO: 35002 - DNA, 254 bp, Glycine max
gcacaagtttgttgagatagctagaagcaataagatgaaaatgaaagtgcttgttttgtttgttgctacagttttggtagcatatgaatgccatggctcagactaccagaagttccctctccaaatgaaaactgggtttggtgggcaatacaacaatgaagtggcatgtgccaatttgaaggtttgccttgaaacaaacaacgttatccagttgcaaactgttcctgcaacctgccgagaattcataactgacc

SEQ ID NO: 35003 - DNA, 387 bp, Glycine max
ggttctagtgtgtgattgtttgttgttgtaacgcgttcttcatccttcgtggttctgtgtttgtgtttggtttttctcgcacctgagaatgtcatgctgcggtgataattgtggttgctgaaactcctgcaagtgcggcaacagctgcggaggctgcaagatgtagccagacttgagctacagtgagtcaaacaccacccatacatggtcacgggagtggcacctgttaacgctcaatttgagggtgctgaaaagggtgtgctcgctgagaacgatggctgcaaatgtggacgaaactgctcctgcaaacgctgcacttgcaagtgaggtgttgggagaacaaacttcaagcatagataacccttaattacgaataatgataaacta

SEQ ID NO: 35004 - DNA, 331 bp, Glycine max
ggtctcgctctgcacaaagcctaacaccaaaaccagaagcgacatcgcaatcgcaatccagcgaatatgatagtcgtcactggagacgtgctcgcattgttgggagggaatccttcaccgtctgcagatgacatcaaacacatcctcggcgcaattggcgctgaagctgataatgagttgattgagttgctcatgactgaactcaagggaaaagacatcaggtgagctaattgctaatggaagtgcaaagatgtctgcagtgtctggtggcggtgcagcggttgccgttgctgctgcagtagctggaggtgcagctgcacctgctgccgaa

SEQ ID NO: 35005 - DNA, 304 bp, Glycine max
ggtgcacaagtgcatttgttgatcgacataactagaaacagtgtgatgaccatgaacgtccttgttttcttcgttgctacaattttggtagcatggcaatgccatgcctacgatatgttctctctccgaatgaacactggctatggtgcccgtactccggaggtgaaatgcgcaagttggaggcttgctgtggaagcacacaacatctttggctttgcgaccattcctgacgactgcgttaaagcagcatacgaatacatccatggcgaacaatatacatcagactccacaacagttaaccaac

SEQ ID NO: 35006 - DNA, 398 bp, Glycine max
gcgtcaagcggaagtaagatgacacaagacgacagaacggggtacacagttgaatttgttgatcgacataactagaatcagtgtgaagggcctttgtgtccttggtttcatcaattttaggggttgggaacatgcaaatgtcaaacatatgacatgttccctctccgatgtgagcactggctatggtagcccgtactccggaggtgaaatgcgcaagttggaggcttgctgtggaagcacacaagatctttgactttgcgaccattcctgacgtgtgcgttacagcagcatacgtatacatccatggcgaacaatatcgctcagactccataacagttaaccaacatgcttacgtttaagccagagacctcgaagtccatcacaatgacacatttgtg

SEQ ID NO: 35007 - DNA, 369 bp, Glycine max
gagattgatgagcgtcatgatgttggacagtgtgactagcaagcagagtcattggagacgtcgatgtcacagttgcgggggcatggaaaggacgggagtacaataagtgaacgttcaaaatgttcagtttcaagggtgtggataccgatgcacgtctggaaatgtccatcgatgaatgcttgaaaatcataagtgatcgctcacgtagagagtactacagaggactcagtagaaagcccataggcttgaatacaaggcttcgcatagcgataagagaagctccaccatgatgagaagccagaacctgtacgcacacatctccgcaacacgatcactgtgactgatatgagtggaatcaatattgcagtg

SEQ ID NO: 35008 - DNA, 366 bp, Glycine max
aacttcgaattcaaactcatactctggccgaagtttctggatgtttatattaccatatctgttgaataattaagatggcatgctgttgcttcatggacttgggatgcccaggatgaaacctgtgggatttgtaggatggcctttgatggatgttgtcctgactgcaaacttcctggagatgactgcccactgatttggggtgtatgcaatcacgcatttcatctgcactgtatcctgaaatgggtgaattctcagacatcacaagcgcattgccccatgtgccgtacggagtggcagtttaaaggatgagagctcaggttttcattttctttttcgagtgtgaccagagagcaatgtaaattggta

SEQ ID NO: 35009 - DNA, 352 bp, Glycine max
aggggcacaagtgaggttgttgatcgagataactagaaacagtgtgatgaagatgaaggtccttgatttcgtcgtagctacaattttgggagcatgggaatgccatgcgtaagagatgttccctcaccgaatgaacactggatatgggggccgtaattcggaggtgatatgcgcaacttgggggcttgctgtggaagcacaaacatctttggcattgggaacaatccctggaaaatgcgttggagcaacagacgaatacgtccatggcaaaaaatgtcaatgagaatcaagaacagttaaccaacaagcttacttttaggccagagacctcgaagtcaatcccaaggacaca

SEQ ID NO: 35010 - DNA, 319 bp, Glycine max
gggccaaaaaaccacaggaaggggggaacctttctcacagaacaatcaagaattagaagcttgactattgtcagcattcgccgaagatgagtaacatcggtagatgttacgatctagcggtcaccacattcgcacgagatggtcgcattttccagctcgagtatgccgctgcagctgtctctaccagcgggactgttagtgtgatcaagtgcaaacatagcgttgtgttaaccgttgacaagcttattccgatcgaaaatgatgctaccaggttccactagaacaagacactccgttcatcgacactctggcatggctg

SEQ ID NO: 35011 - DNA, 425 bp, Glycine max
  unsure (1)..(425): unsure at all n locations
ccacgcgtcaaacggatgcaagaagacaacaaaagggggccttggtgggtgcaccgataatggcgcaagccatgacatgcaatgatgtaacggtcaacatggcacagtgcctatcctacctgatgcacggaggaacaccttcaacactttgctgcagcggagtcaagaacattcttggctctgctgtcaccaccgttgacaaacaaactgtgtgcaactgtctcaaggcggatgctgctaagtacaacatcaatgaccagtatgctcaggcactccctggtttctgcaaggtcaatgtcacttacaagattagccgctccactaactgtgcaagcatcaggttctgaacaagccatggacagatctgctcatttctgcancgggatactgatgcagcagtgaagcacttactatcacgataagag

SEQ ID NO: 35012 - DNA, 297 bp, Glycine max
cggagtcggtgttcaagtacgacagacaccatcacacggctgtggcgaggttttccagcctctacttcagcaagcccaccggcgatctcaagagcgtcgtcaacgataccatccacgaccctgatcacggtgctcgtcgaatcatggtgggctacatcaacaacgtcggcatccgcaacgatgaggagctcgtcgtcgacgtcaatgtcgcctatattggctactacaggttcatccgcaaggccgacagcctcctgatcgataccgtcatgcactgcgcatccagcagcgacggta

SEQ ID NO: 35013 - DNA, 370 bp, Glycine max
gaaggtgcaagagtttgttgtgagctataagctagtttatcgtgaggagaatatgaggttgtttgttttctttgtctgctgcagtacttttggtaccatggtcatgccatggcgcatgctaccaaaggttccctctccgaatgaaaactggctatggtgagcgttcttcggaggtaaaatgcgcacgttttaggcttgctgtggaagcacagaacatccgagcctttaaaactattcctgaagagtgcgttgaacctaaaaaggactacatttatggcgaacagtttatatcagactctaaaatagttatccaacaagctttcttttatgctagtgaacgcgaaatctatcacatcgacatatttatatt

SEQ ID NO: 35014 - DNA, 361 bp, Glycine max
tgggaaggtgcaagagtttgttgtgagctagaagctagtttatcgtgatgagaacatcaagttgtttgttttcgttgttgctgcagtacttttggtagcatggtcatgccatggcgcaagctaccacaagttccctctccgaatgaaagctggctatggtgatcgttcgtctgatgtaaaatgcgcaagttttaggcttgctgtgaaaacacacaacatctgagcctttacaaccattcctgacgagtgcgttgaaccatcaaaagactacattaatggcgatcaatttagatcagactctaatacagttaaccaacaagcttacttttatgccactgaacgctaagtccatcacaacgac

SEQ ID NO: 35015 - DNA, 161 bp, Glycine max
ggggcacaatttagtttgttgatcaaaatacctataaacattgtcataaaaatgacggtccttgttttcttcgttgctacacttttgcaaccatgggaatgccatccgtacaaaacttaccccctccgaataacaactggttatggtgcccgtactccgga

SEQ ID NO: 35016 - DNA, 248 bp, Glycine max
ggaacaaatcactaagccctattattcttcctcaataatgtcaattacacttcacgtctctgcagcaactatgcctaaccctaaggtcgtctgggacatgaacatctgcgatcaatctgctggccgcatcatgatggagctctatgcccatgtcactcaccgcacagccgagaatttccgcgctctttgcaacggcgataacggcctatggcggagcgacaatccccaccaatacaatggctcctcct

SEQ ID NO: 35017 - DNA, 260 bp, Glycine max
ggcacaagtgaatttggtgatccataaaactagaaacaatgtgatgaaaattaaagtccttggtttcatcgttgcaacaattttgggagcatgggaatgccatgcgtacgaaatgttccctctcccaatgaacactggctatggtgcccgtaatccggaggtgaaatgcgcaaattggaagcttgctgtggaaacacacaacatctttgggtttgagaccattccccaaaagtgcgtttaagcaacacaggaatacatcc

SEQ ID NO: 35018 - DNA, 401 bp, Glycine max
ggcacaagtttgttgagatagctagaagcaatacgatgaaaatgaaagtgcttgttttgtttgttgctacagttttggtagcatatgaatgccatggctcagactaccataagttccctctccagatgaaaactgggtttggtgggcaatacagcaatgatgtggcatgtgccagttggaagcttggcgtggaagcaaacaacgtagtcaagtggcaaactgttcctgcagcttgcggatagtacatagctgactacgttctaggagaacaatatacattagattccataacaggttaaccaacaagcttatttctatgctaaatcactcatactcaccaacacagatgtctttgtcttggacgttgacgacactactctctctaatctccagtagtttgc

SEQ ID NO: 35019 - DNA, 289 bp, Glycine max
tcaatggggatgcgatatctctacatactggcgtccacgtccgtccttctaccaacatcactactctcatttctagctatatgctggtctatggggcgcactggctataattctcgtggcttcgcactagttcctccatactttatcctcacatcaatttacactgtttttgggtatgattccacatcttttgcttgtcttcttatgaggctatctgtgatgccggtccttcaaaatcaatctgattctactggatctcaaatcgtcaaaattacctccgagtttccta

SEQ ID NO: 35020 - DNA, 318 bp, Glycine max
gagatttacgtttataaggatgacatcaagcatcaaaacctcccgcaacagctatggctctcaccactgatctcagccgattcagtggtgccatgatttatccaagaatcggcatcagatttgttcgtagagatgctcatgtttacccgtatgcaaacccataatctaacacgtaattccacaagcacctgaagccttcactgctcacctgaactgccatctacactgcgctgtacaaaaaggacattgctcaagacactgttcagaagacgatacgtactaccaaaaatccttactctaagtctaatgctaggtcca

SEQ ID NO: 35021 - DNA, 392 bp, Glycine max
  unsure (1)..(392): unsure at all n locations
acccacgcgtccatgcgagangacaaaaaaagggggaacaatttggtggagaaacctaaaaccattaggatgaaattgaaattgctggttttgttggttgcaaaatttttggcaccatatgagggccatggcgcaaactaccaaaatttccccctcaaaatgaaaactgggtttggtgggcaaaaaagcattgaggtggcatttgccatttggaggcttggcttgaaatcaaacaccgtattcaattggaaaactgttcctgcaccttgcggcaattcaaaagctgactactttcaaggaaaccattataatttagattccaaaacatttaaccaacaggctaatttcaatgctaaatccctcaaattcaccagcaaagatttctttgtctt

SEQ ID NO: 35022 - DNA, 290 bp, Glycine max
ggcagttcaattccaatatattccattctctctgtgtatttccctaactctcccttcaagatgcagatcttcgtcaagaccctcatgggggaaggcatcatccttgaagtggatagctcttagatcatcgacaacctcaaggccaagatccaggacacggaatgaatccccccggatcagcaacgtctcacttcgccggaaagcacctttaggacgggcgttcgcttgctgactacaacattcaaaatgagagtgatcttcagctcgtcctccgtctccatggtagcatg

SEQ ID NO: 35023 - DNA, 383 bp, Glycine max
gaaggtgcacgatttttttgtaagctataagctattttatcgttaggagaatatgaagttgtttgttttctttgttgctgcagtaattttggtagcatggccatgccatggcgcatgctaccaaaggttccctctccgaatgaaaactggctatggttagcgttcttcggacgtaaaatgcgcaagttttaggcttgctgtggaagcacacaacatccgcgcctttaaaaccattcctgaagatgaacgcgaagtctatcacaactacatatttatattcggcatatataacaccgtactctctaatatctcatactatgataaacatggaatatggggtggaggaatttaatgaaaccttatatgatgaatgggttaacaag

SEQ ID NO: 35024 - DNA, 390 bp, Glycine max
  unsure (1)..(390): unsure at all n locations
ggttgtatgagcggttcaacaagaaaatccccccgggcaaaaaaaaagtttaattgaaaaaagaaaaaaaaaaaaaaaaagaaaacaaagaagaagaagaaatttgacggggtgtgtgatcgggtcctcaagtgaagatctgangctgttggtgtctcttttcttttctccgagttccaaagatgagcgcttctaagttcatcaagtgcgtcactgttggggatggtgctgtgggcaaaacctgcttgcttatttcctacaccagcaacactttccccaccgattatgttccgactgtcttttacaatttcagtgcaaatgtngttgtcaatgggagcattgtgaatctgggtttgtgggatactgctggacaagaagattacaacagat

SEQ ID NO: 35025 - DNA, 367 bp, Glycine max
gattgttggcttgtgcactgctcgtgcttctacggttatcacatctcctcttccatcttcatctcactcagtttccaagaatcataggctgaggggacagtcttagtcatccgtgagtgctgattacgagatggtcgttgagaaggcgatcaacaagctcacatgcttcatcactgtgaagagatccacacctttacagtcccgttcggcatggcactctgtaggatctgacgacgtgagatcgaagagctgtcgtcccttcgtgacacataaatcaccgctgcgaacgttctcacgggtcttacagcagtcttgacatcgctgtgaggcgtttggagccacttagagctgactttcccagtttgag

SEQ ID NO: 35026 - DNA, 362 bp, Glycine max
gcaaacttgagtttgttgatcgacataactataatcagtgtgatgaaaatgaaggtccatgttttcttcgttgctacacttttggtaccatggaattgccatgcgtacgatatgttccctctcctaatgaacactggctatggtgcccgtactccggatgtaaaatgcgcaagttgaatgcttgctgtggaagcacacaacatctttggctttgagatcattcctcaagagtgcgttgaatcagcaaatgaatgcatccatggcgaacattagagatcagactccaaatcagttaaacatcagacttacatttatgccagatacctcgatttccatcccaatgacacatttgtgttcagtat

SEQ ID NO: 35027 - DNA, 398 bp, Glycine max
ggcgttgaaatggcttaaacgctccctacccttccataattgttggtctctttcagtgcctcagtttggtgttttcaacaagttgattggatgggatttgctttgtcttttggttccttgcctgttttggtttcctcttatgactttgctaccccaaataaagaaattcaatggctggggtctgtcttcactggcatcatcttctgtgttgttggatatggcaaattgagtagtgcagagaaaattgaatggaataaccggggattctcaacatttcatgctctgtttgcatcatttacgtcattttacctcttggtgttatcagatattttcaacaaggattcacatgaagaacttgttattaatagatcatccactttctcaaattcggtactggg

SEQ ID NO: 35028 - DNA, 249 bp, Glycine max
tgggaagacgaaaacatgggattgttgatttcaaccatgtcatctacagtggtacatgtaatgtccctagtgttcgtccagtctccaaaatcttcattatggaactacttaccaatgaaatatcttacctctaccatttcattcagcttaatcatcttgatctcagtaagtgaaatgatcaactcgaaggcttgctgtgcaatcaaaccacatctttggcattgagaacattcctgaggagtgcgttca

SEQ ID NO: 35029 - DNA, 386 bp, Glycine max
gctgtctgcttcttcactttctctcgtttcaatcgaaaaaaaatcatgggcagaaaattcttcgtcggtggcaactggaaatgcaatgggaccactgaggaggtgaagaagattgttactactttaaatgaagctaaagtccctggagaagatgttgtagaagttgttgtgagccctccttttgtgttccttccttttgtaaaaagtttgctgcccccctgatttccatgtctcggcccaaaattgttgggttcgcaaaggtggtgcttatactggagaggttagtgctgaaatgcttgttaatttgggaattccttgggttattattggtcactctgaacggaggcagcttttgaatgaatcaaatgagtttgtgggagataaag

SEQ ID NO: 35030 - DNA, 348 bp, Glycine max
tggggtagttcacactgtgcagatagacatcacgctcaaaccatcgttcgcaacactgctggatggcgactcaatggtggcaacatcggtccaggaatagtcagtcagctttgcttcgtggatgattctcaagctttcatgtttgcaccactacccatgtccgaggtatttccacaatcggctgaaaccttcaaagctcacgtgaactgcactgtaggcacagcaacaaatacaggacattgctcaagaatctgtgaggaatatgacacgtgctagcaagatcccttactctaggtcgattgttggtgcaaccttgtgagtaatcagaagaagagagctgaggagcca

SEQ ID NO: 35031 - DNA, 389 bp, Glycine max
ggcacaagtttgttgagatagctagaagcaataagatgaaaatgaaagtgcttgttttgtttgttgctacagttttggtagcatatgaatgccatggctcagactaccagaagttccctctccaaatgaaaactgggtttggtgggcaatacagcaatgaagtggcatgtgccaattggaggcttggccttgaagcaaacaacgtattcaagtggcaaactgttcctgcaacttgccgagagtacatagctgactacgttctatgagaccaatatagatcaaattccaaaacagttaaccaacaagcttatttctatgctaaatccctcacactcaccaacaaagatgtctttgtcttggacgttgacgacactactctctctaatctc

SEQ ID NO: 35032 - DNA, 321 bp, Glycine max
ggcacaagtgagtttgttgatcgagattgctagatgcaatgtgatgaaaatgaatgtccttgttttctgcgttgctacacttttggtagcatggtaatgccatgcgtacgagatgtgccctctccgaatgaacactggctatggtgaccgtacaccggacgtgtaatgcgcaagttagatgcttgctgtggaagcatacagtatctttggctttgagaccagtcctgaagagtacgttgaagcagtacatgaatacatccatggcgaacaatatagatcagactcaaagatagttcaccaacaagcttacttttatgccat

SEQ ID NO: 35033 - DNA, 285 bp, Glycine max
  unsure (1)..(285): unsure at all n locations
ggtacacctgaatttgtttattgacaatactagaatcaatgttgagaaaaataagggcctttgtttcctccttgtggtacaattttggtaccagtgcaatgccatgcgtacgatatatgccctctccgaatgaacactggctatggtgcccgtactccggaggtgaaatgcgcaagttggangcttgctgtgaaagcacacaacatctttggctttgagaccattcctgaaaagtgcgttgaggcaggaatggaatacatccatggcgaacaatatagataagac

SEQ ID NO: 35034 - DNA, 393 bp, Glycine max
acacaaaatataagaatggcgtttacgctttatggtctaccaatgtcgacaaacactacccgtgccatgatctgtctccatgagaaagaggtggattttgaacttgttccagtcagtgtgttcgctgcagagcataagcagcctccttttctctccaagaatccctttggtttgattccagtactggaagatggtgatctcactctttttgagtccagagccattaccgcagatgtggctgaggaattcaaggaaacaggagccgatctgataaggcataaggacgcgaaagaagcagcactggtaaaggtgtggacagaggtacagtctcattactacgagccagcagtgtcacccattatctacgagtgcttcgggggcccctttccaagg

SEQ ID NO: 35035 - DNA, 386 bp, Glycine max
gagtcaaagatcgatttgatcatcaatcagtgctcctcaagcatggaagacgctgacgtcaatgatatcatcttcgctttgaataggctgtcaacgagagttccagcctcgaccatgttatgtcccacatcgaacaatccgatgagtgcacctgcgccgactattacttcgactcctactctcatttcggaattcacgaacagatgttgaaggatactgtgagatccaggacatatcataatgtcatttatcagatcaagtttttattcacgattaaagtaattctcgatgttggtgctgggactgggatattatcacgaatttgtgccaaagctcgggcaaaagacgtctatgcggttaattgctcccacatggctgacatggca

SEQ ID NO: 35036 - DNA, 321 bp, Glycine max
gagcatagatcgagacaacttcaatctctcgtatgcattacgatgttccattttccaattcataaccctaactccgttcgaagcaccagatcgtgatggcaccagaggcagataataagccagcatagaagaagcctgtggacgacaacaggtcgactgtgggagacaaagctccggcggcgaagaagccaaaggcctgaaataagcttccgattgatggaggcgccggcggagaaggtaagaagaataagacatccacgaagagcgtggagacatacaagatctacatcttcaatgatctgaatcaggttcaccctgaca

SEQ ID NO: 35037 - DNA, 370 bp, Glycine max
agggaacgttcaagagttagtcgtgagcaatcaggcagtgtatcgtgaggagaatatcaagttgttcgtacgcatcattcctcgcgtagttccaggtagcagagacgctcctatgaacagctgcaacagtgctccactgagtcagcaccagctacggtgagcgtgaagcagccgcatcgttagcatcctgcaagcgttacgcttcgtgagattaggccctaccatacaagtaccgaacttatgatccggaagctccccttccagacgctggttcctgatattactcaggatttcaagactgatctgcatttccagatccacaccgtgcttgcattgcacgaacctgctgacgcataacttgtttggctcc

SEQ ID NO: 35038 - DNA, 229 bp, Glycine max
ggaacaagtgagtttgttgattgatataccctcaattcgtgtgaataagctgagagtccttgatttcatcgttgctgggtcttgggtattatggcactgccatgcctgcgatgtgctctctctccgaatgaacactggttatggtgctcgttatccggaagttacattcgcaagttgggtggcttgctcgttgcagtatacagggtctttcgctttgatagcagtcctc

SEQ ID NO: 35039 - DNA, 355 bp, Glycine max
ccaggcgtcagtaaggatgcgaggggacaacacaagggggcacaagtgagtttgttgatccacacacccacacacagtgtgatcagcatgaaggtccttgttatcttcgttgctacaattctggtagcaaggcagtgccatgcgtacgatatgttccctctccgaatgaacactggctatggtgcacgtacgccggaggtgaaatgcgcaagttggacgcatgctgtggaagcacacatcatctttggcgttgagaccattcctgaagagtgcgttgaagcaacccacgaatacatccatggcgaacaatatagatcagactccacaacagttaacctacacgcttacttttatg

SEQ ID NO: 35040 - DNA, 293 bp, Glycine max
gggacaagtgagtttgttgatccagataactagaaacactgtgaggaaaaagaaagtccttggtttcctcggtgccagaattttggtagcaaggcaatgccatgcatacgacatgttcccactcggaatgaacactggcgatggtgcccgtacgccggaggtgaaatgcgcaagtttgaggcttgctgtggaatcacataacatcattggccatgagacccttcctgaagagtccgtttaagcaccttaggaaaacatccgaggcgaataatagcgatcagactccataacag

SEQ ID NO: 35041 - DNA, 379 bp, Glycine max
ttacaaattgttgacagtaaagataaacctgccatgggttttctttaccaagctatgtataaagccaaagaggagatgattaggaggtttcagaaaaataagaaggtagagccttacttgaatatcttggataggcattgggattctctttgtaaaagtatacatgctgctggttattggttaaatccagcttgtcatttcaatgaagaatttgctaagcataagtccacaacatctggccttttggatgtcattgaaaggtatgctcatggagatcctgatttgcaatttaatttggcaagtgaaatgagaatatttaaaaatgccgagttaaatttttggaaggctagttgctacacgtgaacggaatacggtgatg

SEQ ID NO: 35042 - DNA, 391 bp, Glycine max
agaaggggactcaccacttcaaaacactcataacacaaagcacaaagcaaagctcatccttgagttaaaaaatggcagcagcttcttccatggctctctcatccccatccttggctggcaaggccgtgaagctgggcccatcagccccagaagtgggaagggtgagcatgaggaagaccgtcaccaagcatgtctcctcaggaagcccatggtacggcccagaccgagtcaagtacttgggcccattctctggcgagcccccgtcctacctaaccggtgagttcccaggcgactaccgctgggacactgctgggctttccgcagacccagaaaccttcgccaagaaccgtgaactcgaagtgatccactccaggtgggccatgctcggagc

SEQ ID NO: 35043 - DNA, 377 bp, Glycine max
aggggataagtaagtattcatctcaatcctcaacctttccctcttctctctcaaccaataccctacctcccgaccctgttcccctctcgtatcggtcattgaaagaggaaagtctaagaccgaatctaagagagccgatcccaaacttgctgtgaataagaagggagccgccatcaaagctaggatacccgccggcaaggggaaggcagcgaaagaccctaacaagccaaagaggcctccaagtgctttcttcgttttcatggaggagttcaggaaggtattcatcaaagaacatcctgaaaacaatgcagtgtctgctgtgggcaaagctgctggagcaaaatggaagaccatgtctgatgctgaaaaagcacctt

SEQ ID NO: 35044 - DNA, 381 bp, Glycine max
ggcacaagtgagtttgttgatcgagataactagaaacagtgtgatgaaaatgaaggtccttgttttcttcgttgctacaattttggtagcatggcaatgccatgcgtacgatatgttccctctccgaatggaacactggcaatggtgcccttattccggaggtaaattccccaatttggaggcttgctgtgaaagcacacaccatctttggctttgaaacaatccttaaaaattcctttaaaccaccaatggatacattcaatgcgaacaatatatattaaactccaaaacactttaccaacaagcctacatttatgccagagacatccaaatctatctcacagagacatatgtgttcactatagatggcaccgtattctc

SEQ ID NO: 35045 - DNA, 385 bp, Glycine max
tttcatcttctgattctgattatttttttctttattttgttcagatggagaaggtgagaatggagattgatgaaaagaggaagaggcaagcgaggaggttcatcgaggctattgaagttggagtgatgaagaagctgaaggcgaaggaagaggaaatagagaaaatcggaaaactgaattgggcgttggaagagaaagtgaagcatctttgcatggagaatcaggtgtggcgcaacttagcggaagcgaacgaagccacggcaaatgctctacgctgcaatttggagcaagttttggcgcagtgtggcggaatcgcggcggaggaagaccgcggcggcgcaaccgtgtgcggcggcgcggagatggacgacgcggagtcctgctg

SEQ ID NO: 35046 - DNA, 176 bp, Glycine max
gaatttgggaattattgctcccatcactaatggattcattgtcacgtcatcacattagtatgggtggggcctatctctggacgggacggtcaccgctgcgacatttggaccggctgtcatgagatgcacctggacaaatcaatggatgtattgggtcagttcacccaacggttcat

SEQ ID NO: 35047 - DNA, 359 bp, Glycine max
agacacaaaacttgtgtgcctttctcccaagttaattgtgtggaggagttacaaatctttctaaaccacactgcaatacaccaaaacaatggcagataaagatgctttttgctacccttatcatgttcatgattgcacatcaccacaagagaatttgcccaataaagggccttttcattcagaaatgcttcccaaaaattctaggaaaggagctggttacacatcagagaagccacttgatgcaaagacactgagacgtttagctcaaaacagagaagctgcaaggaaaagccgtctcaggaaaaaggcttatgtgcagcaactagagtcaagtagattaaggctcacacaccttgaac

SEQ ID NO: 35048 - DNA, 322 bp, Glycine max
ggcacaagtgagtttgttgatcgaagtaactagaaacagtgtgatgaaaatgaaggtccttgaattcttcgttgctacaattttggtagcatggcaatgccatgcgtaccatatgttccctctcagaatgaacactggctatggtgcccgtactccggaggtgacatgcgcaagttgagggcttgctgtggaagcagacaacatctttggctttgagaccattcctgaagagtgcgttgatgcaacacatgaatagatccatggctaacaatatagataagggccacaacagttaaccaacaggcgtaggtttatgccagag

SEQ ID NO: 35049 - DNA, 310 bp, Glycine max
gacactaaacaagttaaaagaagagcatcactgaactaacaaagcaaccctatgtcgaaggtggtttgtgtcaccggagccagcggcgccatcggatcatgggtggtcctactcctcctccagcgtggttacaccgtccatgccaccgtccaagatatcaaggatgaaaatgagacaaaccatttggaggaaatggaaggaccaaggggccaccccaatttttttgaaatggttctccttgacaccaacccaatgccgctggcataaagggttgttcccgcgtaatccaccttgcatgtcctaacatcat

SEQ ID NO: 35050 - DNA, 362 bp, Glycine max
gaaggtgcaagagtttgttgtgagctataagctagtttatcgtgaggagaatatgaagttgtttgttttctttgttgctgcagtagttgtggtagcatggccatgccatggcgcatgctaccaaaggttccctctccgaatgaaaactggctatggtgagcgttcttcggaggtaaaatgcgcaagttttaggcttgctgtggaagcacacaacatccgagcctttaaaaccattcctgaagagtgcgttgaaccaacacaggactacattaatggcgaacaatttagatcagactctacaacagtttaccaacaacctttcttttatgccagtgaacgcgaagtcaatcacaacgacatat

SEQ ID NO: 35051 - DNA, 384 bp, Glycine max
gacacatttgtttgtatagatagatacaatcagatgaatatgaatgtgcttgctttgtttgttgctagagttttggtagcatagggatgccatggatcacacaaccaaacattccctctctatctgaatactgggtttggttggcaatacatcaatgaagtgggatgtatcagttagttgcttggcttgcgagcaaacaacgtactcaggtggcagactgttcctgcatcttgcttacagtacatagctaactacgttctatgaaaccaatatatatcaatctccatcccagttagtcaacaagcttatttctatccaaacatcctcactctcactaacaaacatatctctgtcttgcacgtagattacactactctctctaat

SEQ ID NO: 35052 - DNA, 402 bp, Glycine max
agacgacagaagggctcttggttggtgtattgaatgggtatggctgttgaaagcttttgcctttcttgtttgaatgattaaactagttctaatcgtttcagatgtttactgtgatggcattgggggggatcttatgattgtctgttgatgggttttgcagcttcaggcatattttcttgttcttgatgacattatggataactctcacacacgccgtggtcagccatgctggtttagagtgcccaaggtttgtagaaagaataacatgtgccattttgttatctttatgctactgttgcgataaagcaattatctccaatttaggtaagggtgtaggttggaatgatttcagccaatgatggagttctactaagaaaccatattccacgtttccttaaaaag

SEQ ID NO: 35053 - DNA, 384 bp, Glycine max
aggggcacaagtttgttgagatagctagaggcaataagatgaaaatgaaagtgcttgttttgtttgttgctacagttttggtagcatatggatgccatggctcagactaccagaagttccctctccaaatgaaaactgggtttggtgggcaatacagcaatgaagtggcatgtgccagttggacgcttggcgtggaagcaaacaacgtagtcaagtggcaaactgttcctgcagcttgcggagagtacatagctgactacgttctacgagaccaatatagatcagattccaaaacagttaaccaataagcttatttctatgctaaatccctcaaactcaccaacaaagatgtcattgtcatggacgttgacgacactactctct

SEQ ID NO: 35054 - DNA, 387 bp, Glycine max
ggaacacatgaggggattgatagacatgggtagtctgagcatagcagcgtcgaagcgttatgcgatcaccaagtgcatcatctcggtttcatcgcacgagttggtatcggattttggcgggagtcgtctcagtcgtgatcatcattgacgcagccatgccgcggtacgaccgtgacgactgcgagacgtagttgaaccaagaatctccagctgtgagaacacaccagaatgcaggttagaaacacaaggcgaatgtgacgacgtacaaccagcaatttgaggcacaacaaccataaagtttaattgataaatggatgacagaaaatcctgggtaaactgcagcgtttcatcagtgtggagtggcttaggcacatctaacggttcaaa

SEQ ID NO: 35055 - DNA, 381 bp, Glycine max
gggaggcataagtgagtttgctgatagagataactacagtgagtgtgatgaaaatgaccgtccttgctttcttcctagcaataagtttggaagcaagggacagccatgcgtaagatacgttccctcaccgaataaagactggcgagcgtgcacgtacgccggaagtgacatgcgcaagttggatgcttgctgtggaaacacaaaccatcgttggcatagaaatcattcctgatgagtgcgttcaaccaacgaatgcatacatcgatagcaatcaatatcaatcacactccaagttagttaaccaacatacttacatttaagccacatacatctacatccaacggacagacacatgtgtattcaatatagaaggcaacgtac

SEQ ID NO: 35056 - DNA, 233 bp, Glycine max
gggcatagcaaggtcatttctcgaatttaatcaacactgtgcacaccaagtcccttcggcgattacgaatcgcagagcattgggacggaccatgcaaagcgctcggaactccaccggacgaaaggctccgctgacgcaattggcattgaaagccgcgcggaagtcagctccggagaacggaggagtgaagaaaccccaccgcatcacgtcaggaatggtggctctgaaggaca

SEQ ID NO: 35057 - DNA, 369 bp, Glycine max
  unsure (1)..(369): unsure at all n locations
gtcgccaccagcacctctaaaaaccacgccaccaaatgcaccggctgcggcaactgcaccagccccgccgaaaacgggatcgagatcctctcccaaatccccagcccccgcctcgtcaacctcatcggcttcagcaccgacccaaacggcaacaaattactcgtcgtcgaatacatgcccaacggctcgctccacgatctgttacactccgttaaaaaaccgcccggttggaaccgtanggtccggttcgcgcttcaggtcgcaaaagcggttcgcgaactacactcttccaaccctcgcgttattcaccgtgacgttaagtcttccaatgttttaatcgatcaagaatggaacgccaagctcggtgac

SEQ ID NO: 35058 - DNA, 376 bp, Glycine max
gggtgtgggcatatatccaacataaaaggacaattttccgggaattggtaatgtttgacaaagaaaaccaccaatttcaaacacagagagaagggttttggaatggatggaatgactccgcgtcccctcctcatccccttcaattcaaccctcattcctaagcctccaatccaaccatctcagcctcacactcacatgtacacatatctgaacgcgtatcgtccctcctatggcttcaaagcgcatcctcaaggagctcaaagacttgcacaaagacccaccaacttcttgcagcgctggtccagtagctgaggacatgttccattggcaagcaacaataatgggtcctgctgatagtccttatgctggaggtgta

SEQ ID NO: 35059 - DNA, 320 bp, Glycine max
ggacaccaatagtgattgcactgcatgctcggtgttcacctgatcacatcatagtcgtcagcgtccagtgatgaagacggcgatgagggccatcgccgtcggacggcctgaaggagcgaatcaggtcgatacgcgaatggtagcagtggatgggtacagttcttcagaagcctcattgttcgccggctcaggctccggcatcgcctacaacaagctcaccgacaacggcgactccactccagccggcctcagctccgcagccatcgcgcatgcattcgccctcatcgtcgccgtctccgtcggcgcgaacatcgccggcg

SEQ ID NO: 35060 - DNA, 379 bp, Glycine max
ggcacaagtgagtttgttgatcgagataactagaaacagtgtgatgaaaatgaaggtccttgttttcttcgttgctacaattttggtagcatggcaatgccatgcgtacgatatgttccctctccgaatgaacactggctatggtgcccgtactccggaggtgaaatgcgcaatttggaggcttgctgtggaagcacacaacatctttggctttgaaacaattcctgaaaatgtgcgttgaaccaccaaaggaatacatcaatggcaaacaatatagttcagactccaaaacagttacccaacacgctaacttatatgccagagacctcgatctctatcccagggacacatgtgtgtacagtatatatggcactgtact

SEQ ID NO: 35061 - DNA, 385 bp, Glycine max
gacaagtttgttgagatagctagaagcaataagatgaaaatgaaagtgcttgttttgtttgttgccacagttttgggaccaaaagaatggcaatggcccaaacaacaaaagtttcctccccaaattaaaaccgggttttggtgggcattacaccattaaggtgcaatttgcaatttgaaggcttgccttgaaaccaaccaccttatccaattgcaaaatggtcccggcaccttgcggaaattacataccagactattttctaggacaccaatatatatcagatcccaacacatttacccaacacccatatctctacgcaaaatctctcactctcaccaacagagatctctttgtcgtggacgttgacgacactactctctctaat

SEQ ID NO: 35062 - DNA, 344 bp, Glycine max
ggaggaacagtttgtggaatctactgagagagagcagaggaaaacgggaagaaaaatgttgagtgcgacggcgatcggcgcgttattgggtttgggaacccagatgtactccaatgctctccgcaaactcccctacatgcaccatccgtgggagcacatttccgtactcctgttgggccctacgtaagttttcaagcgtcaaaaacctgaagatcaccacgagtttgaccactaccatatgcactgcgcgggtttagctgtcatcaataaatcttatattaatgcagaatacctggaatacagatcttcccaacacgttgtaattgctgaatcacatcaccaaa

SEQ ID NO: 35063 - DNA, 378 bp, Glycine max
ggcgtcgctccgcaccagtttcaccgcacgaatatcttgttgtttggagcgatccgagaaaaactctgtaaacatgttggtttaccaggacctccttacaggtgatgagcttctctctgactccttccgttacaaggaaattgagaatggaatgctgtgggaagttgaggggaagtgggttgttaaaggagcagttgatgtagacattggtgcaaacccttctgctgagggtggaggagaagatgagggagttgatgatgcagctgttaaggttgttgacattgttgacacattcagacttcaggagcaacccgcattcgataagaagcagtttgttaccttcatgaagaggtttatcaagaatttgactcccaagct

SEQ ID NO: 35064 - DNA, 380 bp, Glycine max
gacaacactcagagtagagtaaccaaaaggagagtgcaataactcgttgtacattcctagtgtgtgggagagacatggctaagatgtgtgttttggtgttggttcttgctctggctgtggccacaagtgccagaaacgttcccaaccccaaggatgctggtcttaaggaccagaagaacttcatcagctatggtggagttggtggttattccgggattgggaacaatggactgccttttggaggagctggtgcctgaataggtagtggttttggtagaagtgatggacttggtggtggactctgacgtccaagcgatagaatccgaagtttagcgcgagacacatttgggttcagtagagatagcaccgtactctctaat

SEQ ID NO: 35065 - DNA, 302 bp, Glycine max
aaaggtcaacaatttggtgttaactaaaagccaatttaaccttaagaagatatgaaattgtttggtttccttggtgctgcaatatttttggtaacatggccatgccatggcgcacgcgaccaaaagttccctctccgaatgaaaactggctatagtgagcgttcttcggaggtgaaatgcgcaagttttacgcgtgctgtggaagcacacaacatccgagcctttaaaaccattcctgaagagtgcgttgaaccaacaaaagactacattaatggcgaacaatttagattatactccaaaac

SEQ ID NO: 35066 - DNA, 349 bp, Glycine max
aggggtgattggtcacgcggacccttacgacggaattaccattatggagctgataagtcctgttgtgtcgaaattagctccaaagcatgccataggaagggatgcacttaccgactcggaggggaagcatatgattacgttaagaagcataatctgataccctaatgtatcaatgtcatcatcaatatgtaatttacagcgaactttgctatgggtacgttctttgagatcacagtcgtgatgaacagtatcattctgatgtaatgctttccttgacaattattgcattcttcttatccttctgttaattaagctagctttgctatggttacattccttgcgatctaaa

SEQ ID NO: 35067 - DNA, 394 bp, Glycine max
gcaagtgcaagagtttgttgtgagctataagctagtttatcgtgaggagaatatgaagttgtttgttttctttgttgctgcagtagttttggtagcatggccatgccatggcgcatgctaccaaaggttccctctccgaatgaaaactggctatggtgagcgttcttcggaggtaaaatgcgcaagttttaggcttgctgtggaagcacacaacatccgagcctttataaccattcttgaagagtgcgttgaaccaacacaggactacattaatggcgaacaatttagatctgactctaaaacaatttatccacacgctttcctttatgctagtgaaacctgaatctatcacaccgacatatttatatttggcatagataacaccgtattctct

SEQ ID NO: 35068 - DNA, 322 bp, Glycine max
ggttcaattgtgtgattgtttgttgttgtaacccgtccttctcctttggtggtccggtgtcggcgttggtttttcccctcaccggaaaatgtcttgctgcggtggtaacggtggttgcggaacctcctgcaattgcggaaacggttgcggaggctgcaaaatttacccaaacttgacctacactgattcaaccacaaccgaaatcttggccatggaattggaaccggttaaggctcaatttgagggtgctgaaatgggtgtgcccgctgaaaacgatggctgcaaatgtggaccaaactgttcctgcaacccctgcacttgc

SEQ ID NO: 35069 - DNA, 323 bp, Glycine max
tggggagtttggttatcgagatgagtagaaacagtgtgacgataatgaacgtccttgttttcttcgctgccaaaattttggaagcatggcaatgccatgcttaccatatgttcccactccgaatgaacactggctatggtgcccgtactccggtggtgaaatgcgcaagttggatgcttgctgtggtagcacacaacatcgttggctttgggaccattcctgaaaagtgcgttgaatcaacagatgcatacatccatggcgaagactatcgatcagactccaaaccagttaagcaacatacttacttttatgccagagacctc

SEQ ID NO: 35070 - DNA, 286 bp, Glycine max
gaacaccgatacagagagtgatttcagtgagtgatcggtgatgacatgatcccatcacaagcatcagcgtcaactgaggcacacgcggatcagacacacccccgtccgcacgcctgaagaggcgacgcaacccgatacgtagaatgcggcattcgccgagttcatctcaacgttcatcttactcttcgcaggcgcaggctcccgcaacgccgatcacgagctcaccgatgtgcgcgctgccagtcatgccggcctgacctcatcctccaacgcccatgcactcggg

SEQ ID NO: 35071 - DNA, 412 bp, Glycine max
  unsure (1)..(412): unsure at all n locations
agaagacgacagaagggggagtgcatccaacacgttgcaaggaatttgaggagagtggagatccagaaaagcatttccaggctcttttgtctttagctaaagagggaattcagaaaggaaaggtggttgcaattggagaatgtggattggactatgacaggcttcatttttgcccagcagagattcaaaagaagtatttcgagaagcaatttgaattagcatatatcacaaaactgcctatgtttttgcacatgcgagcagctgctgcagatttctgtgaaatagtggagaaaaataaggacaggttcactgctggagtcacccattcatttactggtantatggatgaaatgcattaangcttcccccatttgataaaatgtacataggcataaatgggtgctctctgaaa

SEQ ID NO: 35072 - DNA, 446 bp, Glycine max
  unsure (1)..(446): unsure at all n locations
attcncgggcagacccacgcgtcagtggcaattggaacacttgcattatgccacaataacattgagggcctcaaaagggtagttaaaatgaagggaagtttaactgccaaagtgattgaccgaactaacaacaaggctgatgtctaaggtgctttccttgattttgcttccatgttggagtccaaggttgacaaaaatgattccaatgcaactaaagcattgagcaagctggaagctatacagaaaacttgcagagaatctggtctcttgagtaaaaggaaatcttacattgtgaaggatgaaagtggatatggctcaaccatgattaacgtactggtcatcatggtttccatcattttttcttatctgtctgctagccaccaaaataactaatcaacaagcaatgccttcttgcctttccgaacattgatatcatgcctcgttca

SEQ ID NO: 35073 - DNA, 379 bp, Glycine max
ggcacaagtgaatttgttgatcgagataactagaaacaatgtgatgaaaatgaaaggccctggtttcctccgtgccaaaaatttggtaacactggaatgccaagcgtacgaaaagttccctctccgaatgaacaactggcaaggtgcccctaacccggaaggtaaaatcccaagttggaagcttgctgtggaagcacacaacatctttggccttgagaccattcctgaagagtgcgttgaagcaacaaaggaatacatccatggcgaacaatatagatcagactccaaaacagttaaccaacaagcttacttttatgccagagacctcgaagtccatcccaaggacacatttgtgttcagtatagatggcaccgtactc

SEQ ID NO: 35074 - DNA, 156 bp, Glycine max
gggacaagtgagtttggtgatcgacataactagaaacagtgtgatcaaaatgaaagtccttggtttcctcgatgctacaattttggtaacatggccatgccaggcgtacgatatgttccctcgccgaatgaacagtggccatggtgcccgtacacc

SEQ ID NO: 35075 - DNA, 296 bp, Glycine max
taaaggggcataagttactctgttgatcgagattacaaacaaagtgttatcaacattaaggtccttgtcttcttcgttgctacaattttggtagcatggctatgccatacgtacgatatgtaccctcgccgaatgaacactggccatagtgcctctactcctgaggtaaaattcccaagttgtacgcttgctctagaagcacacaacatctttggctttgagaccaatcctaacgagtgcgttgaagcaacaaacgaatatatccatggcgaaccatatagatcatactccagaac

SEQ ID NO: 35076 - DNA, 305 bp, Glycine max
agggtggcaaaaaaccaacaaaggggggcacaagtgagtatgatcatcgataacaactatgcacagtgtaactaaaactgagtgaccgtattgtccacgttgctacgtttttgatccaatcgcattgacatgcctaaaattagtccgctctcctaaagaacaacgtctatggtgccaatactcccgatgtgaactgcacaatttagaagcttgctgtcaacgtacacaacatctttggcattgagaccattcctcaaaaatgcgtgcacaaaccaactgaatatatccatgcgtaacaatatata

SEQ ID NO: 35077 - DNA, 355 bp, Glycine max
gggagaagaatttgcatagagcaagcaaagcgggggagaatgagaggcagcatacacgaacaatggctacgtctctctctgtttcgccatctctctctctctcaagactctcttcatcgccaaagcgcttccactatctcgcccctcctttctctctctccctctcaccaactccctactctctctctccacgcgccgccgcaccttcatcgtccgcgccaaatctcatcacggctccgagcccgttcccgcccactacgacttcgatctcttcaccatctgcgcaggcagcggcggtgtccgatccgctcacttcgacgctaactacggcacttctgtcgccatctgcgatctt

SEQ ID NO: 35078 - DNA, 354 bp, Glycine max
ggcacaagtgagtttgttgatcgagataactagatgcagtgtgatgaatatgaaggtccctgttttcttcgttgctacaattttggtagcatggcaatgccatacgtacgatatgttccctctccgactgaatactggctatggtgcccgtactccggaggtgaaatgcgcaagttggacgcttgctgtggaagcacacaacatctttggctttgagaccattcctgaagagtgcgttgaatcaacaatggaatagatccatggcgaacaatatagatcagactccacagcagttagacaacaagcttacatttatgccagagacctcgaagtcatcccaaggacacatttgtg

SEQ ID NO: 35079 - DNA, 370 bp, Glycine max
ggcacacgtttgttgagatagctagaagcactatcatgaaaatgaaagtgcttgttttgtttgttgccacagttttggtaacatatgaatgccatggctcagactaccagaagttccctctccaaatgaaaactgggtttggtgggcactacaccaatgacgtggcatgtgacagttggaggcttgacgtggaagcacatcacgtactcaactgtcacactgttccagctgcttgcgtacagtacaaaactgactactttctacgagaccactctatactaaagtccatcacagttaatcactcaagcttacttctaagctaaatccctcaaactcaccaacagtatatgtccttgacgtggacgttgac

SEQ ID NO: 35080 - DNA, 319 bp, Glycine max
  unsure (1)..(319): unsure at all n locations
ggaagcttganactttcatttcccacacattcccgagcgagagatagagattttcgctctcgacataacatacacacgtctagatggctcgtacaaagcaaatcgcgcgtacgtctaccggtggaatcgcgccacgtaagcagatcgccaccaacgcagcgatgaagtcagcgccagagaccgtgagaatgaacacgcctcaacggttcaggacggaacgggtgccgctgacggataatctcgaggaccacaagttcatcgagcttgacatcaggactcatctatttcagaagcacgttagagacatcacgcaggattt

SEQ ID NO: 35081 - DNA, 299 bp, Glycine max
ggcacaagtttgttgagatatcgagaagcaataagatggtgtggaaagtgcatgggccgttggttcctacattcttggaattatggaacagtgacagtgcaaaccatcaaaaatttcccctcccaaataaaactgggttaggggggccgtacaccagtaatgtaacatgtaacatttgggggttccgtgtgaacgcaaaaaatgtattgaattggcacaatgcccctacaatttgctgaaactacatagggaattatctactgcgaaaccaatatatttcagacccaaacacatttacc

SEQ ID NO: 35082 - DNA, 348 bp, Glycine max
ggaacatcaagggcaacaaatgttgtgctgtgccgccacttccgtaagcagtatcaatggcctcaacgcccatgactttgacctttgaagacgtagctaagcacagcaacaaaaaggattgcaggattattatcaatggaaaggtgtctgataacacaccatttttggatgaacatccatgaggtgatgaaattttgctgacgtcaacagggaaggatgccagcattgattttgaacatgtgggctacattgattctgctatagaaatcatggaaagatacttcattgggaaagttgacacttcaactcttccacacacatttatccataatctgcaacaccctatac

SEQ ID NO: 35083 - DNA, 278 bp, Glycine max
ggcagaggaagggttagaaatatagaaagatgaagatactacagcgtcgcatatttcctcttctctgcttcggaagaatgacacatgaaacacgtcactggcgttcgcatcattcctgggtagagtcgtcttcgcttctgtcatcatactcgcagcctaccagttatttaatgaatttggaattgatgtgggacctgctacaagggcactcagatcgaaatttgatgccattacacatctggtgcattctctgatgggctttcagattccatagatta

SEQ ID NO: 35084 - DNA, 358 bp, Glycine max
gatagcagtatctttgctcatctatattcaccaatgtacactgcatttcacttcggcgtttgcgatcatcagagcaatggcacgtgtcaccatgacgctcacacgtctaacagatgaaatgctccgaagaagcaattggcatccaaagcctctcccaaatgagccccggcgaccttcggagtgtacaatcgacacagcttcaggccattaacggtggcactaacggagattctacagtagcagcatagcacgaatcctctgatgacgaaactcccatatcagacgctcgtcaaataaatcgctcaggatatcaaaacgcatcacagctttcagtccaacgccatgtcggatcttcatg

SEQ ID NO: 35085 - DNA, 310 bp, Glycine max
ggaaaagtttgttttgttaaccaaaataactaaaaccattgtgataaaaattaaggtccttgtttccaccgttgcggcaattttggaacaagggcaatcccatgattacaaaatgtccctcccccaaataactatgggcaatggtgcccgtaatcccgaggtgaaatgtgcaaattggaggcttgccgtgaaagcaaacaacatctttggctttaaaaccattcctgaaaattgcgttaaggcaacaaaggaatacatccaaggagaccattatcgatcagattccaaaacatttaaccaacaagcttac

SEQ ID NO: 35086 - DNA, 321 bp, Glycine max
ggcacaagtttgttgagatagctagaagcaataacatgaatatgaaagtgcttgttttgtttgttgctacagttttggaaacatatgaatgccatggctcaaactaccacaagtcccctctccaaatgaaaactgcgtttggtgggcaatacagcaatgaggtggcatgtgccagttggaggcttggcgtggaagcaaacaacgtagtcaagtcgcaaactgttcctgcagcttgcggagagtacatagctgactacgttctaggagaccaatatagatcacattccaaaacagttaatcaacatgcttatttctatgcca

SEQ ID NO: 35087 - DNA, 378 bp, Glycine max
agggtgtcaaccatgaaaacttcttcaatgagtgtaagaaacctgcttggtattttgtggcaaaggattatggccactctgacatgctagatgatgacaccaagggaattagggggaaagctaccaactgtctatgcaaaaatggagagtcaaggaaacctatgagaaggtttgttggaggagtcattgttgcattcttgaaagcttacttgcatgatgataatgaggacttgttgaccataagagacaggcatgtgagtctaccagtggagatcaaatttgattcttttctgtgaaaatcagagaagatggtggggagcatatatttctgttattatcatgacacatatgactgaacttttcagttacacatacaca

SEQ ID NO: 35088 - DNA, 329 bp, Glycine max
ggaatgtgtgagataggagttcctgatctttcgcgaaagtgtgactaacatgagggtccgtgattccaacagtgaacgcacttctcagtcaccgcgatcgtccacatcgtgtcaggagtactttctgcaaagaaaactggtgatgtgacggatctgcaaagtggtgtgaggcatagaccagtcgcatgctgagttcaggcatacaagggtgacatattcaatcaatactgcagggtaaatttcagtgacagaacagtgatcgattctagctttgatagaatcaatccaattgaagttgagcttggaactgagttagtgatcacaggttg

SEQ ID NO: 35089 - DNA, 290 bp, Glycine max
ggcgaagggttttatactttagtcgttctgcggttaaatacaaatagagagagagagtgagatatgacggtcctatggatggacgagtctcctagtcgcgcatgcctcgtgtcaaaatccgcgagctgagtgactactacgccagtttcgagctcagcgacaccgtcgccagtatgtccaatgcgctgctgcgcgtgatgatctcggaggtgccgacagtcgccatctacctagtagacatcgaggtctactcgtcggtgctcaacgacgagttcatcgcgcacaggctc

SEQ ID NO: 35090 - DNA, 388 bp, Glycine max
ggcacaagtttgttgagatatctagaagcaataagatgataatgaaagtgcttgtgttgtttgttgctacagttttggtagcatatgaatgccatggctcagactaccagaagttccctctccaaatgaaaactgggtttggtgggcaatacagcaatgaggtggcatgtgccagttggaggcttggcgtggaagcaaacaacgtagtcaagtggcaaactgttcctgcagcttgctgagagtacatagctgactacgttctaggagaccaatatagatcagattccaaaacagttaaccaacaagcttatttctatgctaaatccctcaaactcatcaacaaagatgtctttgtcttggacgttgacgacactactctctctaatct

SEQ ID NO: 35091 - DNA, 332 bp, Glycine max
cgtcagagacgacagaagggggagggaggggagaagagacagagggacggagacatttatgggaagctcattcccatcccctaaatcccgcacactcattccatgttttacctttcgctcgtcgctcgcaaacgtcaacttcttaagaacaaggttttagccatggcatcgacgcggatcttgaaggaactcaaggatgtccagaaggatgctcttaattcatgcagtgctggtcctgttgctgaagacatgtttcactggctagcaatagttgtgggtcttccatagattccttatgctggaggtgtgttcttagtaactatgcatttgtg

SEQ ID NO: 35092 - DNA, 177 bp, Glycine max
ccttatgcttctgatgggctagagatatgggatgccatcaagtcctgggtgcatgaatatgtctcattctactataactcggatgcggcaattcaacaagatctcgagcgggtccttggtggacagcacttgtcgacgtgggtcgtggtgatttcgttcatctgtcatggtggcatg

SEQ ID NO: 35093 - DNA, 346 bp, Glycine max
gaaggggacttcaactcccacacattccaatctctctctgcattgcgctaactctcccttcgacatgcagatcctcctcaataccgtcaccggcacgatgatcagccttgcagtggagagctctgacacgatcgacaacttcatggctaagatccacaacagtgcaagaatccccccggaccagcaccgtctcattttcgccgcaacacaacttgaggacggccgtgcccttgctgactacagcattcacaacgacagtattcttcaactcgtcctccgtctccctgctggcatgcagctcttccttaagatactcaccggcaagaccatgtccctagatgttcca

SEQ ID NO: 35094 - DNA, 389 bp, Glycine max
ggtgcacaagtgagtttgttgatcgagataactagagacagtgtgatgaaaatgaatgtccgtgatttcttcgttgctacaattttggtagcatggcaatgacatgcgtacgatatgttccctctccgaatgagcactggctatggtgctcgtactccggatgtgaaatgcgcactttgggggcatgctgtggaagcacacaacatctttggctttgagaccattcctgaagagtggcttgaagcaacagaggaatatatcaatggccaacaatagatattatactccaacacagttaaccaacacgcttacttttatgccatagacctcgaagtccatcccaaggacacatttgtgtgcagtagacatggcaccgtactctctaataa

SEQ ID NO: 35095 - DNA, 355 bp, Glycine max
ggcagaggaagggttggaaatatataactatgacgatactacagcgtcgtacatttcctcttctctgcttcggaggattgagattgaaacacgtcactggcgttcgcttcgttcctcggtagagtcgtcttcgcttctgtcatcagactcgttgcttaccagttatttaatgactttggacttgatgtgggacctgctagaagtgcactcgaaacgaagtttgatgcctttacacatctggtgcattctctgatcggctttcacattccatagattaatctgaagtttttaagtgctggggctattgctctgaaaggtcttggacgggttccttacacaccaggcggctcttttg

SEQ ID NO: 35096 - DNA, 202 bp, Glycine max
gaaggtgcaagagtttgttgtgagctatatgctagtttatcgtgaggagaatatgatgttgtttgttttctttgttgctgcagtagttttggtagcatggccatgccatggcgcaggctaccagaggttccctctccgggtgagagctggctatggtgagcgttcttcggacgtaaaatgctcaggttttaggcttgctgtg

SEQ ID NO: 35097 - DNA, 247 bp, Glycine max
ggcacaagtgagtttgttgatcgagatacctagagacagtgtgatgaatctgaatgtccttgttttcttcgttgctagaattttggtagcatcagactgacatatgtttcacgcgttgaatctacgaatgaaaactgtgctattgtgcccgtagtcaggaggtgaagttcgcaagttggaggcttgctatagaatatcattggatttttgaccattacagaatacttcattaatgcattgaaggaat

SEQ ID NO: 35098 - DNA, 354 bp, Glycine max
ggcacaagtgagtttgttgatctagataactagatacagtgtgatgaaaatgatggtccttgttttcttcgttgcgacaactttggtaccatggcaatgccatgcgtacgatatgttccctctccgaatgaacactggctatggtgcccgtactccggaggtgatatgcgcaagttggaggcttgctgtggaagcacacaacatctttggctttgagaccattcctgaagagtgcgttgagacaactgcggaatacctccatggggaacaatctagatcagactccataactgttaacccacaagcttacttttatgccagagacctcgaggtacatcccacggacacatttgt

SEQ ID NO: 35099 - DNA, 206 bp, Glycine max
gactacgacggtcggggaaggtgcatgagtttgttccgacctttaagcttgtttatcgtgaggagaatatcaggttgtttgtcttctttgctgctgcactagatttggtagcatggccatgccatggcgcaggctaccaaaggttccctctccgaatgaacactggctattggtgagcgttcttcccacgtagaatgcccacgttt

SEQ ID NO: 35100 - DNA, 271 bp, Glycine max
cgtcagacgggtacgagaaacgacacaagggggcacaagtgagtttgttgatcgagataactagaaacagtgtgatgaaaatgcaggtccttgttttcgtcggtgctacagttttgggggcatggcaatgccatgcctacgatatgttccctctccaaatgaacactggctatggtgcccgtactccggaggtgacatgcgcaagttggaggcttgctgtggtagcagacgacagcgttggctttgacgaccattcctgaaggagtgcctt

SEQ ID NO: 35101 - DNA, 357 bp, Glycine max
  unsure (1)..(357): unsure at all n locations
agnctgtacagacgactacaaaaaggggcacaagtgtgattacgaaacttaaatcaatgatatgaaaaataaagtgcatggtttgtatgatgctagacttttggtaccacatgactgccattgtgcaaactagcaaaagttacgtctccaaaagataactgcgtttggtgggcactagagcaatgacgtgtgatgtgccagttagatgcttagcttggaagcatacaatgtaatcaaatggcatactgtgcctgtagattactgataatacatacctgacaacgttctaggagaccaatctagatcagattccaaaatagttaaccaacaaacttaattctatgccaaatctctaaa

SEQ ID NO: 35102 - DNA, 433 bp, Glycine max
agtccaggcgtcagacggctacgaaaaggggacagaaggggaattcacaactgagtttggtgatttaaatgactagaaacaatgtgattaaaatgaacggccttggtatcctcggtgctacgaatttgggaacattgcaattgcatgcgtacgatatgttccctctccaaaatgacactagctaaggagcccgtactccgaatgtgaaatgcgcaagttggacgcatgctgtgtaagcacataatatcattggctttgagaccattcctgaagagtgcgtagacgcatcagaggaatacatccattgtgaacactagatatcagactccaaaacagttatccaacacgcttacctttatgtcagagacctcgatctccatctcaaagatacatttgtgttcactatagatggcagcgtactctctaatattcc

SEQ ID NO: 35103 - DNA, 379 bp, Glycine max
gattgttggcttttgcgccgcccgtggctccagggttaacagaactcgatgtccaattgcgctctctcagtttcgaagaatcgtatgccatgggaaagtcggacccaaccgttcgcgctgatcaacatactgacgtagagaaagctaatacgatgctcagaggactcatcactgagaagagattcactcctctaacgctccgtttggtatgacactctgctcgaacatagtgacgtgagctcgaagacctgtagtaccttcggaaccatataccagccctcagacctcgactacggtactaactacggtcataacatcgctgcaaggccactagagccactcgaagcggacttgactatcttgagctactccgatttca

SEQ ID NO: 35104 - DNA, 402 bp, Glycine max
agggggacaagtttgttgagaaaaccagaagcaataagatgaaaatgaaagtgcctggtttggttggtgccacaattttgggaacaaaagaatggcaagggtcaaactaacagaagtttcctctccaaatgaaaactgggtttggtgggcaatacagcaatgaggtggcatgtgccagttggaggcttggcgtggaagcaaacaacgtagtcaagtggcaaactgttcctgcagcttgcggagagtacatagctgactacgttctaggagaccaatatagatcagattccaaaacagttaaccaacaagcttatttctatgctaaatccctcaaactcaccaacaaagatgtctttgtcttggacgttgacgacactactctctctaatctccagtattttg

SEQ ID NO: 35105 - DNA, 224 bp, Glycine max
gggacaagtgagtttgttgatcgagataactagaaacagtgtgatgaaaatgaaaggccctggtttcctcggtgccacaaatttgggaacacgggaatgccatgcgtacgaaaagttccctctccgaatgaacactggctaaggtgcccgtactccggaagtgaaatgcgcaagtttgaagcttgctgtggaaacacacaacaaccttggctttgagaacaatc

SEQ ID NO: 35106 - DNA, 367 bp, Glycine max
ggcacaagtgagtttgttgatcgagataactagatacagtgtgatgaaaatgaaggtccttgttttcttcgttgctataattttggtagcatggcaatgccatccgtacgatatgtcccctctccgaatgaacactggctatattgcccgtactccggaggtgaaatgcgcacgttggaggcttgctgttgaagcacacaacatctttggctttgagagcattcctgaatcagtgcgttgaagcaacacacgaataaatccatggcgaacaatatagatgagactccagatcagtgaatcaacaaccttacatatatgccagagacctcgaactccaactcacggacacatttgtgttcagtataga

SEQ ID NO: 35107 - DNA, 312 bp, Glycine max
acgcgagacgacaacacaacggggagagaaacagagaaattgataatacaggagtgttatcggcgaacgatgcattcggcaatcctgagttcgccgtagaacggacctacgcgaacgtgtccagagcactacagacggtaactgggaagatcgtggcgctgaagatgactcttctccacgatgactaacaacgtgtctctcacaccacgcaccgtgaggtttccattctgcgactgcgctctcgcaatacccatgtccttacgttaatcgatgtcacagaatgtcacgacgatgaacggaatacagtactct

SEQ ID NO: 35108 - DNA, 403 bp, Glycine max
aagggaaagtgcaagaatttgttgtgagccaaaaaccaatttaaccttaagaagatatgaagttggttggtttccttggtgccgcaataattttggtaacatggccatgccatggcgcaaggcaacaaaagttccctctccgaatgaaaactggctatggtgagcgttcttcggaggtaaaatgcgcaagttttaggcttgctgtggaagcacacaacatccgagcctttaaaaccattcctgaagagtgcgttgaaccaacaaaggactacattaatggcgaacaatttagatcagactctaaaacagttaaccaacaagctttcttttatgctagtgaacgcgaagtccatcacaacgacatatttatattcggcatagataacaccgtactctctaatat

SEQ ID NO: 35109 - DNA, 405 bp, Glycine max
agggagaacaagcaaacacaactctgctaacctcctctctctctccccgaattcctgccccggttaacaagggggaaaatcaataatccttttcccccaacaaaattaacccttccggaaaacctggtcaaaatgaacaagctttgaacgctgtccggtccggaaaaaactcctttggaaataaaacttgcaattgaattttcaattccaccgaaaaaaaattgcatctatatgggttgatgaagcatcagtccagaaaattcagttattaacaccaaatataggtgtcgtatatagtggcatgggtcctgattttcgagttttggttcggaaaagcaagaaacaagccgagcagtatcaccgtttatataaagaaccaattcctgtcactcaacttgtcaggga

SEQ ID NO: 35110 - DNA, 373 bp, Glycine max
gagggcactcgttttcgttctcgtccaggtctaaacatctttgcgaacgacgttcacagcgctcacccctacatgcagaacgatgaaggacagatcactgagctttacattcctaggaactgctccgcgcacaacacattgattaccgctaaagatcaagcctcggttcagatcaacattgggcatctcgaagaaaatggagtcgacaatggacaattctcgacatttgccctctgccgattcagccgtgctcaaggtgatactgacagtgctcgacaccgcttgtggcacatcaagacagttgaagttaagcagcagtagacacccacgatagcatgtaacatcgtgaggtatgcatttccactcttgctac

SEQ ID NO: 35111 - DNA, 401 bp, Glycine max
agggggacaagtgaatttggtgatcgagataaccagaaacagtgtgatgaaaatgaaaggccctggtttcctcggtgccacaaatttgggaacaaggcaatgccatgcctacgaaaagttccctccccgaatgaacactgggcaaggtgcccgtactccggaagggaaatgcccaagttggaaggcttgccgttgaagcacacaacatctttggctttgagaacattcctgaagagtgcgttgaagcaacaaaggaatacatccatggcgaacaatatagatcagactccaaaacagttaaccaacaagcttacttttatgccagagacctcgaagtcgatcccaaggacacatttgtgttcagtatagatggcaccgtactctctaatattccatactac

SEQ ID NO: 35112 - DNA, 352 bp, Glycine max
ggcacaagtgagtttgttgatcgagataactagaaacactgtgatgaaaatgaaggtccatgttttcctccttgcaacaattttggtagcatggcaatgccatgcgtacgatatgttccctctccgaatgaacactggctatggtgcccgtactccggacgtgaaaagcacaccttagaagcttgctgtggaagcacacgacatctttggctttgagaccattcctgaagagtgcgttgaatcaacaaatgaatacatccatggcgaacaatatacatcagactccacaacagttaaccagcaagcttacatttatgccacagtactccaagtccatcccaacgacacattt

SEQ ID NO: 35113 - DNA, 374 bp, Glycine max
gacaagtgagtgtgatgatcgagatcactacaaacagtgtgatgaaaatgaaggtccttgttctcttcgtagctacaattttggtagcatggcaatgccacgcgtacgagatcttccctctccgaatgaacactgtctatggtgctcgtactccggaggtgaaaggcgcatgttggaggcttgctgtggaagcagacaacatctttggctttgagaccattcctgaagagtgcgttgacgcagcatacgaatacatccatggcgaacaatatagatcagactccaaaacagttaaccatcaagcttacatttacgccagagacctcgaagtccatctcaaggacacatttgtgttcagtatagatggcaacgta

SEQ ID NO: 35114 - DNA, 124 bp, Glycine max
tatgtgccaaatcgtcctcccttaatgagaagattaatcccatttccagaggatgaggcagaatatgccaatttcttagcagatccccaaaagtatttcctaaatgcgttgcccagcgtgttac

SEQ ID NO: 35115 - DNA, 154 bp, Glycine max
agagacttccgactggggcacatgtgagtctgctgctcctgataactagatgcagtgtgattacaatgaatgtccttgttttcttcgttgccacaggttttggagcatggcaatcccatgcgtgcaatatatgccctctccgagtaaggtactg

SEQ ID NO: 35116 - DNA, 316 bp, Glycine max
gacagcgaaacagagagtgatttcagtgagtgatcggtgttcacttgatctcatcataatcgtcagcgtcaattgaagaagatgccgatcagaaacatcgccgtcggaaggcctgaagaggcgactcaccccgacacgttgaaggcggctttggctgagttcatctcaaccttcatcttcgtgttcgccggctcaggctccggcatcgcctacaacaagctcaccgacaacggcgctgccaaccctgccgggctcatctccgcctccatcgcccatgcattcgccctcttcgtcgccgtctccgtcggcgccaaca

SEQ ID NO: 35117 - DNA, 389 bp, Glycine max
gagcgccttatctcctctcccaataatgcctatttccgcgtcccccacagaggagagagccacactctcgtggcgcaaaattccccacttcaaatacgacgccgttcagccccgcctccgtcgcaacaccaccaccaccctcactttcgccaccgccaccggcggctctaaattcgcctccgtctccgtggcggagcccaaactgcaccacgatttcatgcccacgccgtcccagctcttcaagaaccccctcgccgccttcgccatcgtgccccgtgacgccgctctcttctccgccggagccaacgccggcgccgccgccaaaaccgtcaacgcgccgctcgaccgcatcaagctcctcatgcagactcatggtgtgcgtcttgggc

SEQ ID NO: 35118 - DNA, 465 bp, Glycine max
  unsure (1)..(465): unsure at all n locations
taccggtctgaggattcccgggcccaaccaagccttcagacaagccttcgttacggtggcaaaaaaacaacaaaagggggaaaaaaccccggaaccaaaccaacaattgggaaataaaaaaaaaaaaagaaaaaaaaaaaaaaaaaaacccttacccttcccaaacgcccgctttcctttgacgcttctgacccttgctttgtctgcgtcttccttccttccttccttctttctccgtgtgtcctaatggctctcccagaatcctcctcccgtcgcaactccctgatcccctccttcaactactcctcttcctccaaaacgctcnctctccaccacatgctcaacaccgcctccgctgccgccgccgccgctccctccccggccgccgggcaatctcgacgcccgatcgcgtggcctcatgattccctctcccagcgagtcacgcaagatcgagttgtactcccc

SEQ ID NO: 35119 - DNA, 344 bp, Glycine max
ggaaacagagagtgatttcagtgagtgatctgtgttcagttgatctcatcacaatcgtcaccgtcaattgaagaagatgccgatcagatacatcgccgtcggaacgcctggagaggcgacgcaacccgacacgttgaatgcggcgttggctgagttcatctcaaccttcatcttcgcgttcgccggctcaggctccggtatcgcctagaacaagctcagcgaaaacggcgctgcgatccctgccgggctcatctcagcctccatcgcacatgcaatcgccctcttcgtcgccgtctccgtctggtccaacatctccggtggccacgtcaaacccgccgtcacct

SEQ ID NO: 35120 - DNA, 403 bp, Glycine max
cacgcgtcagaacgggtgcaaaaaaaacacaggcaggggaaaataagttgaacggcctttccaaaaacataccccttcaacacaacagtacgtcatctacaaggatctcgaagacccaggaacgcacgaaagccgggatctttcagaaaatggattcctaatcgaacggtgcataaccgcatggataagctcacactaaaccgtcaatttgggatgcaattcggttccttaagaagtatcgggaacgaattttggaatgtaataatatcgattcatacagatacagaataaatggttctctattgattcaaacgctctacctacgagataaggatagagaatgaggaaaaaaccgaggatttcacatagtacttttggtcgaaaaatcgatcagaattttttc

SEQ ID NO: 35121 - DNA, 316 bp, Glycine max
ggagagaagttattagggtttttgagtgcggcggtccaaacactcttctctgcagcttttgcctacaactcccttcaccatggctgaacaaaccgagaaagcttttctgaagcaaccaaaagtgtttctcagcacaaagaagactgggaagggaaagagacctggaaaaggtgggaaccgcttttggaagtccattgggcttggatttaagactcccagggaagccatcgaaggaacctatattgacaagaagtgccccttcactggcaatgtttccatccgtggccgtatcttggctggaacatgtcacagtgct

SEQ ID NO: 35122 - DNA, 360 bp, Glycine max
atcccttcgaagtattgttcatatatgggtcatgagcaagaagggccctctctatgttgcaatgtttaagccaattggaatcatctttgcggtcatcatgggaattgcctttcttggtgactctatctatcttggaagtgtgcttggagcatccatagtgggtattggtttttatgctgttatttgggggaaaagccaagagcaagcaaaggaagagtgtgaagtttatgatgactcggaatcatactcacgcgttgtccctcttttgaagaacaagagaatggaggaatagaatcataacaatcatttaatttctctagctttaatataaatgtctcatgtagtattttgaaaacacat

SEQ ID NO: 35123 - DNA, 254 bp, Glycine max
agggagtttcgcctcctttctcaaactaaaacccaatcaatctccacaactcaacgaagaggtgttagagacagcaacactttgttgtctgccttgatcgagcacagcttcttcttggggctcgattttgcgctaaagtactctcactcacaacagacaccgtcgtcgtcgtcgtcgtcatcaatggcaccgaagcagaacaaggctgagaagaagatcacttactatgcgaagctgtgcgacctaatggagga

SEQ ID NO: 35124 - DNA, 346 bp, Glycine max
aggggaatttcccaaggggcttaataccccccccaacttgtgccaacccttaggtcaaagtataaccatccattccaaccttccccccttccccctcaacccaaacccaaacccccaacccggttccccccccgtaccgttcataaaaggaggaaatccaaaaaccgaatctagaaaacccgttccaaaacttgcggtaattaaaaaggaagccgcaacaaaggctaggaaacccgccggaaagggaaaggcaccgaaggaccctataagcccaaaaaggctccaaattgcttcctccgttttcatggaggatttcaggaaggtattcacaaaagagaatcctgaa

SEQ ID NO: 35125 - DNA, 349 bp, Glycine max
gatataagatcgattatactcacaagttttgttctttcctagcaattcggcgcaatcgtcttctgcttcaaggaaggagagcttgttattctctatcaacaaggaaaatgtcagggtatgattgtttttctctctgaagaggttgttgttgcagctgagccagctgctgccatcccatgcgagcctatggacatcatgactgccttgcaacttgtgcgcagaaaatctctggcttatggtggtcttgcacgatgccttcacgaacgggcaaaagtgattgataagcatgctgcacaactctgtgttctagcagaagactgtgaccagcctgactatgttaaactggtta

SEQ ID NO: 35126 - DNA, 351 bp, Glycine max
agcagggaatttttctccacagccttttatagattaattcttattgcaattggtgctggcatatgtttgtttgtaaatattttcatataccccatctggtctggggaggatctgcataaattggtggtgaaaaatttcaatggagttgctgcatctttagaaggtttgcttgaatttcctcatgttctgaatcctcgcaaagattttttggtgttttttatgcctagttcctgtatttaattttctgttgttgtcactctgagttggttcctttgtaactttgtttaggctgtgttaatggttacctgcaatgtgttgcatatgagagggtcccttcaaaaattcctgttt

SEQ ID NO: 35127 - DNA, 309 bp, Glycine max
ggcacaagtgagtttgttgatctagataacgataaacagtgttatgaaaatgaaggtccttgttttcgtcgctgctacaattttggcagcatggaactgccatacgtactatatgttccctcaccgattaagcagtggctatcgtgctcgtactccggaggtgaaatgcgcagattgatcgcttgctgtgggaccatacatcatcattggctttgacaccattcctgaagagtgcgttgaaccatcagttgaatacatcaatggtcatcaatatatatcagactctagaacagtttaccaacaagctta

SEQ ID NO: 35128 - DNA, 352 bp, Glycine max
ggcagcgcttgataccaagccccactcaaccaccataccactctctctgctcttcctctacctttcacgtttttagagtatgaagatggaagagacattcctatgtaacacagagtcggtgtacgacggacacactgacaggctctgcgtccaaatctccgatgctgtcctcgacgcttgcctcgaacaggactcagacagtagagttgcctgcgatacatgcacgacttccaagcttggtcatggtcttcggagatctcacgactaacgctaatgttgactacagataagatactgcatgacacctgcacgaacatctgcgtcgtctcaaatggtgtgggatcggctcacg

SEQ ID NO: 35129 - DNA, 421 bp, Glycine max
gaccacgcgtcccatacgggctgcgaagaaaaacgacaagaaagggaagacagacacacactcggttctgccttcacaaaaaaattatcgagatcccctttttctcctaagaaaagccatggctaagggtcccggtctctactctgacatcggcaagaaagccagggatctgctgttcaaggactaccacagtgaccagaagttcaccatcaccacctactcacccactggagttgctataacagcatcaggaaccaggaaaagtgaactgtttgtggctgatgtcaacacccagttgaagaacaaaaacatcactactgatatcaaagttgatacagattctaatctcttcacaactatcactgttaataaacctgctcctggtctgaaggctatttttagcttcaaagttcctgaccaa

SEQ ID NO: 35130 - DNA, 223 bp, Glycine max
gaccgatatgagggtgtcggagtcgttgcagagctgcgcgttcatctatacgaatggcgaagataaaggtgtactagttgaggaataacaccaatgctgatctactgaaccagctcacggatctcaaggcagaactagccctgccccgcatcgccaacgttaccggcggcaccccacacaagctctccaatactcaagtggtgaggctatcgatagcgcacgt

SEQ ID NO: 35131 - DNA, 336 bp, Glycine max
gaaagtcgagaagattattatggacatgtatcaactttggagcaagaaaataacgttgtgatcgttcgcctttgttccgcttttcctatcggcctcatcagacgacgtcgttgtgcgctctgaagataacttctcagaaagaaattggtcacgactgatgagctctcgttgagttctatgctccttgttgtagacactgcgaaaagcttgctccagaatatgcattgcttggtagcagcttcaagaaagccacatctgtattagtccgcacagttgactgtcaccatcacatcaattcgtgcaccatatatggactctctgggtatcgaacaattc

SEQ ID NO: 35132 - DNA, 355 bp, Glycine max
ggcacaagtttgttgagatagctagaagcaataagatgaaaatgaaagtgcttgttttgtttgttgctacagttttggtagcatatgaatgccatggctcagactaccagaagttccctctccaaatgaaaactgggtttggtgggcaatacagcaatgacgtggcatgtgccagttggaggcttggcgtggaagcaaacaacgtagtcaagtggcaaactgttcctgcagcttgcggagagtacataactgactacgttctaggagaccaatatagatcagattccaaatcagttaaccaagaggcttatttctatgccaaatccctcaaactcaccaataaagatgtcattgt

SEQ ID NO: 35133 - DNA, 371 bp, Glycine max
ggcaaaagtgagtttgttgatcgagattcatacacacagtgtgatgaaaatgaacgcccttgatttcttcgatgctacacttttggtaccatggcaatgccatgcgtattataggttccctctctgaatgaacactggctatggtgcccgtactcaggacgtgaaatgcacacgttggaagcatgctgtggacacatacaacatctttgactttgagaacagtcgtgaacactgcgttgaagcaatccaggaagacatccatggtcaacatgtatagatgacactctagtagagttaacctacacgcttacattcaagcgagagacctcaaagtccatcacgtcgacacatttgtgttcagtataaatggc

SEQ ID NO: 35134 - DNA, 371 bp, Glycine max
agggatcgcatttgagatcactcatcctcagtaccatcacgaaagcataaccgaaaccttttttcgaaatcgctgacattcccacaggcaccggctaacgcagagtagaagccagtggagatgacaccaccagcggatcaagcaacagcggagaagaagccgaaggcggagaacatgatcacgaatgacggacgcagcgagaagctgaagaagcgcacgaacaagaacgtggagagctaggctatctacatctacatcgtctcacgcaagtacatgctcacattggtacgtccagcaacgccatgggcatcatcaccagcctcatctgcgacatcttcgagaagcttctcaacgaagcgtcgcgtttggtc

SEQ ID NO: 35135 - DNA, 330 bp, Glycine max
ccagttgtcagacagcagcgaaagggggacagataagttagttgggtttttgagtgagacggtctatgaacacttcgctggtccttgtgctcatacgtcccatcactatggttgaacagcactacaaagcgtatcagaagtaaccactcctgtttctcaccacatataatactgggaacgcaaagagacctgtaacaggtttgaacggcttttgtgagtccattgggcatggatttaatactcacaaggaatccatcgtgcgtacctacattgacaggatatatcccttcactggcaatgttatcatccgtgaacatatcttggctggaa

SEQ ID NO: 35136 - DNA, 381 bp, Glycine max
ggcacaagtttgttgagatagctagaagcaataagatgaaaatgaaagtgcttgttttgtttgttgctacagttttggtagcatatgaatgccatggctcagactaccagaagttccctctccaaatgaaaactgggtttggtgggcaatacagcaatgaggtggcatgtgccagttggaggcttggcgtggaagcaaacaacgtagtcaagtggcaaactgttcctgcagcttgcggagagtacatagctgactacgttctaggagaccaatatagatcagattccaaaacagttaaccaacaagcttatttctatgctaaatccctcaacctcaccaacaaagatgtccttgtcctggacgttgacgacactactctct

SEQ ID NO: 35137 - DNA, 364 bp, Glycine max
gaaggtgcaagagtttgttgtgagctagaagctagtttatcgtgaggagaatacgacgttgtttgttttctttgttgctgcagtagttttggtagcatggccatgccacggcgcatgctaccaaaggttccctctccgaatgaaaactggctatggtgagcgttctccggaggtaaaatgcgcaagttttacgcttgctgtggaagcacacaacatccgagcctttaaaaccattcctgaagagtgcgttgaaccaacaaaggattacattaatggcgaacaatttagatcagactctaatacagttaaccaataagctttcatttatgcgagtgaacgcgaagtccatcacaacgacatattt

SEQ ID NO: 35138 - DNA, 344 bp, Glycine max
ggaaaccgagaagaagaagatggagatgtatcagatctggagcacgagaagagcgttgggagcgttcgcgtgtgttctgcttttcctagcggcctcagcagacgacgtcgttgtgcgctctgaagatgacttcgagaatgaagttggtcatgatagaggagctctcgttgagttctaggctccatggtgtggagactgcaaagagcttgctccagaatatgaaaagcttggtcgcagctgcaataaagccaaatctgtgttaatcggcattgttgactgtgatgagcacatagagtttgtgcagcacatatggagtctctgggtacccacctattcagtggttt

SEQ ID NO: 35139 - DNA, 341 bp, Glycine max
cggggcacaagtgagtttgttgatcgagataactagaaacagtgtgatgaacatgaaagtccgtgttttcatcgttgccatactttgggtaacatggcaatgctatgcgtcagatatgtaccctctcggaatgagcactggctatcagtgcccgtaccccggacgtgagatgcgcagtgtttgaggcatgctgttgaagcacacaacatctttggctttgagactattcgtgaagagtgcgttgaagcaacacaggaatacatctatggcgaacaagatcgatgacactcgactagacttatccaacaagctcacctttatgctacacacctcgaagtcca

SEQ ID NO: 35140 - DNA, 392 bp, Glycine max
ggcacaagtgagtttgtagatcgagatacctagagataatgtgatgaatgatgagtgtcgttggtttcttcattgctagaattttggtaacatggcaatgcaaagcataagatatgttctctctccgaatgaacactgtctagtgtgcccgtaatccggaggttaaatgctgcaagttggaagcttgctgttgaaacacacaacatctttggctttgagaccattcctgaagagtgcgtgaaagtaacaaacgaatacatttataggaaacaataaagatcagactccaaaacagttaaccaacaagcttacttttatgccagagacctcgaagtccatcccaaggacatactttgtgttagtatagatggacacgtactctccaatactcc

SEQ ID NO: 35141 - DNA, 367 bp, Glycine max
ggaactctcgcaagcttgttttcttgccttctttttctcttattctctactacaacattttttttgtgtgaaatttctctacaactaaatttccatataggctgcaagaccctcatcaacctacaattagtttgttacatatatagctaggttgaacaatatgggaaggtcaccatgctgtgagaagacagggctaaagaaagggccatggacaccagaggaagaccaaaagctcattgctttcatcgaaaagcatggccatggaagctggcgtgcattgcctgcaaaagctaggcttagaagatgtggaaagagttgcagacttagatggtcgaattatctccgacctgatataaaacgatgaaag

SEQ ID NO: 35142 - DNA, 383 bp, Glycine max
gaaagtgcaagagtttggtgtgagcgataacctagtttatcgtgcggagaatatgaagttgtttggtgtctttgttgccgcagtagttttggcaacatgggcatgccatggcgcaggctaccacaggttccctctccgaatgaaaactgggtatggtgagcgttcatcggcggtaaaatgcgcaagttttaggcttgctgtgggagcacacaacatccgagcctttaaaaccattcctgaagagtgcgttgaaccaggacaggactacattaatggcgaacaatttagatcagactctaaaacagttaaccaacaagctttcttttatgcgagtgaatgcgaagtccatcacaacgacatatgtatattcagcatacatgaca

SEQ ID NO: 35143 - DNA, 335 bp, Glycine max
gactcaccacttcagaacactcataatacaaagcacaaagcagagctcatccttgaattaaattatggcatgcagcttcttccatggctctctcatccccatccttggctggcaaggccgtgaagctgggcccatcagccccagaagtgggaagggttagcatgacgaataccgtcaccaagcacgtctcttcatgaagcacatggtactgcccagactgagtcaagtaattgggcctattctctggcgagctttcgtactacttaatcggtgagttcccaagcgactacggctgggagactgctgcgctttctgcatacccaaaaatcttcgcc

SEQ ID NO: 35144 - DNA, 385 bp, Glycine max
agggggacaagttaatttgttgattgaaaatactaaaaacaatgtgatgaaaatgaaaggccttgttttcctcgttgctaaaattttggtaacaaggcaatgccatgcgtacgatatgttccctctccgaatgaacactggctatggtgcccgtactccggaggtgaaatgcgcaagtttgaggcgtgctgtggaagcacacaacatcttttgctttgagaccattcctgaatagtgcgttgaagcaacaaatgaatacatccatggcgaacaatatagatcagactccaaaacagttaaacaacaagcttacatttatgccagagacctcgaagtctatcccaaggacacatttgtgttcagtatagatggcaacgtactctct

SEQ ID NO: 35145 - DNA, 363 bp, Glycine max
gaattgcaatcaaattagttcattctctttgcgcagttccctacctctcctttcaagatgcagatcttcgtcaagaccctcaccggaaagaccatcacccttgaggtggaaagctctgacaccatcgacaacgtcaaggccaagatccaggacaaggaaggaattcccccggatcagcaacgtctgatcttcgccggaaagcagctcgaggacggccgtaccctcgccgacgacaacatccagaaggagtcaacccttcaccttgtccttcgtctccgtggtggcatgcagatcttcgtcaagactctcactggcaaaaccataaccctagaggtcgaaagctctggacacattgacaacgtc

SEQ ID NO: 35146 - DNA, 152 bp, Glycine max
ggcacaattgagtttgttgctcgagataactagaaccactgtgaggaaaatgacggtccttgttttcgtcgttgcggcaggtttggtatcatgggaatgcgatgcgtacgatatgtgctctctccgactgacggcaggtcatggggcccgta

SEQ ID NO: 35147 - DNA, 359 bp, Glycine max
gacaagtttgttgagatagctagaagcactaagatgaatatgaaagtgcttgttgtgtttgtcgccacagttttggtaacatatgaatgccatggctcacactaccagaagttccctctccaactgaaaactgggtttggtgggcactatagcactgaggtggcatgtgccagttggaggcttggcgtggaagcaaacaacgtactctagtggcaaactgttcctgcagcttgcggagagtacatagctgactacgttctaggagaccaatatagatcagattccaaaacagttaaccaacaagcttacttctatgctaaatccctcaaactcaccaccaaagatgtctttgtcttgga

SEQ ID NO: 35148 - DNA, 332 bp, Glycine max
gacagtgcatcagtttgttgtgagcgataagctagtttatcttaaggagaatacgaacttgtttgtcttcgttgctgctgcactagtattggcaccatggccatgccatggcgcatgctatcacaggttccctccccgaaagacaactggctatggtgagcgttcttcggcagtaaaatgcccagcttttaggcttgctgtggcagcacacatcatccgaacccttaaaaccattcttgaagagtgcgttgaaccaacacaggactaccttaatggctaacaattgagatcagactctaaaacagcttacctacaagctttcttttacgcta

SEQ ID NO: 35149 - DNA, 327 bp, Glycine max
agaaaacaacaaaagggggttgtttaattaaaaaacaaaggaattggcggaattaaaattgagattctccggaaaaatctgacaggaaaaacataacctccagtcaaaacaacacacaaccacaatttcaaaggcaagattcaagacaaggaaggcattcctccggattagcggcgtttgattttcgcccgaaagcagcttgaagatggaaaggacctggccgattacaacatccagaaggaatcaacccttcaactcgtcctcatgcttcgtggtggcatcaatgaaccttccctcatgggtttgactcccaaatacaaccaagac

SEQ ID NO: 35150 - DNA, 333 bp, Glycine max
gacagctattcctcttaagcttgctactgagtttccacactgcataccttaggtcttccgaattcgaagttaatttgcaagatggctaaggaaaaggctcaaattaacattgttgtgggttgtcaagttgacccttaaggaggcaaccaacaataacgaacttaaaaaaccttgtgtggagaaagaaacttcaagggatgccattataaggcatgcaacttccggctccggagggaaacaacaaattaagtttacaaaattatcctgaaaccctaaggtaccattttcaccaccattttgtatttaagccaaccttgccaatggtaacttcct

SEQ ID NO: 35151 - DNA, 286 bp, Glycine max
gaaggtgcaagagtttgttgtgagctataagctagtttatcgtgaggagaatatgaagttgtttgttttctttgttgccgcagtagttttgggaacatgggcatgccatggcgcaagctaccaaagggtccctccccgaatgaaaactggctaaggtgaacgttcctccgaaggaaaatgcccaagttttaagcctgccgttgaaacacacaacaaccgaacctttaaaaccaatcctgaaaaatgccttgaaccaacaaaggagctacattaatggcgaacaatt

SEQ ID NO: 35152 - DNA, 314 bp, Glycine max
ggaacctttgcattcgatgcactcaagattcagcaagtgtgttttggaaacaaagatccatgtactccgcgatggcacgtatttggcaacatgctcgtacctcacctggaagaaatgctcccacgaagcaacttgcaagctatgctgcacgtacgtcggcagtaacatgcgctggtttgaagaatgctcagcgttcacaccctagaactggcgctcatagtaagcctaagaaataccttaagaccactgaggacctaatccagagccatccatatcaatcgtacgcccgtgcaattgcccaagattcttacatt

SEQ ID NO: 35153 - DNA, 372 bp, Glycine max
ggagttgaatcggtgagtcagtgaccgagttgaaccatgtcggacgaagagcaccatttcgaatccaaggccgatgccggagcctccaagacctatcctcagcaggccggaaccatccgcaaaaacggctacatcgtcatcaagggtcgcccctgcaaggttgttgaagtttctacttccaagactggtaagcacggccatgctaagtgtcactttgttgggattgatattttcactgccaagaagcttgaagatattgtgccctcttcccacaactgtgatgttccccatgtgaatcgtactgattaccagttgattgacattgctgaggatggatttcttagcttgcttactgaaaatgggaacaccaag

SEQ ID NO: 35154 - DNA, 378 bp, Glycine max
gaatctaccgttgggtcaactcataacctccatttcgaaaggcatcctcgacgtcaatttcgaacccagcgatgcacataagtctcgagcactgcccatctatgtctctgttggttagagtgaatatggtctcaggatgccagacacggtcttcgaacagattatgtgccacacgccactgttttccacagcatcatacacagtgcgtacatttgagattagtataaatgcgacaatggccagcgatatcactgtcatcagtaagacagcattgcagcttatggaaagtggctcgacggtgacagaatattcacttcttatgaagaacttcagtgagactggatgccacggctgtgatatgcaggtgcataccgagtt

SEQ ID NO: 35155 - DNA, 236 bp, Glycine max
ggaacctttggattctagtcattccacattcagcagctgcgttttggaaccagagaccgaaatacttcgacatggcccgtagaaagcagactactcgtaagtcaactggaggaaaagctcccacgaagcagcttgcaatcaacgctgcacgtaagtctgcagcatcaactggtggtgtcaacaacgctcatcgttatcgccctgtaatctgttgctcttcgtgagattatgaaata

SEQ ID NO: 35156 - DNA, 370 bp, Glycine max
ggcacaagtttgttgagatatctataagcagttagatgaaaatgaaagtgcttgttttgtttgttgcgacagttttggcagcataggaatgccatggctcacactaccataagttccctctccaaatgacaaccgggtttggtgggcaatacagcaatgacgtggcatgtgccagttggacgcttggcgtggaagcacacaacgtactcacgtggccaactgttcctgcagcatgcggagagtatatatctgactacgttctaggagacccctagacatcagattccaaatcagttcaccaacagtcttacttctatgctacatctctcacactcaccatcaaatatgtccttgtcatggacgttgatga

SEQ ID NO: 35157 - DNA, 371 bp, Glycine max
ggcacaaggggggtgcaagagtttgttgtgagctataagctagtttaccgtgaggagaatatgaagttgtttgttttcattgttgctgcagtagttttggtatcatggccatgccatggcgcaggctaacaaaggttccctcaccgaatgataactggctatggtgagcgttcttcggatgtaagatgctcaagttttaggcttgctgtggaagcacacaacatccgagccattaaaaccattcctgaagagtgcgttgaatcaacaaaggactacattaaaggtgaacaatttagatcagactctaggacagttaaccaacaagctttcatttatgctagtgaacgcgaagtcaatcacaacgacatatt

SEQ ID NO: 35158 - DNA, 370 bp, Glycine max
ggcagagctgaatttggtgatcaacataactagaatcaatgtgatgaagatgaaggtccttgttgtcttcgttgcgggaattgtggtagcatggcaatgccaagcgtacgagatgttccctctccgattcaacactggatatggtgcccgtactccggaggtgacatgcgcaggttggaggcttgctgtggaaccacacatcatctttggctttgacaccattcctgaagactgcgttgaagcatcacatgaatacatccatgacgaacaatatagataagactccatatcagttaagcaagaagcttagttttatgcgagagacctcgaaattcatcccaaggatccatttgtgtacagtatagatggc

SEQ ID NO: 35159 - DNA, 367 bp, Glycine max
gatatacgtctaggggattggaaggctgctgatattgaaattttgaattcctttcagttgctgactgccaagcctgttgtatacttggttaatatgacagaaaaagattaccaaagaaaaaagaacaagtttctgcccaaaattcatgcatggtgtaaatgatgggatggaagaatgtctctatgtctggtctacgattatggcttgatgcacataggatatgccaattttcactcctaacattccattcctggtcttgactcatatcagcaatagggtccaagagcacggtggtgagactattattcctttcagctgtgccttggaaaggaatcttgcagatatgccaccagatgaagctgctaag

SEQ ID NO: 35160 - DNA, 364 bp, Glycine max
ggcacgagtttgttgtgagctataagctactttatcgtgtggagaatatgtcgttgtctgtgttctctgctgctgcagtacttttggtaccatggccatgccatggtgcacgctattaaatgttccctctccgaatgaaaactggctatggtgaccgttcgtcagatgtacaatgcgcaagttttatgcttgctgtggaagcacacaacatccgagcctttatcaccattcctgaatagtgcgttgaaccaacaacagactacattaatggtgaacattttagatcatactctataacagttaaccatcaagctttcttttatgctactgaacgcgaagtccatcacaacgacatatttatatt

SEQ ID NO: 35161 - DNA, 364 bp, Glycine max
gaaggtgcaagagtttgttgtgagctataacctagtttatcgtgaggagaatatgaacttgtttgttttctttgttgctgcactacttttggtagcatggctatgccatggcgcaagctaccaaaggttccctctccgaatgacaactggctatggtgagcgttcttcggaagtgaaatgcccaagttttaggcttgctgtggaagcacacaacatccgagcctttaacaccattcctgaagagtgtgttgaagcaacaaaggactacattattggcgaacaatttagatcagactctaagacagttatccaacatgctttcttttatgctagtgaactcgaagtctatcacaacgacatattt

SEQ ID NO: 35162 - DNA, 375 bp, Glycine max
gaattgaatttcaattgagttcaacgcaatgcgatattaccctcctgaccattaaaggttcagataaccttttagggaacaagcctcttggagaaggttggttccggtatcaagcacttaaccaggtggaaaagtactgccaagctccagtatacggctcgtcttctcccagatcttcaacttcttcgcagtcatcgaaggcatcgccagggcagtcgtaacatctcagacgatggcatacactgcgattaaccaacacaggactacattattagccatcaatttatattagactctaaaacagttaaccatcaggctttcttttatgctagtgaacgctaggtcgatcacatcgacatatttatagtcggcata

SEQ ID NO: 35163 - DNA, 380 bp, Glycine max
gaatccccaaatttcccaatcccccattcctccccggagcccccattaatcccaaggggtcctaaaattggttccccaacggtcgccccctggagaaacaacaacacaatcttcaatcacatgggcaaacgcagcatctggtatggcagtccatgatgactgcaagttgaggtttttggagctgaagggataaaggacacaccgtttcatagtttttaagattgaggagcagcagaagcaggtcattgtggagaagcttggtgagcctgcccagggctatgaagatttcactgccagccttcctgctgacgagtgccgttatgctgtttatgattttgagtatctgactgaagggaatgtcgctaaaagcagaatttttt

SEQ ID NO: 35164 - DNA, 168 bp, Glycine max
ggcacaagtgagtttgtcgatcgagatcactcgcaccagtgtgctgaagttgaaggtccttgtattctgcgttgctgcgcttctggcagcatggcactgccatgcgtatcatgagtccgctctgcgaatgaacacatggctatcgcgcccgtcccctggaggtgtcca

SEQ ID NO: 35165 - DNA, 360 bp, Glycine max
aggcaaaagaccaaaaaaagggaacaaaaatcaattttttaactgaaatttcctcaacctcccccggttccccaaagaaacctggattaacctgtaacaatctcccaaggacaaaatgaaggtggatcttccgggatttctggccaagtccatttgggatgagggtcgggattgcacttgctgaaaagggtatcgaatatgagtacaaagaagaggacttgaggaacaagagtcctcttctcttacaaatgaacccggttcacaagaagattccggttctcatccacaatggcaaacccatttccgaatccctcattgctgttcagtacattgacgaggtttggaatgacagaaatccct

SEQ ID NO: 35166 - DNA, 342 bp, Glycine max
  unsure (1)..(342): unsure at all n locations
gaaggtgcaagagtttgttgtgagctataagctagtttatcgtgaggagaatatgaagttgtttgttttctttgttgctgcagtagttttggtagcatggccatgccatggcgcaggctaccaaaggttccctctccgaatgaaaactggatatggtgagcgttcttcggaggtaaaatgcgcaagttttaggcttgctgtggaagcacacaacatccgagcctttaaaaccattcctgaagagtgcgttgaaccaacaaaggactaacattaatggcgaacattttagatcagactctanaacagttaaacaacaagctttccttttatgctagtgaacgc

SEQ ID NO: 35167 - DNA, 380 bp, Glycine max
  unsure (1)..(380): unsure at all n locations
gaagcttctgtgagttgtttttgcaatgtcttgttgaattgatgacatatatagtaatcagtttctttgagttgtttttgaaatgtcttgttgaattttctcgagtgacctaaatattctttctgcgtgctgtcagcgaatgctcaaggctgatggttactttccatcagaaagctggatcagggaaactcaccggtgtatatagaaagtacaatacatggaagtatggctgtgccgcgaaaatagaaccagccctgtttctactggataattaagggaatgcaagtaatcttctagtttctaatgcattgctttggttgttntgagagtttgcttgtgctagaagtttgttttgagagcttcagagacctatcaacaga

SEQ ID NO: 35168 - DNA, 323 bp, Glycine max
ggagaatctggggtgtgttgccattgccagctatgaattagaaggatcaaagctttcccaggagggtcaaagctgtcaaattttaatttcaaggctttttttttttttttccccttccctgtgtttcaccttatagctacatttacacgaaatccacatattaaacacccatataatccttcacttgttcttcctctctattccgttgccgtattctttctctcagaattcaagaaaaactctttctcttctctctagctctccctatatagtcctccctctttattattagagcacatagagaatttctgtacctgttttga

SEQ ID NO: 35169 - DNA, 221 bp, Glycine max
gaaggtgcaagagtttgttgtgagctataagctagtttatcgtgaaggaaaaaagaaattggttggtttccttggtgctgcaataattttgggaacaagggcaagccaaggggcaaggtaacaaagggtccctctccgaatgaaaactggctaaggtgaacgttcctccgaggtgaaatgcgcaagttttaagcctgccgtgggagcacacaacatccgag

SEQ ID NO: 35170 - DNA, 239 bp, Glycine max
ggaacctttgaattcaatccattaaggattcagcaggtgctttttgaaaccagaaaccgaaatatttcgaaatggcccgtacaaagcaaactgctcgtaggtcaggtggaggaaaagctcacaggaagcatcttgcaaccaaggctgcacgtaagtctgcaccaacatctggtggtgtgaaaaagcctcatcgttaccgccctgaaagtgttgctcttcgtgatattaggaaataccag

SEQ ID NO: 35171 - DNA, 243 bp, Glycine max
ggcacacgtgagtttgttgatcgatataactagaaacagtgtgatgaatatgaatgtccgtgtttgcttcgttgctagaattttggtagcatgcaaatgacatgcatgcgatatgttccctctccgaatgaacactggctatggtgcccgtactccggacgtgagttgcgcacgttggatgcttgctgtggaagcacacaacatctttggctttgagaccaatcatgaatagtgcgttgatgc

SEQ ID NO: 35172 - DNA, 344 bp, Glycine max
ggatgcacaagtttgttgagatagctagaagcaatatgatgatgatgaaactgcttgtgttggttgctgcaacagttttggtatcatatgaatgccatggctcagactaccagaagttccctctccaaatgaaaactgggtttggtgggcactacagcaatgaggtagcatgtaccagttggatgcttgtcgtggaagcaaacatcgtcgtctagtggcaaactgttcctgcatcctgcggatagtacatagctgactaccttcgaggagaccaatattcatcatcttccacaatagttcaccaacatgcttacttcgatgctacatccctcatcatcaccaac

SEQ ID NO: 35173 - DNA, 322 bp, Glycine max
gattcacagattagtttgttgatcgagacaaccatcatcagtgtgatgaacatgatagtgtccttggtttcttcgctgctacaattttggcatcatggcaatgccatgcttactacatgttccctctccgattgaacactggctatggtgcccgtactccggaggtaaaatgcacatattggaagcctgctgtgaaagcacacatcatcattggatttgaaactattcctgaacagtgcgttgatgcagcaatggattacatccatgacgaatattatatatcatactccacaacagttaaccagcaagcttacatttatgc

SEQ ID NO: 35174 - DNA, 332 bp, Glycine max
aattcccgggccgacccacgcgtcagtccaggcgtcagacggctgcaaaaagagaaatgaaggggacaacacaaatcatcaacatcgaccaagagttaggcttatgcaccagatccatcatgggcacctctgctattcagctctcagcaatcactggtcaaactgcgctgaagcatctcaatgagttcgtccgcatcatcggtggcaccggcaagagtcgcactataatacgacggcaggtcaagagtgcgcctcatagcattcggtaaggctctgaccgtccgatgtacttgggtctattcgcggaacatattccatcacacctgatcgga

SEQ ID NO: 35175 - DNA, 368 bp, Glycine max
tgggattcggagaggttctcaatctccggttcggcacagaatgctcgatcaatctcatgcactgtcacatctactgcacaagcgacagtcacgcgaccaaatccaaccagcacatcgtcatcaggactcccggtggcatgcttgtgtagcagacgacgactaggagggccagctgttgcaactgccctgtcactgggaagaggattcaagggattccacatatagagccagcacagtatcatgtatcaatgttacacagtggccggccgactgtgagccgtgcatatggtagtgtgttgtctggcagtgctgttagagattgaatcattcaagctttcgtggatgaggagcaaaggattgtgacaaag

SEQ ID NO: 35176 - DNA, 421 bp, Glycine max
ccgggccgactacgattcgatggcaaaaaaccaccaaaggggaaaaaacccaataaccggtaattggggccggccaatccgcccttcccggcaacttcggaaccaatggatccaacatccaggtcggacaaaaagcacaatttcagtcaaaggcgacccggagcctccaaacctaccctcagcaagccggtaccatccgcaagagcggctacatcgtcatcaaaggccgcccctgcaaggttgtggaagtttcgacttccaaaactggaaagcacggtcacgctaagtgtcactttgttggaattgatattttcactgccaagaaacttgaggatattgtgccctcttctcacaactgtgatgttcctcatgtgaatcgtactgattaccagctcattgatattgctgaggatggattttt

SEQ ID NO: 35177 - DNA, 383 bp, Glycine max
ggcacaagtgagtttgttgatcgagatcactacaaacagtgtgatgaaaatgaacgtccttgttttcatcgttgctacaattttggtacgcatggcaatgccatgcgtacgatatgttctctctccgaatgaacagagggtacggtgcacgtacatccagacgtgaaatgcgcacattataggcttgctgtggaagcacacaagatctttggctttgataccattcctgaagagtgcgttgatcgcaacaagagaatacatccatggcgaacaatacatatcagactccagcacagttaaccaacacacatacttatatgccagatacctcgatgtatatcccaacgacacatgtgtgttcagtagatatggcaccgtactct

SEQ ID NO: 35178 - DNA, 381 bp, Glycine max
caagacgttcggggagtgcacgctgaaggacacggtgaagcccgtgctgatcccctgctacgacctcgtcacgcgcgcgccgttcgttttctcgcgcgccgacgcgcttgaagtggacggctacgatttcaagatgcgcgatgtgtgcgccgccacgtcagcggacccatcctctgcccccacagagatgcggtccgtcgacggcaggaccaggatcatggccgtcgacggaggcgtcgccatgaacaatccaacggctgccgccatcacgcacgtgctcaataacaaacatgagttcccgttctgtaacggcgtttccgacctcctcgtactctccctcggtaacggagagtcagactttaacgccgttaagtcctcctc

SEQ ID NO: 35179 - DNA, 380 bp, Glycine max
ggttgaatgtataacgctgctgccgaaacccttcccaatccctaaagtaagtgagtcctcggtggctgcgaatcgtggagaatgctaacggtacgaaggaagacgtggttaccatacagtccaccattaacctccacaaacgcctccactggctgcacatttaagaatacagctcctaaagctatgcaggagatacagaaatttgcccataacgccatggggaccaatgatgttacggtggatgtgaagttgaacacatttgtctggagccatagaatcaagactcttccacagatgattaaggtactaactgctcgcccgaggaatgacaattacaatgccaaggaagatctatactcacttgtcaccgttgttgagac

SEQ ID NO: 35180 - DNA, 391 bp, Glycine max
gacagagaagggtttcgtcgggggtcacgtttcacaatcacgttttgcgcatctctcactcactgactcctctgctgccgcatcatgtggggttccatcgcgaagtcaagggacaaggcatgagatgcttcatatccagggagggcaatgcgggaaccagatttgatccaaggtctgggacgtagtgtgtacggatgacgggatcgaatcaacggggaggtaccatagggacaatcaggtgcaacgcgatcgagtcaaagtcgactacaatgatgcgaattgcggtaggttcgtgcctaaggcagtgctcaaggattcggacccatagaccatggacagcgtcatctatggtcactacagtcatatattccggacagataacatcgtcctc

SEQ ID NO: 35181 - DNA, 363 bp, Glycine max
acgacagaaaggggcacaagtgaatatgttgatctagataactagaaacagtgtgatgaaaatgaaagtccttgttttcatcgttgctacaattttggtagcatggcaatgccatgcgtaagatatgttccctctccgaacgaacactggctatggtgcccgtactccggatgtgaaatgtgcaagttggaggcttgctgttgaagcacacaacatctttggctttgagaccattcatgaacagtgcgttgaagcatcaacggaatacatccatggcgaacaatatagatcagactccaaaacagttaaacttcaagcttacttttatgccagagacctcgacctccatctcaatgacacagt

SEQ ID NO: 35182 - DNA, 343 bp, Glycine max
gcatcactctcttcatcttcgatttccattgcgacgcgtgactttttcatcttctttctcgtcattttcttcgctcttcgatcttcgtcaggggactgctccgactaccagcagtaccactcactggtggccacgatcggacgcttacacgattcccaaagctctcacaacagcgtctaaactgacaccctcgctcgattcgccgtagtcgatcacttcagatggcataattcgcttctggagtttgctacggtggttatggcacaggaacaggttgttgctggaaccctgcatcatcttaaccttgaggctatttacgctggtcacaacaagctctatgaag

SEQ ID NO: 35183 - DNA, 193 bp, Glycine max
acccacacgtccaccggctgctacatgcggctgcaaggtgactacagaagggtatcggtcttttgataagccctctgataagaataatgggtacttgcttcccatgcccaagatggttaactcggatcttgccaggattagtaagtctgacgaggttcagtctgttgtgaggcccattaagaaggatgtgaag

SEQ ID NO: 35184 - DNA, 255 bp, Glycine max
acgacgcgtccgatacagcagtcagaacacgcactcaaaggggcacaagtgagtgtgttgatggagagagttatggcacattgttaatgaatttgaaagtccgtctggttctcatgactacggatgagagtatgcgcttaatatcctcagatctgttactcctccgtggggaaatcgtgcctgctgtccgtctacgcgcggtaagatttcaacatgcaatccatggccaccatatgcgtcaagttccaggctcag

SEQ ID NO: 35185 - DNA, 364 bp, Glycine max
ggcacaagtgagtttgttgatcgagataactagaaacagtgtgatgaaaatgaacgtccatgttatcttcgttgctacaattttggtagcatggctatgccatgcgtacgatatgttccctctccgaatgaacactggctatggtgcccgtacgccggatgtgaaatgcgcaagttggacgcttgctgtggaagcacacagcatctttggctttgagaccattcctgaacagtgctttgaagcaacataggaatacatccatggggagcaatatacatcagactccataacagttaaccatcaagcttacatttatgccagatacctccaagtccatcccaaggacatatttgtgttcagtata

SEQ ID NO: 35186 - DNA, 398 bp, Glycine max
  unsure (1)..(398): unsure at all n locations
cgacgcgtccaaccggaagcaanaggacaacagaagggggcacaagtgagtttgttgatccagataactagaatcagtgtgatgaaaatgaaggtccttgttttcttcgctgctacaattttggtaacatggaaatgccatgcgtagcgatatgttcccgctccgaatgaagcactggctatggtgcccgtactccggacgtgagatgcacaaattggacgcctgctgtggaagcacacagcatctttggctttgacaccattcctgaatagtgcgttgaatcaacaaaggaatatatccatggcgaacaatatagatcagactccagaacagttaaccaacaagcttacttttatgccagagacctccaagtccatcccaaggacacatttgtgttc

SEQ ID NO: 35187 - DNA, 350 bp, Glycine max
ggaacaagtacatagaggaaccaaagcggcggttacaggagaccaagcagaggttgggtcgagtgagaccgaaaacggttcaaatgtcatctcggcaggtgataaagcctcaccagtcggtcatgaacctgcacttctagaccatgaagatgcttctggacgaagtggcgatacttccgtcggaaatgctaatgaacacgatcacgaggttctcgacgcacctgatgaagctcatcaagaacgggactgtgcgcagcaacaccgtcaatctccacgacgacgagctcaagctccacaaggacgtcctcgaccacctcatcgacatcatcaccgaccacatcgacgtcaac

SEQ ID NO: 35188 - DNA, 205 bp, Glycine max
ggcacaagtgagtttgttgatcgagataaccataaacagtgtgatgatcatgaaggtccttgtcttcgtcgttgctaccattttggtagcatggcaatgccatgcgtactatatgttctctctcctattgaatcctggctatggtacccgtactctggacgtgaattgcgctggttggatgcctggtttgtagcctaacgagatc

SEQ ID NO: 35189 - DNA, 214 bp, Glycine max
gaaggtgcaagagtttgttgtgagctataagctagtttatcgtgaggagaatatgaagttgtttgttttctgtgttgctgcagtagtggtggtagcatgggcatgccatggcgcacgctaccaaaggttccctctccgaatgaaaactggctagggtgagcgttcttcggaggtaaaatgcgcaggttttaggcgtgcggtggaaccacacaac

SEQ ID NO: 35190 - DNA, 204 bp, Glycine max
gaagaaaggaagaaacataccgaatgagagcatcaaactcttcttcttcgatttccattgcgaagcgttactttttcttcttctttctcttcattttcgtcgctcttcgatcttcgtccggggactgctccgaataccacgacgaccactccgccgatggccacgatcggaggcatacacgactccaaatgctctcaaaacagc

SEQ ID NO: 35191 - DNA, 268 bp, Glycine max
gactcaaacgtccaacgacgacagaaaggggttgcgtgtgtgcgtgacataagcaagatgaaagaatatcatcaaggtaaagtagattccttacgagacattgcgttcaacgagacatgctacatagctcagggatcaccagctttgtccatagatgaatccactcaggccaggaagttccttcagtcatggaagagggacgtgtatcctcaaagattggcttcaagtcgtgtcatcgctggtcattgggaaacctcagttcacacgg

SEQ ID NO: 35192 - DNA, 222 bp, Glycine max
ggcacaagtgagtttgttgatcgagataactagaaacagtgtgatgaaaatgaaggtccttgctttcttcgttgctacaattttggtaccatggcaatgccatgcttacaatatgttccctctcgaattgaacacgggcaatggtgcccttatcccggaggtaaattccccaatttgaaggcttccgttggaacaaaacacaaccttgggctttaaaacaat

SEQ ID NO: 35193 - DNA, 285 bp, Glycine max
aggcacaagtgagtttgttgatcgagataactagaaacagtgtgatgaaaatgaaggtccttgttttcttcgtggcgacgattttggtagcgtgggaatgcgatgcgtacgatgtgttccctctccgaatgaacactggctagggtgcccgtactccggaggtgaaatgcgcaagttgggggcttgcggtggaagcacacagcatctttggctttgagaccagtcctggagagtggcttgaagcaggaaaggaagacatccatggggaacaatatagatcaggct

SEQ ID NO: 35194 - DNA, 339 bp, Glycine max
gataatgtggctgattggtaacgtagtgaatcctgtgcatacatccgctcgtagcctcttcctgcgactctcttctcagtgggtctccgtattctccctcaatcctattaaccttttcttctttcatttcccaccccattctataatcaatcagtgtcaatggcttcttcaatcgctaatgcgccttctgcgttcaattctcagtactactttggtctcagaacgccactgaggtccttcaacttttcttctcctcaagctgccaaacttccacgctcgcattgccttttcgtcgtcagagcctccgattcggtcttcgaaaccgccgttgtcgccggt

SEQ ID NO: 35195 - DNA, 339 bp, Glycine max
atcatttaagaaggcaacaggacaaaaaccattgagaataatcttttacagggatggggtaagtgagggacagttctaccaggttttgctatatgagcttgatgccattcgcagggcttgtgcatccttggaacctagttaccaacctccagtaacatttgtagttgttcaaaaacggcatcacgctagactcttcgcaaacaatcatgacgacagaaatagcactgataagagtgggaatatcttacctggtactgtggtagattctaagatctgtcatccttccgaattcgacttctacttatgcagtcatgcacgaattcatggtacaagtagacc

SEQ ID NO: 35196 - DNA, 309 bp, Glycine max
gacaacatcctaaaattgattttggtccatttgaaattaccaattaccaaagatgtttggaatcatcggaggaaacaagggtcacaagataaaggggaacttggtgattatccaaaaaaatttgttggaaatcacaaacattacaatgtgttaagggtctcaccggaaccggcattaacaccattgggagactcctccacaccgtaagcgctttggtctcacatatctatatacatcacaatagtgacaacagcgcatatacacatgagaaagaaaaagttggaaacgctacaaatttaagaagacaag

SEQ ID NO: 35197 - DNA, 183 bp, Glycine max
ccatcggtggtcaatctgctggctgcatcgtgatggagctctacgccgacgtcactccccgcaccgccgattaacattgtgctcattcctaatgtaagaagggcttagtgcggagcgggaatcccctccactagaacggctcgtcctttcactgcgtgattccgagtttcatgtgtcagggtg

SEQ ID NO: 35198 - DNA, 376 bp, Glycine max
ggtgcacaagtgagtttgttgatcgagataactagaaacagtgtgatgaaaatgagtgtccgtgttctcctcggtgctacaattttggtaacatggcaatgccatgcgtacgatatgttccctctccgaatgaacactggctatggtgcccgtactccggatgtgaaatgcgcatgttggacgcttgctgtggaaacacacaatatctttggctttgagaccactcctgaagagtgcgttgacgcaacacgggaatacatccatggagaacaatatatatcagactccaaaacagttaaccaacacgcttacttatatgccagagatctcgatgtccatcccagggacacatttgtgtacagtatagatggcaccg

SEQ ID NO: 35199 - DNA, 333 bp, Glycine max
gcgtcagcccacacgtccgagaagggggcacaagtttgttgagatagctagaagcaataagatgaaaatgaaagtgcttgttttgtttgttgctacagttttggtagcatatgaatgccatggctcagactaccagaagttccctctccaaatgaaaactgggtttggtgggcaatacagcaatgaggtggcatgtgccagttggaggcttggcgtggaagcaaacaacgtagtcaagtggcaaactgttcctgcagcttgcggagagtacatacctgactacgttctaggaaacaatatagatagcatccaaaacagttaaccatcaagctt

SEQ ID NO: 35200 - DNA, 334 bp, Glycine max
ggaaggcgaggaatccacattcagacacaatacagagtgagttgttgctccttcggcacatgtctccgccaacatgggtatcttccagagattctatgcacacaacgcttgccactggtggcaccaagaatgcctgcaggaaaaagagaacgtatgcccttggtcgccagcctgctaacactaggctgtcaagcaacaagacagtcacgaggatctgtgttacatgctggaatatgaaatggaaggcattgagattggatactggaaattactcctggggtagtgatcctgtaactcacacgactcgtgtactatatgtcgattacaatgcctc

SEQ ID NO: 35201 - DNA, 351 bp, Glycine max
ggcacaagtgagtttgttgatcgagataactagaaacagtgtgatgaaaatgaaggtccttgttttcttcgttgctacaattttggtaccatggaaatgccatgcttacaaaatgttccctcttcgaaggaacactggatatggtgcccgtactccgggtgtgaaatgcacaatttggaggcttgctgtggaagcacacaaaatctttggctttgacaccattcctgaagagctgcttgaaccaacaagggaatacctccaggggccaacaatatatattagactccaaaacagttaaccaacagtcttacttttatgccagacacctcaatgtccatcccaaggaaacat

SEQ ID NO: 35202 - DNA, 323 bp, Glycine max
  unsure (1)..(323): unsure at all n locations
aaaaaccacaaaaaggtaccgcttccaaaaaaccacaaaaaggtaccgcttccaaaaaaccacaaaaaggtaccgcttccaaaaaaccacaaaaaggtaccggttccaaaaaaccacaaaaaggttacggttccaaaaaaagaacaaaaaggtaacgggctgccaagaaagacgaacaaaaagggggaatatcgccttaacagtaaagaaggttgagaaaagagaagacaaaatccgcagaaagcaaagaagctgagagcgagagagcaactgcacgcactgtaactcctaacttcccagatcgtcntcttcctcttttctct

SEQ ID NO: 35203 - DNA, 364 bp, Glycine max
cggctcgagccacgcgtcagatgattatgggaggtggaaggtgtactagaaggtaaaagcatggtgcatgaagtggatttgaggttttggtttatatatgagtacagaggtgcacccctttggaattaaactggtcaccttcatcaatcttgtcactgtcaaccagtattgaagggggaaccaaatggttggtcaacaagttaaaaggaaagatgcaaaaggcattaacagagttgctaaaggagtatgatctacccatatgaatctttcctcgcgatgcgacaaactacgaatttaacgaagagacaggaaagcttgttgtttacattcctcaagtgtgtgaggttggctacagggattcgtc

SEQ ID NO: 35204 - DNA, 308 bp, Glycine max
ggcacaattgagtttgttgatctatatatctagaaacaatgtgatcaacataaaggtccttgctatcttacatgtcaaaattttggtatcattgaaatgccatccctatcatacgttcccacaccgaatgaacaatgtctatggtactcgtatcccggaagtaaaatgcccacattagaggcttgctgttggaacataaaacatcattggcattgacaccattcctgaacagtgcgttgacacaacaaaagaatacatccaaggcgaccaatatacatcacactccaacacagttaatcaacaagctt

SEQ ID NO: 35205 - DNA, 354 bp, Glycine max
ggccagaaaggaggcagagaccgagagagcaactgcacgcactgtaactctctcaccgtttcttccgctttgatggaacaggttggtaaaacgcatgcgttttgaagcttccattccatttcagtttcgattttcgattcttttccctctactctgcagtacgagaaggttgagaagataggcgagggaacatacggcgtcgtttacaacggtcgcgaccgctccaccaacgagaccatcgccttgaagaagattcgcttggagcaggacgatgacggggttcccagcaccgccattcgcgagatttctctcttgaaacaaatgcagcacacggacattgttaagtttcaggat

SEQ ID NO: 35206 - DNA, 291 bp, Glycine max
cttctaaaggttaaccagattggtacagtgaccgaatctattcaggctgcacttgactcaaaggctgcaggttggggtgtcatggttagtcatcggagtggcgagactgaggataacttcatcgcggatctctctgttggcttggccagtggacagataaagactggtgctccttgccgaggtgagcgattggcaaagtataatcagcttcttcggattgaagaggaacttggaagcgtgcgatatgctggtgaaactttcagatcaccttaaagtgaactcaattgatcc

SEQ ID NO: 35207 - DNA, 346 bp, Glycine max
  unsure (1)..(346): unsure at all n locations
aaatgaaaattgcttgtttttgtttgttgctacagttttggtagcatatgaatgccatggctcagactaccagaagttccctctccaaatgaaaactgggtttggtgggcaatacagcaatgaggtggcatgtgccagttggaggcttggcgtggaagcaaacaacgtagtcaagtggcaaactgttcctgcagcttgcggagagtacatagctgactacgttctaagagaccaatatagatcagattccaaaacagttaaccaacaagcttatttctatgctaaatccctcaaactcacaaacanagatgtctttgtcctggacgttgacgacactactctctct

SEQ ID NO: 35208 - DNA, 240 bp, Glycine max
gaattctcgtcatacatttgttcaatcttcatcacttgcgtctagggattaaacgcagcttcatctagatttaaggcatatgggtaaagatgacgttcacatcagtattgtagacactcgcaatgtcaactctgggaaatcgatgaccattggtcagctgaattacaagcttgtgtgcattgaccacagtgttattgcaatggttgtgaaggacaccgctgaattgaaaattaggtcttt

SEQ ID NO: 35209 - DNA, 302 bp, Glycine max
caaaaagacgggggcacgggaaagtttgttaatttgtagtgcgctatacactatgttaacgttgagagacctatgatttcgtctgtgctcattgttggtgacatagtattgccatgattgccatatgttcgctcacggtatgaacagtggccacggtgcacgtactctggatgtgatatgcgcacgttggaggcatgctgtgcaagtatacagcatccttggctttgagaccatacctgaacagtgcgttgcattcataaaggattacatccatggcgaacagtatacatcagactccaaaa

SEQ ID NO: 35210 - DNA, 206 bp, Glycine max
ggagcaaatccctaagccctactattcttcctcagtaatgtcaattaagcttctcgtctctgcagcaactattcctaaccctaaggtcttcttcgaaatgaccatctgcggtcaatctgctggccgcatcatgatggagctctacgcccatatcactcaccgcaacgccgagaatttccgcgcgcttttcaacggccagaacggcg

SEQ ID NO: 35211 - DNA, 235 bp, Glycine max
gcttcagtaagactacagaaagggctgccaaggttttggttttggctgggaacgctcaacaagatgagattggggatggagctaatttaaccatttcatttgctggggagctcctgcagggtgcccaggaacctatcaggatcggtttgcatttgagcgagatcatcagtggatacactctccccatcaacaacactgttcacatcttggatgaactagttgaggatcgctctga

SEQ ID NO: 35212 - DNA, 182 bp, Glycine max
agcatttacatgtcccatttgggctgggaacagtggagcttgtggctggtatggaaagtgccaatgcccagatccactgtgaagttaccaacggtctttactatcttcgattctcagtttgagatgccatggctgggtgccatggattaatgatggtcgcagcaagtgccgccagggatagg

SEQ ID NO: 35213 - DNA, 224 bp, Glycine max
gaaggtgcaagagtttgttgtgagctataagctagtttatcgtgaggagaatatgaagttgtttgttttctttgttgctgcagtagttctggtagcatggccatgctatggcgcaggctaccatgcgttccctctccgactgaacattggctatggtgagcgttcttcggacgtagcatgctcacgttctaagcttgctgtggatgcacatgttatccgagccc

SEQ ID NO: 35214 - DNA, 311 bp, Glycine max
tttattgatatgaatttgaagttgcagtgtgataaatattatagtccttgatttcttcgttgcaacaattttggtagcatggtaatgccatgcgtactatatgtgccctctccgaatgaatactggctatggtgcccgtactctggaagtgaaatgcgcagctttgaggcttgctgtggaagcacacaacatcgttggctttgagaccattcctgaagagtgcgttgaagcatcaacggaatacatccatggcaaacactatacatcagactcccaaacagttaaccaacaagcttacttttatgccagag

SEQ ID NO: 35215 - DNA, 228 bp, Glycine max
gcacaagtgagtttgttgattgaaaatactagaaacaattttaagaaaatgaaaggtcctgttttcctcggttccaaaattttgggtgcatggcaaatccaatgcgtaacatatgttccctccccgaaataacactggctatggtgcccgttctccggacgttaaattcccaagttggacgcatgctgtggaagcacacaacatctttggcttttaaaccattcctga

SEQ ID NO: 35216 - DNA, 212 bp, Glycine max
gactcacaatcgaacgggaaaatgcgtcttcataaacgctgtccaaaacttctcatagccttttattcattccattcctttctagggttttcttttctttgccgagaaaatcagagagtgcatttcgatttacattggccaggccggtatccaggttggaaactcctgctgggaactctatcgcctctaatacgggattcagcccgattgat

SEQ ID NO: 35217 - DNA, 339 bp, Glycine max
gagaaagggacacttaagaaggaacctgtgtggatgttgatcgatagaactagaaacagtgtgatgaacatgaacgtccttgttttcttcgttgctacaattttggtagcatggcaatgccatgcgtacgatatgttccctctccgaatgaacactggatatggtgcccgtactccggaggtgaaatgcgcaagttggacgcttgctgtggaagcacacaacatctttggctttgagaccactcctgaagagtgcgttgaatcaacaaaggaacacatccatggggaacaatatagattaaactccaaaacagttaacaaacatccttacttttatccc

SEQ ID NO: 35218 - DNA, 363 bp, Glycine max
  unsure (1)..(363): unsure at all n locations
ggcacaaagtgaagttttgtttaattcaagaataacttagaaaacaagtgttaattaacaaattaaaggtcccttgtnttccttccgtttcctaacaatttggtagcaatgcaattccatgcgtacgaaatgttcctctccgaatgaacactggctattgtcccctacccggaagtaaatgccaagttggacgctttctgtggaagcacacaacatccttggctttgagaccattcctgaagagttccttgaaacaacataggaatacatccatggcgaacaatataaattagactccaaaacagttaaccaacaagcttacttttatgccagagacctcgaagtccatcccaaggacacatt

SEQ ID NO: 35219 - DNA, 240 bp, Glycine max
ggcacaagtgagtttgttgatcgagataactagaaccagtgtgatgaaattgaaggtccttgttttcctcgttgctagaatttcggtagcatggcaatgccacgtctaggacatgttccctcgcggactgactactggtcacggtccccgtactccggaggtcaacggcccaagtttgaggcttcttcaggcaccctgcaccaccgtagcctttctgaccctccattatcattccttaaa

SEQ ID NO: 35220 - DNA, 260 bp, Glycine max
tggggtcttgcagggcgaagagatggccacagttacagggcacctcgtgtgggagatcgtcaagaaaaacaattccttcctgggcaagcagtttggaacgggcacccagagcgtcgaactcagcagagagagcaacaatctctacaacctcaattcgttcaagtactctggtttggcaaataagaaaactgttactgtccagcctgagggcaaagatcaagtcgtgtggagtgcttactggacccactgacagcattgga

SEQ ID NO: 35221 - DNA, 317 bp, Glycine max
ggcagttcagttgcaagcagattagttcattctctttgcgcagttcgctacctctcccttgaaggtgcacatcgtcgtcagcgaccctcaccggcaagaggatcacgcttgacgtgggcagctctgagatcatcgacaccgtcaaggccaggatacaggacacggacggcatccgcccggtccatcagcgtcacacttgcgccggaaagcaacatgaggacggccgtacccatgctgactacagcatgcatatggagagtactcgtcaactcgtcctccgtctcagtggaggtatgcagatcttcggtaagacactc

SEQ ID NO: 35222 - DNA, 285 bp, Glycine max
gcataagtgagtttgttgatcgagataactacaaatagtgtgatgacaatgaatgtccatgttttcatcgattgctacaattttggtatcatggcaatactatgcgtacgatatgttccctcaccgaatgacaactggctatggtgcccgtactccggatgtgaaatgctcaagttggatgcatgctgtagaagcacacatcatctttggctctgagaccattcctgacgagtgcctagacgcaacaaatgaatacatctatggcgaacaatatatattatactc

SEQ ID NO: 35223 - DNA, 395 bp, Glycine max
  unsure (1)..(395): unsure at all n locations
atacgtacggccacgagtacaggactgcaagaaaacgtacagaaaggggatcataaacctaatccctatttttcttcctcagtagtgtcatttacgcttctcttctctgcagcaactatgcctaaccctaaggtcttcttcgacatgaccatcggcagtcaatctgctggccgcatcgtgatggagctctacgccgacgtcactccccgcaccgccgagaacttccgcgcgctttgcancggcgagaagggcgtanggcggagcggcaagcccctcactacaagggctcgtctttccacgcgttatccgagtttcatgtgtcaaggtgggactttcacgcggaaacggaacggcggcgagtcgatttatggcgccaagttcgccgacgagaactt

SEQ ID NO: 35224 - DNA, 377 bp, Glycine max
  unsure (1)..(377): unsure at all n locations
ggcacttcaattgcaatcaaattagttcattctctttgcgcagttccctacctctcctttcaagatgcagatcttcgtcaagaccctcaccggaaagaccatcacccttgaggtggaaagctctgacaccatcgacaacgtcaaggccaagatccaggacaaggaaggaattcccccggatcagcaacgtctcatcttcgccggaaagcagctcgaggacggccgtaccctcgccgactacaacatccagaaggagtcaacccttcaccttgtccttcgtctccgtggtggcatgcagatcttcgtcaagactctcactggcaaaaccataaccctagaggtcgaaagctctgacnacattgacaacgtcaaggcca

SEQ ID NO: 35225 - DNA, 265 bp, Glycine max
gatcagtagtgagtgtgtagactaagatccagacattcagtgtcatgaatgggacggtccttgttacccacgccgctcctattctggtcacatggtttagcttcgcgtcaaatttatgccctcgacaaataattcttgagcatggtgacccgtctcaggaggtgaactgcgcaagttggaagcttgctgtggaaggacacatcatcattggctttgagccgataccagacaatcttgttgctgcaaccagtgattgcctctatgg

SEQ ID NO: 35226 - DNA, 373 bp, Glycine max
gaattccatggccgacccgacgcgtcagcccacgcatccgtcgcgacgcaaggggacggttttgcgcggtagatgcggctcagccgctgtagactccgagctctgctgtgatgaacgtgaccgtcggtaatatccacggagcgggatctgcggtcacacggaagtcccatccctagaagcagttgtgggccgacatgtcatacggcaaatcgtatccgtggtcctgatgtaaaatgcccttttctggtgcatgccgtgccaacggacttgtcctttggcatagaggtcatgccgcaaaactgcgtagatccgccattcgtatatgtgccagggtacaacttatcatcagacggaagaacattgccgcatttgt

SEQ ID NO: 35227 - DNA, 256 bp, Glycine max
gagcgtacacgagtttgttatgcactagccgctgatttatcatgcggagaatatgatgttgtttgttttctttgttgctgcagtagttttggtcacatggtcatgccatggcgcaggctatcatcagttcgctcaccgattgacaactggctatggtgaacgttcttcgggcgtataatgcacgttgttttatgcgtgctgtggacgcacacaagatccgagcctttagtagcattcctgaagcgtacgttgaacc

SEQ ID NO: 35228 - DNA, 243 bp, Glycine max
gggatgttgatcgagataactagaaacagtgtgatgcaaatgaaggtccgtgttttcctcgtttcgattcgtctggggacatggcaatcccatgcctacgatatgttccctctcctcaggaacactgcctctgctgcccgtcctccaaaggtgacgttgccaccttgggtgcttgctgtggcagcatacaacatctttaactttgacatcattcctgacgactttattcccgcttcaatggaa

SEQ ID NO: 35229 - DNA, 325 bp, Glycine max
ggaatccaataaagcaaaaactaatccgaatccggtcctcggaatccggcaatggaacttccttcaacggaacttcaggcgcacccgttttcggttccgattgcattgaatcaaatctgagaaccattctcattgcccgtctgtaatcatgtcaggaaagtatatcatttctgctattcttggatcatttggagttgcatgggtttgtgattattatgtttcagagaaaaagctatttggaggttctacccctggcactattacgaacaatgagtgggcagaagagactgacaaaaaattgcaggcatggcctcgtactgccggt

SEQ ID NO: 35230 - DNA, 358 bp, Glycine max
aaaagacgacaagaagggggaaaagttaatttggtgattcaaaatactaagaacaattttgtgaaaattaaaggccctggtttcctccgtggcaaaaattttggaaccatggcattgcaatgcttacaaaagtttccctctccgaatgaacactggctatggtgcccgtactcgggaggtgaaatgcgcaatttggacgcttgctgtggaagcacacaacatctttggctttgagaccattcctgaagagtgcgttgaagcaacagaggaatacatccatggcgaacaatatagatcagactccagaacagttaagcaacaagcttacttttatgccagagacctcgaaatccatccc

SEQ ID NO: 35231 - DNA, 339 bp, Glycine max
cagaaggggagcaacttaggcaatggaaaaggaaaaccctaggaaatgagaagaattctaacctggttccgccccttcttcctccttggtgccttaacctcaaatcaaccttcagcaacggcggatgatgatcaggtgtagaacattgacgggaataagcttcaatacggtgtcaattatttcgtgtggccattgataagaggaaatggcggtggattacagttagcaaaagcaggaaacgaaacttgccctctgactgtggtgcaatctggcaacaagctctctgaggggttaccgataaagattgcatcccgataagcaagagtcgctttcatcacc

SEQ ID NO: 35232 - DNA, 343 bp, Glycine max
ggcacaagtttgttgagatagctagaagcaataagatgaaaatgaaagtgcttgttttgtttgttgctacagttttggtagcatatgaatgccatggctcagactaccagaagttccctctccaaatgaaaactgggtttggttggccataccaccatgaagttgccagttcccattggaagcctggccttgaaaccaacaacgtattccagtgtgcaaactgttcctgcaacctgccggagagtacatagctgactacgttctaggagaccaatatagatcagattccagaacagttaaccaacaagcttatttctatgctaaatccctcaaactcaccaac

SEQ ID NO: 35233 - DNA, 361 bp, Glycine max
gcgtcagtacagctgcaaaaagaggggaaaagggggcacttgcagttgcaatcaaattagatcaatcgcgttgcgcagttccgtacctctcctctcaggatgcagatcttcggcaagaccctcaccgcgaaagaccatcacccgtgaggtggcaagctctgacacgatcgacgacgtcagtgccaagatgcaggacaaggaaggaattccgccggatgagcaacgtcacatcatcgccggaacgcagctcaaggacggccgtagcctcgccgactacaacgtccagaacgagtcagcccttcaccttgtccatcgtctccgtggtggcatgcagatcttcgtcaagactctcaatggcaaa

SEQ ID NO: 35234 - DNA, 326 bp, Glycine max
agggggacaagttaatttggtgattgaaattactaaaaacaatgtgatgaaaatgaaaggccctggtttcctccgtgccaaaaatttgggaacaatggaaagccatgcgtaagataagtcccctctccgaatgaacactggctatggtgcccgtactccggaggtgaaatgcgcaagttggaggcttgctgtggaagcacacaacatctttggctttgagaccattcctgaagagtgcgttgaagcaacaaaggaatacatccatggcgaacaatatagatcagactccaaaacagttaaccaacaagcttacttttatgccagag

SEQ ID NO: 35235 - DNA, 310 bp, Glycine max
aggggaccaattgaaccagtatacccaaggccctatacaaccatgccctaaaacacacccatttgattcacttccaagggctagcctcaaggttacatttttggcagcagtgctctgcatggttgtggtgagtgcacccatggcacatgcacctatcacgtgcgggcaggtgaccaatatcctgatcaattgcatcagttacctccataacggaggaacacagccgtcgggatgctgcaactgagtgaacagcctcaatgccgccgccaagaacaccaccgatcgccagacggcgtgcaactgcctcaag

SEQ ID NO: 35236 - DNA, 263 bp, Glycine max
aaaacccgacaaaggggggcaaatttttgttgaaatacctaaacccaataatttgaaagtgaaattgctggtttgtgtttgtcgcaacattcctggaaccaaagggttgccatggtcaaacaaacaagaagttcctcctccaaatgaaacacgggtttggtgggcattacaccattaaggtggaatttgccatttggaggcttggcttggaagcaaccaacgtattcaattggcaaactgttcctgaaccttgcggaaattac

SEQ ID NO: 35237 - DNA, 359 bp, Glycine max
aaaagacgaccagaagggggaaaaatttggttgaaataccaagaaccattaggatgaaattgaaagtgcttgttttgttggttgcaacagttttggtaccatatgaatgccatggttcagactaccagaagttccctctccaaatgaaaactgggtttggtgggcaatacagcaatgaggtggcatgtgccatttggaggcttggcttggaagcaaacaacgtagtcaattggcaaactgttcctgcagcttgcggaaattacatagctgactactttctaggagaccaatatagatcagattccaaaacagttaaccaacaagcttatttctatgctaaatccctcaaactcaacaac

SEQ ID NO: 35238 - DNA, 313 bp, Glycine max
ggcacaagtttgttgcgatatctagaagcactaagatgcacatgacagtgcttgttttgtttgttgctacagttttggtagcatacgaatgccatggctcagactaccagaagttccctctccacatgaaaactgggtttggtgggcaatacagcaatgaggtggcatgtgccagttggaggcttggcgtggaatcaaacaacgtactcaagtggcaaactgttcctgcagcttgcggagagtacatagctgactacgttcgaagagaccaatatagattagattccaaagcagttaactaacaagcttattt

SEQ ID NO: 35239 - DNA, 355 bp, Glycine max
agggaatgcacaagtgaatttggtgattgagataactagaaacaatgtgatgaaaatgaaaggccctggtttcctccgtgccaaaaattttggaacctgggaatggcaagccgtacgataggtttcctctccgaatgaacaccggctatggtgcccgtactcccggaggtgaaatgcgcaagttggaggcttgctgtggaagcacacaacatctttggctttgagaccattcctgaagagtgcgttgaagcaacaaaggaatacatccatggcgaacaatatagattagactccaaaacagttaaccaacaagcttacttttatgccagagacctcgaagttcacccaaggacac

SEQ ID NO: 35240 - DNA, 396 bp, Glycine max
ggcacaagtgagtttgatgatcgagatatctacagacagtgtgatgaaaatgaaggtcgttgtattcttcgttgctacacttttggtagcatggcaatgccacgcgtacgatatgttacctctccgaacgaacaatgactatggtgcccatactctggaagtgaaatgcacacgttggaggcatgctgtggaagcacacagtatctatggctttgagaccattcatgaatagtgcgttgacgcaccaagggaatacatcgatggcgatcagtatacatcagactctaaatcagtgaaacaacaagcttacttttatgacaaagacctcgacatctatcacaacgacacatttgtgttcagtatataccggaacgtaccctctataatccaatacta

SEQ ID NO: 35241 - DNA, 317 bp, Glycine max
ggcacttcaagtgcaatcaaattagttcaatcgctttgcgcagttccgtacctcgcctttcaagatgcaaatcttctggaagaatcgcaccggcaagagtatcacacttgcggtcgcaagctctgacacgagtcgagagtgtcagtgctccgatggagaacagcgcaggttttccgcctgctgaggaacgtcacatcatcgctggaaaccagcacaatgactgacgtatgcgctcagacaacaacagccaacatcgatggcgactacaacttgtcagacgccaccgtagttgcacgcaaatcttagttttaagccac

SEQ ID NO: 35242 - DNA, 406 bp, Glycine max
  unsure (1)..(406): unsure at all n locations
ggagcaagagtgaagagcgaagagaatggctcccaagggtttaatctttttggctgtgttatgcttctcagcactgtcactgagtcgttgtcttgcggaggataatggacttgttatgaacttctacaaggaatcatgccctcaggctgaagacatcatcaaagaacaagtcaagcttctctacaagcgccacaagaacactgctttctcctggctcagaaacatcttccatgactgtgctgttcagagttgtgatgcttcactgttgctggactccacaagaaggagcttgtctgagaaggaaacagatagaagctttgggttgagaaatttcaggtacattgagaacatcaaagaagctttgggaangggaatgcccaaggagttgtttcctgtgctgatatcc

SEQ ID NO: 35243 - DNA, 320 bp, Glycine max
gagaaacatcaagagtctattttatggtacccctacattttggaaacattccatggaaccctgatttggttatggggattggcaactagtcgatgtcacagatgtaccacacgacgggcatctgtgccatcaaagccataaacagtcgagttttgccccgccacgatcccaagcccatgcccaaagccccagtccagatcctgcccatgttctaccctgccgtcgatgttaacaagcccctcgtcaacaagcacgttcccaaactcgcgaaactcacggttagcattactccagggactgtgttgatcctgcttgctggg

SEQ ID NO: 35244 - DNA, 368 bp, Glycine max
  unsure (1)..(368): unsure at all n locations
gacccacgcgtcagggggatttttgactttcaagtttcaatagtctcccactcttcttcgagcgggaactcaacattttcctttcctctctctgcatgtctctgcaattctagggtttcaatttcgctctccccttcgaaattcgcagttgtgtaaccgacgccatgagtctgcgccacggctccaaggtttggcttgaggaccgcgattcggcttggctcgccgccgaagtgctcgattccgacggtaaccgcctcttgctcgtcaccgattccggcaagaaagtttatgcttcgccggagaagctgcttccganggatgcggatgaagaggagcatggaggattcgaagatatgacgaagctggcg

SEQ ID NO: 35245 - DNA, 348 bp, Glycine max
gacccacacgtaagacggctgctatgatatgaaaaaaagtacagaaggggacatatcgtttgttctaagcttatcccaatttccgctatgcatgctgttcctcaacttcgagcaacacttttctctaaagtcaggggcacggtcaagtttggaatcagcggatttgtttcaattgggcttttgggtgcaagattcgctctgcaaagtaacgatgtgtaactccttgccgtttagaatcctttcgatactaccgattacacgacacaaatttttaaatacgagattgtgcacggccagtgaaaccatttcaatgtaatcgttaaggacaagattacccttctcttcagt

SEQ ID NO: 35246 - DNA, 251 bp, Glycine max
ggcacaagtgagtttgttgatcgagatgattaaaaacagtgtgatgaatatgaatgtccttgatcacttcgatcgcaatcattctggtaccatggaaatgcaaagcataggacatgttaccactctcaacgaagactcattatcgcacgcgtaatacgtgatgtcaaatgcacatcttcgacgctacatgtgcaagcacaacacagctttcgccttgagcaggatcatcaaccatgagtgtactgttcaga

SEQ ID NO: 35247 - DNA, 305 bp, Glycine max
gcaaagttaattggatattgaaaaaactagaaacaattttatgaaaaattaagtccgtgatttcctcgtgctaaatctttgagcatggaaatgcatgccttcgaaatgtttcctctccgaatgaacactggctatggtgcccgtacactggaggtgaaatgcgcaatttggaagcttgctgtggaagcacacaacatctttggctttgagaccattcctgaatagtgcattgaaccaacaaaggaatacatccatggataacagtatagattagactccaaaacagtttaccaacaagcttactt

SEQ ID NO: 35248 - DNA, 260 bp, Glycine max
ggcacaagtgagtttgttgatcgagataactagaaacagtgtgatgaaaatgaatgtccttgttgtcatcgttgctataattttggtagcatggcaatgccatgcagtaggatatgtttactctccgaattaacactggcaattgtgcccgtattcctgatgtcaattgcaccttttggaagcattaatgtggaagcacacattatctgctgtctatgaaaacattcctcaacactgcctataaggctcaaccgaataca

SEQ ID NO: 35249 - DNA, 334 bp, Glycine max
ggagcaataccctaaaccctattgttcttcctcagtagtgtcatctacgcatctcttcactgcaccatctatgccgaaccctaaggtcttcttcgagatgatgatcgggggtcaatctgctggccgcatcgtgaaggagctctacggctacgtcactccccgcaccgcagagaacttccgcacgctttgcaccggcaagatcggcgtaaggcggagcagcaatcccctcgactacaatggctcgtgcatcgaccgcgtgatcccgagtttcatgtgtcaggttggcgacttcaacgtcagtaacgggatcggaggcgagtcgaattaaggcgcc

SEQ ID NO: 35250 - DNA, 408 bp, Glycine max
  unsure (1)..(408): unsure at all n locations
gaacgatcataaggcaaaaatctaaagagctacgatgacgcgagcaagcggcgaagattcctgagaagagtgggatttgcttgagtcattctcttcccttctagctacgtaacgactaacgacgcactctactctttcttagggtttcctctcccgccaattttccctttccccaattcaattccaaccctaacctcactccactctcgccggaaccgcaccttcgattcgacctagggtttcacgaacttcacgatgccgtcgctactctccccgggcaaaatccactgcctcgaggtggagaatttcaagtcctacaagggcttccgagtgatcggtcncttctacgacttcaccgccatcatcggccccaacggcgccggcaagtccaatctcatggacgccatc

SEQ ID NO: 35251 - DNA, 333 bp, Glycine max
cccagccttaagacggatgcaagaggacgacgtaagggggtcgaaccgcgatcacgcgccctagaacccgagctcgcgtgcagcttccgtctcctacaccaggatggagtctcaggtgaatcacgcacttcttgtcaaagttatgggtcgtactggatctagaggagaagtacgccaggtgcgagtcaagtctctggatcatcagtaccgtcacatcaccaggactgtgaactgacctgtgcgatgaggagacattctcagccaactcaagtcagtaagggaatcacgaggattgcactcaatcgcatcttttggcttgcctccaagatcgac

SEQ ID NO: 35252 - DNA, 369 bp, Glycine max
ccggctcgacccaagcgtcagtccagccgtcagtacagcagcgaaagggacaccgcaggtgaaaacctcaatatcctaaatcggatgaagacaaaacctacattttccggccttaccgtacactagattcacacggatgaatgtaggtcgcatcaagttcagactcagtcacgtccaattcaacaggtgctccagctgtggcattagcagttccactgacatagtcatcaaggcgttccaggatgagtacattgttaatcaggctccagtcggagatgtgcaggcaccttgtgtcaatcaacactatactcatcgcaaacgctcagtacatatgcaatcctgtgtttcttgtactaacgacgctcatgt

SEQ ID NO: 35253 - DNA, 425 bp, Glycine max
ccggctcgacccaagcgtaagaagacgacagaaggggagtacagaagacgcagttctcaccatttccctctcgattgtgagacttgatgttgttaactgaacttttctgagcaagaatgtctgggcgtggaaagggaggcaagggtttgggaaagggaggagcgacacgacaccgtaaggtgctgcgcgataacattcacggaatcaccaagcccgcgattcggcgtttggctcgtatgggtggcgtgaagcgtatcagtggtctcatctacgaagagacacgtggcgtgctcaagatgacagaagggggtgcacaagtgagtttgttgatcgagatatctagaaccagtgtgatgaacatgaacgtccctgttatcttcgttgctacaaatttggtagcatggcaatgacatgcgtacgatatg

SEQ ID NO: 35254 - DNA, 296 bp, Glycine max
agggaaagtgcaggaggtagatgagagcaatcatcgaattaaacgtgaggagaatatgaagttgtctgttctcattgttgccgcatcacttatggtaccaaggtcatgtcatcgttcatgctatcattcgcttcctcgctgatcgataatcggctatggtgatcgtacatcggatgtcaaatgagatcgtttaaggcttgatgtaggttcacacaacatgcgagcatttataatgattcctgaacagtacgtagactgatcagcagactacattattggcgaacattttagatcag

SEQ ID NO: 35255 - DNA, 370 bp, Glycine max
gggttgaaaagcatgatgtaatggaggcatttcggcttttggaagttgcaatgcagcagtctgcaacggatcattctactggaactattgacatggatcttattactactggagtttcggcaagtgaaagaatgaggcgagaaagtctgcaacaagcaactcgtaacataatcatggagaaaatgcagattgggggaccatctatgcgcttattggagttattggaagaattgaagaaacaggatactggtagcgaagttcatcttaatgatctaaggaatgcaattgctactctggctacagaaggatttgttaccatgcacggtgacattgtaaaaagatcttgatggcacgagacagtagtgacatc

SEQ ID NO: 35256 - DNA, 386 bp, Glycine max
gaaggtgcaaaagtttgttgtgagctataacctactttatcgtgaggagaatatgaagttgtttgttttctttgttgctgcagtagttttggtaccatggccatgccatggcgcatgctaccaaaggttccctctccgaatgaaaactggctatggtgagcgttcttcggacgtaaaatgcgcaagttttatgcttgctgtggaagcacacaacatccgagcctttataaccattcctgaagagtgcgttgaaccaacacaggactacattaatggcgatcaatttagattagactctaaaacagttaaccaacaagctttcttttatgctagtgaacgcgatgtccatcacaacgacatatttatattcagcatatataacaccg

SEQ ID NO: 35257 - DNA, 392 bp, Glycine max
gcacaactgagtttgatgatcgagatatctatgagcagtgtgatgaaaatgaaagtccttggattcttcgtgtgctacaactttggtagcattgcaatgccatgcgtacgatatgttccctctccgaatgaacactggctatggatcccgtactccggacgtgaaatgcgcatgttggacgcatgctgtgggatcacacaacatctttggctttgagatcattcttgaacagttcgttgaagctgcattggaatacatccatggcgaacactatagatcagactccaatacagttcaccaacaggcttacttttatgccacatacctcgaagtcgatcccaaggacacatttgtgttcagtatatatggcaccgtactcgctaatattccat

SEQ ID NO: 35258 - DNA, 396 bp, Glycine max
  unsure (1)..(396): unsure at all n locations
gaaagggcaagaatttggtgtgagctaaaaaccaatttaacctgaagggaataagaagttggttggtttccttggtgccggaataattttgggaacaagggcaagccaaggggcaaggtaacaaaaggtccctccccgaatgaaaactgggtatggggagccttcttcggaagtaaaatgcccaagtttttaagcttgctgtggaagcacacaacatccgagccctttaaaaccattcctgaagagtgcgttgaaccaacanaggactacattaatggcgaacaatttagatcagactctaaaacagttaaccaacaagctttcttttatgctagtgaacgcgaagtccatcacaacgacatatttatattcggcatagataacaccgtactctct

SEQ ID NO: 35259 - DNA, 410 bp, Glycine max
cgatacaaggggacagtgcaagagtttgttgtgagctataatctagtttatcgtgaggagaatatgaagttgtttgttttctttgttgctgcagtagttttggtatcatggtcatgccatggcgcatgctaccaaaggttccctctccgcatgacaactggctatggtgagcgttcttcggatgtaacatgcgcatgttttacgcgtgctgtggaaccacacaacatccgagcctttagaaccattcctgaaaagtgcgttgaaccaccaacggactaaattcatggtgaacaatttagatcagactctacaacagttaagcaacaagctttcttttatgctagtgaacgcgaagtccatcacaacgacatatttatattctgcatagataacaccgtactctctaatat

SEQ ID NO: 35260 - DNA, 372 bp, Glycine max
aggggcacaagttagtttggtgatccagataacaaaaaaatgtatgaaataaggcctgtttctcctgcaaaatttggacaagaatgcaagctaagaaagttcctccccaatgacacggctaggggccgtacccggaagtaaaatgccaattggaaggctgctgtggaagcacacaacatctttgggctttgaaacattcctgaagagtgcgttgaagcaacaaaggaatacatccatggcgaacaatatagatcagactccaaaacagttaaccaacaagcttacttttatgccagagacctcgaagtccatcccaaggacacattttgtgtcagtatagatggcaccgtactctctaatattccatactac

SEQ ID NO: 35261 - DNA, 352 bp, Glycine max
ggcacacgtgagtttgttgatcgagataacgagaaacagtgtgatgaaaatgaaggtccttgttttcgtccttgctggaagtttggtagcatggcaatgcgatgcgtacgatgtgttccctctccgaatgaacactggctatggtgcccgtactccggaggtgaaatgcgcaagttggaggcctgctgtggaagcacacaacatcgttgggtttgaaaccattcctgaaaagtttcttgaaacatccgcatgaatacatccatggggaacaatatggatcacactctaggtcagtttaccaacaagcttacctttaagccagagaccgtcgaaatccatcccaagggcccat

SEQ ID NO: 35262 - DNA, 382 bp, Glycine max
  unsure (1)..(382): unsure at all n locations
ggttcaaaaggatttgtgtgttctgtggcagcagccctgggaacaagagtagctataaggacgctgctattgagcttgggaaagagttggtgtcaagaaatattgatctggtttatggaggaggaagcattggtttgatggggttggtttcccaggctgtttatgaaggaggtcgccatgtaattggagttattcccaagacactgatgccaagagagattactggagagacagtgggggaagtgatggcagtagcagacatgcatcagagaaaagcagagatggctaagcactctgatgcctttattgccttgcccggtggctatgggactcttgaggagcttctanaggtgataacttgggctcagcttgggatccatga

SEQ ID NO: 35263 - DNA, 454 bp, Glycine max
  unsure (1)..(454): unsure at all n locations
gtacggtctagnataccgggtccaaccaagcctccattcgggtggcaaaagaccacaaaaagggggaaaagtttggttagaaaaccaaaaacaattagaagaaaattaaagtgcctggtttgtttgttgctacagttttgggagcatatgaatggcatggctcagactaccagaagttccctctccaaatgaaaactgggtttggtgggcaatacagcaatgaagtggcatgtgccagttggaggcttggcgtggaagcaaacaacgtaatcaagtggcaaactgttcctgcagcttgccgagagtacatagctgactacgttctaagagaccaatataaatcaaattcaaacagttaacaacaggcttatttctatgctaaatcgctcaaactcaccaacaaagatgtctttggcctggacgttgacgacactactctctctaatctccagta

SEQ ID NO: 35264 - DNA, 349 bp, Glycine max
ggcacaagtgagtttgttgttcaaaatacctagaaccattttgataaaattaaaggccctggtttcctccgtgccaaaaattttggaacaatggaatgccaatccttagataagttcccctcccgaatgaacactggctaaggtgcccgtactcccgaggtgaaatgcccaaattggaggcgtgctgtggaagcacacaacatctttggctttgagaccattcccgaaaagtgcgttgaagcaacaaaggaatacatccatggggaacaatatagattagactccaaaacaatttaccaacaagcttaattttatgccagagacctcgaagtccatcccaaggacacat

SEQ ID NO: 35265 - DNA, 379 bp, Glycine max
ggcacaagtttgttgagatagctagaagcaataagatgaaaatgaaagtgcttgttttgtttgttgctacagttttggtagcatatgaatgccatggctcagactaccagaagttccctctccaaatgaaaactgggtttggtgggcaatacagcaatgacgtggcatgtgccagttggaggcttggcgtggaaacaaacaacgtactcaagtggcaaactgttcctgcagcctgcggagagtacatagctgactacgttctatgagaccaatatagatcagattccaaaacagttaaccaacaagcttatttctatgctaaatccctcaaactcaccaacatagatgtctttgtcctggacgttgacgacactactct

SEQ ID NO: 35266 - DNA, 240 bp, Glycine max
ggtatagatctcggtagcaaacgcaacagtgggagatataaaggtagatagattgagagagagagaaagattcggaaccatcgctatcgcacgctttccattgatgcttccgacgcttgctttgtctgcatcgtccttctttccttcatgcgttctctgtgtgtcgtaagggtgctctcaaactcttcatcatgtctgaactcgctgatactctcgatcagtgagtcgtcttcctccaag

SEQ ID NO: 35267 - DNA, 278 bp, Glycine max
ttacagaaggatacagctgggagaagagataaattgggaaagtgcaatagtttgttgtaatctataagctattttagcctgtggagactacgaagctgtatgttttctatgatgctgcagtaattctgtgaacatgtgcattctatggctcacgatagcatatgttccctctccgcatgaagtctggttatcatgatcgttgttcgcaggtaaaatgcacaagttctatgcttgctgtacaatcccagaacattggatcctttaaagccattcctgaa

SEQ ID NO: 35268 - DNA, 337 bp, Glycine max
gatcgaagcaaaaaatgaaaacccaaagtgcttctctcctctgtctttttctctctcttgctatccttttggctagtggcactgctgcaagtgcaactccaagaagcgcagtgccaagccaccatgtttcaacattcaacagaagcctttttccttccacttttctctttggaattggttcttctgcttaccaggcagaaggagcagcaagtgtaggtgggagaggaccaagcatatgggacaccgacactagacagcatactgaaaagatttgggatcatagcaccggtgacatgggaactgatttttatcatcgagacaaaggttacattaaaat

SEQ ID NO: 35269 - DNA, 291 bp, Glycine max
cggtcaggcattcccgggccgacacacgcgtcaaatgcccaatgaacctgatctggaatttggtattccttctaagtacagctacatgacggtatgtgccccttcatgtcatgactgttccaccttgcgtgcttggtgggaagaagatgaataaaaaagactcaggtttttcaaaattgtaatggattccgataatttgccgcccgattcaatgtgttcaaaaatttgtacatttgttccaagacaacattttgaagccccaacaatgttggcaatcctccctcctcaaga

SEQ ID NO: 35270 - DNA, 315 bp, Glycine max
gactcaccacttcaaaacactcataacacaaagcacaaagcagagctcatccttgagttgaaaaatggcagcagcttcttcgatggctctctcatcgccatccttggctggcaaggccgtgaagctgggcccatcagccccagaagtgggaagggtgagcatgaggaagaccgtcaccaagcaggtctcctcaggaagcccatggtactgcccagaccgagtcaagtacttgggcccattctctggcgagcccccgtcctacctaaccggtgagttcccaggcgactaccgctgggacactgctgggctttccgc

SEQ ID NO: 35271 - DNA, 214 bp, Glycine max
  unsure (1)..(214): unsure at all n locations
ggcacaagtgagtttggtgatgnagagagctagaaacagtgtgctgaaaatgaaggtccgtgttttcttcgttgctacaattttggtagcaggggaaggccatgcgtacgatgtgtgccctctccgaatgagcactgggtatggtgcccgtactccgggtgtgaaatgcgcaagttgggggcttgctgtggaagcacacaacatctttggcttt

SEQ ID NO: 35272 - DNA, 309 bp, Glycine max
ggttcactttcttccaacctctaacctacctctttttcttctctctcaacaacttcaacttcttcctcctcgattaagttccaatttaaaggcaaattacaagattaacctaaccgcaaaaccgccttcaattggaatccctgaaaagggtattcttcctgccgataattcaacagggacaattggcaaccttttggccagcatcattgtaaaaacaattgaatccaacaggcaagctcttagggagctgcttttcattgctcctgatgttcttcaatatctcattggtgtcatcctctttaaggaaac

SEQ ID NO: 35273 - DNA, 374 bp, Glycine max
ggaaacagagagtgatttcagtgagtgatcggtgttcacttgatctcatcataatcgtcagcgtcaattgaagaagatgccgatcagaaacatcgccgtcggaaggcctgaagaggcgactcaccccgacacgttgaaggcggctttggctgagttcatctcaaccttcatcttcgtgttcgccggctcaggctccggcatcgcctacaacaagctcaccgacaacggcgctgccacccctgccggcctcatctccgcctccatcgcccatgcattcgccctcttcgtcgccgtctccgtcggcgccaacatctccggcggccacgtcaaccccgccgtcaacctcggcgccttcgtcggcggcaacatcacct

SEQ ID NO: 35274 - DNA, 364 bp, Glycine max
ggtgcacacgtgagtttgttgatcgagataactagaaatagtgtgatgaaattgaacgtccttgtgttcttcgttgctacaattttggtatcatggcgatgccatgcatacgatatgttccctctccgaatgaagactggctatggtgcccgtactccggaggtgaaatgcgcaagttggaggcttgctgtggaatcagacaacatctttggctttgagaccattcctgaagagtgcgttgaagcagcaaatgaatacatccatggcggaataatatggatcagactcgacaacagttaacctgcatgcttacttttaggccagagacctcgaagtccatcccaacgacacatttgtgttcagt

SEQ ID NO: 35275 - DNA, 351 bp, Glycine max
aaaggggggaattggcctagtcaaccggcaccgccagcaagggaacatgggggtctttgagccacgggttgacgcacaagatcgtcctctcctacagctaactgggcatatggattttcttgagcttcaacgtcatcgtctacaaaacgtagatcctgaatcagaagatgtacaactgtgccatccccaaccccctcacaatgatcgacatgttcttctgggccaacctcgccatcctcctcgtctgtatcctccgcaacgtcgagcccgtctccatgtcccgccatgtctacctctcctccgtcgtccccatcggtgctctctaatccctctccgtctggctctccaact

SEQ ID NO: 35276 - DNA, 395 bp, Glycine max
cggcacaagtttgttgagatagctagaagcaataagatgaaaatgaaagtgcttggtttgtttgttgctacagttttggtagcatatgaatgccatggctcagactaccagaagttccctctccaaatgaaaactgggtttggtgggcaatacagcaatgaggtggcatgtgccagttggaggcttggcgtggaagcaaacaacgtagtcaagtggcaaactgttcctgcagcttgcggagagtacatagctgactacgttctaggaaaacaatatagatcagattcgaaaacagttaaccaacaagcctatttctatgccaaatccctcagactcaccaacaaagatgtccttgtcctggacgttgacgacactactctctctaatctccagta

SEQ ID NO: 35277 - DNA, 319 bp, Glycine max
gatatcacaaaaaactattttggcttctgcctttccttttccagtgagctcattgacaatggctgaaacatagtgggtcatgaaggacaattgatggtctctccatggaataatagcccaattaaaaggaggaaccgaaggataagggaaggcaatggtgaagcgttaactgagtttagcgcaactgttcatagatgtgcacgttatcaagatgatattgataaatgtttagaagagtggaaaaatcagggacttaatgtgactggttcaatatgtgatttactatgttctgaccaacgtataagattaatggaaattg

SEQ ID NO: 35278 - DNA, 339 bp, Glycine max
atggcacttgtattgttgaacaaaggtttctccgtctgcttcgtcactttccctcgtttcaatcgaaaccaaaactaatcacatggacactaaattcctcgtcagtggcaactggaaatgcagtgggaccactgaggatgatttgaagattgttactaatttgactgaggctaaagtccctgtacgaatatgtcgtagcaaattgtgttgatgcccacctttcgtgttccttcctgttgtaaacagtttacagcgccctgatttccatgtttcaggacagcactgttcggttcgaaaaagtcgtgcttacaccggtgatgttattgctgatctgcatgt

SEQ ID NO: 35279 - DNA, 347 bp, Glycine max
aaatgggttaaaaagggcaatgcaccggaactgcccgagactcgtaataattacaacacgctggtgtctcttggattcaagattatagtcttgtcacgaagaacactggacaaacaggccgtaacagaaccaaccttaacaaaggttgctaacaaacattggaaaaattaaatctcaatgatccacacgatccttccactccaaatgcagtttcatacaagacagcatcgagagagacactgataaagcacggatacaacattcatgggatcactgttgaacaatggagcgatatcctcggaggccacagattgaaatgcatgacctttaaacttcataatcccctg

SEQ ID NO: 35280 - DNA, 307 bp, Glycine max
ggatccacagatttcgcgaatactgcaaaaatagcacgcgctggtatcacctttcgccaaaccagctattccaatcctcccaatttccacaatcttcaatcttcacactctgcttcacctttcttcatttcacttcagagagagagaacaatacacaatgggcgtcgtggtgatcgacggcagcagcgtgcgcgacttcgtgaaggacgaaaccggcttcaacaacagcgtggacgatcagttctcggcgctggatctcaacaactaccgcgtcctctcgcgctcggagctcccgcacggccttcga

SEQ ID NO: 35281 - DNA, 169 bp, Glycine max
ataattataaccattgtgatgaccgtgtaggtccttgttgtctacgttgcacacaagggtggtaccactccactggcatgcctaccatatgttccctctccgaatgaacactgtctagtggtgcccgtactccggaagtgatatgctcaagttggaggcttgctgtgga

SEQ ID NO: 35282 - DNA, 381 bp, Glycine max
ggcacacgtgagtttgttgatcgagataactaaaaccagtgtgatgaaaatgtaggtccttgttttcttcgttgctacaattttggtagcatggcaatgccattcgtacgatatgttccctctcctaatgaacactggctagtggttcccgtactccggaggtgaaatgcgcaagttggaggcttgctgtggaagcatacaacatctttggctttgagaccattcctgaagaatgcgtttaaccaccacacgaatacatccatggcgaacaatatagattagactccaaaccatttaaccagcaggcttacttttatgccatagacctctaagtccagcccatggacacatttgtgttcactatacatggcaacgtactct

SEQ ID NO: 35283 - DNA, 383 bp, Glycine max
ggcacaagtgagtttgttgatcgagataactagaaacagtgtgatgaaaatgaaggtccttgttttcttcgttgctacaattttggtagcatggcaatgccatgcgtacgatatgttccctctccgaatgaacactggctatggtgcccgtactccggaggtgaaatgcgcaagttggaggcttgctgtggaagcacacattatctttggctttgagaccattcctgaagagtgcgttgaagcaacaaaggaaaagatccatggccaacgctacatatgagattccagatgaatggcacctaatgttttaccttttgctgcatacgacgagtctacatacgtgtggagcagttggtgcaaaactatacgaataatagggattt

SEQ ID NO: 35284 - DNA, 392 bp, Glycine max
  unsure (1)..(392): unsure at all n locations
ggcacaagtgagtttgttgatcgagataactagaaacagtgtgatgaaaatgaaaggccttggtttcctccgtgccacaattttgggagcaaggcaatgccaagcgtacgaaaagttccctccccgaatgaacaacggctaagggggccgtactccggaaggtgaaagcccaaattgggaggcttgctgtggaagcacacaacatctttggctttgagaacattcctgaagagtgcgttgaagcaacanaggaatacatccatggcgaacaatatagatcagactccaaaacagttaaccaacaagcttacttttatgccagagacctcgaagtccatcccaaggacacatttgtgttcagtatagatggcaccgtactctctaatattcca

SEQ ID NO: 35285 - DNA, 242 bp, Glycine max
aatacaggtgtgagacagctgcagaaaggggaacaagtgaggatgttgatctatgttgctataaacagtgtcatgaaaatgaaagtcattgtgctcgtcgtgtgctacagctttggtatcatgagcatgccattcgtacgattcattccctcatccgaatgaccaccggccttggtgctcgtattccggaggtgaaatgcactaattggcagcttgcagttgaagcgcatagcatctttgga

SEQ ID NO: 35286 - DNA, 224 bp, Glycine max
gaaggtgcaaaagtttgttgtgagctataagctagtttatcgtgaggagaatatgaagttgtttgttttctttgttgctgcagtagttttggtagcatggccatgccatggcgcaggctaccaaaggttccctctccgaatgaaaactggctaaggtgaacgttcttctgaggtaaaatgcgcaagttttaagcttgctgtggaaccacacaacatctgagcct

SEQ ID NO: 35287 - DNA, 385 bp, Glycine max
agggggcaaaattaattttgttgatcaaaatagcttcaaacatttgaatgaaaatcacggtcgttgttttcttcgttgctaaaattttggtaccatggcaatgccatgcgtacgatatgttcccccacgtaatgaacaatggcaatggtgcccgtactccggatgtgaaatgcgcaagttggacgcctgctgtggaagcacacaagatcattggctttgagaccattcctgaagagtgcgttgaagcatcaaacgaatacatccatggcgaacaatatagatcagactccagtacagttaaccaataagcttacttatatgccagagacctcgatgtccatcccaaggacacatgtgtgttcagtatacatggcatcgtactcac

SEQ ID NO: 35288 - DNA, 229 bp, Glycine max
agggaagtctcactaggacgagagtcatcatcaggggatgagaatgccgtgaacttgaaggtcatactgcagattgcaatcatcgtggacgtcaaatcctgagatctgataggctacagtctccttttgactacatagatgttgctaaggtggtgaaaccagggaattagaaactggttagaccatgtccgaagcgtgcttttaatgctagtgaaagtgcagcgacatt

SEQ ID NO: 35289 - DNA, 343 bp, Glycine max
cggggcacaagtttgttgagatagctagaagcaataggatgacaatgaaatgcttgttttgtttgttgctacagttttggtagcatatgaatgccatggctcagactaccagaagttccctctccaaatgaaaactgggtttggtgggcaatacagcaatgacgtggcatgtgccacttggaggcttggcgtggaagcaaacaacgtactcaagtggcaaactgttcctgcagcttgcggagagtacatagctgactacgttctacgagaccaatatagattagattccaaaacagttaaccaacaagcttatttctatgctaaatccctcaaactcaacaac

SEQ ID NO: 35290 - DNA, 269 bp, Glycine max
ggacacatcactctccttacactcacaacagagttcacacagcgcagctcatcctgtcgtcagaattcggcatcagcttcctccatggctctcgcaaccgcacccatggctggtatggtcgttaatctggtcccatcagccgcagaagtgagaatggtgaacatgatgaagactgtcatcaagcaggtctcctcagggaacccatggtacggcccagaccgattcgcctacgtgggcacattctctggttagctcccgtcctacctaac

SEQ ID NO: 35291 - DNA, 324 bp, Glycine max
ggggggagaagactagatgttaagaagttgatagtttgaagtgtcatgacggcttgtggcacaatttcgtcgctgctagttggaagagatcttcatgcacagattattagtagtaacatccataccatcatagttgtaagaagcacgttggtatggtactactgcagttgtgaagaatactccgatgccttcgtggtgctccaatagatgcctatcaaggatgttgtatcaaggactgccattaccgctggttgtaccatcctccggcatgatcatgatgctcaggagttgctgcaagaaatgatggaagaaggcgtgttgcct

SEQ ID NO: 35292 - DNA, 233 bp, Glycine max
agggacacaacttaatttgttgatccagattactaaaaacaatgtgatgaaaattaaaggccttgttttcctccatgccaaaaatttgggaacaatggaatgccaatcgtaacaaaagttcactcaccgaatgaacactggcttatgggcccgtattccggaagtgatatgcgcatctttgacgcttgctgtagaagcacacaagatctttggctttgagaccattcctgaag

SEQ ID NO: 35293 - DNA, 331 bp, Glycine max
gaaagtgcaagagtttgttgtgagctataagcaagtttatcgtgaggataataggaagttgtttgcttttctttgatgctgcagtaattatggtaacatggacatgccatggcgcacgctaccaaaagttccctctccgaatgaaaactggctatggtgagcgttcttcgcaggtaaaatgcgcacgttttacgcttgctgtggtatcacacatcatccgagcctttaaaactactcctgaacagtgcgttgatacatcaatggactacattaatggtgaacaatttagatcatactctaaaacacttaaccaacaagctttcatttatgc

SEQ ID NO: 35294 - DNA, 391 bp, Glycine max
  unsure (1)..(391): unsure at all n locations
ggcacaaattaatttggtgattgaaaaaactaaaaacaattttattaaaattaaaggccttggtttccttcgtggcaaaaattttggaagcaaggcaattgcaatgcgtaacatatgttccccctccaattgaacactggctatggtgccgtactcgggagtgaaatggcaagttggaggcttgctgtggaagcacacaacatctttggctttgagaccattcctgaagagtgcgttgaggcaacanatgaatacatccatggcgaacaatatagatcagactccaaaatagttaaccaacaagcttacttttatgccagagacctcgaagtccatcccaaggacacattttggttaagtatagatggcaccgtactctctaatattccat

SEQ ID NO: 35295 - DNA, 315 bp, Glycine max
agaacatatgagtttgatgatcagaatcattagcacaagtatgatgaactatgtctagaccataatggcctcttcagtgctggtatctgtggatctcaatcctgtccctttcactgttgcgaactcctcatttacaggccttaccgcgctcgtaaggaactcgtcttcagtcagagttgtgggcattggttgcaagaagatcacaactgataattcttaaggaattaatggtggtatggctttgcaggaaggagttgctgcaactggcaagaatagaaatgaaactggcgtttactagtttgtcaaccttaactg

SEQ ID NO: 35296 - DNA, 318 bp, Glycine max
gactcaacacttcaaaacactcataacacaaagcacaaagcaaagctcatccctgagttaaaaaatggcagcagcttcctcatggctctccacccgatccttgctggcaagccgtgaagctgggcccatcatccccacaagtgggaacggtgagcatgaggaagaccgtcaccaagcacgtctcctcaggaagcccatggtactggccataccgagtcaagtacttgggcccattctctggcgaacccccgtcctacctaaccggtgagttcccaggcgactacggctgggacactgctgggctttccgcagacccag

SEQ ID NO: 35297 - DNA, 351 bp, Glycine max
ccacgcgtaaagtaggctgcgagaacgacagaaaggggaatcgatttttttttccgttcagtttcgaagctacatttcggttcaatcacaaaatggctctatcgcgcgtggctcaatcgtcgccatcacagtcgaatcgtttgaaacccctctcgtcgtacttatccctacgacgccgttcggtgtcgacctcgtcagtgcgcctcaccgtggagacctcggtgcacttcacctcccacaactgcgatgcgcctccacgcgccgtggcgacgtcctcagcggaactcgtctcgttcttccgtgacatggcgctgatgcggcggatggagatcgcagaggactcgctctaca

SEQ ID NO: 35298 - DNA, 302 bp, Glycine max
gaaggtgcaagagtcagtttgttgttcgaagccaaaaccctagcagccggcgagaatggcagacgttgaggttgatgcggcggcagcggcaggggcagcgcagccgaagaagagaacgttcaagaaattcagcttcaggggcgtggatctggacgcgcttctggacatgtccaccaaatgcgcgagttttaggcttgctgtggaagcacacaacatccgagcctttaaaaccattcctgaagagtgcgttgaaccaacaaaggactacattaatggcgaacaatttaaattaaactccaaaa

SEQ ID NO: 35299 - DNA, 385 bp, Glycine max
aattccgggccgacccacgcgtcaggagaggaccacaaaaaggggagcgtgctctgagcaatcaataatcaagttacccacagaccaaccaagggtatagaaactgacccacttgcattttttctaccacgacatcttaaagggcaagaacatcacggtggtgaaaatcatcgagccatcagcgatcgacgttcgtgaagcaactgggtttggaaccactttcatgatggacaatgttctgaccgagggtccaaatctgatctcgaagcacgttgggagggctcacgggctgtttggcttggcctctttggaggaccgtggcatggtgatgctcactaacttggctttcagtgagggtgagtatgctggcatcactctcagcatg

SEQ ID NO: 35300 - DNA, 307 bp, Glycine max
aattctaggctcgaccgacgcgtcagtagcgaaaagacgacagaaggggggaatagttttttatctcacatccgtgctgtagatggcattttccatgttttacgtgcatttgaggatccggacattattcacgttgatgatactgttgacccagtcagggatttagaggtcattactgaagaattgcggctgaaggatattgaattcatggaaagaaagatagaagatattgagaaaagcatgaagaggagcaatgacaaacagttaaaaatcgagcttgaatgttgtcaaagggtgaaggcattgc

SEQ ID NO: 35301 - DNA, 283 bp, Glycine max
gaaggtgcaagagtttgttgtgagctataagctagtttatcgtgaggagaatatgaagttgtttgttttctttgttgctgcagtagttttggtagcatggccatgccatggcgcaggctaccaaaagtttcctccccgaattgaaactggctaaggttaaccttcctccgaaggtaaattccccagttttaaggcttgcgttggaaccaaacacaatccgaccctttaaaaccattcctgaaaattgcgttgaaccaacaaaggactacattaatgcgaacaa

SEQ ID NO: 35302 - DNA, 389 bp, Glycine max
tagccgtcaggaattcacggctcgacgcacgcgtcaggtttaattcaaagaatagattggatccaaccaaactgcactttttagttataactaagaaaatgtgcataatcccgcgaattacttctgaaaattacttctgaattaatgaaattttttcaataatttaagaaaaaatatttaagaactatagcatttcgcgatttattggtaatccactttgattctctattaaccaataattttggactattaccatggttaaagtgaatagtttgaagtctagacgcagtgtagtactctttctaccactatgttaatacagaaatgaaatggtttcgataaaattattagatttttttttcgatatagaacactcatgtcgataaaat

SEQ ID NO: 35303 - DNA, 336 bp, Glycine max
ggcacacgtttgttgagatagctagaagcaataagatgaaaatgaaagtgcttgttttgcctggtgctacacttttggtagcatatgaatgccatggctcagactaccataagttcgctctctaaatgaaaactgagtttggtgggcaatacagcactgaagtggcatgtgccagttggaggcttggcgtggaagcaaacaacgtactcaagtggcaaactgttcctgcagcttgcggagagtacatagctgactacgttctatgagaccaatatagattagattccaaaacagttaaccaacaagcttatttctatgctaaatccctcaaactca

SEQ ID NO: 35304 - DNA, 367 bp, Glycine max
gaaggtgcaagagtctgatgtgagctataagctaatttatcgtgaggagaatatgaacttgtttgttttctttgttgctgcaatagttttggtaccatggacatgccatggcgcaggctacgaaaggttccctctccgaatgaaaactggctatggtgagcgttcttcggaagtaaaatgcgcaagttttaggcttgctgtgtaagcacacagcatccgagcctttaaaaccattcctgaagagtgcgtatgaaccatcacaggactacattaatggcgaacaatttagatcagactctaaaacagttcaacaacgaactttcttttatgctaatgaacgccaattccatcacaacgacatatttat

SEQ ID NO: 35305 - DNA, 395 bp, Glycine max
tgaaactactcaactaattgaaatgttttgccaccaaactgaccgagagtatcgcataatgatggggactgatgttcgaatccaaagggatcctttagcaatgcgaatgagggaggatcagataaagcaaatatggggtggagatccagtttacccaactgtgaactatattcaagatccaaatgaagtgattgactacagggggccagattttcatgaaccaacaccaaatatggtgtcttatctgaaggagaaaggaaaacttatttcaagggaggaatttgacaagattatggccaaggaaaagactgaacaaattgagtcgacggagatggatgaagctatggccaaagctgttgacattggagaaaatgatgatgaagaggatagtgatg

SEQ ID NO: 35306 - DNA, 346 bp, Glycine max
  unsure (1)..(346): unsure at all n locations
aagacctcaacttcaacaactgatcaagataagggtggtgacaacaagagtaagaagaagtggaagctatggagggcttcttcagaagggtccatgaagaaagttggtggtggtggtggtggtgctgctgctgcatctgattcttcccttacttatgcggtggccgtgatggttcccaaagatttcaagctcatcaagcaggaatgggctgccattcgcattcaggctgtgtttcgagccttcttggctagacgagctttgagggctttgagggcagtggtaaggctacaagctatttttagaggccggctagtcangaagcaagcagctgttactctaagatgca

SEQ ID NO: 35307 - DNA, 329 bp, Glycine max
gatctggcagcagacaaacaagtagttgagaactaagaagaaggaaatggcttcctcaatgatctcctccccagctgttaccaccgtcaaccgtgccggtgccggcatggttgctccattcaccggcctcaaatccatggctggcttccccacgaggaagaccaacaatgacattacctccattgctagcaacggtggaagagtacaatgcatgcaggtgtggccaccacttggcaagaagaagttcgagactctttcctacttgccagacctcgatgatgcccaattgggaaatgaagtcgaataccttctaagggaaggatggattc

SEQ ID NO: 35308 - DNA, 343 bp, Glycine max
acgcgtccgccaacgcgtccggacgacagaagggggagttgagaggatcgtgagatgggcagtagccgagagtccgtgagttgcaaaaatgaagatcaggctttccaccgagaccatgaagatcacggacagcgtgagcatcaaagtccacgccaaggtcatccaagtttaaggccctcgcggaaggttggtgcgagacctcacgcatatgactcgcgattttcagcccatgactgacgagaaccgtactggaaagctgaacatccacgcgtggtttggttctcggaaagcattcaccgccattcgcagcgccttgagccatgtggatattcataccaccggc

SEQ ID NO: 35309 - DNA, 146 bp, Glycine max
gaattgcaatcaaattagttcatgctctttgcgcagttccctagctctccgtgcaagatgcagatcgtcgtcaagaccctcaccggaccgacgatcacgcttgaggtggacagctctgacaccatcgacaacgtcgcggccaagat

SEQ ID NO: 35310 - DNA, 400 bp, Glycine max
aacaacatagattaacgcaatagcaacatatcttccaaaagtccggcttcagcaacactaccttgacgcgactacgcgcagaaggcgaggaatctaaacgacgacgcaacgaaaccatggaaaaatctaagcgactctttatgaaatccaagcgatcttttcgtaggcgtttgcccccgatccaatcgggggaccgaattgattataaaaacatgggtttaattagtcgatttattagtgaacaaggaaaaatattatccagacgcgtaaatagattgaccttaaaacaacaacgattaataacaattgctataaaacaagctcgtattttatctttgttaccttttcttaataatgaaaaacaatttgaaaaaagcgagtcaaccgctagaactaatac

SEQ ID NO: 35311 - DNA, 417 bp, Glycine max
cacgcgtccgcacaggcgtcagaccgacactagaagacgacatacggagagatgctacatgaataaataacgtgatatcggtgaatcaagtatccttttgcatctgatctaagaatcaaaacgcaaagaccagattttgtcattacatgatcaacgttatagttcgtggaaatgacgatgatgacgcgtgattttggggatactatgcagaaagatgcaatgacggccgtgtcggctgataaaatatatgattctcttcggtttcctaattacaacatcagagttaacaatcagatcatggagacaaaggatagtccataagtgctatctatgaaggatgttgttgcgcgagagactgcacagctgttggaccagcagaaacgtctgtcagttcgcgattcttccagtaaaattgag

SEQ ID NO: 35312 - DNA, 264 bp, Glycine max
  unsure (1)..(264): unsure at all n locations
cccacgcgtccgcccacgcgtccgcccacgcgtccggcggaacganaccacaaacacggctacaccagattaacttctctgaagacatcgctgttaatgactcgtcggttttgtttgaggatggtcgtggtggtcacttcatctagtatctttaagttgtatgctacttgtaacacgatcttgtccttgatcaagaacatctgatgagcactgatgtatggtcatggagcaggtacgtacattgctttcgtcagcgttactagg

SEQ ID NO: 35313 - DNA, 326 bp, Glycine max
ggaaaagggttttacattttaatcgttctcccgtgtaacagagacacagagagagagtgtgaaaaaacgagaccatagagggaggagtctcccaaacgcgcatacctcgtgtcataatccgcgagctgatgagaggactactccacgttctagctcctcgacaacgacgcgactattaccaacacgctgctgcgcctcatgatcaccgaggtgccgacagtcgccatcgacctcgtcgagatatatgtacgcacctccgtgcgcacccaccagttcatcgctcacacacacgggctcattcacctcactaacgagcgagccatgtc

SEQ ID NO: 35314 - DNA, 261 bp, Glycine max
gtgatctctaactcactgttgagctagtcatacatcttcaagtgattgacgcattgttctatactcatttaattacattcgatgtacgtaatcgtgatggatatgccccgtttgttcaataaacttcaaccaacatttccggccgcacgagacgattcaagcttacgtccgcgtgcatgcgatgtcatacctcttcaatagcgtcaccctccctcatttccatggctcgtctttttacaccatctcgactgggaaaatcct

SEQ ID NO: 35315 - DNA, 239 bp, Glycine max
tctgaccaagactacgctctagatccatcccacttcgagctcccgtcacagtcactcgtaaatgtgctccccatggcgaggatcaatgtttacaagctgcagcaaatcaccaaggctgatctgttcaatcagctgatagacctcaaggccgaacttgccctacttcatattgccaccgtcaacggctgtgcacctaacaagctctctcacatcaatgtcgtgacgttgaacattgccca

SEQ ID NO: 35316 - DNA, 356 bp, Glycine max
gttctagtgtatgtgattgttgtgactcgttcttcttcgtcatgatcttcttcatttgttgtttgtgtgtatgtctttactctcaactgatgaatgtcatgctgcagtggtaactgtggttgctgaagcgcctgcaagtgcagcaacggctgctgaggcagcaagatgtacttagacttgagctacactgagtcaaccaccatcgagaccatggtcatgggagtggtaccagttaaggctcaattcgagagtgctgaaatgagtgttaccgctgataacgatggctgcaaatgtggatctaactgcacctgcaacacatgcacttgcaagtgaggtgtaggagagctaaagcttca

SEQ ID NO: 35317 - DNA, 358 bp, Glycine max
cttgcactaacaaccttgaaacccgggtcaaccgaaacccctcaaccaaccaagtccaagaaaaaaggttaaaaacccaaaggaggaaatgttaacccgggttcaaccggtaaaaaatgggaacaacttttttgcctttcccccaaccttggcccccttcaacaaaaccttcaccaaggtcactaattttccggcaaggaaaacccttgtccgaatcactggtggtatgaaagttaaacctgacaaaaatgaatcatctccttatgctgctatccttgcagctcaggatgttgctgccagatgcaaggaactgggcataactgctcttcatatcaagctccgtgctactggtggaaac

SEQ ID NO: 35318 - DNA, 345 bp, Glycine max
gattctgaagttgaacggcggagaagaagatgttgtgcgcttgttcttccggggagcagttcaaattcgaagagccgccacactcgccggagtccctcgccaccagggatttctccgccagcggactctcttccaggaccggagaatgggaacctaaattcgatgatacgcaagttgaagaagctgaatctactcttaaagatgctctttccttaaactacgaggaggctacggctttgttggggaggcttgaataccagagagggaactttgatgctgcacttcaagtgtttcaaggtatggatatcacgggtttgaccccaagaatgatcaaggctattgctg

SEQ ID NO: 35319 - DNA, 390 bp, Glycine max
gtgaaaggcattcaatttttgcacacagggatagtgcctggactatattcaaataatctgaagataacagatattcttttggataacaatcacaatgttaaaataagcagttataatctaccactctctgctgaaaataaaagaatgatcagcaagggaacctcccctggattaaaaggaaaagtccaagcaaggatccaggatgcagacaagaatgatgtctatgatattggagtagtcttgctagaaaccattctgggaagaccaataatgttccacaatgaagttggaacactaaaagatcttttacaggtaagcatcaaaaccgatgacatagctagaaggagcattgttgacccagcagttcataaggaatgttcagatgagtca

SEQ ID NO: 35320 - DNA, 312 bp, Glycine max
gaagttaatttgcgtctagagtcaatttggaatctaggatgaatctcaacggacagagaagagccataaccatgtctggaatatgaaagggacgcaggggtctcggatcgggaggagcgaagcgagaccgtacggttctgagggataacagtcaaggtacaacgaagcccgcaattcgccgtctcgcgagacgtgacagcttgaagcgtatcactggtcacagctaccatcaaacacgaagtgttctcaatatcttccatgataatgtcattcgctgagctgtcagctagactgaacacgctcgacgctcga

SEQ ID NO: 35321 - DNA, 226 bp, Glycine max
aggggaaaacagaacatggactcactctggcacctgaactcacagtggctaaaatcgttctgtggtgaattgtcaagatgttcacatcaatgaagaaaatccacaaagagtcagatgctgatccaacttaatttgacgaatcagtcagacaggcattgtttgatctgtgaaataccaacagtgacctgaaaactgatctgagagatttatacataaactcatctgt

SEQ ID NO: 35322 - DNA, 396 bp, Glycine max
  unsure (1)..(396): unsure at all n locations
gactcaccacttcaaagcactcataacacatagcacaaagcaaagctcatccttgagttatggaatggcagcagcttcttccatggatctcgcatccccatccttggctggcaaggacgtgtagctgggcccagcagccccagaagtgggaaaggtgagcatgaggaagaccgtcaccaagcaggtctcctcatgaagctcatggtacggcccagaccgagtcaagtacttgggctcattctctggcgagcctgcgtcctatctaaccggtgagttcgcacgcgactacagctgggatactgctgggctttccgcagatccagagaccatcgccaagaatcgtgaactctatgtgatcactctangtgggccatgctcggaaccttgggctgcgtc

SEQ ID NO: 35323 - DNA, 270 bp, Glycine max
gacattcatacgtgccatgcgtgtcccttccaattgcccacattttcacgctcgcgaatcactcctctctctccaccaatggccgagcagctcacggatgacgagatcgccgagttcaaggcggacatcagcctcatcgaaaatgactgcgatggctgctatattactattgcacctgggactgtgatggggtcaccacggcaaaatccagctgatcgcagagatgcatgatattattaatgacgttgatgctgatggcaatggaagcat

SEQ ID NO: 35324 - DNA, 328 bp, Glycine max
cgggaaccaagtttgcttgcgtgtatattcattttaccatcaccgttgaatctcacaaataaaggcgcatcgacatgcatgtctcgaagaggaaagggaggcaacggtctcggacagggacgagccacaggacaccgtatggttctgacggataacattcagggaatcatcactcccgcgattcgccatctggccagacatagtggcatccagcgtatcagtggtcatagctatgacgaaactctcggtattctcaagatcattctacagaacgtcagtctcgacgctgtcatctagacttaagactctcgccgcaagatcgtcactg

SEQ ID NO: 35325 - DNA, 374 bp, Glycine max
gtatgatgacatcgtgacagaagtctcttcttacttgacgaaggttggttacaacccagacaacattcgctttggtctcatctctggatttgaaggtgacaacatgattgagaggtccaccaatcttgactggtacaagggaacaactctccttgaggctcttgatcaaatcaatgaacccaagaggacctccgactagcctctaatgcttccattgcacgatgtctacaatattgatggtattggtactgtgccaatgggacgtgtagagactgaggttgttaagcctgttaaggcgatgacttttggtcacactgggctgacaactgaagttaagtctgttgagatgcaccatgacgctctcacacacgctc

SEQ ID NO: 35326 - DNA, 393 bp, Glycine max
gacacatgcccatcatcaaagtttcttcctttctctgctctttgtcttctctgacacatttggggccctgttgagtgtgtttttgcaagacggtatggcgaatgacgttgacgttgctgatcgtggctccttctctgggaaggactaccagtaccctccaccagcaacactcattgatgctgatgagctcacaaagtggtccttttacacggctcttattgctgagttcattgccactttgcgcttcctctacattactgtgctcacagttataagggtaaagcaccatacggatcattctgatgcgtctggtggggttggcattcttggcattgcatgggccgttggtggcatgatcttcatccttgtctacttcactgctgggatttcagg

SEQ ID NO: 35327 - DNA, 167 bp, Glycine max
  unsure (1)..(167): unsure at all n locations
tgagactcaggtcaggcggggctacgcgctgagtttaagcatatcactaagcggaggagaagcaagaanacggccgctcgaaaagatcggacgctctatacgattgaatctgacgtccgcgtgcatccgacgtcggagctctactcaagtgtcacccaattgcaatt

SEQ ID NO: 35328 - DNA, 459 bp, Glycine max
  unsure (1)..(459): unsure at all n locations
ttcaagggtcaaccaacccttcgttaaggttgcaaaagaagaacagaaggatacggttgcaaaaaaacaacagaagggaatcaatccatacattaaaaacaacctttggcttctttgtaaacatggaaataaggaaatcaggtggcttcttcttcttgctcctcctcccttgtctttgcttcccaggtggtggtgcagacggagggaagagtgtgtgagtcacaaagccacgggttccatggtttgtgtaatagagaacacaactgtgctttggtctgcaagaacgaaagtttctccngtggcaagtgcaaaggcttccgccgccgctgcttttgcaccaggatttgttgagatctcatcanacactactcttgccatgcaaattaataaatcatagctaggccacataaattgcatctactctttatccatttgggagctagcctacacaaacaactc

SEQ ID NO: 35329 - DNA, 392 bp, Glycine max
gacagcagtgcactcttcgcaacacggcacagctggacaacccagagagcgcgtcataataaacgctcttctctgaaaacccccatttcttttcatctttcttcttctctttcgcttcttcgatcttcgatcttcgtcgctgacactgagagattgcatttcaattcacatcggataggccgggattcacgttggaaacgcctgctgggagctttactgcctcgatcactgtattcagtctgatgggcaaatgccatgtgataagaccgttggtggacgtgatgatgctttcaacattctcttcagtgaaactggggcaagaaagcacgtgccatgtgcgatttttgtagatcctgagcctactgtgattgatgacgttacgactgggagat

SEQ ID NO: 35330 - DNA, 375 bp, Glycine max
ggttgttggcttgtgctctgctcgtgcctctagggttatcatatctccattgcgattctcctcgctctcagtttccatgaatctgaagctaagggaaagtctcatccaaccgtgagcgctgattaccataaggccgtgtagaatgcgaagaagaagctcagaagcttcatggcggagaagagatgcgctcctctaatgcacagtttggcatcgcactctgctggaacttacgacatgagcgcaaagatcggtggtcccatcagaaccataaagtaactctccaaagtcactcacggtgctaacaaccgtcttgacatccctgtgaggcgtttggacccactctaagcggagtatctgacattgagctacgccgat

SEQ ID NO: 35331 - DNA, 306 bp, Glycine max
aggggtttaaagataaaaaaaaaaaaaaaaacacaaaaaaaaaaaaccggcggcccaaaaggttcaaacctaacttagccttgaaggcaacttaaaacccctccaaaagggccaccaaaatcaaattaacgggcggtcgtttaaaaaggtcttaacgggaaaaaccctgccgtaaccaaactaaaccgccttgaagaaaatcccccttccgcaaccggccgtaaaaccaaaaaggcccgaacgattagcccttccaaaaatttgcgcaccttgaatggcaattgagacccgccctgtaacggggca

SEQ ID NO: 35332 - DNA, 407 bp, Glycine max
gattacacgggatttacatcaccgtccgcactttccttcccccctacacaaaacatggctttgcccaatcagcacaccgtcgattaccccaacttcaagcttgtcatcctcggcgacggtggcacaggaaagacaagcttcgtgaacaggcatctcactggtgacatcgagaagaactatgaaccgaccattggtgtggatgttcatccgttggattttttcacgaactgtggaaagagtcgcttcgattgttgcgatactgctgagcaagacaagtttggtggcctcagagatcgctattatagccatgggcactgtgcgattagcatgtttgatgtgactgcccgtctaacatatacaactgtcactacctgtcaccgtgatcattgccgggtctgtgaaaacat

SEQ ID NO: 35333 - DNA, 269 bp, Glycine max
cggcgtgatcatcagtgttcatgccagggtcaccgacgttaacggcctccgcggacagctgtgtgcgagacttcctgcacttgaatctcgattttcagctcacttctgacgaattcggtgaaagaccgctgaaaatcgacgcgatgtttggttccctgaaatcatccgccactattcgcaccgccttgagccaggtggcgaatctgatcacaggcgtcacgagaggctagcgctcacaaaatgacgttcgtttatgccaattttcccat

SEQ ID NO: 35334 - DNA, 170 bp, Glycine max
ggaacctttgcattctactcattcaggatccatcaagtccgtttaggaatcagagacagagatacttctagatggcccctaaattcaaaacagcacggatgtcagctggaggaaaagctcccatgaagcagcttgcaaccatggttgcacgtaattctgctccaacagtt

SEQ ID NO: 35335 - DNA, 157 bp, Glycine max
gtgattaagctttcgataagagacatagagagaactcaaaggaaaaacatcaaagccttttactattttttcttttgcatcatttgaatcttgattggaagagcttcgaattggggtgttttagccatcaattcaatgttgatgccgtgccttctac

SEQ ID NO: 35336 - DNA, 158 bp, Glycine max
tgagacctcaggtcaggcggagctaccccctgagtttaagcatcccatatgcaaaaaattcacaatcatcagtcaagcggctcgctctacatgatccaagcttaattacgcttgcatgcaacatcctagctcttctagactgtcacctaaattcagat

SEQ ID NO: 35337 - DNA, 407 bp, Glycine max
cggtcacgaattaccgggctgacccacgcgtcaggcgagaacacgacagccaggaagagtgtgcttggtgctcccagatcgtcctggaggatcctgtcatccattcaacaccacgcatatactaacgggaactacttgagtgccaaccagcatattgagtacatacggacagttgaattggatctagccatcatctgctgtgatgttatgatagtgattgatgagcaccttatgccttctgctgcaactggtgaatccaccgtcttttactatcacatcatacgacattattatcgttatcttgctaaatttcagtcaagccctgacaccaacgaagctgctgatcagtctactatagcatctgagtctgctaccgctgcattcacaagctgatttacctcccacac

SEQ ID NO: 35338 - DNA, 365 bp, Glycine max
gaaacgcatatctctgtcatttgtgtctgctcagtcgctcttctccgctacttctgagatcttttagtcaagtttcatgtctgaccaagagcaccatttcgagtccaaggctcactccggagcctcgaaaaccgactctcaccaagccggtaccatccgcacgaatgggtacctcgtcatcaaaggccgcccctgcaaggttgtggaagtttcgacttccaaaactggaaagcacggtcacgcgtagtgtcactttgttggaattgatattttcactgccaagaaactttaggatattgtgccctcttctcacaactgtgatgttcctcatgtgaatcgtactgattaccagctcattgatattg

SEQ ID NO: 35339 - DNA, 160 bp, Glycine max
gattcacacaactaactaagaaagtcttccatagccccccaaaaatgaagagcaccatcttctttggtctccttcccctttggggcttcaacaactcatacctaacttcagccatcgctgatttcgtgcccgataatgaaggtaaccctcctgaaaatgg

SEQ ID NO: 35340 - DNA, 346 bp, Glycine max
ggagcgaagaagatattagggtttttgagtgcggtgcggcgatcctagcactctcttctgcagctttcgccgacagcttcattcaccatggctgagcaaaccgagaaggcttttttgaaacaaccaaaagtgtttctcagctcgaagaaaactgggaagggaaagagacccggaaagggtgggaaccgcttttggaaatccattgggcttggatttaagactcccagggaagccatcgaaggaacctacattgacaagaagtgccccttcactggcaatgtttccatccgtggccgtatcttggctggaacatgtcacagtgctaagatgaacaagactattattg

SEQ ID NO: 35341 - DNA, 275 bp, Glycine max
gacattgctcgctctctctcactctctctctctctcgctctctctcatcacgttcgatcattcgcatctgaatctccaacgatggtgctcgacgagactataatttgtgatgacaagtcagaatggattcgtaacggggattactcaccatcacgatttcaaacccaagcattacgccgtcaatcttaattgcggtgctaaaacccaatcgaatccagaagatactgtgagagttctcacgaaggccgagaatggcgttcgtgttatggtgatcc

SEQ ID NO: 35342 - DNA, 360 bp, Glycine max
gacagcaaagcaattttcaaactcaattacaattcaataaccaaacctccccttggtttccaattcaaaaagaagtggcacttccaagccaaaccgcccacaattcaaccgggggaagggccccggggacgcaattggagactaaagccgctcacatgtcagctcgggacaccggcggtgtgaaaaagccccagcgtttcaggcccgaaactgtggctctgagggatatcagattgtaccagaagagcactgatcttctgatgcgaaaactcccattccagaggctcgtcagaaaaatcgctcaggatttcaaaacatatcttcgtttccagagcagcgctgtttctgctcttcaggaag

SEQ ID NO: 35343 - DNA, 366 bp, Glycine max
  unsure (1)..(366): unsure at all n locations
cacgcgtcaacccaagcgtccgacggcagaaaacgacataaggggactctcactctcactctcactctctcagctcaggagtgtataaccctgacaagtcaatctgaggtcccttgccctaaaggaaaagttggttgactattcgtcagttcgatggatcntgttattttgtggtccttcccatctccttcaacatttatttccttacataccttggggatgtaagatctgagtggaagtcctataagacgcgtcagaaggaacatgatgagaatgtgaaaaaaggtaacaaacgtctcaaacaaaggaatccatcaaaagatggtcttgtctgtaccgctcgtaagccctggattgctgttggga

SEQ ID NO: 35344 - DNA, 316 bp, Glycine max
gacttcaattgcgatcaaattagttcattcactttgcgcaattccctacctctcctttcaagatgcagatcttcgacaagactctcaccggaaacaccatcagccttgaggtggtaagctctgacaccatcgacatcgtcaaggccaagatccaggacaaggaaggaattcccccggatcagcaccgtctcatcttcgccggaaagcagctcgaggacagccgtacgctcgccgacgagaacatccagaaggagtcaacccttcatcttgtccttcgtcgccgtgggggcatgcagatcttcgtcaagactctcac

SEQ ID NO: 35345 - DNA, 308 bp, Glycine max
ggtgtcccacgagtccataaagctgcaaaatgagaaattcgtcgtcactttcacactttctctcgcattcactcatgcacacgtatcattgcataaaggtgacggaaggcgcttcgtgcatcgaaaatcaccgcggcgaattctgacaaagctacggacagtaacaaacctaattctcgctcttcccgtgctgaaatccagtttcctgtcggacgtatccataggcagctgagacagatggtccaatccaactagacatgttgaggcaacagctgcactgtacttagcctcaactctagagtatctga

SEQ ID NO: 35346 - DNA, 359 bp, Glycine max
cccacgcgtccggcgagaagtacgagagaacggggcactttcattctctaggaaaatctaattcgctttggtcttcatcctctgttctgatccaagtatggcttctaaactcatcttgaaggagctcaaggatttgcagaaggatcctcctacctcatgcactgcatgccctgtggctgacgacatgtttcactggtaagccacaatcatgagacctgctgataccccatatgcaggtggtgttttcctagtttcaattcattttcctcctgactaacccttcaagccatcaaaggttgcttttcggactaaggtgttccactcaaagatcaacagcaatggcactatatgtcttgaca

SEQ ID NO: 35347 - DNA, 253 bp, Glycine max
catccatgatctggatgtgaatgagtcaaattacttatccctcggtcttttaatgaggtagctctccaggaattgtgcattaatgttctatgaaacgtattcatgttactgcttcgacgcatattccctacaatttacatgcggttctaatacatcctaataactgagatacatgtattgttatacaactgattcttatttcagaacatcgaccttactttatcagtctttcaaacaataagggatttcactt

SEQ ID NO: 35348 - DNA, 102 bp, Glycine max
ctacacttaaaattacaattttagcgtgggaaacgtcgctgttttatttatgttcaatgcagtttgacaactgcagaaaatgacatatgcagatattgcgga

SEQ ID NO: 35349 - DNA, 221 bp, Glycine max
caggtgcgaaaagaacagaaaagggttgccaatcacatacttggaaagcaaactatatctcagggtaacattcatcaattcagccactgttactcagatttccttacgcgaaaataaaaaaatgcataaaaaacaaaagagcggacgcacgagaggatccaaacttacgtacgagtgcatggaacgtcatagatcttctagagtgtcacctaaatacaatt

SEQ ID NO: 35350 - DNA, 230 bp, Glycine max
gactttctattggccttaaaccaaacgcagcatcgctattctcttcattccagggcttagcccatgcagcaaaacgtggattaacctaatttcaaactcgctatcgtccgctatggtgtgacaggtcagacatcgcttgtcaacaggcatctcaccggagaactcgacatcaaatatgagccaatcatcggtgtggaggttcacccattggcttttttcacaaactgtgg

SEQ ID NO: 35351 - DNA, 263 bp, Glycine max
gggccgtacgggcaaatcgtcaagttcgacaactttgtgtttgggcagtcctgcgcatggaacaactgggccaacgggcattacaccgagggtgtggaattgaatgactccgttctcgatattgtgcacaacgacgctgataactgcgaatgcatgcaaagttttcacgtgtgccaatccctggggggaggaactggatcaggaatgtgaaccatgctgagttctacgatcaaggaatactacccagatagaatgatgcttaa

SEQ ID NO: 35352 - DNA, 348 bp, Glycine max
gaaaccggaaaaaaaatggattcattgagtgatcggtgttcacttggatctcatcataatcgtcagcgtcaattgaagaagatgccgatcagaaacatcgccgtcggaaggcctgaagaggcgactcaccccgacacgttgaaggcggctttggctgagttcatctcaaccttcatcttcgtgttcgccggctcaggctccggcatcgcctacaacaagctcaccgacaacggcgctgccacccctgccggcctcatctccgcctccatcgcccatgcagtcgccctcttcgtcgccgtctccgtcggcgccaacatctccggcggccacgtcaaccccgccgtcacc

SEQ ID NO: 35353 - DNA, 290 bp, Glycine max
ggttcccaattcatcgtggcctccgcctcctttaacccccccctccaatcccaaatcgaaaaaaattcgttttaagttcccccaaaggaaccttaggttgcacaaccaaaggatttggaaccaatccccggtggaaaaattgcaaaacccaaatttcccccggccgttaaaaattatgaaaattaccatgtttgctatggaggtcaagaggaagagagaaaagctaattataccgatatggttaataaatactaagattctgttaccagcttttatgaatttggctgggg

SEQ ID NO: 35354 - DNA, 397 bp, Glycine max
gactcaccacttcaaaacactcataacacaaagcacaaagcaaagctcatccttgagttaaaaaaatggcagcagcttcttccatggctctctcatccccatccttggctggcaaggccgtgaagctgggcccatcagccccagaagtgggaagggtgagcatgaggaagaccgtcaccaagcaggtctcctcaggaagcccatggtacggcccagaccgagtcaagtacttgggcccattctctggcgagcccccgtcctacctaaccggtgagttcccaggcgactacggctgggacactgctgggctttccgcagacccagaaaccttcgccaagaaacgtgaactcgaagtgatccactccaggtgggccatgctcggagccttgggctgcgt

SEQ ID NO: 35355 - DNA, 225 bp, Glycine max
ggagacagggatttccatagctcgcaatacatcacacatgtctgagcacatccctgcgttaaaaaatgggagcaggttcttccatgggatctctcatcgacatccgtgggtgggaatgccgtgaagctgggcccatcagccccacaagtgggaaaggtgagcatgaggaaaaccgtcaccaaacaggtctcctcaggaaacccatggtatggcccataccgactc

SEQ ID NO: 35356 - DNA, 356 bp, Glycine max
gacacagacgaatattcattgcatttagatgcagcatcagcttataacaacaattaaacatgagtgcagccagcatagcttggtttgtggcatcaagcagtggagcagtggatgcattgaacgatcgattgggggtgtgcaagtggaaccatgcattgaggtcactgcagcatcaagccaggagcgtcattatctgctacaggcaagccaatcccttgtcatctgctacttcagctgcggtcgccaataaggtcaataggaccaaggacgagtccatgaggaaagtcatggacttgagctgttgaggtcacaatacatcaacgtttcactgtgtggactattcgaattgcattcat

SEQ ID NO: 35357 - DNA, 346 bp, Glycine max
gacggttttgtgctgttgtcgctgcgcatcctccatagtctccttcctctacatctcaacatgaagccatggggaatacacatggaatgggagctgctcgcaagctcacagtctcaccgcacgaggcaaaagtgggctgatatgtcatacggtatatcccatcttgggaatccatggcagaaatcttttgccggttcagcccatgccaatggaactgtccttgaaagcataggtattgtatctggacatcccaactctgctattcgtaactgtgccatagttcaacttatcaataatgggtaataaattgcagcttttgtctctaatgatggatgcatgaactaca

SEQ ID NO: 35358 - DNA, 273 bp, Glycine max
cggtacttctcctacaaaaccacacactggtaccgtcgctacaagacgacacatcggtactgtctgccacaacaccacactatggtactgctgcgatacaatcacagaaggggatgagggtaatgtgtaggatgttgatgaaaaggttcattcctcttcattgaaagaaatgcggccgctcatatacgatccaatcttatctacgcgtacatgctacgtcacatctcttctatattgtcacctaacttcacttcagtggtcgtcgttttacaa

SEQ ID NO: 35359 - DNA, 309 bp, Glycine max
tcagacagctacaaaagggtaaggctgcggcaatacgacatacggggagatctgctgcttctcattgttgaaaaggaagcccaacaggttgcacactggcatacgtttacatccaagttgcggcagcatcaacagcatggcctgccgttcaaatagaacgttcatcaagttcagttttcgaggcgtggatcacgatgcacttctcgacatgtccaccgatgaactcgtcaagatgttcactgcccgcgctcgtagaaagttcgacagaagccttagcacatcgcacatggtcttgatcaagaatctcca

SEQ ID NO: 35360 - DNA, 306 bp, Glycine max
agtgcatgtaattcatattcataaagagaaaacccttagccaacacaaccatcatggccagctctgctattcaatactcaccaatcaatgcttacattgcacttcatcaccccactaaattcttccgcaagatcagttcaccgggcatcggtctcaataatattcaccgcaacgtccctagtgttcctcagattatttggtatggacctgatcgtcctatctacatctgtccaatcacggagcaggttcgatcatatctgacttgacaattctttggtaactacagatgcgacactgatgcattat

SEQ ID NO: 35361 - DNA, 322 bp, Glycine max
ggaacagagtgaaaagaagggtttgtaagagaaagaaaaaagaggtacggtggtggtggaggaggtggtggcggcggaggaagctgctacagctgtggagagtctgggcatttcgccagagattgcccatcaagtgctcgttgaaattactgttatggtggtttatgttatgcggattgttttaagtttttactttaacatgttgtagagattttaatggtttctgtcaaagctgtggcttcttataagtagatgcgtgagatttttcttttttttggttatttaaatgaaagtttctgtgttatcgttacaatctgcaaac

SEQ ID NO: 35362 - DNA, 349 bp, Glycine max
gactcagcacttcaaaacactcataacacaaagcacaaagcaaagctcatccttgagttcaaaaagttggaacagcttcttccatgggtctctcatccccatccttggctggcaagggcgtgaagctgggcccatcaagcccaaaaatgggaacggggagcaatgagaagaccgtcaacaaacatgtctcctcatgaagcccatggtacgggccagaccgagtcaagtacttgggcccattctctggcgagcccccgtcctacctaaccggtgagttcccaggcgactacggctgggacactgctgggctttccgcagacccagaaaccttcgccaagaaccgtgaact

SEQ ID NO: 35363 - DNA, 280 bp, Glycine max
gacagcgaaacagagagtgatttcagtgagtgatcggtgttcacttgatctcatcataatcgtcagcgtcaattgaagaagatgccgatcagaaacatcgccgtcggaaggcctgaagaggcgactcaccccgacacgttgaaggcggctttggctgagttcatctcaaccttcatcttcgtgttcgccggctcacgctccggcatcgcctacaacaagctcaccgacaacggcgctgccacccctgccgggctcatctccgcctccatcgcccatgcat

SEQ ID NO: 35364 - DNA, 358 bp, Glycine max
gattcagaggcaacaaaggagttgtaaattaagagcatggctgcacaagctcttgtatcatcatcatctcttaccttctcagccgaggctacaagacaaagtcttggaccaagatcactccaatctccatttggcttctcaagaaaagcctcctttcttgttaaggcagctgctactccccctgtcaagcaaggatcagacagacctttgtggtttgcatcaaagcaaagtctttcctacttggatggcaggtaaatttcatcctagttcatcaatagcttaacgtaacgatatgatcatgtctggatatataaacttctcatgagcacttgaagaataaaaaggtaaaatgaagttt

SEQ ID NO: 35365 - DNA, 393 bp, Glycine max
agtccaggcgtcagacggctgcaagaggagtacagaaggggattcacaccttcactccctctattgctttctcaaattccattttccaattcagaagcctatctccgtgcgaagcagcacatcgggatggcaccaaaggcagataggaagccagtatagaagaagcctgtggaggagaataaatcgactgtgggatacaaagctccggcagatatcaagtcagcggccggagagaagcttccgaaagagggaggagccggcggagaatgtatgaagaataagagaaataagaatagcgtggagacatactagatctagatcggaaacgttcagaagcacgttcacactgacattggtatctcaaccaaagcaatgggaatcataagcagattc

SEQ ID NO: 35366 - DNA, 334 bp, Glycine max
gatgtgatagtattatcattcattcgcatcggtctcacttctctctccacctataccctaactcacgacactgtacccctctcgaatccgtcatgacacgaggaaagtccaagaccgaatctaagacagcagattgcaaacttgctgtgaataataagggagccgcgaacaatgctaagaaactcgccggcaacgggaatgcagcgaaagatgctaacaagcgaaagaggcctccaagtgcattcttcgttttcatggaggaattcacgaatgtattcaacaaagaacatcctgaaaacaaatcagtgtctgctgttggcaaaactgctggagc

SEQ ID NO: 35367 - DNA, 291 bp, Glycine max
gcttgcaggcgaaagagaagatggccaccgttccaagggcaactcctgttggaaattgtgaagaaaaacaactcctttttggtcaagcaattccgaaaggggaaccaaaacgtctaattctaaaaagagagcacaaatctctataaactcaattcgctcaagtataccgggttttgaaacacaaaaactgttacagtgacaacccaaggggaaaattaagggctgttttttgggacaacaaagaccaagaaaccaaacaaacccgctggaatgcctcacaaatctctgtat

SEQ ID NO: 35368 - DNA, 294 bp, Glycine max
cacgggactcacgacttcagtacactcataatacatcagcacaaatcaaagctcatccttgagttatgaaatggcagcagcttcatccatggctctctcatccccatccttggctggcaatcgccgtgaagctgggcccatcatccccagaatttggaatggtgagcatgaagaagaccgtcaccaagcaggtctcctcaagaagcccatggtacggcccagaccgactcaagtacttgggcccattctctggcgaacccccgttctaactaacccgtgaatttccaagcgaat

SEQ ID NO: 35369 - DNA, 420 bp, Glycine max
ccaggtcaccagcgtccgtaagcgtcagacaacgatcagcgcagatatctgacaaagaatcgaacgttagctaaaagacaatacttcggtgacctcccgtattgttcataaccaaacttcttctgctcaacatgctgacgctctgatacaagctttcataggatggagggctgatgacaacgccactatagcattactgggtcacagatctgtgcatcacatgcaagaaatcagtgaagcttatgacgatatttaccacgaggatctcatcacatgccttgagtccgatatctctagtgactttgatagagctatgtaccggtggatgttgcattctgcagattgtgatactgttatggtgaatgtggaaatcaccagtggcagcacagactaccatgtgattgcagagattgcttgtat

SEQ ID NO: 35370 - DNA, 354 bp, Glycine max
gacaaccaagctcgcttcttccttctcgcatcaacagcatgcagatcatcgtcaagactttgagcggcaagaccatcaccctcgaggtcgagagcagcgacaccatcgacaacgtcaaggccaagatccacggcaaggaatgtatcgctcctgaccagcagaggttgatttttgctggtaagcacctggaagatggtcgcactcgtgctgattataacatacgacaggaatcaacacttcacatggtcttgaggctaaggggaggtaccatgagtagcgtgatgactttaactgggaaagaaattgagattgacattgaagcatctgatacaatcgaccggattaaggaacgtg

SEQ ID NO: 35371 - DNA, 303 bp, Glycine max
gagcgaaacagagagtgatttcagtgaatgatcggtgttcactttattccaacaaaatcctcaacgtcaaattaagaaaatgccgatcagaaacatcgccgtcggaaagcctgaagaggcgactcaccccgacacgttgaaagcggctttggctgagttcatctcaaccttcatcttcgtgttcgccggctcaggctccggcatcgcctacaacaagctcaccgacaacggcgctgccacccctgccggcctcatctccgcctccatcgcccatgcattcgccctcttcgtcgccgtctccgt

SEQ ID NO: 35372 - DNA, 260 bp, Glycine max
gtgaatgctacagatgttaaaacatcacagaatgcgccagtttcccgaacgagttgatggtttagtatgcatttctcaagcaacgtgtcttcagttctaaaccagcatatggaataccagagtgaatggtatcaaataaattctaacgatcttttagctactactgagtttgaactaatgactccctccgtactataccagtactctaaccactgaattacgtaggtcatttatcaacacccccccccataagaaaaccc

SEQ ID NO: 35373 - DNA, 185 bp, Glycine max
gactccctacgacaaacaacaacaacttctttttactttcatattctctcctctttcattaacgatctctacgaagttctttcactcaaacacacccttaatacacccttaattatatcgcattcgccttctcgtaccgttagaattagattgcacttattcctctctctccctctttttctgga

SEQ ID NO: 35374 - DNA, 292 bp, Glycine max
gaacaattcaaaggaaaatcctccctaacaaaagccttccaaaaacgaaaaaaaaaggaagagcaattttcccccaccaaagaagaagaagcaaacaagggccgataaacttaccgatgaaaagatctccgagttcaaggaagccttcagcttgttcgacaaagacggcgatggtttgttctcgctctctctctctcaagttttgtgtatttgatttgatttgatttatgcgtttgtgggttttgtagatcggtgttccgtgtcgtgatagtggattaggaaaattagatga

SEQ ID NO: 35375 - DNA, 377 bp, Glycine max
  unsure (1)..(377): unsure at all n locations
aggcgtcagacagctgcaaaaagagtacagaatgggactcagaacttcaatccctctattgctttatcaaattccattttccaattcaaaagcctaaatccgttcgaagcaccaaatcgtgatggaacaataggcagataagaagccagtatagatgaaaccagtggaagagaagaaatccacggtgggatacaaagctccggcagataacaagtcagctgccggagacaagcttccgagagaaggacgcgcctgccgagaatgtatgaagaagaagagagataatatgagcatcgagacatactatatctacatcggaaacgttcagaatcacgttcaccctgacattggtatctcatgcanagacatgggaatca

SEQ ID NO: 35376 - DNA, 371 bp, Glycine max
tggtaccgctgccaaaaaaacacagaaggggaactcaaccaattgccgtaaaaaagacaatcaaatttcaccttcagcctaaccggttttaggtttcagtttttgaaccaacccttgacgtaacaaaacctaagtttcggatcaagtctgaccaatctggttggtagaacctttggacttacagagtcaagttttatgtctgaattagacgataaattcctactgccttcgatacttttgctgatgcaaatgctgatgactcgggtgctgggtcaaaggagtatgtgcacattcgcgtacagcagcgaaatggaacgaaaatcctgacaaccgttcaaggattgacaaaagaattcagctataacaagata

SEQ ID NO: 35377 - DNA, 372 bp, Glycine max
gacagcgaaacaaagagtgatttcaatgaatgattgggggtcacttgatctcaacaaaatcctcaaggtcaattgaagaagatgccgattagaaacatcgccgtccggaagctgaagaaggactcacccgacacgttgaaagcggctttggctgagttcaacccaaacttcatcttcgtgctcgccggctcaagctccggcatcgcctacaacaagctcaccgacaacggcgctgccacccctgccggcctcatctccgcctccatcgcccatgcattcgccctcttcgtcgccgtctccgtcggcgccaacatctccggcggccacgtcaaccccgccgtcaccttcggcgccttcgtcggcggcaacatc

SEQ ID NO: 35378 - DNA, 364 bp, Glycine max
gacaccgaagcactcgcgattccagccatagcacagaactctttgcaagacagttgctgaatgacgccacagatagaagcgtcttagttcacgctcatcgctgaaaaacctgaattcttctcttcatctcttcacattcgtttcgatcttcgatatctgaaaatgacagtgtgcatttcaatccacatcggtcatgccggtattcacgtcggaaaaacctgctggtagctctattggctcgaacacggcattcagcctgataggcaaatgctaagtgatacgactgttggtggacgtgatgatgctttgaacatcttcatcagtgaaactgggtctgaatagcacgtgcctcgtgcgatttttg

SEQ ID NO: 35379 - DNA, 397 bp, Glycine max
aaaagggcactgaacgctatcgcttgcaggttgccacactacggtgatgtttccaccaaacccgtttgcgttgttgtttgcaaatacatggcaacgataaggatcctaggaacgctgaaagagggtgacttgcatgggaaaacggtactcgttaaggtccatcttaacgtgactttggatgacacccttaatatcagcgatgacactaaagtccgtgctgctgttcccaccatcaagtacttcactcggaacggtccaaaagtaatcctttccagccatttgcgacgttcaagatgtttaacacctaaatacagtttgaaccctcttgtgccaacgctgtcacaacctcctggaactgaagttactattgccaacgaacccaattgggaagaaattt

SEQ ID NO: 35380 - DNA, 353 bp, Glycine max
accacgcgtccaataaggcgccaaaaaaataacaaaagggaattgcaaaccattaggaacccccatcccaattcttagccgccattttcccagggcttcaacctttcaagttaacccataaaaatttccacaccttggatgaaatccctcaaggataaggatcctaacccatctaaatttgaaaattcatttggacaggcaccgtttgatctggaaagtaccactcaggagctcaaaagtgatctgaaggatttatacagacacccatccgtgccagttgacgtttctggataccgtatagctgtagtcattcatgtcgcttacatattaaagataggtttccgtaagattca

SEQ ID NO: 35381 - DNA, 321 bp, Glycine max
gacgctttacgatttctctttttttgttttttgttgcgtgtgttagggttttaaggaagcatgggaaaggttcaggtgagtgacaaggaagaattctctcaaatggagaacaacgatttcagtgattcgcagttagttcatcacttcagaggtgtgcttgttgcagtgacaacgggtgatcgagagaattacgatgagctcgttggttatttgcaaccgaagaaacatcttaatcctgatgaggttgctatacttgtgacaactttgaaagcgctttctggagcagtgtcctatatagattctgttcatcatgaatccctg

SEQ ID NO: 35382 - DNA, 330 bp, Glycine max
aaagggacacttaagggaaaaatacccggcaaaggttggaaacgcttttggaaatccattgggcttggatttaagactcccattgaatccatctaaagaacctacattgacaataagtgccccttcactggcaatgtttccatccgtggccgtatcttggctggaacatgtcacagtgctaagatgaacaggactattattgttaggacgaattatctccactttatcaagaattaccacaggtacgacaaaaggcattccaacattcctgctcatacatcaactgctttccatgtgaacgaacgagatcacgttactattggtcaatgc

SEQ ID NO: 35383 - DNA, 226 bp, Glycine max
gaaaagctttgtttattaataataataacaagcgaggtaaaacacttcgagcggcggggcaggggcagagttgattgcagttgagagagttgtagtgagtaacgagtacgatgatctgttcaagcttctcctaatcggcgacgcttccgttggaaaatcctgcttgcttctcagattcgctgaggactccgacgtcgacagctacatgagtaccagtggacttgat

SEQ ID NO: 35384 - DNA, 440 bp, Glycine max
gggctgccaaaagaccaaagaaagggggaaggcaaagaaaagattggcaacgttccaagggaactccttttggaaattcttaagaaaaacaactcctttttgggcaacaatttcgaaaggggaaccaaaacgttcaatttaacaaagagagcacaatcctcacaacctaaattcgttcaagtactctggtttggcaaacaagaaaactgttacggtacagcctgagggtaaagatcaggctgtgttgttggctacaacaaagacaaagaagcataacaagcctgctgcattgcttcacagatctgtgatgaagaaggagttcaggaggatggcaaaggctgttgaaaatcaggtggcagaaaattactacaggcccgatctcaagaaggccgcccttgcaaggttgagttctgttcacaaaagcctcaaagttgccaagt

SEQ ID NO: 35385 - DNA, 252 bp, Glycine max
tagagtcagtggtttatcgctgttcaaatgctccttcatgattgctctccagcatcatcatcatcaccgttaagttcgaaaggggtcatcaagtgtcatcgccatcggaaggcctcatgacgctactcagccccgcactttgagcgcggggtttgctcagttcatctccaggttgatcttcgtgttcgcccgttcacgttccggcaatcccctacagcgtgctcacggacactggccgccgtcactcccgcc

SEQ ID NO: 35386 - DNA, 165 bp, Glycine max
ggggatatggcgaaattggtagacgctacggacttaattggattgagtcttggtatggaaacttaccaagtgagaactttcaaattcagagaaaccctggaattcacaaagggcaatcctgagccaaatcctgttttccgaaaacaaggaagaaggggggaaagg

SEQ ID NO: 35387 - DNA, 403 bp, Glycine max
ccgggtcgaccacgcgtccatccacacaacgggacagaaccataagcttcagcaatgggaaccacacatttcgagaaaaacagcttttacatccatgaacttatgggtattctcgtatactcttgaatcttcgacatgtcatcatacttgacccttattcccattcggtgatgattacagccggaatagtgtatgcgtcatacagacaatggttcaaaggtttgtgtaatatagaccacaactgtgctttggtctgcaagaacataggtttctacgttggcatgtacacaagcttctgccgctgctacatttgcaccaagatttgttgagatctcattagtcactactcttgctaagcagattaataaatcatttcctaagccaaatacattgcatctactct

SEQ ID NO: 35388 - DNA, 170 bp, Glycine max
gagacctcaggtcacgcggggctacccgctgagtttaagcagatcaatacgcggaggagtcctgctgcatactacatgagatcattcgagcggccgctctataggatccaggggtatctagtcctgcatccgacgtcctatctctctctaagtgtcatccaatctcattt

SEQ ID NO: 35389 - DNA, 309 bp, Glycine max
accactaccaaaggccccaagagaagccaaatacctactagtcgtcattgactacttcaccaagtggataaaagcaagaccactgtgggaaattacagctaacgaggtggaaaatttcacctagaaacacctcatctgcagctacggcctcccatacgccattgttgtggacaacgacactcagttcgaagcttagacttctgaataattcttgacaaggataggcatcaagcacctagtcacctttgttgaacatcctcaaactaacggttgggtagagacaaccaatagagtccccttgagagccct

SEQ ID NO: 35390 - DNA, 152 bp, Glycine max
gagagaaagagagagaacgatgtcgaagcgtggtcgtggtggttcggcggggaatgagttccgcatgtcgctgggtcttccagtggcggcgacagtgaactgcgcctacaacacggcggcgaagaagctgtagatcagttcggtgaaaggga

SEQ ID NO: 35391 - DNA, 118 bp, Glycine max
gggcacaatgcaaggtaacacatcgacttgaaattcggccgctctagatgatccaggcgtacgtatgcgtgcatgctacgtcagagctcttccacgagtgtcacctacattcgcctcg

SEQ ID NO: 35392 - DNA, 268 bp, Glycine max
  unsure (1)..(268): unsure at all n locations
cccacgcgtccgacgacagaaggggagagtggtggagtgtgcaaaagagcgtcgtagtcgcaaccctaatcagaagaagcgcagcttcaagcgagtgacagccaccagccatgggtcgtatgcacagccgcggtaagggtatatcctcttctgctttgccctacagggggggggctcctanctggctcaagatctcttcgcaggatgtcgaggagggtggcggcagcgtggggaggaaaggtttgggggcggcggagattggtgtcag

SEQ ID NO: 35393 - DNA, 296 bp, Glycine max
  unsure (1)..(296): unsure at all n locations
cggggcgagagaagttattagggtttttgagtgcggcggtccaaacactcttctctgcagcttttgcctacaactcccttcaccatggctgaacaaaccgagaaagcttttctgaagcggggaggagtgtttctcancacaaagaagactgggaagggaaagagacctggaggaggtgggaagcgcgtttggaagtccagtgggcggggatttaagactcccatggaggggggcgaaggaacctagattgacaagaagtgccccttcactggcaatgtttccatccgtgggcgtat

SEQ ID NO: 35394 - DNA, 289 bp, Glycine max
gagggtttcaaagtggacagaggagagcgtcctagtcgcaaccctaataagaagaaccacagcttcaagcgagtgacatccaccagccatgggtcgtatgcacagccgcggtaagggtatatcctcttctgctttgcgtgggggaaggacacctcctagctggctcaagatctcttcgcaagatgtcgaggaggggatctgggggtttgcgaagaagggtgtggggggcgtctcagattggtgtcattgggcgggagtctcacggtattgctcaggtcaacagcgtcac

SEQ ID NO: 35395 - DNA, 303 bp, Glycine max
ggaaacagagagtgatttcagtgagtgatcggtgttcacttgatctcatcataatcgtcagcgtcaattgaagaagatgccgatcagaaacatcgccgtcggaaggcctgaagaggcgactcaccccgagggggtgaaggcggctttggctgagttcatctcagccttcagcggcgtgtgtcgggggcgcaggcgccggcatcgcctagaggaagggggccgacaacggcgctgcgacgggggccgggctcatctccggctccatcgcccatgcattcgccctcttcgtcgccgtctccgtcg

SEQ ID NO: 35396 - DNA, 359 bp, Glycine max
ggaagaaatgcaacagattatggaagaaaacaggactttgcatgaacttaacttctcttccaccaggtcattgaaaaatcagcaaatggaaatttctgagctgaagaagatcaaagagaaacttgaacgagagtttgctgtaaaagttgaagaaagtaatgtcctccaatgggaatctcatcaaataaaggatgaaatcctgggcttgaataatagataccaggctatactggaagaactaggctctgtgggtttgaatcctaaatcttttgcagcatctgtgaaggatttacagaaggagaatacaatgataaaggatgcttgcaaaatggagcgagatgagaaagaagctctgcatg

SEQ ID NO: 35397 - DNA, 375 bp, Glycine max
gctagcaatactaatagcaaaaactcattcgcgatctcgttccgtacgtgcagccgcagcaagtgatcgaagcgaaagagagagaaattcatcgtcgcagtaatcatgggtaaggttcatggatcacttgcacgtgctggtaaggttagagggcaaaccccgaaggtggccaagcaggataagaagaagaagccacgtggccgcgcccacaagaggatgcagtacaatcgccgattcgtcaccgccgtggtgggattcggcaagaagaggggacccaactcgtctgagaagtgaggccgaggcttgaggaatatgttgctactctatttgatttatctttgttgttttttatttatgtttaatttgtatgttttg

SEQ ID NO: 35398 - DNA, 310 bp, Glycine max
  unsure (1)..(310): unsure at all n locations
gagaggcggaagcggcaaatcgcttcgaccgagttccacaacagcagcttagcttagtagcttaactctttctactggcgtggcgctgctggatgcttttgatcaatagaacaggaagaggagtcagccaaaaagaaagaccgggagggagggatgaccaccaagatatgcatagtgagtcgatcgtttggatgagccagttttggggaggcagtttggggggcttcaggggggacacngaagattggattaggggaatcacgagtcttatatactgtgttacgatcacctcagattgataaaaagtcca

SEQ ID NO: 35399 - DNA, 281 bp, Glycine max
gagggttacaatccttggtgttgatccaaaacgtccacacattcgtcatggacatatacacaatgggtccgacagaaacgtgtcaaagggtccgttgtaacagcgaacaagaatgttcaggaaaaggtcatcaatcctttgttcgagaagcgtctcaagcagttcgggatcggaggcgcgctgccgccaaaaccggacctgacgccgttcgtgaagtggccgaagaaagtccaaatccaacgcaagaagcacatcctcaagcagaggctcaaggtccctct

SEQ ID NO: 35400 - DNA, 318 bp, Glycine max
gaaggttttgtgccgttgtcgctgctcatcctccataacctccgaactctactcctaataacgacgccatgctgaagacacatggttcgtcacctgctcgcatcctcatgtctcacctcatgaggtactggtgggctgagaggtcgatttcaatctcccatcttgagaatgattttcaggtcccttttgccggttgagcgcatgccaggggaattgtccgtgaggggcgaggtattgaaactaagcaggggaactctgctattcgtaagtgtgccagcgttcaacttatcaataatgggaactgaattgcagcttttg

SEQ ID NO: 35401 - DNA, 300 bp, Glycine max
gagatagctcagagagaaaggaaaggttaactaaagaagcaatacgtcactggacacgcttgttgttcatatccacacgtcttctactcaagatgccgacgctctcgaacaggctttcaaaggatggggggcttgatgacaaggccattataccagtactgggtcacagtaatgttcatcagaggcaatgcatcagaaaagcttatcaggagatttactaataggatctcagcaagcacctttagtccgacatctctggtgactttgctaaatctatataccgatggatgttgcagcctg

SEQ ID NO: 35402 - DNA, 179 bp, Glycine max
ggattgtcacatgtcacttaacactagagataacccatttttcaaggactaaaaacaccattaaacccaaaggatcaaacttaaagtaaacataaaaaccaggtgctctataggatccaagcttacctacacttacatgagaggtcatagctcttcaatattgtcaccgaaattcaatt

SEQ ID NO: 35403 - DNA, 195 bp, Glycine max
gagcgaaacagagagtgatttcagtgagtgatcagtgttcacttgattacaacaaagtcgtcagagtcaattgaagaagatgccgatcagaaacatcgccgtccgcaggccggtagaggcgacgcaccccgagacgttgaaggcggatttcggcgagttcatcacaaccttcatcttcatgtgcgccggctcaag

SEQ ID NO: 35404 - DNA, 317 bp, Glycine max
gacagcacaatagaacgcgcacgctctcatttgcgcgccgtcttttgttctcgcatcgcatagacactatcgttcgtctcgtattcgccgattctcgccaggctgaaagcgagatccgacggtaaagacgcagatagcacgttgaaacagaaaggcgctggagctgggatgaaacaatcgaggaaagctgcgaaagaccctaagcaaccgaaaatgattacaagcgcattgttctgatttatgtctgagttaagagagcaattcaggaaggagcatcataacaacggatccgtcgatgttgtcggcaaagctggtgg

SEQ ID NO: 35405 - DNA, 364 bp, Glycine max
gacttcaattggaatcagattatttcaatctcctagcgcagttccctagttctcccttcaatatgcagatcctcgtcaagaccctcatcggtaagaccatcacccttgaggtggaaagctctgacaccatcgacaacgtcaaggccaatcatccaggacaaggaaggaattcccccggatcagcaacgtcccatcttcgccgagagagcacctcgaggacggtcgtacccatctccgactacaagatccacaatgagtcaatccttcaccgtgtcctacgtcaccttggtggcaggcagatcttcgtcaagactctcactggcagtaccattaccctatacgtctagagctctgacaccattga

SEQ ID NO: 35406 - DNA, 208 bp, Glycine max
gagtaatacagacagcaacatgcgcccagcggttattctcaaaactaccatctctcttttggaggcgtcgtcgtcctcaacaccctgtgatggcagactcaacactctcgctagacacgtccttccacaaatggcttctcatgacatgatctgagaatcttcaacctacgcatctgaatccgtcatcaatcatctcgttcgtactccc

SEQ ID NO: 35407 - DNA, 386 bp, Glycine max
acccaggcgtcagcccacgcgtcagcggacccgtcagattgctgccagacgacaactgaacggggtccgcgcacatctcacagcataactgtacacaatgcgcaatctctcatttctctcatattacgaatgccctaacgttcatctcggtttcaccgattctcggcatgccgaaagtgtcatacgatgctatcgtcgccgatagccggttgaagcacacaggcgctggtgcttgaatgaatcaatcttggatagctgatatggatcctaacattccaatcagatctccacacgctttcgtcatattcaagtccgagttcagagagcattttaaggaggagcattctaacaacaagtccgtctctgtagtcggtaaagctggtggt

SEQ ID NO: 35408 - DNA, 359 bp, Glycine max
ggcacttcaattgcaatcaaattagttcattctctttgcgcagttccctacctctcctttcaagatgcagatcttcgtcaagaccctcaccggaaagaccatcacccttgaggtggaaagctctgagaccatcgacaacgtcaaggccaagatccaggacaaggaaggaattcccccggatcagcaacgtctcatcttcgccggaaagcagctcgaggacggccgtaccctcgccgactacaacatccagaatgagtcaacccttcacgttgtccgtcgtctccgtggtgggatgcagatcttcgtcaagactctcactggcaaaaccataaccctagcagtcgaaagctctgacacca

SEQ ID NO: 35409 - DNA, 304 bp, Glycine max
gaaagaagttaagagagttttttttgttccacactgaccaacccttggagacgcaagtgatactttcgttacctatcttggtcttgtatcccttagccttattttcaaacatagtctttggtaaatggttcaaattggacgttcattcaagagtaactgggctcgtaacaagttgggaccaatggcattactcacagcatgacactcagggtgacaagcgggtatgcttgccatgatgtgacaagtcacatcgtaggaagcactagcgagagacacacttcgttgttgttcgtgacaagcttcg

SEQ ID NO: 35410 - DNA, 236 bp, Glycine max
gaacgacgtatggactgatctcagtgcatgatctgtgatcaattcatctcatcaaaatcgacagagtcaattcactaaaatgccgatcaaagacatcatcgtcagcaagcctgatgaggcgactcaccccgagacgttcaaagccgctttggctgaattcaactcaagcctcatcttcgtgtacgacggctcaagctccagcatcgcctacaacaagctcaccgacaacggcactg

SEQ ID NO: 35411 - DNA, 222 bp, Glycine max
cagagcacaactcatccgtgagtgtaaggatggagacagcttcttccatggctctctcatccccatccttggatggcaacgccgtaaagctgggccgatcaacgggatcaatgctaacggtgcgtatgaggaagatcgtcacccttcaagtctcctcaggaatcccattctacggcccatactttgacaagtacttgagcggaatctccggggagctcccgt

SEQ ID NO: 35412 - DNA, 159 bp, Glycine max
cgcacgaagaagagcgtggagacctacgggatctacatcttcaaggtcctcaagcaggttcattgcgatgttggtagttccagcggggtcatggggcatcctgagcggcttcgagcacgacatcttcgagaagctcgctgaggaggcgtcgcgtttggg

SEQ ID NO: 35413 - DNA, 254 bp, Glycine max
ggaagagtgaagagaatggctcccaagggtttaacctttctggctgtgttaatatgcgtttcagcactgtcactgagtccttctgttgcgggggaacggcaaaataatggccttgttatgaacttctacaaggaatcatgcccccaggctgaagacatcatcacagaacaagtcgagggtctctacggggcggccgcaagaacactgctttctcggggcgcaggaacatcttccatgactgtgcggttcagagt

SEQ ID NO: 35414 - DNA, 161 bp, Glycine max
ggcaacattgttaaccattctcttcactttaaagttacatagtttttcattgttttacttaatctacaatggctgcttcaacaatgactctctcttcatcatcattggctggccaagctatcaagcttgtcacctccacccctgaacttggtgtttgaatg

SEQ ID NO: 35415 - DNA, 281 bp, Glycine max
caatattatatgtgagcttgttgatcccgatggtctactaacgcagctaagggtgttgaaatcagtacatgttgatggtgttatggtagactgttggtggggaatagtggaggcacatgctccacaagagtataattggaatggctacaagagactctttcaaatggtgcgagagcttaagcttaagctgcaggttgtaatttcatttcatgaatgtggaggcaattttggtgatgatgtttgtattccactaccgcattgggttgctgaaattggtcgga

SEQ ID NO: 35416 - DNA, 146 bp, Glycine max
tccagatgcgacaatacaatcgaagggggatgtggcagaaagaaatcaggacgtgcaaacggaaagcggggactctaaaggatccaagcttacatacgccttcatgcgacgtcataactcttccatagtatcaccgaaattcaatt

SEQ ID NO: 35417 - DNA, 270 bp, Glycine max
gacacatgcccatcatcaaagtttcttcctttctctgctctttgtcttctctgacacatttggggccttgttgagtgtgtttttgcgagagggtatggcgaaggacgttgaggttgctgaacgttgctccttccctgggaaagactaccaagaccctccaacagcaacactcattgatgctgaagaactcacaaagtggtccttttacagggctcttaatgctgagttcaatgccactttgctcttcctctacattaatgtgctcacagt

SEQ ID NO: 35418 - DNA, 355 bp, Glycine max
gtctagaagtcccgggtcgactcacgcgtggatgcaataagactacacaaggggaacgtaatgtaaatcagaaacctgctgtattgcgcgtagtaattcacaatttgtggtaaaccaaatggcgaaagttttcggtgattttcggttccttcactgggttgccgctggcgtcttcagcaatatccagataaggcttttcgcaactcaatcacaatatgctgatcgcctacctgcagctattgaagctgacaaccattgtgcaagtcaaacgcgatcactgattgatcagattagcttgcaacaaggacgaattgtggccctagaagaagaacggaaacgcctagaccaaaaatgt

SEQ ID NO: 35419 - DNA, 387 bp, Glycine max
cgggccaacccacgcttcgaccaaaccttcgttccggtgccaaaagaccacaaaaaggggaagaagaagaagaacgagatggcgtcaattgtgaagaacgtactcaaatccgtcaaagaaaaaggtttccgggccttcctcaaggaactcaaaggtgaaaggtacctgaaaagccttcccgattggaatcccctgtcaaccaagattcacaataatggggcaacacttgttggtgttgataaatttggtaacaagtattatgagaaacttggagacacacagtttggaaggcacacgtgggttgaatatgcagagaagactagatataatgcctctcaagttccagctgaatggcatggttggctccacttcatcactgatcacaca

SEQ ID NO: 35420 - DNA, 282 bp, Glycine max
ggtgtgtagtataagattcacttccttactcattttgtaatttcagtcagtcataatctttgtgaaaaataatgttcatcgagaattttaaggttgagtgtcctaaggtgaagtacagcgcaactgagattcagtccgtatacaactaccacatcaccgaccttgtttacgagaacacgaatgggacctatcagtggattgtcaaaccaaaatctgtcacgtccgaatttacaagcaacatccacgttcctatcttaggggtaatgcctgtgggttggggtg

SEQ ID NO: 35421 - DNA, 284 bp, Glycine max
gacgttccattctcttcaaacgtaacgcagcatcgctattctcttcattccatggctttgcgcagccagcagaccgtggattacccgagtttcagactcgttatcgtctgcgatggtggcacaggaaagacaagctttgtggggaggcatcgcacggggagaattctgggaggagatatgagccgggcagcggtgtgggggtgcacccattggagtttttcagagactgtggaaagagtcgatgttactgccggggagcggctgggcaggagaagtttggtggg

SEQ ID NO: 35422 - DNA, 261 bp, Glycine max
cccacccgtccgcccacgcaaacataccgctgctatatactacagaacgggatccacatcctccacaccacatctccactcttagctgccattggcttttcttcttccatttctcttcctttctaaccttgtttctattacccattctcgtattctgtcctaatcactcttgctccttccaaactttcctccttttccgagttttctcccaaacccacttttggggattctcttaaaataccaacttgctccgtttccctc

SEQ ID NO: 35423 - DNA, 354 bp, Glycine max
ggattccatcaaatctcttcagatccgccaggtcctcacccaggctgtgagcctaggcatgattgttacgtctgcactgataatatggaaggcattgatgtgcgttactggcagtgaatctcccgttgttgttgttctttctggaagcatggaacccggattcaagcggggagacatcttgttcttgttgtgtttaatgttgatggacgtgagattccaattgttcatcgcgtaattaacgtacatgaaatggaagatactggggaggttgatgttctcacataaggagacaacaattatggggatgacaggctactgtacgctcactggcaactttggctgcaaaggcaccac

SEQ ID NO: 35424 - DNA, 393 bp, Glycine max
gactgcaactttgcacactgtgaggcatcaaattccaattaaggttacgcttaaaataaccaatcaacatgggagtcctcatctttgtcgcccgcacatccggcatcaaaaggcgcgccaagcaacattccggtcacatcgaagactccgccgagtccaccttccatctccaacggaagctcgtacaagccgctctcgccgttaaatcctccggtggacttcactcctctttctcacccgtgtcccctacctccacatgtgttcgacgtgacatcgggatccttcgtattcgatggaggtggtagtagtgctatagcaactgcacttgcaggtggcgcagccgcatctgacgatgcaccagctgctgacaaaaatgaacaaaacgtggatgaa

SEQ ID NO: 35425 - DNA, 394 bp, Glycine max
actcaccacttcaaaacactcataacacaaagcacaaagcaaagctcatccttgagttaaaaaatggcagcagcttcttccatggctctctcatccccatccttggctggcaaggccgtgaagctgggcccatcagccccagaagtgggaagggtgagcatgaggaagaccgtcaccaagcaggtctcctcaggaagcccatggtacggcccagaccgagtcaagtacttgggcccattctctggcgagcccccgtcctacctaaccggtgagttcccaggcgactacggctgggacactgctgggctttccgcagacccagaaaccttcgccaagaaccgtgaactcgaagtgatccactccaggtgggccatgctcggagccttgggctgcg

SEQ ID NO: 35426 - DNA, 351 bp, Glycine max
gagagagaaggctccatttataaaacatcgtgtgcgtactcgctcttcacctaggtttcggtcccatcaacttcagggatggtgcaaacgtccacttatcgcaagtctcagagctatgctactagttccaactaactacgggttgttaagatccctgatggcgaattggtgtactataacatctagttgagagcacgtggacgtaactgccctgtcagtggtaagaagatccaatggattctatacttaagtcctgctgaattcaagaggtctagattgccgatgaatcgcatgacagtagatcgatcctatcgatgtctgttatcctggggagctgttacagagttgatt

SEQ ID NO: 35427 - DNA, 379 bp, Glycine max
gggccgagccacgcgtcagtacaacctgtcaggacaacagtccgggagtcgtcatttcaattttcaatgtggatattccactgtaaagcatcaagacttaactcgaaccctccccgtcacaaaagaatatcctctttgtctgattatcgtcgtcaagatgttggatctccgtctcgagcaatgctcgctcctgaagaaagttttggaatccgtcaaggagctcgataacacgtatacttcactgcaccccatgtgttcgactccaagcactggattctactacgtgaacctcattgctcaccacaatctatacgcaggtttctatcagtacgactgcgacagcaacatctccatgggcatgaatctcaacaagatggcc

SEQ ID NO: 35428 - DNA, 344 bp, Glycine max
gacatctttcactcgttctctgaaattttaattgacttttctcccctcataaaaaaaacctaccaatggctcccgcaaaggcagagaagaagcccgcggagaagaagccggcagagaagaagatatcgaaggaaggaggaagcgagaagaagaagaagagaacaaagaagagcgttgagacctacaagatctacatcttcaaggtgttgaagcaagtgcaccccgacatcgggatctccagcaaggctatggggatcatgaacagtttcataaacgacatcttcgagaagctcgcccaggagtcatcgcgtctcgctaggtagaacaagaagcccaccattact

SEQ ID NO: 35429 - DNA, 333 bp, Glycine max
gacaacacaacgcaacacaacgcgcactctcgcttttctctctgatcacagctaccctatcgttcttcgcggtttcgccgattctcgccatggcgaaagccatatccgacgccgaaggcgccgatagacggttgaaacgcaaaggcgctggtgctggaaggaagcaatcgacgaaagctgctaaggattctaacaagccagagagacctccaagcactttcttcggtttcatgtccgaattcatagagcagtttaagatggagcatccgaacaacacagccgtcgctgttgtcggtaaagctggttggtagatatggaaatcgctgtctgatg

SEQ ID NO: 35430 - DNA, 187 bp, Glycine max
ggttgtgaatcaccataactcttccgtcttgcgtttctctgcctacaaggattgaaacatgggtcaagcactacgttgctagcaacttgatcagtcaaatgtcgatatcaccgagcattttggcacatttgatcatgtcctacaacctgcatgtcatcacctgccttggtgtcctgcgtaccacctt

SEQ ID NO: 35431 - DNA, 182 bp, Glycine max
gatcatagcgatccagagagtgggttcaatcagtgatcggggttcacttgctccttcgtaaagtcctcgtcatcagcataatcatcactccttggttggagacgatgctgatgacagacgtcgccatcggaacgcctgaagacgctactcatcccgacacctctgaacgtggggttggctga

SEQ ID NO: 35432 - DNA, 381 bp, Glycine max
gttcttaaatgaaaggccccaacctaggcctggaaaaggggtcaccaatacctgccaagtctgtgagcgcagcctccttgattccttcaacttctgctctcttggttgtaaggtatatttaaatggaattcctaatcttaactacatcttagttgtaacaaaatatgatgaatagatttcctaattttttaagaaatgttgtatgtcctttgtaaattgtaactacctcctacttttttgctgtataaagtatgtaacattatagttgtactttttatgcctgctttgaaaaagtaagaaaaaaatgatgatgagaacagttggatacgaatgaataatgatctcttgaacttttgaattttcttctcagattgttggaac

SEQ ID NO: 35433 - DNA, 292 bp, Glycine max
ggattctgcaacactttcgtttcgtcactctgttgttttcccatccacagtactctctacaatacaaaacctccactttcagttctacaatataagattgttcatcaatggaatgtaatgatcagcgtgtaagtgtaagcttgaagagaaaatcaccagaaaatggagatcatgtactcttcaacaccttttctctggatgaccttaatgaagatctctttgaaaggatactttcatggctccaaacttccacattctttcgcctcaattctgtgtgcaaaagatggaaatc

SEQ ID NO: 35434 - DNA, 288 bp, Glycine max
ggtgtactatcattgcaacatcatggaaaaatggtgtaactgtgacgtcacaaacaccgcacaacaagcgtgctcaaatgctgcacaagtaaggtttaggataagtctagtgtgatccccgagatctccatgaacacttcacggcaaaatctcaggaaattagctagagattggtttatgatcaggatatcaaccagaattcaatcacgatcaactcctcctcagatgcacgaaggataaaggaagggccgacgaacgggttatagtccagttaagggtaccatggag

SEQ ID NO: 35435 - DNA, 395 bp, Glycine max
gtgctgctgcaagaagacgaaagagagggacagcacagttctcatactttggagaatcccaacccttagttaacacaactatcattgccacctctgctattcagtaatcagcattcactggtcaaactgctctgaagcagctcaatgagttcgtccgcatgaccggtggcgcctgcaaaggtcgcactaacattcgccccaccgtcaatagtgctcctcagagcatctggtatggacctgaccgtcccaagtacttgggtccattctcggaccagattccaacagacctgaccgcggaattccctggttactaccgattggacactgccgggttatcagctgaccctgaaaccttctccaggaaccgggagctggaggtgattcacagcagattg

SEQ ID NO: 35436 - DNA, 258 bp, Glycine max
acttgatatcacattctgccacagtgcttaacatgcggattggataagcccctctatctgcagatcttagattcagacttttaaatgcgaattagccccatgtttacttgtttgcataacaagaggaatggctgtgttgatctaaatccttgccccacacatacataacctaaaggagaaagaactacaaggaggacttgaattttctacgaaagtgactctcacaattcgcgggaccctctcaagaattcaggctaa

SEQ ID NO: 35437 - DNA, 285 bp, Glycine max
atccagctctcgcaacagtgcataccctctcgcattccgtatttcctcccctccttcattcaccgctaactatcgacggttccaacatggacactggccgaagaattaagaatggatcccgacgtagaaaaggacgaggtccaaagaagaagccggtttcaacgtctgtcaaaaccagtctccaagtcaccatctgaagaattggccgtaagttgactaaaagaaggtacgctcagcgtgtcggtaccggtgctcccgtatacttcgctgcagttctcgaatacc

SEQ ID NO: 35438 - DNA, 304 bp, Glycine max
ggcccattcaccgaggcaatgcagatagagttactgagtttccgagattaccagttgactcattgattcaacatgggaagatgctaagagagttaacgacgtatcacctcatgaatgcgtaaacgtctaagcttaagagttcaagcgttatggaactacggaacttcatgaatggagtgatattgtcaaaatttcaggatttagcgacttagcatcatgagatgcagaatggtacgacagtatggctgcctcaatggctcgaaatatcaagttgacatgtggtcgtggcgttcgagatgatcaa

SEQ ID NO: 35439 - DNA, 290 bp, Glycine max
gacagctgcaataacaatggctgcctcactagatgctgcagctaccttcatgcgacccaccagcgttcgaatatcctctcgcatcctcatatctacacaatgcatttctaaagcatttggcatgtcacctgctgcaactaacctcacttgctcccttcagcctgatttccaagaacttgctcaagtgtgtgtccacgctaccaaaattgcaagattcgcccttgccacctctgctctcgttgtttctggatcaagtgcacaaagtgttccaatcaggccaaccctcaacc

SEQ ID NO: 35440 - DNA, 286 bp, Glycine max
gggtcgacacaagcgtccgcccagacgttcgacagctgcgaaaagaccacagaatggggaaacactcccctttggcgctgttgttgttgccgcagcaccgaacaacttcccctgttaatcgcgtttcgtttgtgcaatgttttaaaagattgctgacgctgaagacattcaacctcctggtgttgataaaggaactggaatggtcaacgctggttttgcacgtgatgatgctcctaaggccgtgttccccagcattaatgggaaaccacgccatactggtgtaatg

SEQ ID NO: 35441 - DNA, 316 bp, Glycine max
gaagttgcgtgtgatgaaccataaccatgtcagacgatgaacaccacttcgactcaaaagctgacgctggagcatcaaacacatttccccaacatgctggaaccatccgcataaacggttacattgtcaacataaacatgccatgcaatgttgtcgatgtttcaacttccaagactggctagcatggatacgcaaagtgtcacattgttgcaattgacatcttcactgggaaaaaacttgaggataatgtcacatcttcccataactgtgatgttccccatgttaatcgcattgaataccaactcattgacatctc

SEQ ID NO: 35442 - DNA, 339 bp, Glycine max
ggaaacagagagtgatttcagtgagtgatcggtgttcacttgatctcaacaaaatcctcagcgtcaattgaagaagatgccgattagaaacatccccgtccgaaaggctgaagaagcgaatcaacccgacacgttgaaagccgctttggctgaattcaactcaaccttcaacctcctgttcgccggctcaagctccgggaacggcctacaacaagctcaccgacaacggcgctgccaaccctgccggcctcatctccgcctccatcgcccatgcattcgccctcttcgtcgccgtctccgtcggcgccaacatctccggcggccacgtcaaccccgccg

SEQ ID NO: 35443 - DNA, 377 bp, Glycine max
  unsure (1)..(377): unsure at all n locations
gggttcttcttagccgtagttttctctcacagccgcagacagagatggaagctgtgtgtggaagtgtttgggtcacatcctctcttccacgctcacccaagtccactctctctctattccgctctactcatcaacacctaacagcatttccttcacaatcccatcttttcttatatcaccctcctccctatgctaatgctaaaaccctccgcgccagaacctcctccaaacccgccattttccttccccacttaattgcttctctggaacaagttgaccagacttacataatggtcaagcccgacggcgtgcaacgtggcctcgtgggagaaattacttctaggtttgagaaganagggtttaagtcaactggcttg

SEQ ID NO: 35444 - DNA, 249 bp, Glycine max
taatggggagggaaaaagattccacggttctcgagttcggtgcgtcgatgctagcattctcttctgcaactttcgcggggagcttcattcaccatggatgtccgtgccgaggatgctttgttgtttgaaccgtcagtgtttcgcatctctaggaaaactggtaatggaaagcgtcccggaaggggtgcgaaatgcgtttggaaatgtcttgcgcttggtcatcatactcccacggaagccatcgaacga

SEQ ID NO: 35445 - DNA, 314 bp, Glycine max
ggagcgaacaagatattaaggtttttgagtgcggtgcggcgatgctagcactctcttctgcagctttcgccgacagcttcattcaccatggctggacaaaccgagaaggcttttttgaaacaaccaatagtgtttctcaggctcgaataaaactgggaagggaaagcgacccggaaagggtgggaaccgcttttggaaatccaatgggcttggatttaagactcccacggaagccaaccaaggaatctacattgacaagaagtgcgccttcactggcaatgtctccaaccgtggccgtatcttggctggaacat

SEQ ID NO: 35446 - DNA, 383 bp, Glycine max
  unsure (1)..(383): unsure at all n locations
gaactcacacttcaactttttcataacacaaagcacaaagcaaagctcatccttgagttaaaaaatggcagcagcttcttccatggctctctcatccccatccttggctggcaaggccgtgaagctgggcccatcagccccagaagtgggaagggtgagcatgaggaagaccgtcaccaagcaggtctcctcangaagcccatggtacgggccagaccgagtcaagtacttgggcccattctctggcgagccccgtcctaactaaccggtgagttccaggcgactacggctgggacactgctgggctttccgcagacccagaaaccttcgccaagaaacgtgaactcgaagtgattcactccaggtgggccatgctcggagcc

SEQ ID NO: 35447 - DNA, 323 bp, Glycine max
gtcgacccgacgcgtcagcccacgcatccgtagaagacgacagaagggggcacccagagaggaggaagctttgagagagagagagggaggagggagagtgttgacgctccatcaagatgggtatttctagggattccatgcacaagaggcgtgccactggtggcaagaagaaggcatggagaaagaagagaaagtatgagcttgggcgtcaggccgcaaacaccaagttatcaagcaacaaaactatccggaggattcgtgttcgaggtggcaatgttaaatggagggcattgaggttggataccggcaattactcatggggt

SEQ ID NO: 35448 - DNA, 306 bp, Glycine max
attcccaccattgggtccaccttggagacggtggaggataggaccattagtttcactgtctgggaggttggtggccaggataggattcgtcccttgtggaggcactgcttcgaaaatacacagggtcgcatttttgttgttcacagcaatgacagggagagatttgttaaggccagagatgagttgcacaggattttgattgaggatgaactgggatatgctgtatcgcttgtatttgcgaacagtcactatcttcccagtgcaatgaatgcggcccaaattactgagaacctgggatcccagtct

SEQ ID NO: 35449 - DNA, 358 bp, Glycine max
  unsure (1)..(358): unsure at all n locations
agcccaggcgtcagacggctgcgaaaggacaagataagggggagtacaacttcagagtttagaagaataccccctcttttgctgcatcagaggagttgtaaattaagagcatggctgcacaagctcttgtatcagcatcttctcttaccttctcagcggacgctgcaagacaaagtcttggaccaagatcactctaatctccatttggcttctcgagaaaagtctcctttcttgttaaggcagctgctacctcccctgtcaagcagggatcagacagacctttgtggtttgcatcaaagcanagtcgttcttacttggatggcagccttccgggtgactatggatttgacccactggg

SEQ ID NO: 35450 - DNA, 345 bp, Glycine max
aaaaccaaaaaaagggaatgccatccatctgattaatgtggacagtattttgatcgcgttcaagtcactctctcaaaatggaccacgatacgctcaagcgcaacatcgattgcatataattcctatccgcaccactcacatgcaaaagcgtggctaagtgtgacatatcggcataattgagatgtgcgaggctgaagcctaaggattgctggtactggctagctggccagtgcatgaatccaaactgtgcatttagacatcatcgattggatgggcataatgcagcgtcagtgcaatctgaatttaagcaaacatcattacgtgcacacaatacacttgttcccc

SEQ ID NO: 35451 - DNA, 343 bp, Glycine max
gcgagctagagaagttattatggtttttgactgcggcggtccaaacactcttctctgcagcgtttgcctaaatctcgcttcaacatggctgaacacatcgggaaagcttttctgaagcaaccacaagtgtttctcagcactccgaatactgggaatggacagagatctggaaaaggtgggaaccgcttttgaaattccaatgggcatggatttatcactcccattgaagtcatctatcgaatctatattgacaagagttgccccttcactggcaatgtatccatccgtggccgtaacttggctggaacatgtcacactgctaagatgaaccggactattattg

SEQ ID NO: 35452 - DNA, 355 bp, Glycine max
gtgtagtataggattctcttctttattccttttgtaatttcattcattcttaatctttgtgataaaatcatgttcatccataattttaaggttaaatgtcctaaagtgaagtacaccgatactgatcattcagtccgtgtataactactaaaccaccgagacttgttcacgagtaacacgaatggcaccgtatcagtggattagtcaaattaaatctgtcagatacgaatttaaaacgaacatccatgttcctaaattaagggtaatgcatgtcggttggggtggtaacaacggctcagtactcaccagtagtgttagtgcgaaccgagagggcatttcatgggctacaaaggac

SEQ ID NO: 35453 - DNA, 305 bp, Glycine max
tacaactgcgagaacacgatcctacggtatctaaacaacacacactaagttctgttccttttcccacccaattcaattttcgcaattggctcataacgatacatactgatcacaggtcgaccttcggcatagcgttatatcagcagctttccactaaagcggatcgtaagtcttgctccagctaccggccgctttaagaagcctcacagattctgtcccagaaccgtagcgctccgatagatccaggatctacagactagcacggaacttcagattcttaatctcccgttccatcgattggtccc

SEQ ID NO: 35454 - DNA, 350 bp, Glycine max
ggttttgcatttgtcttctttaacttgtcactctctctctctctctaatggcttcattttccatcacctcctcgcctcccacccttcacaaagccactatcaccgacccttcttcttcttcttcccacgccttccctcaccgttctcccttcgttttacgcatgccccaccaaccccatcgccctcaaactcctcttgttttgcccaagattcaatctttgcgcaacgaaactagagctattccagttaccaaagacctgtgggataattcaattctgaaaagtgaaatcccagtccttgttatattctatgcaaattggtgcggcccgtgcaggatggttcaccggata

SEQ ID NO: 35455 - DNA, 364 bp, Glycine max
  unsure (1)..(364): unsure at all n locations
gaatcctctgttacctctcagcagcttaggctagggttcagaaacgaaaaagggttcggtgttcagttcgcgatgggagccaagtggaagaagaagcgtatgaggaggttgaagaggaagcgccgaaagatgagacagagatccaagtagtgcgttaatccaagtagttgatttccgttgcttttataattatgttgtcaaattgggcacccagttgttagaggcactggtttctcctttttgatgttttgatacatttttgtttggtttaattcgtcttatgttattagctgaaaacaatgctgttactgcgtttgcgaatcaacatgatctcttatacgaaaaanattttcaacaatttaat

SEQ ID NO: 35456 - DNA, 422 bp, Glycine max
cccgggtggccccacgcgtcagaataatatactagttaattaaacagcattcattaatcattacgaaacataaaccctgaacatggagatgaggaaatcatgtggcttcttcttcttgctcctcctccttgtctttgcttcccaggtggtggtgcagacggagggaagagtgtgtgagtcacaaagccacgggttccatggtttgtgtaatagagaccacaactgtgctttggtctgcaggaacgaaggtttctccggtggcaggtgcaaaggcttccgccgccgctgcttttgcaccaggatttgttgagatctcatcaaacactactcttgccatgcaaattaataaatcatagctaggccaaataaattgcatctactctttatccatttgggagctagctaccacaaccaactcatac

SEQ ID NO: 35457 - DNA, 328 bp, Glycine max
gttccaatgagaacccaactataattgcagggactgtttttgatgaaaatccagaagaagcagtagaccttgataccgtcattaaagcagcgctgaaagacagtaacaagctcagcagtggaactttcaacactgtttacaaggcagtcatgccttctggggtggtcatatctgttaggagactgaagtctgtagacaagacaataatccactaacagaacaagatgatctatagaacttgaaagactgagcaaagtttgccatgataatctaatgcgtcacattgtctatgtcacttatgaagatgttgctcatcgcctgcatcaat

SEQ ID NO: 35458 - DNA, 430 bp, Glycine max
  unsure (1)..(430): unsure at all n locations
ttacgattgcaaaaagacaacaaaaggttacggttgcaaaaaaacaacaaaaggttacggttgcaaaaaaacaacagaaggggaacacaatggcaactaatttaaccccttcccaaccaaccaaaccctcacttttttgaaattacttgcatagatagataatcatggctatgatgaaacgtgctgcttcctctgcgcttcgctctcttattgcctcatcctccaccttcaccagaaaccttcatgcctcaggtgaaaagaagaagattgtgggggtgttctacaaagggaatgaatatgctaaattgaatccaaattttgttggatgtgttgaangtgcattgggaatacgtgagtggctggaatcacagggtcatcagtacattgtcactgatgacaaagaaggacctgattctgaacttgagaaaca

SEQ ID NO: 35459 - DNA, 344 bp, Glycine max
ggatcccttgtattctattcttcgggattcacatggctcgtttcaagcacaacgctcttaagtccacaagaggatacgctctctacgaagcagcttgcaaccgaagctgcacgtatttctgcaacagctactggtggtgtgaagaccccccaccgttatcatcctgttaacgttgctcttcgtgtgattaagctgtacctgaagattaccgaccttttgatgcggaatctctccttccagtagctggttcttgaaattgctcatgacgtcacgactgatatgcgtttctagagtcacgccgtgcttgcattacaaggaactgctgtggctttccttgttaggct

SEQ ID NO: 35460 - DNA, 318 bp, Glycine max
gagaacgaaccagagaatgatttcagtgagtgatcggtgttcacttgatctcatcataatcgtcaacgtcaattgaagaagatgccgatgataaacatccacgtcggcaggcctgaaaaggcgactcaccccgacacgttgaacgcggctttggccgaattcatcccaaccttcatcttcgtattcgccggctcatgctccggcatcgcctaaaagaagctcaccgaaaaccgcgctgccaaccttgcctgcctcatcacaggctccatcggacatgcattcgccatcttcgtcgacgtcgacgtctgagccaagatc

SEQ ID NO: 35461 - DNA, 376 bp, Glycine max
ggaaaattgattaggtcacgcgcttcttccggaattagtcggtgtaatttacatttatccattttttgaaccttcccttcccaccccagaactttcaaatttcaacaaaatcgcagacatggcttctgcggtgcccgcgacggggcgagagttgtcgaatcctccattggacggcatcaccaatcttcgattctccaatcacagcgatcatctccttgtgtcctcatgggacaagagcgtgaggttgtatgatgccagtgccaatgtcttgagaggagagtttatgcacgctggtcccgtcctcgattgctgcttccacgatgattcctccggcttcagtgtcgccgccgacaacactgttagacggcttgtcctc

SEQ ID NO: 35462 - DNA, 242 bp, Glycine max
gagggttttgtgctgttgtcgctgctcatcctccataacctccgagctctacaccgaggagcgaagccatggggaagacacatggaatgggagctgctcgcaagctcaagtctcaccgcacgacggcggatgtgggctgagaagtcatacaggaagtgccatcgtgggaaggacggcgggaaagggtttgccggttcatcccatgccaagggaattgtggttgaaaagataggtattgaagc

SEQ ID NO: 35463 - DNA, 298 bp, Glycine max
cgtcgtggctagctgcattagatccctgtgatggtatccatgttccaacctggttccagaaaggtttacttccgacaccatcagcgtcactccccctcatacttgttggacctggaacaggatgtgcaccttttcgtggatttatagaggaaagaccagtgcagagtagaagtaattccactgctccaattatttttttctttggttgttgggatgaagacggtgactttctgtatcgtgaggtttggttgagtcagtcacagaacaaaggggtgctttgaggagcaaacggtggcgg

SEQ ID NO: 35464 - DNA, 240 bp, Glycine max
ggctgcttccaggaaaagactacaacactgacttgactccttcatgcatgctccacgcggctcggggggatatagctcagttggtagagctccgctcttgcaattgggtcgttgcgattacaggttggatgtctaagtgtccaggcagtgatgatgatatcgtgtacctgaaccggtggctcactttttctaagtaatgggaaagacgaccgaaacatgccactgaaatactctactgag

SEQ ID NO: 35465 - DNA, 244 bp, Glycine max
ggaaaacagagagtgatttcagtgagtgatcggtgttcacttgatctcatcataatcgtcagcgtcaggtgaagaagatgccgatgagaaacatcgccgtcggaaggcctgaagaggcgactcagcccgagacgttgaaggcggctttggctcggttcatctcgggcttgagcggcgggtgcgccggctcaggctccggcatcgcctagaacaagctcagcgacaacggcgctgccacccctgc

SEQ ID NO: 35466 - DNA, 243 bp, Glycine max
gatccacatcctccacaacacaactccactcttagctgccattggtttttcttcttccagttcgcttcctttctaagcttttttcgattacccatttggagattctgtcctaatggctctggcggcggcgggagtttcctccgtgtccgggtgtgtctggcggggggagtgttggggatgggcggaggaaggcaagttgctcggtgtctctcagctttgggaatgtgaaacttggaagcagaa

SEQ ID NO: 35467 - DNA, 342 bp, Glycine max
ggacgaaattctccactgagagacatagaaaaccgagaaaaagaaaaaaagacaatatgtatgtggtgaagagagatgggaggcaagagacggtgcattttgataaaatcaccgcgcgtctcaagaaacttagttacggtttaagcaccgaacactgtgaccctgttctggtgtctcagaaagtgtgcgctggcgtctacaaaggcgtcaccactagccagctcgatgagttggcggcggaaaccgccgcggctatgaccgccaaccaccctgactatgcttctttggctgcgaggattgccgtttcaaatctgcacaagaatacgaggaagtcattttcgg

SEQ ID NO: 35468 - DNA, 245 bp, Glycine max
gaacgaaacagagagtgatttcactgagtgatcggtgtgcacttgatcgcaacagaatcgtcagcgtcaattgaagaagatgccgatcagagagagcgccgtcggaacgcctcaagcagcgaggcatcccgacacgttcagggccgcggtggctgagttcatcgcaaccttcaacgtcgtgttcgccggcgcatgctccggtatcgcctacaacagtctcaccgagaagggcgctgccacccctg

SEQ ID NO: 35469 - DNA, 365 bp, Glycine max
gagacctcaggtcaggcggggctacccgctgagtttaagcatatcaataagcggaggaaaaaaaaaaaaaaaaagaaaaaaaaaaagctggcggcccaaaagattcaagcttaaatacccctgcaagccaagtcaaaacccctccaaaatgtcaccgaaattcaattcaatgggcctccatttaaaacgtcctgactgggaaaaacctggccttaaccaacttaatcccctttcaacaaaaccccctttccccaactggggtaataacgaaaaagcccccaaccattggccttcccaacaattgcacaacctgaatggccaatgggaagcaccctgtaaccgggcaataaaccccgccggttttg

SEQ ID NO: 35470 - DNA, 291 bp, Glycine max
gaggtttctctctcccgtatacatcttgaacctaccgcgtttccgtgacagagacatcgcagtggcgatgaggcctacgccgtgttagcggcagatgcaaatcaatccataccccaactcccgtttctgccgtggtcttcctgatcctaatatcagaatctaagatgttggtattagtatgaaaagtgttggtgattatcccttctgcgttcatctggatatcttggactaggaaaatgtttcaagtgcagctgtggcagctgctacaactgcaagcaccagctatatggc

SEQ ID NO: 35471 - DNA, 356 bp, Glycine max
gacagaaaagaaaaaggaaaccctagctggataggtcaaacatcatcatgtcggacgaagagcaccatttcgagtccaaggcagacgccggtgcctccaaaacctaccctcagcaagccggtaccattcgcaagaacggctacatcgtcatcaaaggacgcccctgcaaggttgtggaagtttcgacttccaaaactggaaagcacggtcacgccaagtgccactttgttggaattgatattttcactgccaagaaacttgaggatattgtgccctcttctcacaactgtgatgttcctcatgtgaatcgtactgattaccagctcattgatattgctgaggatggatttttgagt

SEQ ID NO: 35472 - DNA, 372 bp, Glycine max
tggatgcgattggcaacatgcttgtgaagtttcctcctctactcacttacagtctgaacaagaagattagaccagtggtcatattcttgatgaccaaagctggagtcagtgagaaagatatcgccaaggttgtagctcttggacctgagctgttgggatgcaatatagcacataagcttgatctaaatgtaaaatattttttgtctcttggcatacgtcttcggcaattgggtgagatgattgctgattttccaatgctgctcagatacaatccagatgtccttcgtcccaaatatatttatttgcgaaaaacaatggtccggcctttgcaagatcttactgagtttccaaggtttttcagctattctcctg

SEQ ID NO: 35473 - DNA, 370 bp, Glycine max
gaattttgaaaataaagaggaaagcttgaagcataagagagagatgtcatcatcttcagacctggacaggcaaatagagcagttgaagaggtgtgagcctcttaaggagtctgaagtgaaggtgctctgcctcaaagccatggaaatcctcgtcgaagagagcaacgttcaaagggtcgacgctcctgtcatcatatgtggtgatattcacggtcagttttatgacatgaatgagcttttcaaagtatgatgggattgccccaaaactaagtagttattcctgggggattttgttgatagagggttttactcggttgaaacgtttctgcatctgctcgctcttaaggtgaggtatccagattcgataaca

SEQ ID NO: 35474 - DNA, 347 bp, Glycine max
gaaggtttttgaatgctgtgctgttatcctaccattctcttctgcaactttcgccgtcagcttcattcaccaaggttgtccttcacgatagcgcatttttcctacaacgattattgtatctcagctcgaatatttctgagatcggaaagagatgcgaaaggggtgagaaccgcttttggtaatacactcgtcttggatttaagactcccagggaatccatctcacgaagatacattcacaagaagtgacccttcactgaaattgctcctaactgtggacgtatctagccttgaacatatcatagtgctaacatgtccaagtgtattaatgatcagaagaattatcgc

SEQ ID NO: 35475 - DNA, 374 bp, Glycine max
gaaggaacggagggaagaatataatgggatctggaagtggaaaacacactggagagttcttcaggagaagggatgcatggaggaagcatccgatgctcaccaatcagctccgccacgccacccctggccttgggatcgccgtcgtcgccttcgattgattgctcttgcaggtgaaagccggggatcaccactaaacgtttggacggacgcactccattccatcatcacttaataagcttgctagcatgttctcgcagcctttaatgtttaaatttcagaccgtgttcgcttctttggcactcactatgttgtcgtgtatgcctacattttatgccttcaatttgcattcacaatgaaactcaatttacgttaat

SEQ ID NO: 35476 - DNA, 360 bp, Glycine max
  unsure (1)..(360): unsure at all n locations
ggaccganacagagagtgctatcagtgattgatctgtattcacttgatctcatcacaagcgtcagcgtcgattgaagaagatgtcgatcagaaccatctccgtcggcatgcctgaataagccactcagaccgatacgttgaaggccgccttgacttaattcaactcatcattcatctgcatgttcgccggcgcacgcgccggcatcacctacaacaagctcaccgaggacggcgctgccatgcctgccggatttagcactgcatctatcacacatgcattcgccctcttcgtctccgtctccgtcggcgccaatatcgccggcagctacatcaagccctccgtcaccgtccgcgccttcg

SEQ ID NO: 35477 - DNA, 328 bp, Glycine max
aatgagggttgtccctcacgtggaaaaaaaaaaaagagaggagggaaaaaaaaagcggcccacgcgtccgcccacgcgtccggagacacaaaacaagcccgctgcattgctccacaaatctgtgatgaagaaggagttcaggaggatgggaaaagctgttgaaaagcagggggccaaaaattactacaggcctgatcgcaagaaggctgcccttgcaaggttgagtggtgttcagaggaagcctcaaagtgtccaaggtctggggtcaggaacaggaatagacagggcgtgagagtcgcggggagagagtgaaagggaattgagaaag

SEQ ID NO: 35478 - DNA, 255 bp, Glycine max
ggattagggtttgtcattagcacttcgtcttttcacactgccgctgcaacaatggcttcagggaagaaactttcgaacccaatgagggagagaaaagtgcagaagctcgttctcaatatctctgttcgcgagagtggagatggtctcaccagagccgccaaagtgttgggacaacttagtatggaaaccccagtgttgtccaaaggaggaggcactgttcgttcctttgcgattagggggaatgggaagattgca

SEQ ID NO: 35479 - DNA, 329 bp, Glycine max
  unsure (1)..(329): unsure at all n locations
aagctcggtatgaaatattaaggtcctgcttacaggaaatgatgcgtacagggatattgactagtttacaggattgtaagaacgccatgcttcctcattacgctagtgcgaaagataggttgaacactctagattttcatgaggacgcgacattcatgcaactgtgcaaacaactacttgagactgcagaggcatgtganggaatgggtggaaggtcgttgagagagcttccagttttgggagatgctgcgcttgcaaatccgtttgaatgcaagcctattaagttcttaggttcaagggtagaaacagcaaacgaggagcgttctgag

SEQ ID NO: 35480 - DNA, 142 bp, Glycine max
gacagcgaaacagagagtgatttcagtgagtgatcggtgttcacgtgatctcatcataagcgtcagcgtcaattgaagaagatgccgatcagaaagatcggcgtcggaaggcctgaagaagggactcaacccgacacgttga

SEQ ID NO: 35481 - DNA, 354 bp, Glycine max
gaaacacagagggagagagagtgagagaagcagtaattcatcacaatgggtaaggttcacggatctctcgcacgtgcggggaaagtgagaggacaaactcccaaagtggcgaagcaagacaagaagaagaagccacgcggacgtgctcacaagagaatgcagtacaaccgccgattcgtcaccgccgtggtgggattcggaaagaagcgtggacgaaactcgtcagagaagtgacggaggcgtttggaagatgatgggttttcttaggttgcgaaatgtatcacctcgtggtagttgagtgatgaactcaagacggtcggagttgggattaagcgtcaatgaacgagttttttg

SEQ ID NO: 35482 - DNA, 392 bp, Glycine max
gagaacagaaaaataaattgaagattgagagaagatacaaaacagaagagagatgggcgtgacgaaggaacaagttgaattatccttgaaggccaaactgaacccttctcaccttgaagtggttgatatatctggagggtgcggtgcaagttttgtggtagagattgtatccgaacagtttgaaggcaaaaggctacttgagaggcatcgaatggtgaatgctgccttagaggaggaaatgaaacaaattcatgctctctctattaagaaagctgttaccccagagcagtggaaacaacagcaagaatccaaccaatcaaatcctgctgcctagagcatatgttttagttataaaataagaaatccatacagtgtgttgctgactgttgaca

SEQ ID NO: 35483 - DNA, 286 bp, Glycine max
ggcagtccatacctcacaccacatctatccaaacaatcaataacaatggcttatgcaaggcatgctcctacggatgtcttcctgcttgccacttccatcaaactgttcccaacgaacatagatacagcagattgtattggttcatgtacatctttctatataccaccgtgcctctcacgtgattgtcgttctgtctctatatgactaattactggtttctgcatacatccatctggacttacatccgtcgctaacatcatcgattaacatccctccttatgtcaat

SEQ ID NO: 35484 - DNA, 333 bp, Glycine max
gaccacgcgtcagacgacagatgggggataaacaaatcgttacggttttttggttgtgcgagtgagagtgagagagagcaatggaagacatagcagagggagtgaataacatcatcatctctgattcgtatcagagtaatcgcattcatgtctctaacaccaagaagcccctcctcttctatgttaatctggccaagagatatatgcaacatcatcatgaggtctagctctcaactctaagaatggctattgccacagtagtaactgttgctgaaattttgaaaaacaacagacttgccgttcaaaagaatatcaggacatctactgttcaca

SEQ ID NO: 35485 - DNA, 350 bp, Glycine max
gattatcatagtagatattcattccccttatctttctctcttctctctccccgcccaaaccctaactccctatcctattccgctttctctcatccatcatgaaacgaggaaagtccaagatctgaatctaacagagccgatgccaaacctgccgtgaataagaagggcgccgccatcacgactaggaaacccgccggaaaggggaatgcatcgaaagattctaacaagccaaagacgcctccaagtgctttcttcgttttcatggaggaaatcatgaacgtgttcaacaaggaacatcccgacagcaaaacagtgtctgctgttggcaaaactgctggagcaaaatggaa

SEQ ID NO: 35486 - DNA, 259 bp, Glycine max
gaatcacgcactatcagtacaacaactcactcactaagctaaacaatttcatcaagcctgccatggcttcctcgcgtgcttcctctgccattgcagctgttgccatctccacaacaggttcccagaagaatggatcactcttgggaagcacaaaagcttcttttcttaatgggaggaaactgaaggtgaacagttttacagcaccagttggaccacgatgcaggaatagattgcgcttcccaacagttcctcaacctga

SEQ ID NO: 35487 - DNA, 282 bp, Glycine max
cgggccgacccacgcgtccaaccaatcgtccgacggctgcgaaagggcgaccgaacggggaacctgatcgatctcattaccagttgccacactacaccgagattccccctaaacccgtttgcgttgttgtctgcgaagacatggcgacaaccaggagcgtgggaacgttgaacgagggtgatttgaaagggaagatggtgtgcgtgagggtcgatgtgaacgtgcctttggataacaagcttaacatcaacgatgacactagagtccgtgctgatgttgcca

SEQ ID NO: 35488 - DNA, 192 bp, Glycine max
gacaccttcgaattttcttttccttcactttcccgagaaaaaaaaaaacactctttcactttcttgactacggtctcacttcgacatggctcgtactaagcaaactgcccgcaagtcaaccggcggcaaggcgcaacttaaccatttggcaaccaaggccccccgaaattccgttcccctaaccggagaatt

SEQ ID NO: 35489 - DNA, 230 bp, Glycine max
aacgaaacgacgacagaatggagattttatacagaagtaatcgatttcagtcacatagaattcacacaaaataaatgtggcaaaaacacagagaaaaaaaaacaacaaagagcggtcgctctaaaagatccaagctgacgtaggcgtgcatgcgaagtcataactcttcaacattgtgacctaaagtcaattcactgggcgtccttttacaacgtcatgagtgggaaaac

SEQ ID NO: 35490 - DNA, 250 bp, Glycine max
caaaaggggctattcttggtgctaataccatcagcagactgcatttaatcacaccgcaaacagtgaaccacggtcgtcggaaacaactaactcatctccaaagggaagacaggtcggacgaagaacgcaactgatacccttgcgacgaaggattggcatgaaattaatgccccctctgtgtttcaagtaacaaatgttggcgcaacactcgtctcacggatccacggtaccaagattgcgtcctaacgac

SEQ ID NO: 35491 - DNA, 284 bp, Glycine max
gacaccttcgaattttcttttccttcagtttcccgagataaaaaaaacacgcttgcactttcttgactacggtctcacttcgacatggctcgtactaagcaaactgctcgcaagtccagcggcggcaaggcgccacgtaagcagttggcgacgaatgccgcggggaagtcagctcccgcgactggaggactgaagaaggcggagcgcggtcgggccggggaagcgtgggcggctgagggagggcagagggtatcagaagagcagcgagcttctggtcaggaagc

SEQ ID NO: 35492 - DNA, 216 bp, Glycine max
aattcgcggtctgacccacgcatacatacggccctagaagaggagagaaaggggaaggagagggaatgcaagacattgagtagtttcagtaagtgattggtgttcaattgatccttcataagtcatcatcagcagcagcatcatcaccgtagattgagaaatatgccgcttacacacatcgctatcgcgaaagcctgaagaggcgactcatcacca

SEQ ID NO: 35493 - DNA, 142 bp, Glycine max
gttcactttcttccaacctctaacctagctcgttttcttctcgctcatgagcttcaccttcgtcctcctcgatcatgtctcacttcaggggcaagtaccatgaggagcttatcgccaatgctgcgtacattggcactcctgg

SEQ ID NO: 35494 - DNA, 373 bp, Glycine max
gaggggttcaatgtataacgctgctgccgagccccttcgcgatcactaaggtaagtgagtcatctgtggtcgacaacggtcgccaccgccatggctatgaatgacgaggtggttaccagacagtacagcattatccgccactcacgcctccatggctgcacatttatgagtaaagctcctaacgctagtactgagatcaggaagtttgcccagtacgccatggggaccaatgatgtgatggtggatgtgcaacttgatcaactttgtctggagccaatgaatcaggactgttccaatgacgactaaggtaagaattgctcgcaggacgaatgacgatgaacatgcccatgaacagctatacactcatgtcacc

SEQ ID NO: 35495 - DNA, 276 bp, Glycine max
ggcgcattgaacgaagcttagggtttgtagtgtagcatgaataagcagcaatggccccgaatataagaccttaggtgagcaaaaaccctgaactgatcctgggaatcggacagtactccaagtcgcatatgtactacaataggggcatttgggctatcaaggccaaatacggtggcgttttatcgcggctcgacgctaaactcaagcccgatgcgactgctgaagaaccaatcaaattttaccctgctgatgacatcaaaaaacctcctgtcaaca

SEQ ID NO: 35496 - DNA, 368 bp, Glycine max
ggcatcatttcattgcactcattcaccgcacatgtccggcaaggaccgaaagaaaattaaaacggcgtttcgataactgccacaaaaaagtacaaataaaataagaaaaagaaaaccaacatacatcagtcactagtgtgttaaaagcgacacaacacaacataagctttattcttttttcttcgcttcttctgtacagcacccaagattgaagatgatagaccttgcgcgcgtgcagaatgagctcgtggaatgcagcaaggactcggacggatcgggcatcaaagtctgccccaaaagcgacaaccttgttctcttgatcggcaccattcctggccctgtcggaactccttatgaaaggggcattt

SEQ ID NO: 35497 - DNA, 374 bp, Glycine max
aggggactcactcatacaataaagaacagcttttgcttctttgtgaacatggagatgaggaaatcatgtggcttcttcgtcatgctcctcctccttgtctttgcttctcaagtggtggtgcagacggagggaagaatgtgtgagtcacaaagccacgggttccaagggttgtgtaaaagagaccacaaatgtgcgttgggctgcacgaaagaaagtgtctcccgtgtcacatgtacaagggttctcccccgcggggtttttgcaacaatattttttgatatctcatcaaacactactcttgccaagcaatttaataaatcatagctaggccaaataaattgcatctactctttatccatttgggagcctactac

SEQ ID NO: 35498 - DNA, 367 bp, Glycine max
ccaggcgtcagacagctacaaaagggggacacaaaggggtctcgtggaagtgtaagcaagcaaaaccctaacggcgcctgctttcattgtacgtgttttgcagcaggatggagtcacatgtgaagcacgcacttgttgtcaaagttatgggtcgtactggatgtataagacaagtcgaacaggttagagtgaagtttttggacgatcagaagcctcacatcatgacgaatgtgaaaagacctgtgagagaaggatacattctcatcctacgcgagtctgaaaaggaagcacgaagattgcgctagatggtctctcttttttggcttgcctccaaattcgaacaaaatcaatatttttcttgatattt

SEQ ID NO: 35499 - DNA, 292 bp, Glycine max
gatgtttgcttactcagacataccccttgctagcaacactgagcttaatcgagcttcgcacacatgaatcaggaaaagttaatgaatatggacggttcggtcagaactggctgaaagggtagtgtgagaagaaagaagaaagctggccatacaacaacaaccacacatgacagacagcttgataccaacctgactagaataagggtgagtgccatccatgctagtgaataagtcggtatctttaatgatggcgtacttatccagttactaactcacacacttcatgcatcca

SEQ ID NO: 35500 - DNA, 341 bp, Glycine max
gggtcacaaagagatgtattgtagaactgagcaatggtttctctttctcattcgcagtctgcttcttcaatttcacgcgtttcagtcaagcatgatcatgggcagaaaattcttcgtcggtggcaattggaattgcaatgggaccactgatgaggtgaagaagattgttaatactttagatgaagctaaagtcgctgaagaagatgttgtacatgttgttgtgagccctccttttgtgtaccttccttttgtaaatagtttgctgcatcctgatttccatgtcacggcccaaaattgttgggttcgcaaatgtggcacttacactggagacgttattgctg

SEQ ID NO: 35501 - DNA, 336 bp, Glycine max
gagtagcagcagcagctttactccatagtgagatatggtttcttccaaccgttttgctgctctacctctctgttctcttctcctagctctgcttctatgtgcagttggggctagctcttcttcttcgtcttccacaggtgccaccagaattggccaaggctaccgtcttgtctccattgaagagacccctgacggtggtcttatagggatccttcaagttaagcagaaaaccaaaacctatggccctgacattccccttcttaggttctatgtcaagcatgagacagataatccgtttagggttaacataaccgatgcacaaaagcaaaggtggga

SEQ ID NO: 35502 - DNA, 242 bp, Glycine max
cggataagctttgctaaacatagtaatatcgacctttcgtcgtaaaaagccattttcagttgatgatgaacttaattttccataacagtctcagtgacagtccttcaaaccatacaaggctttattaactttgagaacatgatgagggtatatacaactctcaaacgcagggatttgtccgacatagacctcttccttgattagtcgattgaggaaagccttttttacctccagttgagaca

SEQ ID NO: 35503 - DNA, 296 bp, Glycine max
gacttctcttcacacctttgttcactcttcttctcttgcggctatggttttagcgcaacttcttctatatttaaggaacatcggtaaggaaaaggttcacagcagtattgttgtcattggccatgtccactctgggaaatccagtaccactggtcacctgatttacaagcttggaggcattgacatgcgtgttattgagacgtttgagaacgaagctgctgagatgaacacgatgtcattcaagtatgcctgggtgctggacaaacttaaggctgagcgtgaaagaggaatcacca

SEQ ID NO: 35504 - DNA, 296 bp, Glycine max
aggggttagaagaaaggttctaacggaaccaaaggcaacaaaggtgcccaaaagaagaagttaatccttccggctggttcaacaagggaagttggttacaataaatgttgggttcctttccgtactcctgtgtcctcctttctaagtaacttgtttttcggacaaaatttgaaatctccaacatcatctctcaactgttgttcccaaaactgggttcttgatataacgtggcaaacatgcttttaattatctgtgttttaaaatgttttgtttgtccgaacccctgattacaattt

SEQ ID NO: 35505 - DNA, 379 bp, Glycine max
aaccaagccttcaaacggtggcaaaaagacaacagaaggggataaacaacatcggtggtctggggcatatgctaaaacagatgtcagacatggatactgtagagaacagcattagaggcaatggcgagatatccgagaaagaagagcaccaacaccataccagtaagacggagcatcgacgaggaggcatcagaaccttacccttcatccttgcaaatgaattgtgtgatagatttgcgagctctggttttcatgcaaacatgataagctacctcactcagcagctgaacatgccattggtatctgcctcagtcacgctcaccaactttaatggaacttctagcttcactcctctctttggagctctcattgctgactc

SEQ ID NO: 35506 - DNA, 368 bp, Glycine max
gaatattaaacatcgaatctttgttcaattgcgaggcaaagcaagcaaagcacaacacaagatggggatacttagtccagaacagctccgattcttcaactctcaaggttatcttgtgattgaatctttcgcatgtagcgatgagattgagtccatgatgaagaggatggagcagtcggtagatgactttgacccttcttccaccgcctctattttctccaccaagaaccagcaacagtcgactgataattactttttcgacagcgccgagaggatttctttcttcttcgaggagaaagcatttggtaatgatgctcttcatgagattgagccagcattcaaaaagttttcttcctctgagaaagttt

SEQ ID NO: 35507 - DNA, 200 bp, Glycine max
gttcgcaagttaagcagttaggggcagctgtagtattagaaatgctattttttgtttcccttttctgtggtagtgatgtctgtggaagtataagtaaacgttttttttttctctggcaattttgatgataaagaaaatttagttcttcaaaaaaaaaaaaaaaaaaaaaaaaaaaaataaaaaacaaaaaaaaataaaag

SEQ ID NO: 35508 - DNA, 395 bp, Glycine max
gactcaccacttcaaaacactcataacacaaagcacaaagcaaagctcatccttgagttaaaaaatggcagcagcttcttccatggctctctcatccccatccttggctggcaaggccgtgaagctgggcccatcagccccagaagtgggaagggtgagcatgaggaagaccgtcaccaagcaggtctcctcaggaagcccatggtacggcccagaccgagtcaagtacttgggcccattctctggcgagcccccgtcctacctaaccggtgagttcccaggcgactacggctgggacactgctgggctttccgcagacccagaaaccttcgccaagaaccgtgaactcgaagtgatccactccaggtgggccatgctcggagccttgggctgcg

SEQ ID NO: 35509 - DNA, 390 bp, Glycine max
acgcgtcaacccactcgtccgtcgggttgcttgtggtgggttcccgtgggttcattctctttgcgcagttcctttcttcatagcctaccacttttctgctttcatctactctcacttcgcttcacaaactgccatgcagagggaaactcggataccagctgcaatgtctatgccaatatctaggatcatgaaggaattcccccggatcagcaaagtctcatcttcgccggaaagcaactcgaggactgccgtaccctcgccgactacaacatccagaacgagtcaacccttcaccttgtccttcgtctccgtggtggcatgcagatcttcgtcaagactctcactggcaaaaccataagcctagaggtcgaaagctctgacaccattgac

SEQ ID NO: 35510 - DNA, 247 bp, Glycine max
  unsure (1)..(247): unsure at all n locations
gcacttcaattgcaatcaaatgagttcattctctttgcgcagttccctacctctcctttcaagatgcagatcttcgtcaagaccctcaccggaaagaccatcaccctttaggtggaaagctctgacnacatcgacaacgtcaaggccaagattcacgacaaggaacgaattcccccgggataacaacgtctcatcgttcgcggaaagcagctcgaggacgggcggtacctcgccgactacaacatcc

SEQ ID NO: 35511 - DNA, 267 bp, Glycine max
gcttgttggaaatgcacctgcatagtctagtgcttaattaggttgctgaagagtgaagaatgagacagcctggttcgaaggggaaaagcctaaggatatatcaaaggatcctatatgtataaattaaatgttgcttttttaccttcggtattgatatctgaattctaatttgacatcctatatatgaatatatgatcaatgtgtttctttaaaaaaaaaaaactacatcacaaaaaaaaagcggccgctctagaggatccaagctta

SEQ ID NO: 35512 - DNA, 362 bp, Glycine max
gactcaccacttcaaaacactcataacacaaagcacaaagcaaagctcatccttgagttaaaaaatggcagcagcttcttccatggctctctcatccccatccttggctggcaaggccgtgaagctgggcccatcagccccagaagtgggaagggtgagcatgaggaagaccgtcaccaagcaggtctcctcaggaagcccatggtacggcccagaccgagtcaagtacttgggcccattctctggcgagcccccgtcctacctaaccggtgagttcccaggcgactacggctgggacactgctgggctttccgcagacccagaaaccttcgccaagaaccgtgaactcgaagtgattcact

SEQ ID NO: 35513 - DNA, 258 bp, Glycine max
tacggggaactaggatccacacaacgaaaatcacttgccattcgttggttattgggggcatcccgaaatcgtccgggtcgatatatggctttcaaattaagttccgaattagtggatgctgccacatgtagtggcgatgccagacacaaaataaaagacggttacggcagctaacaagcggacgctcaagaagatccaagcttacttacgcatgcatgcgacatcatagctcttctatggtgtcacccaaagtcactt

SEQ ID NO: 35514 - DNA, 385 bp, Glycine max
ggaacttcactgggaaatttgattgttctgtcaataaaacggtgccgttgaggttggagatggaggaaccgctacaagaagagcatgctcctcccaacaagcactttaaatcttcatccgcttcacaagatgagcaatgggatgcttcaaacggtgcatcaacttccagttctccctcccagtacaatatacttgatgagcctaaccctctgggcttacgtctgaagaaaaacccttcgcttttagatttgatacaaatgaagctttctcaagggaatgtgattattgcaaatacacaagatgaaaattttataagctctggattgaaaaaggagagtcggggtgctgctgcatcaggttctgtggagaagcttaaggcttcaaa

SEQ ID NO: 35515 - DNA, 261 bp, Glycine max
aggggggccaggtattgaaatactgctacaatacagattgcgttgttgctccgtcgccacaagtccctgccatgcatgggtatctccagagattctatgcacaacatgcgtgctgactggtggcaagaatagcgcatgcatgaacaagagaaagtatgagcttggtcgccagcctgctaacaatacactgtcaagcaaccagacagtcaggacgattcgggtgacaagtggaaatgtgaattgcatggcactgatattgga

SEQ ID NO: 35516 - DNA, 287 bp, Glycine max
gagtttcagccgcagcttgccccacagcattgcgaccattatcagctatggctgtctgtaagattagacgatctccaaaggaaacatgggtggcactatgacatccgctgatccctttgccaagagagactggtacgatatcaaggctccatcgctcttcgacgtcaagaatattggcaaaaccctcgtctctcgtacacagtgaaccataattgcatcagaacgactcaaacatccagtttttgaggtcacattggctgatctccaaggggatgaagaccactcct

SEQ ID NO: 35517 - DNA, 251 bp, Glycine max
cgtcagtcggtggcaagacgacaacagggcggcatgtctgtttatggacaaaatctctatatggtctcatacaagcacctcgccgctctctatgattcatgcttgagtcaggctttctccgacggtctttctctgctattgtgtcttccaagttctattcaattgccgtcctttttcacagtcttgactgggaaacccctggcgtttcccaacttattcgccttgcaccgcatccccctttgatcagctgg

SEQ ID NO: 35518 - DNA, 390 bp, Glycine max
ggttctgcttcttcttttcccttccacacaaatacatcacatcattgccattgctctctctctctctctctctctcgtgcggacacaatttttgatggggatatacctcagcactcccaaaacagagaaggcctctgaagatggtgagaacgacaagcttcgcttcggtttgtcttccatgcagggctggcgtgcttccatggaagatgctcatgcagctcatccatatttggacgagtctacgtcatactttggtgtttatgacggccatggaggcaaagcagtttcaaaattctgtgccaagtatctacaccagcaagtgcttaagagtgaagcttacttagctggagaattaggcacatctttacagaaatcttttctcagaatgga

SEQ ID NO: 35519 - DNA, 310 bp, Glycine max
ggggaagggtaaggctgcttggaaccaaaacaaaggaggcgataccagaagaagccttcttattaaaggcccttctcggaaaaaccggatttcttcccttcttcccttctctttcgtttcaatcttcgatccctgaaaatgaaagagtgcatttcaatccacatcggtcatgccggtattcaggtcgggaacgcctgctgggagtctctgtaggcaattcagtcacatttagcatgatgggtacattcttggatgttcttatgttgagggacagtaagacacgcattatgtttacaacagtgaaactggg

SEQ ID NO: 35520 - DNA, 257 bp, Glycine max
gagacctcaggtcaagccgggctacccgctgagtttaagcatagcagtataaaataaaaggtaaaaaaaatccgaaccgccactcgatacgatcatagcttacctttgctttcatgtcacatcatatctcttctaatatgtcaacttaattcacttcacttccccttactttaaaacgtcgtgaactggaataaccttaccttacccaaattaattgcctttcaacacaatttcctttacccaacttgtattataac

SEQ ID NO: 35521 - DNA, 379 bp, Glycine max
ggtctccctcatttgttcactttctctctctaaatccctaaaccagatctcgcactcgcgctttctctctctaggattcgacaatggcggccgctccctcgcctcgcgaagagaacgtgtacatggcgaagctcgccgagcaggccgagcgctacgaagagatggtggagttcatggagaaggtctccgccgccgccgacaacgaggagctcaccgtcgaggagaggaacctcctctccgtcgcgtacaagaacgtgatcggagcgcgccgcgcctcgtggcgcatcatctcctcgatcgagcagaaggaggagagccgcggcaacgaggaccacgtctccgtcatccgcgactaccgattcaagatcgagtccgagct

SEQ ID NO: 35522 - DNA, 342 bp, Glycine max
gtacggtctagaatcccgggtccaaccaagcctccaaacggcggaaaaaaccaacaaaagggaaaaccaaaccaaaaattggttcattaattgttcggggtcaactgttcctcaaaaatccgtcatcatcatcatcaatcatcaacgttgattgaagaagatgccgatcagaaacatcgccatcggaaggcctgaaaaggctactcaccccgacacgttgaaggccgggttggctgagttcatctccaccttgatcttcctgttcgcccgttcaagttccggcatcgcctacaacaagctcaccgacaacggcgccgccaatcccggcggcctcaactccgc

SEQ ID NO: 35523 - DNA, 334 bp, Glycine max
gagacctcaggtcaggcggggctacccgctgagtttaagcatatcaataagcgaagaaaaaaaaaaaaaaaaaaaaaaaaaaaaaaacgggcgctccaaaagattcaagcttaagtaagccttcaagcgaatttaaaactcctccaaaatgtcaaccaaattcaattcaatggccgtccttttacaacgtccttaatgggaaaaaccttgcgttaaccaacttaatccccttgcaacaaaatcccctttccccaactggcgttataaccaagaaggccgcaacgattgcccttcccaacaatttcccaacctgaatggccaatgggaacccccc

SEQ ID NO: 35524 - DNA, 385 bp, Glycine max
gacttgttcgcgctctctctctctctgtctttgttaaccctctcggcctctgtgtgttgtgttgtgaatcgagattcaacacttcaactcggcccattgggattttcagggtacaatggcttccaacatctcgccctctgcctttgataaagaacagatatttggaatggctgaaaaggagatggaatatagggtcgaattattcaacaagatgacccagacctgtttcaataagtgtgttgacaataggtacaaggagtctgagctaaatatgggtgaaaatagttgcattgaccgctgtgtttcaaaatattggcatgtgactaatctaattggtcagctgcttggttctgggaagcctccaatgtaatccaagtgttttgta

SEQ ID NO: 35525 - DNA, 362 bp, Glycine max
ttccgctgtcacatcaggacacacgtcgatagtgctgcgagaaacgacaaaagggggttctactgtgtgactgtttgttgttgtaactcgttcatcatcttttgttgttctgtgtttgtgtatgttttttctctcaactgaaaatgtcttgctgcggtggtaactgtggttgctgaagctcttgcaattgcggcaacggatgcggaagcatgcaagatgtacccagacttgagctatactgagtcaactagcaacgagaccttgtgtcaaggtagtggcacactgttaaggttcaatttgagggtgctgaaataggtggcccgctgagaacgatagttgcaaatgtagaccaaactgctcct

SEQ ID NO: 35526 - DNA, 212 bp, Glycine max
tggggatgcacaagtttgttgagatagcgagaagcaataagatgaagatgaaagtgcttgttatgtgtgtcgcgacagtcttggtagcatatgaatgtcatgcctcacacgactagacgttccctctccaaatgaaaactgggtttggtaggcaatgtagcactgaggtggcatgtgccagttggaggcttggcgtggaagcatccacgtag

SEQ ID NO: 35527 - DNA, 323 bp, Glycine max
gatcgcacaacattattctttcgcaccttgcagaatcaatttcccccccaaaccgccttccagggtccttacaagccaaacggtcgcaaatccaacggtgggaaagcgcccaaggagcaactcgccaacaaggctgcaagaaaatctgcacctatcaccggtggagtcaagaaacctcaacgctatcgtcctggaactgttgctcttcgtgagatctgaaaataccaaaagagcacacagcttctgatactcaaactcccctttcagcgtcttgttcttcaaatcgcgcaagacttcatcactgatttgaggttccacaatca

SEQ ID NO: 35528 - DNA, 376 bp, Glycine max
ccgacgcgtgggcggatgcgtgagcgggagagaaagggatagagaaggggattctccaattgattcaccaatgtactcaccattgcacatcgcagttctcgacgacgatatcgatggcaagtgcaatggaacgtgctaggcagtccactggcagatccgctggaaggaaggatctgaggaagcaagtggcacgcaagtcagctcgggagtcaggcgcggtgaccggcggagtgagcatcacgcaacgaatcatggcactaacggagactctgaaggagaatcggaggtacgagcttatgatcggacttctgatacgccagatgctagtcaaaaagctcgtccaagatttcgctcacgatctcagaattgatatcag

SEQ ID NO: 35529 - DNA, 162 bp, Glycine max
ggtatgcagttgttgtggttctcatcatttgcatttacatatcaccatttgcctagtcatggggtcgccaaggttggttggtgcctcatgagatcgttcacttggcaatccgtacggctgctcaaagtatagatgtctcggtgaacatggttttcactttct

SEQ ID NO: 35530 - DNA, 384 bp, Glycine max
caggccacacgtcagtacaggtgtgagtagaggagagaaagggaaaagtgaagagggaacagaatggttcccagaggtttaatcattatggctgtgttctgcatctcatcactgtcaatgagtctctgtcgtgtcgcggataagggacgtgttatgaacttctaggcggtatcatgccctcaggttgcaggcatcattccgtatcaagtcccacttctccaggagtgcaattcgaagacagccttctcctgacgtacatacatcttcgatgacagtcgcgttcacagttatcaggcctcacagttactggactccacattcacgatcttgtctgacaaggatatagatacaagctttgagttgagaacgttcacgtacatttga

SEQ ID NO: 35531 - DNA, 370 bp, Glycine max
ggaaacaaagcatgaacggtgctgcatttgttgtggcagagtgctgtgagtatgtggaagtcgatcccacgggaagatatggaagatatagtgaaattcttggcaaaggagcttccaagacagtctatagagcatttgatgagtatgaagggatagaagtagcatggaatcaagtaaagttttatgactttttgcagaatcctgaaaatcttgaaaggttaaacattaaaatcaacctccccagaacattgaacaccagaacatcaagaagttccaaaactcctggggtgatactaacaacagacacattaactttgtcactgaaatgtttaactctgggaacccaagacagtacagacttaaacacaaa

SEQ ID NO: 35532 - DNA, 320 bp, Glycine max
tggggttctaatatgtgattgtatgttgttgtcactcgttcttcttcttttgatgttcagtgtatgtatttgtttttactctcatctgaaaatatcttgccacagtggtaactgtggttgcggaagctcctgcaagtgccgcaacggctgctgatgctgcaagatgtagccagacttgagctacactgaatcaacaaacagtgagaccttggtcatgggagtagtacctgttaaggctcaatttgagggtgctgaaataggtgtgcccgctgagaacgatagatgcaaatgtggagcagactgcacgtgacaatccctgc

SEQ ID NO: 35533 - DNA, 348 bp, Glycine max
ggatgcacaagtttgttgagatagctagaagcaataagatgaaaatgaaagtgcttgttttgtttgttgctacagttttggtagcatatgaatgccatggctcagactaccagaagttccctctccaaatgaaaactgggtttggtgggcaatacagcaatgaggtggcatgtgccagttggaggctttgcgtggaaacaaacaacgttattcaattgcaaactggtcctgcaacctgcggaaaattcatagctgaacaagttccaagaaaacaatatagattagattccaaaacagttaaccaacaagcttaattccaagctaaatccctcaaactcaccaacaaag

SEQ ID NO: 35534 - DNA, 341 bp, Glycine max
aggtagcatgcggacttcgtctgtcaatgcatatcttgttggtcgacatatgcgatgtcgtgatcgagagtgagtacagctttgctaaccattggatacaaatgtctgcactcttcacctatgaaacgcccctccattggtgaggtttcgcaaggtatattgaggattaagctatgactcctcatgaaagaacagccgatgtcatttgcatccagcaacttctctcgaactgtgagtcaaatagacgagtgtcaggttgagctatgtagcatcatcatcatgatacacagggaaatggggtgaactcagtcagatgttctggggcgattttttttttcggt

SEQ ID NO: 35535 - DNA, 263 bp, Glycine max
ggcagaaagagaagcattagcaaaagcaagaagaactagtctaagcagaaatggcctcttcagtgatggcatctgtggccctcaaacctgcccctttcactgttgagaagtcctcagttagaggccttccctccctctcaaggaactcctcttcattcagagttgtggccagtggtggcaagaagatcaagactgacaagccttatggaattaatggtggcatggctttgagggaaggagttgatgcatctggcaggaaagga

SEQ ID NO: 35536 - DNA, 320 bp, Glycine max
acgcgtgagtacagatgtcagtagaggagagaaaggggaaggcagaggcttggcgtaaaaccaagacacgacgtcgtgtggtttctaggaccgtgtacgttttgaaactctggagattgagattgcgagtgagaatcaacacgcaaaactgctgttgccataccatgatcgcgacgatcaattgcagaaacatgaaccactcgtcgcttagtatcgtcaattatatgcactggaacggtggttgaagattccgccaagtgaacgtaccattacgacaaatgttcttctggtttcgctcatgaagcatcttgaaaaggata

SEQ ID NO: 35537 - DNA, 156 bp, Glycine max
gaatccaatatccatcacatgggaatgtggttctctcacatctcctatatgcgcgcctctctgctttacatctcacagctacgttggtctcacagcgccactgaggagcttcaacttttcttctcctcaaactgccaaaattcctcgctcccaaag

SEQ ID NO: 35538 - DNA, 324 bp, Glycine max
catgggactcacagactgaaaccagacactgacgggacaagcaaccgataccatatcatgggttcgtccagcagtcacacttcgaccttcattcaacatcagtcacctgtcatcttcgcttcagatgctcatcagcaacatcgcctgtatgcaagtccgactctgcgactcatcgcgccacgttgaacgatgttttggccgacttcatctcaaccttcatcttcgtgttcgccggctcaggctccggcatcgcctatagcaagctcaacgacaacggagctgccactcctgccggcctcatctgcgcgtccatcggtcatgcat

SEQ ID NO: 35539 - DNA, 398 bp, Glycine max
  unsure (1)..(398): unsure at all n locations
ggttcaatgctggtgttagagttggtgttggaattggccttgggatgtgtgtagggcttgggattggtgttggactgctcatgcgctcataccaaacaacaaccaggaacttcaggaggagatttttctaaactgctataaggaatttgctactctagtttaatgacaagcaagatatgttggagtttaatctaaggtgggacacctctggaggaagaacccaaattctacaagtctaatgcatgaagtgtaagttttgtagatgagtggaggttgtgcttcctctctgttttgtggcttacttgcagatacgttcaagtagatttgcagatttgcatttcctggtaaattttatctgatcctcggacaacaatagatatcaatanaagagaaataca

SEQ ID NO: 35540 - DNA, 325 bp, Glycine max
caggataattcatgtgtatactccagaaatcatcaaaactgatgctgcaaatttcagagagttggttcaaaggctcacaggaaagccaaaagaagaaggaacaggtggaagcaagtccgaaactgcactaaccaaagaaccaatggattcacaccccaagaaggccatgatcatgcaagatgaagaggagtttctgagtctacaaaatgggacaaggctaaagaatgaacataaagaggaggaagttcaagatgatgtgtggaggtcaaagtcaaacgagaagttcagtggtttccttgatgggttctcagaattggatggtttt

SEQ ID NO: 35541 - DNA, 366 bp, Glycine max
ggcagttcaattccaatatattccattctctctgtgtatttccctacctctcccttcaagatgcagatcttcgtcaagaccctcaccggcaagaccatcacccttgaggtggaaagctctgacaccatcgacaacgtcaaggccaagatccatgacaatgaaggaatccccccggaccagcaacgtctcattttcgccggaaagcaacttgaggacggccgtacccttgctgactaacacaatcagaaggagagtactcttcatctcgtcctcagtctccgtggtggcatgcagatcttcgttaagacactcaaccggcaagacataaccctagaggttgacagctccgacgacatcgataacgtc

SEQ ID NO: 35542 - DNA, 405 bp, Glycine max
gagcctcatcagaagcagaacgatgagaagcagaaagatcaaaagcaatggcgccgaagaagccgagaaccactacaaggaaccctgatttggttacggggattggcaagtattcgaggtcgcagatgtaccacaagaggggcatctgggccatcaaggccaacaacggtggcgttttgccccgccacgatcacaagcccatgctcgaggtcccggaccagatgccgcacaagttctacccctcggacgatgttaagaagcccctcgtcaacaatcacaagcccaaacccgcgaaactcagggctatcattactccagtgactgtgttgatcctgccttcctgggacgttcatgggaaacagggttgttttcctgaagcagctccgatctggattgcttcttgta

SEQ ID NO: 35543 - DNA, 283 bp, Glycine max
tgggggagcgacacagagagtgatttcagtgagtgatcagtgttcacttgatctcatcataatcgtcagcgtcaactgacgaagatgccgatcagaaacatcgccgtcggaaagcctgaagacgcgactcactccgacacgttgaacgaggttttggctgagttcatctcaagcttcatcttcgtgttcgccggatcaggctccggcatcgcctagaacaagctcagcgacaacggcgctgcaacccctgcagggctcatctccgcctccatcgcctcatgca

SEQ ID NO: 35544 - DNA, 400 bp, Glycine max
gatatcaccctttttgtttctcgccttgtcattgaaaccttttcacccccttcatatatccttaattcagcaatggcgagccacgacaaagcccaaagatctagcacaaccaaaaatggcatctcgcgaagcaacaaagctggtctccaattccctgttggtcgtgttgctcgataccttaagactggcaagtatgctgagcgtatcacttctgctgctcccgtgtatctctcctctgttcttgaatatcttgctgctgaggttttagagttggccggaaatgctgtaatggacaacaagaagactcgaattatgccacgccatatccaatttgcaattacggattgatgatgatttaaccaagcttctcggagatgtgaccacccctaatggtggtgtg

SEQ ID NO: 35545 - DNA, 347 bp, Glycine max
agttccggtggccaaaagaccaccagaagggaacaaaggcaactccgaaatcccctcccaacaaaagaagattctccaaggccgacaatcaaaaccgggtccccaaccccgggcctcaccgccgatggccgcgtcctctcccgctacatgagatccgaatgcatcaactataattacacctacgagtcgccgctccccgtcggcagactagtcgttcagctcgccgataaggctcaggtttgcacacagcggtcttggaaacgtccttatggggttggactcctggtagctggattagatgaatcaggagctcacctctattacaactgtcccagtggaaactattt

SEQ ID NO: 35546 - DNA, 415 bp, Glycine max
  unsure (1)..(415): unsure at all n locations
ggagtgagcaagagtgaagagcgaagagaatggctcccaagggtttaatctttttggctgtgttatgcttctcagcactgtcactgagtcgttgtcttgcggaggataatggacttgttatgaacttctacaaggaatcatgccctcaggctgaagacatcatcaaagaacaagtcaagcttctctacaagcgccacaagaacactgctttctcctggctcagaaacatcttccatgactgtgctgttcagagttgtgatgcttcactgttgctggactccacaagaaggagcttgtctgagaaggaaacagatagaagctttgggttgagaaatttcaggtacattgagaccatcaaagaagctttggaaagggaaatgccangagttgtttcctgtgctgatatcctcgttct

SEQ ID NO: 35547 - DNA, 549 bp, Glycine max
  unsure (1)..(549): unsure at all n locations
acgcggcaggtaccggtgaggaattcccgggaatcgacccacgcgctcaagttacgggggctgcgaaaagaaaagacgnaaacaganaggggggnggttgaaatcaagcaancaacaatttcaaccctggaagcctttttttggtgaagggaattccaanaagcaattggctttcccctttgcaagcaatccaactggctggcggccttcccttgggcaatgttcagaaaatgccttggaaacccaatcaacctcagtggtgccacaaagccagctccatctgcctctagccctgcctccttcaagactgtggctcttttctccaaaaagaaggctgcacctccaaaaaaagctgcagctgctgctcctgccaatgatgagcttgccaagtggtatggtcctgacagaaggatcttcttgcctgaaggtctcttggaccgatctgagattccagagtacttgaccggagaagtccccggagactatggttatgacccatttggtcttagcaagaagccagaagatttttcaaatatcaggcatttgaat

SEQ ID NO: 35548 - DNA, 391 bp, Glycine max
gaccgcacagaattagggttttccaattcacagagcaacacaacgaaccaacaatggcgcagcctcagccgcagtcccaaccgcagcaagggcaagcaacgctggaacaaggggaattcctccggccccagaagaacgccgttggcgttaactaacggaagccccggccccggcccaaccagaataacggctgccccattgagctcgtggagccggagatcctccgcttcaaagccttcgagcctatcctcctgttgggtaagagccgcttcgccggcgtcgacatgcgcatccgcgtcaagggtggcggccacacctcccagatctacgccatccgccagagcatcgccaaggcgctcgtcgcgttctaccagaagtatgtccacgaaca

SEQ ID NO: 35549 - DNA, 327 bp, Glycine max
gattattatcatagtagatattcattccccttatctttctctcttctctctccccgcccaaaccctaactccctaccctattccgctttctctcatccatcatgaaaggaggaaagtccaagaccgaatctaagagagccgatgccaaacttgctgtgaataagaagggcgccgccaccaagactagggaacccgccggaaaggggaacgcagcgaaagatcctaacaggccaaagaggcctccaagtgctttcttcgttttcatggaggaattcaggaaggtgttcaagaaggaagatcccgacaagaaagcagtgtctgctgtgg

SEQ ID NO: 35550 - DNA, 427 bp, Glycine max
acgcccacgcctacataaggatgcaagaagatcacacacagagatgtcactcacacccgtgaataatcctctattaacattccacagtcaagttctagggttccgaaatggaatcaggaggggagatcaaggtaggcacgggaggtacaaagggcagaagcccatttcagagtccggtttcaacgtccgtcaaatccggtctcgaattcctcgtcgtaagaagtggacgtgaatgtaagaacagaatgtacgcacagcttctccgtaacagtgcgctcgtatacttgactgcagatctcgaatagcgatctacttaggtgcgagagttggatgtgaatgccgcacgtgacagcattaatcacaaggattatcctaggacacttacttatggcaatgaggaacgaaaatgacttgcggaaattgcatg

SEQ ID NO: 35551 - DNA, 400 bp, Glycine max
  unsure (1)..(400): unsure at all n locations
agcgcacgcatcagcacacacggggataccaccgatttgcagaaagaaaagaccatcaaagtttcacttcagccttatccggtttagggtttcggtttttgacccaacctttgacgtatcgaaaccttgagtttcggatcaggtctgagcaatctggttggtagaacctttggtcttagagagtcaagttttatgtctgaattagacgatcaaattcctactgccttcgatccttttgctgatgcaaatgctgatggctcgggtgctgggtcaaaagagtatgtgcatattcgcgtacagcagcgaaatggaatgaaaagcctgacaaccgttcacggattgaaaaaangattcagctataacaggatacttacagatgttaagaaagagttctgttgca

SEQ ID NO: 35552 - DNA, 357 bp, Glycine max
gacacctcagaagaacagaacagaaccaccagtgcttttcaaagacggatttgatctctagtctgtctaccaagtggaatgaaccagacaccccccctcagacttgatgctgtggagagtggagttcaaccacaagtccaaaacctttaatggtttcagcaatggcgttcttaaataaaattggaaatctggtcaagaattctgctgtcaagcacatcaatcaagatttttcagtgtctaccccatcacttttccaagcaattagatccatgtcatctgcaaagctttttgtcggaggtatttcttacagcactgatgatatgagtttgccagagtcttttgctcgccatggaaaag

SEQ ID NO: 35553 - DNA, 395 bp, Glycine max
gactcaccacttcaaaacactcataacacaaagcacaaagcaaagctcatccttgagttaaaaaatggcagcagcttcttccatggctctctcatccccatccttggctggcaaggccgtgaagctgggcccatcagccccagaagtgggaagggtgagcatgaggaagaccgtcaccaagcaggtctcctcaggaagcccatggtacggcccagaccgagtcaagtacttgggcccattctctggcgagcccccgtcctacctaaccggtgagttcccaggcgactacggctgggacactgctgggctttccgcagacccagaaaccttcgccaagaaccgtgaactcgaagtgattcactccaggtgggccatgctcggagccttgggctgcg

SEQ ID NO: 35554 - DNA, 345 bp, Glycine max
ggttctagtgtatgtgattgttgtgactcgttcttcttcgtcgttatcttcttcttttgttgtttgtgtgtttgttttgtctctcagctgaaaatgtcttgctgcggtggtaactgtggttgcggaagcgcctgcaagtgcggcaacggctgcggaggctgcaagatgtacccagacttgagctacagcgagtcaaccaccaccgagaccttggtcaagggagtggcaccagttaacgctcaattcgagagtgctgaaatgggtgttcccgctgataatgatggctgccaagttggaactaactggtgctggcatccctgcaatttccggttagggttttgagaa

SEQ ID NO: 35555 - DNA, 315 bp, Glycine max
tggggcagttcaattccaatatattggagtcccactgtgtgattccctaccgctcccttcaggacgcagatcttcgtcaagacgcgcaccggtaagaccatcacccttgaggtggaaagtcctgataccatcgacaacgtcaatgccaagatccatgacaatgaaggaatcgccccgggccaccaccgtctcaatttcgccggaaagcaccctgaggacggcagtacccttgctgacgacatcattcagaaagatagtactcttcacctcgtcgtcggtcaccgtggtggtatgcagatcatcgataagacactc

SEQ ID NO: 35556 - DNA, 446 bp, Glycine max
  unsure (1)..(446): unsure at all n locations
caggtccaaccaacccttagttccggtgccagaagaagacaaaaagggggacaagtttggttagaaaaccaaaaacaataaagatgaaaatgaaagtgcttgttttgtctgttgctacagttttggtagcatatgaatgccatggctcagactaccagaagttccctctccaaatgaaaactgggtttggtgggcaatacagcaatgaggtggcatgtgccagttggaggcttggcgtggaagcaaacaacgtagtcaagtggcaaactgttcctgcagcttgcggagagtacatagctgactacgttctaggagaccaatataggtcagattccaaaacagttaaccaacaagcttatttctatgctaaatccctcagactcacgaacanagatgtctttgtcttggacgttgacgacactactctctctaatctccagtatttt

SEQ ID NO: 35557 - DNA, 387 bp, Glycine max
tacgctcacgaattcccaggcccaaccaacccttaattccggcaccaaaagacgaacgaatggggaaacttgaacctttaaaggaccttaaaggcacaggttttcctcccctcaacgtcaaatccaatccaattcactttgattgtgtgtctctccgatcttcaaatccgcaacaaccatggtcaggggattgctcaacaagctcgtctctcgctccctctccgtcgccggaaaatggcagcacaaccaactccgccgcctcaacatccacgagtaccacggcgctgaattgatgagcaaacacggacttaatgttccgacaggcgtggctgtttcctctgttgaagaggttagaaacgccatcaaggaccttttcccaaatgaaaa

SEQ ID NO: 35558 - DNA, 344 bp, Glycine max
aaccaagccttcaccgaagccttggccgctgccaaaagaccacagaaaggggaaccagaattaaaaaccaagaagaagctcccaaaggtttaaacttttggctgtgttaagcttctcagcactgtcactgagtcgttgtcctgcggaggataatggacttgttatgaacttctacaaggaatcatgccctcaggctgaagacatcatcaaagaacaagtcaagcttctctacaagcgccacaagaacactgctttctcctggctcagaaacatcttccatgactgtgctgttcagagttgtgatgcttcactgttgctggactccacaagaaggagcttgtctg

SEQ ID NO: 35559 - DNA, 333 bp, Glycine max
ggggcgaggtagccagagagtgatacaatacagagtgcgttgttgctccttcgccacaactccctgccaacatgggtatctccagagattctatgcacaagaggcgtgccactggtggcaagaagaaggcatggaggaagaagtggaagtgaagctgtaactcgcaagactcgtatactagatgtggtttacaatgcctcaaacaacgagcttgtgcgtactcagactcttgtaaaaagtgctattgttcaggttgatgctgctccattcaaacagtggtaccttcagcactatggtgttgagattggtaagaagaagaagacagctgccaag

SEQ ID NO: 35560 - DNA, 450 bp, Glycine max
  unsure (1)..(450): unsure at all n locations
taccggttaggaattcccggctctacgcaggcgtattggccggctgcaaaagaacaacgaaagggcacaagtttggtgagaaaactaaaacaataagatgaaaatgaaagtgcctgttttgtatgttgctacagttttggtagcatatgaatgccatggctcagactaccagaagttccctctccaaatgaaaactgggtttggtgggcaatacagcaatgaggtggcatgtgccagttggaggcttggcgtggaagcaaacaacgtagtcaagtggcaaactgttcctgcagcttgcggagagtacatagctgactacgttctacgagaccaatatagatcagattccaaaacagttaaccaacaagcttatttctatgctaaatccctcagactcaacaacanagatgtctttgtcttggacgttgacgacactactctctctaatct

SEQ ID NO: 35561 - DNA, 316 bp, Glycine max
gtccaaattccattttcttcgaagccatacacttttcactaaaacaaaattgattaatgttagggttttggaaagccaatttcagagcagactcgaaaccctagattccacaaatccatgccagcttgatctcgcagcttccgtcaatggcgatcatcggcgacgcgcttcgccaggcgttcatgccgaagcgcgagtacgagagcctcagagaagaagacaaggcgtggggcaagcttcagaggcccgtgacggtggcttccgttgccgtcatcgtgctcgcaatcgccgtgtccactgttatcagtttgaaaat

SEQ ID NO: 35562 - DNA, 195 bp, Glycine max
gacacattcatattttccttatctctatatataccccattcctctcgttcttgtttttccacattcatattttcctttcgttggctttcattttccctcactttctcgctccccaaatgctcctctctctcctccaatggccgaccatctcaccgacgaccagatctctcagttcaacgatgccttcaccctctt

SEQ ID NO: 35563 - DNA, 378 bp, Glycine max
gacccacgcgtccacccacgcatccgcccacgcgtccggacgacagaagggggatttgaggttgagagattgagtttcatattaacatagggaaaggttgcagtttggttaatttaacattttcaagtgtgcagggaggcatggttgaggccttaagcatttacaagaagtggaaatgctacagcttggactacgaaggatctcggaagctggttttcagcttgagagaacccaattcttgtttggttaagaacaatgcaatcagaatcttcactaggaacagaggccgtgactttaagatcagtggctgtttcccggataagtgttgtagcattgttgactctaaaggcaacgaggtagcacaagtggggatgatga

SEQ ID NO: 35564 - DNA, 308 bp, Glycine max
gacccccaaaccctgctgcataggaagaaaccctagcctctcaccctccctgcgacacgatgcagatcttcgtgaaaaccctaacgggtaagacgatcacccttgaggtggagtcttctgacaccatcgacaacgtgaaggccaagatccaggacaaggaaggcatccctccggaccagcagcgcctcatcttcgccggaaagcagctggaggacggccgcaccctcgccgactacaacatccagaaggagtccaccctccacctcgtcctccgtctccgcggtggcgccaagaagcgcaagaagaag

SEQ ID NO: 35565 - DNA, 331 bp, Glycine max
gaagcttgtctcttgggatgacatccactggggatacagttcacgtaccattgacctgcttgtaaccgttgccaagaagtctgtttaattaatgtggttcgaacattaagtgtcggtcaagctgcgatttattatcgtgcacatggaaatattgcgaagtctgaataaattggtttccggaacgagtgttgtcactcagtcatcaacagtacacccggttcttgttgcctcatccgtgtcagggatggacttttttggagtcctagacacgtgcagatgtagtcagggtttattgaatcagatagcagatatttgctctcaatatatcacc

SEQ ID NO: 35566 - DNA, 202 bp, Glycine max
ggaagcagtggaacaaagcaaggaagagaaagaaatttgtttctctctaaatagtctccgctgaactttttggtttcttcaagatgtcggtacgctgggatcttagcaggcttaacgtctccgacatcaccgataaggtgatcgccgactacatatgggttgggtgatctggcatggatatgaggagcggagcagggactct

SEQ ID NO: 35567 - DNA, 156 bp, Glycine max
gagagtgaggcacacagaaaaaatgggttcttcttcttctatgtcgacggtgtgtgtgattttggcagcagtgagcgctacaggactctgtgtgaggggacgcaggcgagtggatctacaagttggccgaaacgacgtgcccagatggggctgtga

SEQ ID NO: 35568 - DNA, 265 bp, Glycine max
gacacacagctattccgcgtaagcttgctactgagtttccacactgcataccttaggtcttccgacttcgaagttaatttgcaagacggctaagggaaaggctcagagtaggattgtggtggttgggcatgtggaccctgatgacgcaagcaccattaacgagctgaagaagcctgttgtggggaaaggagctccagcgcatgccatatgatggcatgcgcgtacggcctcggacgggaaccagaaaattatgttaacaaaataa

SEQ ID NO: 35569 - DNA, 360 bp, Glycine max
ggcgtcaattacgttatattgattgtgctgtacacgattctggtctctgcagagtaggtttgcattttccgaaaatcgaagttcgatttcaggacttgaccgttgagacttacgtacatgtcggtagcagagctctgccaacgattcccaatttcatttgtaatatgactgaggctcttttaagacagttgcggatgtacagaagaaagagaagcaaattgacaattctagcagatatcagtgggattattaaaccttcaaggctaacgttgctgttgggtccgccaagctctggaaaaacaacactactattagctcttgctggtacgctatgacctgggttgcagatgtcagggaaca

SEQ ID NO: 35570 - DNA, 311 bp, Glycine max
gaagctattggaaaagtgagtgagagatctcaatatcctcagataatggagggatacgttgcgaaggttatgaatgtgcggactggagttgggcatggccatgattgggatggccaatggcaaatactcctgttgtcgcatgccctgctataggttggcggcatgcaagccgagtgtaagtcgggatcagcctgcgtataccaccactgattgttactcacccattgctatggccgatcttaaatgcctctgccgcatcgaggattccggccctctctcgctgtatggtgttgatctgacctcctgcatgg

SEQ ID NO: 35571 - DNA, 368 bp, Glycine max
tggggtagctagaagactaaatcttggggaagtccttgctttgaggtcagacttgcagcatatcaataaaattgttctcatctttcacgcataaccttatctgaccttcgtcaatcctgtaagtagtagaagtatgaagatggtatagacattctgactcagatcaaagtcggtaaatgaaggacaagctgaagcgctctgcgaccagatctcaggagcagtcttcgagtcttgggtcgagcatgaaccagacagcatagttcactgcgagccattcatcaagacctacttgatcatgtgcatatgagaaatctcaatcagagccaatttctgaatgcatcaagatagtgcgtgacacatgcatgaac

SEQ ID NO: 35572 - DNA, 230 bp, Glycine max
ggagacgaacgccctagtatgctcagtaagatggcttcctttgtatccttcccactgccgcttcttgcagtccttatccgcatgcgggaatggcttgctacttactatcaggcgattaagaagccaccagtgtacatgcctccggtgtacaatccagcactgtacaatccatcggtttaccagccaaaatcaccggtttatacagcgaagccgcttgtttacgcgccacc

SEQ ID NO: 35573 - DNA, 366 bp, Glycine max
acccacgagtcaaacgggtgccaaaagaagaaagaagggggttctagtgtacgtgattgttgttactcgttcttcatcgtcgttatcttcatcatttgttgtttgtgtgtttgttttttcactcacctgaaaatgccctgcagcggtggtaactgtggttgtggaatctcctgcagttgaggctacggctgcagaggctgcatgatattgccagacttgagctacagagagtcaaccatgactgagacgttggtcatgagagtggcaccatttaaagcgcagttcgagagtgctgaaatgggtgttcccgctgataacgatggctgtatatgtggatctaactgcacctgcaatacctgaacttgc

SEQ ID NO: 35574 - DNA, 358 bp, Glycine max
gacgcagtgttcggtaatgtgattactcagtgctcaaccgagtcaaatcgattctcctgatgatggtggctatggatcgcacagtgttgcggttctcttcatcagctgctgcatctgcggatatcttgtctgcgaaggtctacgctctggtcatcgtaagtatctgcgattgctatgttcgacgctctgactatgcagaatgtgtcataggttggttactcgactccgtcctttccgagtgaagcgtcgaaatccgaaattcctactttgttcctctaaataagtctatcgacgaggttggattggatatacagtaccatcacaatatgttaatatgctatcataacgtgaatctaaa

SEQ ID NO: 35575 - DNA, 315 bp, Glycine max
agggggagtcaatgcattcaggattcaccaattgcgttttggatccagataccggtattcttcgagatggcacgtactcacccaagtgctcgtatgtcaactggacgaaaagctcccaggaagcagcttgcaaccaaggctgcacgtaagtctgcaccaacaactggtggtgtgaagaagcctcatcgttatcgccctggaactgttgctcttcgtgagattaggaaataccagaagagcactgagctcctaatcatgaagcttcctttccagatgttggttcgtgaaattgcccaggatttcaagactgatctg

SEQ ID NO: 35576 - DNA, 281 bp, Glycine max
gatactcaaaaccctaacacacggaggagaacacaaacagcgcgagacagaggcacagagagaaaatggtttcggggtcagggatctgtgccaagagggtaattgtggacgcacgacaccacatgctggggaggctggcatcgatcgtggcgaaagaacttctgaatgggcagaaggtggtggtggtacgctgcgaggagatttgcatctccggtgggctcgtcaggcagaagatgaagtacttgcgtttcctccgcaagcgcatgaacaccaagccctct

SEQ ID NO: 35577 - DNA, 403 bp, Glycine max
gagggaggaaaagaggtagagattagggtttggtattttccacatgagaggattggagtgaaagtgagaaaatggaggaatcaggatcagggggtgtgtggtggtgttgttccccattgaagatgatagtggagtcgctaaggattatgagctgcaacaaagtggtgttcgcatccatcatgctcctcaccacccttcctctatcgaccctggtaatttcccaatccatctccacccactccctcacctcccaaatccagcacctggaggccctcgcacacttcacctccacacgtttcgaggcccgccacgtctgccaagaatcccgccacgaagccctctccctcctccgcatcaaggccctcttctccctcccctcctacctcctcccccttcgcggcgc

SEQ ID NO: 35578 - DNA, 298 bp, Glycine max
gatgtcaaattcctctacgctctcttgttcaagggctgtgcaaggatcctcccagagggacgccttgacaacttgtgcaacccacaactgatccaggcgcagagcatacttgcgagctgggctgttcaagttgtgctcatcgtgtctgttaattgtcatcgaattgatcgacgaccacttggtgatagacgtcaccccctctaccctggaggggcctttgaatcaccaggtacagctgatgaatctagatcattctctgaattctacgtcactgaggtcaagaacggtcccttggcta

SEQ ID NO: 35579 - DNA, 348 bp, Glycine max
gacccaaacgtccagctgggagacaataaaggagagacaggcatatcatcagcagtctcgtcaacgcagtcgccaaccactatcaaagccatcacactccaccatcatctcgttagggcaactatgattcgacgaagtgatagtggatagcatcgtctcatcactagccgtctcctagtgaaggatgtcttcttcgactgtcgcagtatgccttcatagctgttaaagacacaggatttacctcaactgatgtcctatgtcacgagaccacttgtgttgttagacacaagattgtgtcggataagcttttggataacacaagtgttacgcacctcgttcccatcacca

SEQ ID NO: 35580 - DNA, 298 bp, Glycine max
aaacggggaggcaaactatgaaaattcacattgcgtcactcctccgtcgttttctctctcttgctaaccttctggataatgtcactgcttcaagtgcaagcctaagaagcacagtgccaacacatcaagttttaacattgagccaaatcctttttccttcaaattttcgctttgaaattcgttcttctgcttaccagacataacgagcagcaactgtacatgggagaagaccaagcatatgggaaacctacactatacagcatactgaaaagatttgggatcagaacaccggtgacat

SEQ ID NO: 35581 - DNA, 382 bp, Glycine max
  unsure (1)..(382): unsure at all n locations
gatgtattagtattttcctaaaaaaaagattccaccaccaaattatatatgatattttaagcgttgtttggggaagggtgattagaccccgactcaattacaccacgcttctaaattctgagaatgaattcgtaagatcgaagcaatagcctttttctctgccgccactggtttcgatcccacacccacaaacgcaaaccctccatcctttgaatgctcttgcgttttcctttcactacctcattcctaactcacacacacacaacgggtgatatcaatgtcgactcctgctangaagaggctcatgagagatttcaagaggctgcaacaagacccgcctgcaggaatcagcggggcacctcaagataacaacataatgctg

SEQ ID NO: 35582 - DNA, 387 bp, Glycine max
acgaggaggctttctaaggggggcaccgaaatgaggtttgggatagtgcaaacactactgagttccatcaaacacaacgacgatgagctctgcccggacctaaggacatgatgtctgctaactcagtcggcatcattagcatgctccacagcgctctccgcgtctatgtcacgactctcttctgtgatctccgtgctgcttagaatgccatcgaactccacaatgaatctgatggaaatcagctccatgaatcagtactcttatggcatgactagcgaaccgttcagtacgtgtgtagcggtggaaaccacattggtggctgtgaaacaacaactgcccggcacacacattggaagctggttcctcagctgataccagctggagctg

SEQ ID NO: 35583 - DNA, 381 bp, Glycine max
gtggacgtccatttttgtgggtcgttagagaaaaggtaattaatggaaaaaaagaagaggaggatgagctttgttgtttcagagaggaattggagaagtgggggaagatagtgacatggtgttctcatgtggaggttctttcgcattcttctgtgggttgttttttaacacactgtgggtggaattcgaccatggaaagccttgtttctggggttccaatggtggcgtttcctcagtggactgatcagatgaccaatgcgaagctcatagaagatgtgtggaagatatgggtgagagtggatcatcacgtgaacgcaaatgggatacttgaaggaaaggaaattgatgcatgtttggatgtggtgatggggagtggtgaca

SEQ ID NO: 35584 - DNA, 404 bp, Glycine max
ggcacttcaattgcaatcaaattagttcattctctttgcgcagttccctacctctcctttcaagatgcagatcttcggcaagacactcacagggaagaccatcacacctgtggggggaaactctgagaccatagagaaagtttaagggcaaatttcaggacaagggagggattcccccggttatcaaagtctcaacttcgccgggaaacagctccacgacgggcgtagtctcgccgactacaacatccacaaggagtgaacccttcatcatgtcgttcgtccccgtggtggcatgcagatcttcgtcaagactctcactggcaaaaccataaacctacaagtcgaaagctctgacaccaatgacaacgtcaatggcaagattcatgacaaagaaggaatccccc

SEQ ID NO: 35585 - DNA, 393 bp, Glycine max
ggagcaagagtgaagagcgaagagaatggctcccaagggtttaatctttttggctgtgttatgcatcgcagcactgtcactgagtcattgtcttgcggaggataatggacttgttatgaacttctataatgaatcatgccctcaggctgaagacatcatcattgaacaagtcaagcttcactacaagcgccacacgaacactgctttctcctgtctcaaaaacatcttccatgactgtgctgttcatagttgtgatgcgtcactgttgctggactccacaagaaggagcttgtctgataaggaaacagatagaagctttgggttgagaaatttcaggtacattgagaccatcaaggaagctttggtaaaggaatgcacaagaattgtttcctg

SEQ ID NO: 35586 - DNA, 406 bp, Glycine max
ggttggggtgttctgtcaaagtccaagacggaggtggtcctccttctcttccctcaaacacagacacagacacaagaacaagtttgcaagtcatgaaagctctaattttaatcctcacgctatgcagcttctcacaagcagcaacctccatagtcagtcaaccccaacccaaagagtctttcaagctcaaccaaaccaagccacagaatgatgaggctagtagttcctgtagttacacggtgagcataaaaacaagctgcagttctcccccctacaccagagattacatcagtcttgcatttggtgatgcttatggctaccaggttcagttcctacctacggatacatttgaaaaaaaatgaatgaatccactgcaggtttatgttccaagactggacggtcctcg

SEQ ID NO: 35587 - DNA, 335 bp, Glycine max
gaagaggttgagtgtcaaacaatctttttataaattgtaggaaaacaattgattgtcatgttactaaagccttattatgttttttgaaacacagtgggaggacttttgaatgcaacatgtgggaatgctacagagctcatcatagcaatttttgctcttagcaataacaaaattgcagtggtaaagtattctttgctgggttccataatttctaaccttcttctggttcttggaacctctctattctgttgtggcattgcaaacattagaaaggagcaaaaatatgatagaagacaggcagatataaacttgcttatgctgtttgtggcattgct

SEQ ID NO: 35588 - DNA, 352 bp, Glycine max
  unsure (1)..(352): unsure at all n locations
agcggacccttggccggtgccaaaaaaccaacaaaagggaaggcaaaagggcaaaaattttgaccacattggccccaacacaagcctttttccacaacaagcccctaacaatccaaccaaaaccttcaacaaagcgcccaattttgaacaacanaccanaccacattgtttgcaaggcaacacagaagcaggttactgtccaagagggtgangacactactactggccttgtctctcgcaagttggccctcactgtgctcattggtgctgctgctgttggctctaaggtggcacctgctgatgcagcctatggagaagctgccaatgtgtttggaaaaccaaagacaaacac

SEQ ID NO: 35589 - DNA, 199 bp, Glycine max
aaaaggggaatgaccctgggcgaattcaataaccacaaaggattcatccttcatcgcctcctcaaggctcgttgttgcatgggtagaccctggctcaaggccttggctcgcaaatactggcaagagaagatgatttgccgcaagtgctatgcacgtctgcatcctatggctgtgaactgccgcaagattaagtacggtc

SEQ ID NO: 35590 - DNA, 320 bp, Glycine max
ggtagttccaccgagtaccaacaatgtcgaatcgatgtcacggaggatccgcgggaaacaagttccccatgtccctgggtctgccggtgcctgcgaccgtgaactgcgccgatgccaccggcgcgaagaaccgcaacatcatagcactgaaagggatcaatggtacgctgaaccggttgccgtcaacatgcgtcagagacactcttatggccaccgtcatgatgggacagcccgatctccgtatgaaggtgctgctcgccgtcatcgtccgccatctcatgccttggcgccaaaaggacggtgtttacatctacttcaat

SEQ ID NO: 35591 - DNA, 387 bp, Glycine max
  unsure (1)..(387): unsure at all n locations
gtttcaatgtgtgattgtttggtgttgtaactccttcctgctcctttgatggtccgtgattgggtttgtttttttcctaactgaaaatgtcgtgctgcagtggtaactgtggttgctgaaactcctgcaattgcaggaactgctgctgacgctgcaagatgtacccagacttgagctacactgagtcaaccaccaatgagaccttggtcatgggagtggcacctgttaaggctcaatttgagggtgctgaaatgggtgtgcccgctgagaacgatggctgcaaatgtggaccaaactgctcctgcaacccctgcacttgcaaatgangtgttgggagagcaagcttcaagcagagataacccttaattatgaataatgataaactat

SEQ ID NO: 35592 - DNA, 339 bp, Glycine max
  unsure (1)..(339): unsure at all n locations
aaaaggggtcccctcccctgggaattttagcaagcaaaaacctaaccgggcctggcttccttggtcctgtttttcaacaaggatgagtcccaagttgaacacgcacttgttgtcaaagttatgggtcgtactggatccagangacaagttgaccaggttagagtgaagtttttggatgatcagaaccgtcacatcatgaggaatgtgaaaggacctgtgagagaaggagacattctcaccctactcgagtctgaaagggaagcaagaagattgcgctagatggtctcttttttttggcttgcctccaaattcgaacanaagcaatatttttcttgatat

SEQ ID NO: 35593 - DNA, 330 bp, Glycine max
gatcgaaaccgaaaatgaaaacccagagtgcttctctcctctgtctttttctctctcttgctatccttttggctaattttactgctgcaagtgcaactccaagaagcgcagtgccaagccaccatgtttcaacattcatcagaagcctttttccttccacttttctctttggaattggttcttctgcttatcaggcagaacgtagaccaagtgtacatgggagaggacgaagcatatgggacacctacactagacagcatactgaaaagatttcggatcatagcaccggtgacatgggagccgatttttagcatcgatatcatggtgacc

SEQ ID NO: 35594 - DNA, 222 bp, Glycine max
ttcttcgttacccaaatcccaagggtcccttttcccccttaatcaaaaccttcttccttttcccggttgcaattttcaactgcttccaactcgccgtgttgctcctcctcctcctccatcactcccaaggttaaatccaacgataacaacaactgctacctcgtctccgctaaacattctcccgctaacacgtccgcttcggtttcttcacgcaccttcctc

SEQ ID NO: 35595 - DNA, 345 bp, Glycine max
gacagcagataatagggtcaaagaataaaaaggaccgttagctgacacaaccatcatggccacctgtgctattcagcaatcatcagtcagtggtcaaactgtccagaagcagctcaatgagttcgtccgcaagagcggtggctccggcataagtctcatgaacattagctgtaccgtctcgagtgctccacagagcatttggtacggcgctgacagttccatggtactgggtccattgctggaccagtttctatcacatctgaccggagaattccctggtgactacggatgggacactgctggattattagatgatccggacatctttgccaggaaacggggaac

SEQ ID NO: 35596 - DNA, 416 bp, Glycine max
cttcgttacggtgccaaaaaacaacaaaagggggcgccccccgaaaaaaaccaaatattttggaaaaaaaaaaaggggaaaaaaaaatgacaacaagtttcaaaagaaacaggaaaaaaaaaggtcacgtcagccccggacacggccgtatcggaaagcaccgcaagcatcccggaggtcgcggtaacgccggtggcatgcatcaccaccgtatcctcttcgacaagtaccatcctggtttcttcgggaaggtaggcatgcgctacttccacaaacttcgcaacaaattctacaatccgatcatcaacatcgacaagctgtggtccctcctcgcccaggaggccaaagacaaggccaccgccgacaaggcacccttgctcgatgtcacccaattcggttactttaaagttttgggt

SEQ ID NO: 35597 - DNA, 401 bp, Glycine max
aggggaaatccagagaaagagtgaggggagaatttcagaggaattttcaacaagaattcacgaacgaatcaaaacctctccttctccccgaaagtgggtttaaaaacgtaatccccttaaaatggtcctctcgttcatgaaactgttctcgtttcgatttgagggaacagtacaagagtgtgaggatcggttaacccaactgcacaggtagtcactaaaataatggagtctcacgatgagactggatgccaggctcctgaacgcaccattctttgcattaataattgtggcttctttggaagagcagctaccatgaacatgtgtttcaagtgttacaaggacatgctgttgaagcaggagcaggacaattttgcagcatcgtcggttgaaaacattgtgaa

SEQ ID NO: 35598 - DNA, 293 bp, Glycine max
tcgggacgctgctgaagagtccactgacatcattcccctggatgtcgctctactcactctcggaattgaaactgttggtggagtcatgacaaagttcattcgcagaaatcctgttatcgcaagcatggagtctcacgtgttcagcaccctatcatgaccattagactacagtcgccattcatgttttcgaaagcgacacgagtctcacacaggacatgccgccttcgtgggaattttgatatgtccagacatcctcgatccccatcgggtacgcctcacattgaactgacctt

SEQ ID NO: 35599 - DNA, 391 bp, Glycine max
gttcaagcaggggcgctagaggagtcgacagccaacctctggaggatctgaatgacgtgtacagctatcatagaggaccagacggtgaacacgatgcccctcgacgtctaaagcatcgacacgattgacaatgtcagggctaagatgcaagacctggaaggcatcactccggatcatcagcatttgattttcgccggtaagcaacttgaacatggaacgaccttggccgagtacaagtatccagaaggaatcaacccttcaccttgtcctcaggcttcgtggtagcatcatcgatccttccctcatggctttggctcacacatacaaccacgacaccattatttgccgcaaatgctatgctcgtctgcagcctacggctgttaactgccgt

SEQ ID NO: 35600 - DNA, 393 bp, Glycine max
  unsure (1)..(393): unsure at all n locations
aaaagacgacagaaagggaatcccaatttgaatggttaacaaagggttccccggccggctcctcaacttccccccgttccaaccaaacccaaaccaaaatcatgggcaaaaaatcctccgccggtggcaactggaaatgcaatgggaccactgaagaggtaaagaaaattgttactactttgaatgacgctaaagtccctggagaagatgtcgtagaagttgttgtgagccctccttttgtgttccttcctgttgtanaaagtttgctgcgccctgattcccatgtttcggcacaaaactgttgggttcgcaaaagtggtgcttataccggtgaggttagtgctgaaatgcttgttaatttgggaattccttgggttattattggtcactctg

SEQ ID NO: 35601 - DNA, 314 bp, Glycine max
ggggatcatgttgctgtaaaagcgcttccggctatgagtacacgcccttcatatgatgatggctccaatgctgagatgggcatattggggctatgccgacagaggcatattgttaggttcttgggctcctgttcaaatcatgacataaaccttctggtctatcagtacatgcccaatggaactttacgcgatgttctacatggaaagaacgggggtcattttcatttggatccacagtattcaattgcggtggaggcagtcatggtgctttgccactagtcttatgaatgtactccagtcactgtctatcgtga

SEQ ID NO: 35602 - DNA, 375 bp, Glycine max
ttgggacagctatccctcatcagcatgctgctgagtatcctgcttgctttgtttatgtctaccgatttggaagtatatgtgcgccatggctcaggctaccgcacatatcctcaccgtgttagttcggcatttggagggcaatgaagcaatgaggtggcatgtgccaattaaacgcgtggtgtagaagcaaacaccatagtcaagtggcagactgttcctgcatcttgcctcgaatgcgtagctgactactttctacgagaccaatactgctcagattccataacagttacccaacaagcttatttctatgccaaatccctcaaactcaccatcacttatgtctttgtcttggacgttcacgaccctactctctct

SEQ ID NO: 35603 - DNA, 347 bp, Glycine max
ggctcattgagctaatattagggtttgtagtgtatcaagaacaagcatcactggcgccgaagatcacacgtaaggttagcagataccctgaagtgataatgggaatccgatagtactcgaggtcacacatgtatcacaagacgggtatttgggctatccaggccaattcaggtggcgttttaactcgccactatcctataaccaagcctgaaactctcgctaaaatagcgcccaaattttaccctgtccgatgatatcacgaagccccttgtcatcaagcacacaccgataatagctaagctcagggctagcagtactcacgggatagtgttgactcttcctgccgg

SEQ ID NO: 35604 - DNA, 194 bp, Glycine max
cgcatactatttcatgtggaagttgtctgctctagcagagcatggttccctacgcacagagaacgcatgggcaggaagatggtggacttggctagggacgtgggcaagggtggaacaccttcgtaccgtcgacacctgcatgttgttgttaccggttaggatgatgaggatagatacattgacatcccccaaat

SEQ ID NO: 35605 - DNA, 251 bp, Glycine max
cgggaaattgaacctcggtagcctctatttggaggctggaactcaacctttgtcagtggttatgggctagcattgcaagacttcctttttgaatctccggatggcagaagatacctcaatttgtacttgtggttgccctcgtgtcgagagagtggttgcgaggttgagtggaaacattgtgctgcgagagggatgcaaggatgccagagttgagagtccttttgaagtgaagcaacatctagagatgaagt

SEQ ID NO: 35606 - DNA, 229 bp, Glycine max
attcgcatggttagcttatagacagcctcacctgctacttttgggtgagccaacgaatcatttggctagtgggacaattgactcattgagcgaggcattggctgaatgggatggtgggatggggcttgttacgccaggagtttgggctcataaatcaggtggcccatgagatgatcgtgtgtgctgctcaagctgtgaccagagaggaaggtgacattatggatttcaa

SEQ ID NO: 35607 - DNA, 254 bp, Glycine max
gtggattagttcaccatccatgcaggagttcttctgagatacgttccattaacggctaagcgcatgacgggaatagtctcaagaggagggtctattcatgcagagtggtgcttagcttagcacacagagaattttgcttatgagcactgggatgagatagttgagatctgcagtcagtaggatgtgggcctatccattggggatggggtaagagctggatccatcgatgatgcgagtgagggcagggcagttcg

SEQ ID NO: 35608 - DNA, 123 bp, Glycine max
aggaccaagaatgaagagcgaggagaatggctcccaggggtttaatcgttttggctgtgttatgcgtctcagcactgtcactgagtcgttgtcttgcgggggataatgggggtgttagcaact

SEQ ID NO: 35609 - DNA, 371 bp, Glycine max
ggttctagtgtgtgattgtttgttgttgtaactcgatcttcttcttttgttgttctgtgtttgtgtttgttttttctctcatctgaaaatgtcatgctgcagtggaaactgtagttgccgaagctcctgcaagtacagcaaccgctgctgacgctgcaagatgtacccagacttgagctacactgagtcaaccagcaccgataccttggtcatgggaatggcacctgttaaggctcaatttgaaggtgctgaaaagggtgtgctcgctgagaacgatagatgcaaatgtcgaccaaactgctcctgcaacccttgcacctgcaattgaggtgttgggacagcaagcttcaagcatagatatcccttaatta

SEQ ID NO: 35610 - DNA, 414 bp, Glycine max
ccacgcgtaagtacagccgtcagtagagcagagaaaggggcacaagttgggtgagatatcatgaagcaagtggataagtatgcaattgcatgttaagatcggcactaaaatctgggtagcaagccataagtactctatatgcagaactaaagtaagacagaagtgcatctgctatgtcaggcagtcaatcaatggcaatgatagataggcttcaatagaagaatgcagcaatgcacatggaagccttgcagtatcaaagaatgatggaagaacaatctgagtatgatcacgacgctttgcaacttttgaatgagctcatgatgaagagggacaaagagaagctagagctagaaaaggagattgaagtatatagaaagaaggttcatgaatatgacgtaagagataagatgatga

SEQ ID NO: 35611 - DNA, 338 bp, Glycine max
acgcgtaagttacgctgccataatatcacaataagggacaactcacaagctcacaaagcaaaaacaatgttccaatactggatccaaagggatgcaaatcaaacatcctgaatcatgggttcaacaagttagaatcagattaccccaacccacgtatctgatgaacaagcaaatcttttcgacatgcaactagccagtgcttctgtccatcaatgattctcagatcaagacttgagcttgatctgttggaaatcagtatcaatgctgagacctggtgttcaactttcccccactgacatttcttcacagctcccaatacagaaccctgatgcacccgt

SEQ ID NO: 35612 - DNA, 405 bp, Glycine max
  unsure (1)..(405): unsure at all n locations
ggcacttcaattgcaatcaaattagttcattctctttgcgcagttccctacctctcctttcaagatgcagatcttcgtcaagaccctcaccggaaagaccatcacccttgaggtggaaagctctgacaccatcgacaacgtcaaggccaagatccaggacaaggaaggagttcccccggatcagcaacgtctcatcttcgccggaaagcagctcgaggacggccgtaccctcgccgactacaacatccagaaggagtcaacccttcaccttgtccttcgtctccgtggtggcatgcagatcttcgtcaagactctcactggcaaaaccataaccctagaggtcgaaagctctgacnacattgacaacgtcaagggcaagattcaggacaaggagggaatcccccc

SEQ ID NO: 35613 - DNA, 188 bp, Glycine max
gagacacagagtgttggcaaatgggttcaagtccaggctttcaatgatttactttggaggtccacctttgagtgagaaaatagcaccattatcctctctcatgaaaggaaaagaaagtctatataaagagtttacctggtttgagttacacaaatcaatctacggttcaagattatctaaaaatagac

SEQ ID NO: 35614 - DNA, 242 bp, Glycine max
atggagcttgatacatgatataatgcacttatatcaaccatttcatttaccaatctggcacaccaggaataatattacatcttgccagcacaggtgtttgtattctgaaacaattcgctatgcttgttatctgataagccgaataacttctgtccccatagtttcaaccatctatacatcacctgattcaatttcttcctacaacccctcaaatcttgatcttttcacccatatttcctgtt

SEQ ID NO: 35615 - DNA, 161 bp, Glycine max
aacgggaagttttcctcgcgagtgtcactcttgaaaacattccacatcatggaaccattcactttgtttgccactcatgcgttggcggggcaatcgcttaccacagggatcgcattttctttgctaacaagacatatcttccaaatgcaactccaactcca

SEQ ID NO: 35616 - DNA, 399 bp, Glycine max
gggtctgcgtaatagtcacaccaaaaacgagacacgacatgggtccaaaatcgttcggaaaagcattcgtcgtgcactacgtaaccaccttcaacaccaccggagaaatcccgctaatctctaggatgtaggttacacgctcactttccaaggtcaaaaccatccacggctctcacagcaacgtcgccaaactcacctcccttcacttccaacagtgacagcatcccatgatcagcgtggatacgcaggactcaagcgtcaactgcgacatgctcagcttcggcagcggcaatgctccagctctgcggtaataaataccccctcaagttcatacgtatgtgcgatctgacaccagcaccacagggaagctattatgtgtcgaatgacatattccggttg

SEQ ID NO: 35617 - DNA, 404 bp, Glycine max
  unsure (1)..(404): unsure at all n locations
taccggtctagaattcncgggccgacccacgcgtcaaagacgacagaaggggaagagtgaagagcgaagagaatggctcccaagggtttaatctttttggctgtgttatgcttctcagcactgtcactgagtcgttgtcttgcggaggataatggacttgttatgaacttctacaaggaatcatgccctcaggctgaagacatcatcaaagaacgagtcaagcttctctacaagcgccacaagaacactgctttctcctggctcagaaacatcttccatgactgtgctgttcagagttgtgatgcttcactgttgctggactccacaagaaggagcttggtctgagaaggaaacagatagaagctttgggttgggaaatttcaggtacattgagaccatcaaag

SEQ ID NO: 35618 - DNA, 406 bp, Glycine max
attcccgggtcgacccacaacgtcagggggagcaagagtgaagagcgaagagaatggctcccaagggtttaatctttttggctgtgttatgcttctcagcactgtcactgagtcgttgtcttgcggaggataatggacttgttatgaacttctacaaggaatcatgccctcaggctgaagacatcatcaaagaacaagtcaagcttctctacaagcgccacaagaacactgcgttctcctggctcagaaacatcttccatgactgtgctgttcagagttgtgatgcttcactgttgctggactccacaaggaggagcttgtctgagaaggaaacagatagaagctttgggttgagaaatttcaggtacattgagaccatccaagaagctttgggaagggaatgccc

SEQ ID NO: 35619 - DNA, 212 bp, Glycine max
gattggggttggggttggggttggggatgggggtaagcaacaacatcaccgcagtgctgaacttgatagctacgctggcctcaatcccgatcatagcctccggcatttggctggcatcgaagcccgacaacgagtgcgtggccaacttccggtggcccattgtcatcatcgggatcctcatcgtcctcgtttcgctggccggttttgtcggt

SEQ ID NO: 35620 - DNA, 355 bp, Glycine max
ggcacaagtttgttgagatagctagaagcaataagatgaaaatgaaagtgcttgttttgtttgttgctacagttttggtagcatatgaatgccatggctcagactagcagaagttccctctccaaatgaaaactgggtttggtgggcaatacagcaatgaggtggcatgtgccagttggaggcttggcgtggaagcaaacaacgtagtcaagtggcaaactgttcctgcagcttgcggagagtacatagctgactacgttctaggagaccaagatagatcagattccaaaacagttaaccaacaagcttagttctatgctaaatccctcaaactgcacaacaaagatgtccttgt

SEQ ID NO: 35621 - DNA, 317 bp, Glycine max
tggggtaaatgccttcctaagatgtcatggatctggctgtattattatgcgtctcaacacggtcactgcggggttcggttgcgggacaatggaattataatcgactagttatgaacttccacagggcatcatgcactcatgttgaggatatcatcataaaagtagtcatacttcactagattcgccatatgaccactgctttctcctgcctcacgaacatcttccatgactgtgctgttcatacttgtgatgcttcactgttgctggactccacaataaggagcttgtctgacaagcgaacaaattcaaacctttgg

SEQ ID NO: 35622 - DNA, 402 bp, Glycine max
ggaagagtgaagagaatggctcccaagggtttaacctttctggctgtgttaatatgcgtttcagcactgtcactgagtccttctgttgcgggggaagggcaaaataatggccttgttatgaacttctacaaggaatcatgccctcaggctgaagacatcatcacagaacaagtcaagcttctctacaagcgccacaagaacactgctttctcctggctcaggaacatcttccatgactgtgctgttcagagttgtgatgcttcactgttgctggactccacaagaaggagcttgtctgagaaggaaacagattgaaaccttgggttgaagaaatttcaggtacattgagaccatcaaagaagctttggaaagagaatgccctgcagttgtttcatgtgctga

SEQ ID NO: 35623 - DNA, 285 bp, Glycine max
ggaatagtgaagacactggctctcaagggtttaacctttctggctgtgttaatatgcgtttcatcattgtcactgagtgcgttctgttgcggcggaagggcaagatcatggtcttgttatgaacttctacaaggaatcatgctctcaggctgaagacatcatcatagaacaagtcaagcttctctataagcgccacatgaacactgctttctcctggctcacgaacatcttccatgactgtgctgttcagagttgtgatgcttcactgttgctggactccacaag

SEQ ID NO: 35624 - DNA, 313 bp, Glycine max
agccgtcagtacagcaccgaaaggggaacagagcggacaatggctccctcgggttcaaactttctgtctgccttactatgcgtttcaccactgtcactaggtggatctgttcccgcggaatggcataatcatggccttgttatgcacttctacagggaatctttccctctggccgaagacatcatcatcttaccagtcactcttcgctacacgctccacatgaccactgcttgtctcgtggctcacgaacatcttccatcactgtgctgttcacacttgtgacgcttcactgttgccccactccacaatacgg

SEQ ID NO: 35625 - DNA, 288 bp, Glycine max
gaagagagcatgcatatgaacatgatgatgaaaacagtgtgtgggtttgcaatattgatagtggcagtgcatcttcaggtggaagtgagtccctacgcacacgctgtgacgtgtatccctgtggagctgagtccatgtttgggggcaataacctcattccaactatcatcaacaatttgttgccacaaggtgaaggaacaaatgcaatgccactgttgttacctcaaaagcccaagtccaatgccatatgccaattctcctgtctccagaaaggttgctagcccttgt

SEQ ID NO: 35626 - DNA, 256 bp, Glycine max
aaattaagcgagagcattccattgttgttatactgtattgtagccggataataagtcacgagatagccgctaataggggaagatgactgaggcatatataaggaacaagcctgggatcgcgatcgtgaatgacatgccggttctccatcacggtcgttcatcactcgggttcattccggtccggttcgtcctgcgcatctttgtcaatgtgcctatcgccgttgccatcttcctcactgttttccgctctttctct

SEQ ID NO: 35627 - DNA, 364 bp, Glycine max
gtcaatgatgcaacaaaccaagttgcggatgatccaaaaagattatctcttatggaggagcagctcaacaacatcttacgtggatgtgatggtgagaaagtagccaggaccagtttctccatgggttccacccatatggatcggcggcttcaccaaatgttgttcgctgatcgggattatgaaagttatgcggtagcaagagaagttgatagtcctccctctttaaggccaagaatcacaatagaacgttgtgaggaaaaagggtactcagtggtcagtgtcaagtgcaaagatagggcaaaactcatgtttgacattgtttgcactcttactgatatgcaatatgttgttttccatgccacag

SEQ ID NO: 35628 - DNA, 376 bp, Glycine max
ttcccgggtcgaaccacgcgtcagaccaagcgttcgtaacggtgccaaaaaacgacagaaaggggaattagcaagaatgaagagcgaagagaatggctcccaaaggtttaatctttttggctgtgttatgcttctcagcactgtcactgagtcgttgtcttgccgaggataatggacttgttatgaacttctacaaggaatcatgccctcaggctgaagacatcatcaaagaacaagtcaagcttctctacaagcgccacaagaacactgctttctcctggctcagaaacatcttccatgactgtgctgttcagagttgtgatgcttcactgttgctggactccacaagaaggagcttgtctgaaaaagaaacaga

SEQ ID NO: 35629 - DNA, 308 bp, Glycine max
ggaacgtgatcgatctcgttaccagttgccacactacagcgacattccccctacacccgtttgcgtggttgtctgcgaagagttggcgactaagaggagcgttggaacgtttaatgagggtgatttgaaagggaagagggtgttcgtgagggtcgatgtgatgttaccgttggatgactgccgcaacatcgttcaggactctgtagtgcgtgctgctgttgtcaccatcgagtacttaaccggtcatggagccagagtgatcctattcgagcccatgggacctcctatcggtgtaattgctagtgaca

SEQ ID NO: 35630 - DNA, 443 bp, Glycine max
aaccaagccttagaacaagccttcgttacggctgcaaaaagacaacaaaagggggtccagtatccgagagcatggcaattgctcgctatgttaacccacctgaaaggtgataacactttgtatggatcttctttgattgaacatgcccacattgaacaatggattgatttttcatcattggagattgatgctaatattatcaagtggtatgccccaagagttggacgaggaccatatcttcctccagctgaggaggctgcaatttctgcactaaagagagctttggctgctttgaacactcaccttgcttccaatacttacctggttgggcattctgtgaccctggctgacatcataatgacatgcaatttaaaatttgggttttgcaaacaccctggttaagtgctttacctctgagtttcctcatgttgagagatactttt

SEQ ID NO: 35631 - DNA, 377 bp, Glycine max
tggggtgccaaacaggaatgctcagttgaaaaggtataatagtgatggtcccatgttgtcgccgcgaaccatggcttctcctgtcagggggaatgtgaatgctcgacctgcttcgccgagtaagctttgggcgggatcatccccctctaggggagttagtcctgctagggtgaggagcacggttgccagttctatcaatagtggttcaagtaacacaccctcgattcttagcttctctgctgatgtgcgaagagggaagattggggaagatcggatatttgatgcgcatacattgaggcttctgtataaccggtatgtgcagtggcgtttcgtgaatgcaagggcagatgctacatttatggtgcagaaactgaatg

SEQ ID NO: 35632 - DNA, 306 bp, Glycine max
gattcagacttgcatcaactggtacccctatgaaaaaccccagtttctctctttcactattgccgttcaagttctaagcaatcactcagactaattttgcttctctcgaagatgtctctacgaatgctgaaccccaacgccaatgtgccgaacaaatctgcggcacttcagatgaacatcaatgccgccaagggtttgctagatatcctcaaaatcaacctctgtctcaaaagatgcatcaaaatactcgttggtagtatcggtggtatcaagcttatccaagatggcaacagtctcttgaaagag

SEQ ID NO: 35633 - DNA, 337 bp, Glycine max
ctgccataagacgagataagggcaacttccctcagtgcagaccttgaggaaatacctgccatcaataattgactttaatgagcctggatcaggtgctccaactggattgtacatcggtggcaccaaatccatggtcatccagggtgagcctggtgctgtcattcgagggaagaagggtcctggtggtgttactgtgaagaagaccggtgcggccttgatcattggcatttatgatgaaccaatgactccaggtcaatgcatcatggtaattgaaatgcttggcgattatctcattgatcacggtctcaaatcattgctctatgtcatgtgatcgtgc

SEQ ID NO: 35634 - DNA, 380 bp, Glycine max
  unsure (1)..(380): unsure at all n locations
ggaactcaactgaaagtgagtgtgtgaaggtanggttttagaaactgatcctacggcatgttcatgtttttggttagcagagtgactaaggattcaatttcacgcaaccgcaatgcctttgcttcttttgctttctctagcaggtgtgctcattcattatcatttgccacagtagaagcagaagagatatcaggttctaggcctgctgaagttttgaacctggtgcaaggtaaatgggtaggatcttcaaattggaacacaattgcagatcctttaaatggtgactcatttattaaagttgctgaagttgatgaaacaggcattcagcctttttataaaaagcttgtcaagctgtcccaaacatggtgtacacaatcctt

SEQ ID NO: 35635 - DNA, 333 bp, Glycine max
caagacacgacaggggtgaattgtatagtgtctctgacctatcatggtataaagatgatgtttggatccactaagaaagttatccatgtggggagtgccgttagacatggacatgattcggatggccaatcgccaatactccttttgtctcaggaccatccataggttggcgccatgcaagccgactgtgaatggggactatcctgctgatccctccactgcttgttactcagccattgccaccgctgatcatacatgcatctgccgcttcacggattcaggccttctctctatgtatgatgttgatcccaacaagtgcatgaaactccctgt

SEQ ID NO: 35636 - DNA, 393 bp, Glycine max
ggataaaatgatgagtaaattattttgacctaaaccttaaccttaacctatgtttaaaaaataaattattttgaaaccctaggttggagatggtggtgggaggaacagcagatttcttctacaaagaagctcaacggttagggtatgtggctcgctccgccttcaagctccttcagatacagaaccagcacaagattatcagccctggctcctccattctcgacctcggctgcgcccccggcgggtggctccaggtggcttgccagagcttgggtcccttccgcggccgcggctccgtcctcggcgtccacacaaagaaagtcaaggtaacccctcttcactgcgattctagggttcaaaccatctccgctgacgtcaccacgctcccccacc

SEQ ID NO: 35637 - DNA, 263 bp, Glycine max
ggggacacatcaaccctgcagtgacattctggttgttcctgggacgcacggtgtctttggtgaaggcgtcgttgtacatgataccacagtgcgcaggtgcaatctgcggtgctgggttggtcaaatggttccataaatcgtagtacaacaagtaccgacgtggacttaacactgttagcgaaagctacaacaaatgtaccgctttgggagctcacataatcggtacgccttgttcttgtccacaccgttttctccgccactga

SEQ ID NO: 35638 - DNA, 412 bp, Glycine max
  unsure (1)..(412): unsure at all n locations
agtgaagacgacagaaggggacttcatggtataaaaataaatgtagacagattctgcctggctgtgatgcacttaacactaagaaaaagatggcactcagaagggcaacccctaacaccgttcatatgtataggaatttttcttaccaccacctaaagtagtagaagcctttgaaaatttgacacagtgcaacaaaatcccttcaccttatctctttttcttcatgcacagtcatcacctttgtcttttccatggctaaaatctggattgaggtgtgcttgatatctgctcgtggtgtgaggggttctccctcactttggaagcgtcaatggtatgctgtanggtgggttgatcctaagagcaagtactgcacaanagttgacgcttctgggaacgccaaccctgtctggag

SEQ ID NO: 35639 - DNA, 316 bp, Glycine max
ggcataggcagggatagatagagacaagcttgaagcatgtcagacgaagatcatcacttcgattctcacgcggatgcgggagcgtccaacacgtatccgcagcaggctggtaccattcgcaataatggctacatcttcatcacatccaggccttgcactgttgtataggtctctacgttaaacacaggcaaccatggacatgcaaagtgtcacttcgttgcaattgacattttcaatgggaaaagtcttcatgatatttttccatcatctcacagctgtgatgttccacatgtgactcgcactgactatcatctta

SEQ ID NO: 35640 - DNA, 317 bp, Glycine max
gacagccgcagcgttatttagtgaaaagcgacctttacgacctatggctgtctgacagactaagaggatttccagaggagagcacggtcgctacaatagagccgctgatgcctttgccaacatagactggtaccataccaatgccacttctctcttccaggtcaagaatattcgcaaaatcctcgtctctcgtacacatggaaccatcattgcagtccaatgactcacacatcaggtttttgaagtctcattggctgatctccaacgggattaatagcactccttcaacaacattcgtttgagatctgacgactttc

SEQ ID NO: 35641 - DNA, 339 bp, Glycine max
acgcgtcagtagaggagcgaaagggctagagaagggggtgcttcggaagaacgctcgcctgcaccgtccagctcgttctcaagagaagaggaccgagtgatgtttttccttgcagttcatgcgatggcgcctctgatcctgcatggtggaaaatacaatagcagttcgtacaagagactcagtgcggcggagtatgccggcgtccaagttgactttgcaccaacttttgacatgggtgtctctactagaactcgtgaatttcgcaagatcagtcctagtggcagggttcctgtgttggtaacatctgagggtccagtagtctagagcattgccattgct

SEQ ID NO: 35642 - DNA, 248 bp, Glycine max
ggccctttcgcctacgcagagagaaattgagtttctgagataaccacttttctctttgattcatcaatggcaaccgcgaggaccgtgaaggatgtttcgcctcacgatttcgtgaaagcttacacctcccatctcaagcgtttcgagaagatggagacttccgaatggggcagcattttgaagacatagaagatatactgtatagataccatattcctacagatagattgtggtctagcctctgtaaa

SEQ ID NO: 35643 - DNA, 267 bp, Glycine max
ggaacctttgcattctattcattcaagattcagcaagtgcgttttggaagcagagaccgaaatacttcgagatggcccgtacaaagcaaactgctcgtaagtcaactggaggaaaagctcccaggaagcagcttgcaaccaaggctgcacgtaagtctgcaccaacaactggtggtgtgaagaagcctcatcgttatcgccctggaactgttgctcttcgtgagattaggaaataccagaagagcactgagctcctaatcaggaagc

SEQ ID NO: 35644 - DNA, 270 bp, Glycine max
tggggcgaaagaaagatcgttctcgatgacagaggggagcggtgacaaaactctgcgaaagatcgcagacgcattcaatgatcttgcaaacgtcttcaccgattctcagagcgtataagcagaggtcaaggttgctcccttctctcatgcatgctctctcgtctcccctctcgacggttgcctgggcgtctccttcaagttcggcgaaatggattacgtcgcgaaggttcatgatctggcacaggcgtccagctctagtcagaatctgca

SEQ ID NO: 35645 - DNA, 371 bp, Glycine max
ggtgcctctcgtctccctttgcacaaaccctaacacctaaaagccagaagaagcgaaatcgtaatcgcaatctagcggatatgaaggtcgtcgctgcatacttgctcgcagtgttgggagggaatccatctccttctgccgatgatatcaaaaacatcctcggcgcagttggagctgaggctgagcatgagttgattgagttgctcttgaccgaagtcaagggcaaagacttcaatgagctacttgctagtggaagtgaaaagatttctgcagtggctggtggtggtgcaaccgtttgccgtggcggttgaaccagctggaggtgctggtggcggtgctgcacctgctgccgaagcaaaggaagaaaagaa

SEQ ID NO: 35646 - DNA, 311 bp, Glycine max
gtcagtacagcagcgagaggagtacaaaaggggatctcacccaggttgcacgaacgacaacaccatcaaactttcacttcagccgtatccgggttagggtttccgcttatgacccaacctttgacgtatcgaaaccttaagtttcggatcaggtctgagcaatctggttggtagaacctttggtcttagagagtcaagttttatgtctgaattagacgatcaaattcctaatgccttcgatcctattgctgatacaaatgccgaagactcagattctgggtcaaaggagtatgtgcataatcgcgtacagc

SEQ ID NO: 35647 - DNA, 308 bp, Glycine max
ggaggggttgggcggcgggatagacttcatggtggtggattccacgcgcggaaacttctccagagtgctgaggctggcgaagctgagtaacaaaggcgcggttcttatatgcaagaacgtgaactccgccaccaatattgcttcttcttcgggtttcagatggcggagcgtgctcgaagaagggtcagggtcgcgtcgtgtggttcgttcggtgtttcttcctgtggggaaggggcttgacatagcacacgtgtcggccattggggggggctccgctgctaagagatggttcaagcatgttgaccaac

SEQ ID NO: 35648 - DNA, 388 bp, Glycine max
  unsure (1)..(388): unsure at all n locations
gtatgaggcaatctacagcttctactttggggactatggtcacatttcagtgcanggttcatacctgacctatgaagacacttatcttgctgtgactggtggatctggcatctttgaaggggcttatggtcaagtcaagctgcatcaaattgtgttcccctttaaattattctacacattttatcttaagggcatcaaggacttgcctcaggagcttctttccaagcctgttgagcccagcccatctgttgagcctagcccatctgccaaggcctgtgagccacatgctgttatttctggcctcaacgactaaaccaccattgacccaatgaggattcacattttttttgtttcttttttaaggaaaaaattcggttacagtttctta

SEQ ID NO: 35649 - DNA, 294 bp, Glycine max
aggatgggcagcgcttgatttgggggatgggaagccccagtcaaccaccagaggtttcctcgtgcacgctggccctttctgcacgtcttcgagctttcaggttttatgagtttgaggatgggagtgagattcggacttagctcagagtcagtgtaggatggaaatcctgacatgcggtgctgccagatctcgtatggtgtcctcgacgcttggctggagcaggacccaggcagcaaagttgactgcgagatatggaccaatgccgacttggacatggtcttcgggaagatcacg

SEQ ID NO: 35650 - DNA, 240 bp, Glycine max
aggggctgcggtagttggctcactctctttctctcagaaaaacactccgagtacaaagaccctctctcctcgcctctttgcattcgagttaaagaagcgaagaaaaagaaacatgtcagacgcgttctgcatcgactgcaagaaggaaactgaagtggtgttcgaacacgccgccggcgacaccgtgttctccgaattgcggcttgtccccgaatcccaatccaatcgacgaagaactcg

SEQ ID NO: 35651 - DNA, 308 bp, Glycine max
ggaagtcgagaagaggaagaagacgaagatggagaagtatcaaatgtggtgcaggagaagagtcttagtaacgtttgcgtatgcgctgctgttctaatcagtctgagcagacgacgtcgttgtgctctcttaagataacttctagaatcgaactttgtcaggacataggagctctcgttgagttctatgccccttggtgtggtcactgctcaaagcttgctccagaatatgtgaagcttggtagcagcgtcactatggccaaagctgtgttaattggacaagttgactgtgatgagcataatagtttg

SEQ ID NO: 35652 - DNA, 335 bp, Glycine max
gagattagggtagtagcagaaagaaagagtaaccaggtggtagggtttctaattcttttcatcctcttcgcagagcctcagtagcttcgcattagcaatggcgagaatcaaggtgtacgagctgaggaacaagacaaaagcagagcttctgaaccaactgaaggatctcaaagcagaactcgctctcctccgcgtcgccaaggtcaccggcggagccccgaacaagctttccaaaatcaaagtggttaggctttcgatagcgcaggtgctgacggtgatttcccagaagcaaaaagcagcgctgagagaggcttacaagaagaagaaataccttc

SEQ ID NO: 35653 - DNA, 261 bp, Glycine max
gataaaaaagtgatttagggtttttgcacagtctcttacatataaagggaagtccttatcttatagtatcggtcagctcttccatttcgcaatccgttccaaaccacataagcttcaacaaagatggatgtagaaaagttgaagaagatggccagttctgttcgaactggtgggaagggtactatgagaaggaagaagaaagctgtccacaagactactactacagatgacaaaaggcttcaaagcaccctgaagaggata

SEQ ID NO: 35654 - DNA, 280 bp, Glycine max
ggagatcaactgtcgaaacacttccgatacagcaacttgcagacactgctgcagatggatctgcagcatcaacatggaggcgtgttgaaacctcatcgatatcgccctgctactgttgctcttcatcatattacgaaacgtgagttgatcatagatctcctattcaggaagcttcctttccacaggttggttcgtgaaagtgcccaacatttccagtctgagtagcatttccatagcaatgctgtgcttgcattgcaatgacgatgcctacgcatacctt

SEQ ID NO: 35655 - DNA, 350 bp, Glycine max
ggtcaaccgacttccctctcccgtgtcgtgttgtgtcttcttctctaaaatcaataaccctaacttctgaacctttcatcgcatcgccaccgattcccaatctccactaatcaaagaaaagaaaatgagtagatgctcgaccagaactacctacgttgggaatctacccggtgatatccgtgaaagagaagttgaagatttgtttctgaagccaaatggctacacagccaaactctcctccgcctcctcctctttctactggtgtagcatcgcattcgccgtcaccaccattgaagccgactagaaaaggtctcacgcctaagatcattggcgactagacaagttggggc

SEQ ID NO: 35656 - DNA, 252 bp, Glycine max
ggttcaacgacgatggggcatataaagcagagcatagttggagtgaatggcataagaatgcatgttgcagagaaacgacagggtccagtggtgttgttcctccacggcttccctgaggctctggtacgcatggcgcgaccagtatctctctcctcagctccctcggatatcgcgcagtcgctccagatctccatggctactgtgacaccgaagcaccaacttcaatcatcagctacaactgcttccacataa

SEQ ID NO: 35657 - DNA, 231 bp, Glycine max
gacagaaaggggctgccgctccccgaaaaaaacagatactgtgggaaaaaaaagagcgggacagaaaatgacgaccaagttcaagaagaacaaggagaagagaaggcacctcaacgccggacacggccgtatcggaaagcaccgcaagcatcccggaaggtccccgtaacgcccgtggcatgcaacaacaccgtaacctcatccacaagtaccaacctgggttcctccgga

SEQ ID NO: 35658 - DNA, 283 bp, Glycine max
gatcattatcactaccactagacagatgtcaaccctagtctactcgcttttcacttgttcactttcttccaaactctcaagcccaacgtagtcccttttcttctcccaccaacttcaccgtcttcttcctcgatcatgtcgcacttctagggcaactagcatgatgagcttattgccaatgctgcttacattggcacacctggaaagggtattcgtgctgctgatgagtcaacagggacaattggcaagcgtttggccagcatcagtgtatagaatgttgaat

SEQ ID NO: 35659 - DNA, 259 bp, Glycine max
cagggggggatttccatggatctcctgaaccgtgtgcactctctttctgtgccgtctcatcttcgaactccgatggcgaacctgtggcgcgcggcaaccggcatgaccgacaatgccaccgattacgacagcgtctagttctggtctgaacccgagcggatcggctggctcaccaagcacggcgagtacatcaagacctggcgccgccgctggttcgtcctcaagcaacgcaagctcttctggttcaaggactccgccg

SEQ ID NO: 35660 - DNA, 300 bp, Glycine max
gatgcttcacaaacggtatatgctgtatacctctgttctctctccccctccccgattcgttttgcccctttcgttgccctaatttcaaccatgcctcgccgtaactccggtggaagatctgcccgtcctgctcctcgtgcagcacctcgtcctgctccagttcaccatgctcctcctccagcccctgctcagagcggtggcggatctatgcgtggtggcattggttcaaccatagctcaaggtatggcttttggcactggaagtgcactggcacacagggctgtcgaagctgtcaagggt

SEQ ID NO: 35661 - DNA, 367 bp, Glycine max
gatgctcccttgcttcactctcatcaaacaccacctttactcaactcctcccaattaaagttctttgggacacattcaacaagtttagttcaccaatcaaccttgttcctatattcacattcatatcatattataaattacattgacaagccttctccacttttttttttcacttctaaacattcagaaatgggagttggaggcacactggagtacttgtctgatctaatgggcagtggccaccaccaccacaagaagaagaagaagcagttccaaaccgtggagctaaaggtgagaatggattgtgatggttgtgagcttaaggtcaagaacgctctctcctcactaagtggggtgaaatctgtgg

SEQ ID NO: 35662 - DNA, 394 bp, Glycine max
ggttctagtgtatgtgattgttgtgactcgttcttcttcgtcgttatcttcttcttttgttgtttgtgtgtttgttttttctctcacctgaaaatgtcttgctgcggtggtaactgtggttgcggaagcgcctgcaagtgcggtaacagctgcggaggctgcaagatgtacccagacttgagctacactgagtcaaccaccaccgagaccttggtcattggagtggcaccagttaatgctcaattcgagagtgctgaaatgggtgttcgcgctgagaacgatggctgcaaatgtggagctaactgcacctgcaacccctgcacttgcaagtgatgtgttggagagctaaaacttcaagcagaaatggcccttagaaataatgatacaaactata

SEQ ID NO: 35663 - DNA, 331 bp, Glycine max
ctgccatacgacgagatacgggggagcgagcgagcagtttcaaatagaggatttgggattgggaaggcgagggattgcgctgcgtctcttcctcttctctttcgattcatccctcattcataatcttcgaatccaataacctcagcctcacactcacacatacacacatctgaacgcgtatcgtccctcccatggcttcaaagcgcatcctcaatgagctcaaggacttgcataaagacccactaacttcttgcagcgctggtccagtagctgaggacatgttccattggcaagcaacgattatgggtcctgccgacagtccttatgctgg

SEQ ID NO: 35664 - DNA, 367 bp, Glycine max
  unsure (1)..(367): unsure at all n locations
ggcacttcaattgcaatcaaattagttcattctctttgcgcagttccctacctctcctttcaagatgcagatcttcgtcaagaccctcaccggaaagaccatcacccttgaggtggaaagctctgacaccatcgacaacgtcaaggccaagatccaggacaaggaaggaattcccccggatcagcaacgtctcatcttcgccggaaagcagctcgaggacggccgtaccctcgccgactacaacatccagaaggggtcaacccttcaccttgtccttcgtctccgtggtggcatgcagatcttcgtcaagactctcactggcanaaacataaccctagaggtcgaaagctctggacacattgacaac

SEQ ID NO: 35665 - DNA, 356 bp, Glycine max
  unsure (1)..(356): unsure at all n locations
ggtgcacttgaatgagagagagatatcctgaagtgagggttttcacttggtggtgaccacctatagtgatggaactgatatttacatagactccaattacattcaagatatatggccattcaccactaaacttgggctttcgttttcggtcttctaggcaacgtgatctcctttatggtgttccttgcgctattaccatctttttaccaaatctacaagtaaaaatcatccgaagggtttcaatcactaccttaagttgttgcactgttcagttcaatgctctggatcnactatgcattttgcaaactggatgctatcctccttctcattactattaactcctttggatgtgtgat

SEQ ID NO: 35666 - DNA, 307 bp, Glycine max
aggggaacatataggtgtcgtatcgatgattaacgagtcattgttgcaactagagcaggaagcattgcacatttaattaagcaatcgtgtgcacgaaattgctattccagagttatgagcgttaatggctatcagcataatacaatatttgcgatgagggacattaaatagtgggaagagcttacctatgatgacaggattttctcaattgatgaacgacgtccttgttactgtggcttcccaaagtgcctaagtatactaaatgatactgacgcagaagaacgagctgctaccctatatgcaccac

SEQ ID NO: 35667 - DNA, 378 bp, Glycine max
  unsure (1)..(378): unsure at all n locations
ccaagccttcattacggttgcaaaagaacaacaaaaggggttttaattgaaaaaccaaaggaattaccggaattaaaaatgcaaatctcgtgaaaatctgaaggaaactaaccctcagtcagagagcgacacatcgacaatgtcaaagccaagattcaagacaaggaaagcattcctccggattagcagcgtttgattttcgccggaaagcagcttgaagatggaaggaccctggccgattacaacatccagaaggaatcaacccttcatctcgtcctcaagcttcgtggtggcatcattgagccttccctcatggctttggctcgcanatacaaccaggacaagatgatttgccgcaagtgctatgcncgtctgcat

SEQ ID NO: 35668 - DNA, 291 bp, Glycine max
ggttctaatgtgtgattgtctgttgttgtaaatcgttcatcatcatatgtgtcagtgttgtgtatgtttgatctctcaccggaaaatgtcttgctgctgtggtaactgttgtttctgaagctcttgcaagtgctgcaacggctgctgaggctgcaagatgtacccagacttgagctacaatgagtcaactagcatcgagatcttggtcataggagtggcacctgttaatgctcaatttgatggtgctgaaatgggtgtgcccgctgacaatgattgctgcaaatgtggacc

SEQ ID NO: 35669 - DNA, 290 bp, Glycine max
gacaatccaacgggaaaacgcgtcatcataaatgccgcccatcaacttctcatacccttttattcattccattcgtttctacggtattcttttctttgccgagaaattcagatactgcatttcgatccacattgaccacgtcggtatccaggttggaaatgcctgctgggaactctattgccttaaacacggcaatcaccccgatggacatatgccgagtgacaacatcgttagcggatgatatgacgccttcatcaaatttgtcagcgagaccggcgccggaaagcacg

SEQ ID NO: 35670 - DNA, 345 bp, Glycine max
aggatggaaaacgctaaatgctgatgctggctcttatgggtttattcattctggctgtgctgttagtcgtttcagcaatgtcacagactcattctgttgcgggggatgggcagtgtcatggccttgttatgaacttctattaggaatcatgctctcgtgctgtagatatcatctcagttacgtctagcttctctacatgtgccacatgaatactgctttctcctgactcacgaacatcatccatgactgtgctgttcagagttgtgatgcgtcactgttgctggactccacaagaaggagcttgtctgacaaagaagcagatataaacgttgggttgataaattt

SEQ ID NO: 35671 - DNA, 328 bp, Glycine max
gatagcacaagattactcatacgcaccttgcagattgacatttctctcacagtcgtctttcatggcacgtacaatgaacaccgctcgcatatcgaccggtgggaaggctcctaggaggcaactcgcaacgaaggctgcaagattctctgcaactatcaccagtggagtcaagaagcctcatcactaccatcatgcaactgttgcccttcgtgagatcagaagatgcagaatagcaaatagcttctgatctggaagcatccctttcagcgatttgtacgtgaaatcgcgcacgacttcaagattgctttgacgttccagagtcacgcgg

SEQ ID NO: 35672 - DNA, 327 bp, Glycine max
ggtctcatggtattgttagcaggcattagcctatcggcgcctgctttctgtggtcgtgtgttgcagcatgatggagtcccaagtgaagcatgcacttgttgtcaaagttatgggtcttactggatccacacgacatgtgacccacgttacagtggagtttttggatgatcagacatgtcatatcatgaggaatgtgaaacgacatgttagacaaggagacattctcatcctactcgacatctaaagggaaccaagatgattgcgctagatggtcacgattgtttggcatgtctccaaattcgaacatgagcaatatgtatcttgata

SEQ ID NO: 35673 - DNA, 226 bp, Glycine max
ggggttttgtgctgttgatcactgcttcatcgcttcaataatactcccgattctctatcctgatctacgattccattgtgaagactcatggaatgggagctgcattcatacttaagtctcagtgcatgaagcaaaggtaggctgataagtcatacaagaaatcccatcttgcgaattactggacgaaaccttttgccggttcatcacatgccattggaattgtcct

SEQ ID NO: 35674 - DNA, 316 bp, Glycine max
  unsure (1)..(316): unsure at all n locations
gatttcaattaaaccaaagcataagccatataatttttttttatttgaaataatgtccgggatcatccacaagattgaggagaccctccatgtgggagggcacaagaaagaggagcacaaaggagaacaccatggtgagcacaaaggtgaacacaaaggagaacaccatggtgagcacaaaggtgaacacaaaggagaacaacaccatggggagcacaatgagggacttgtggataagatcaaggacaagatccatggtgatggccatgacaagggcaaaaaaataacacnatcaattacacaaaaagcggccgct

SEQ ID NO: 35675 - DNA, 378 bp, Glycine max
catacgacaggctggtcgaagacgacatgaagggggtgatactcacatctatactctctaatgccacacgttttagaatgtgccttccaatctgattgaacagcatatttcttggagcacttttcacacttccacttcttctcaccatgtttgcgagagtagtgtttcttaatgccagtgaggtctccaagagcccttgaagggtcgtggtgaacacatgtgggctcgggacacagataaacctttctctttggctctttgttggtcttttgctttagcttccaaggcaagttgtgtcctcttctgtgtagctgtaggttttgctctctttggaaccctttattgcacacttcaaatataaacctgtttgttgccatt

SEQ ID NO: 35676 - DNA, 329 bp, Glycine max
ggtaaatgcaagtttacagtacggtaaattctactggcaaagaattggatgtgtggctggctgcagcattatcgtacattgccatggcgcgtggtagtgcacatgctgttgcatcaagtagcattgacgcaagtcatctgaagttgtgtcgagctgcacttactggtcaaaaccctccaccatgtgatgagaaatgctgtacagttacacgccaggccactttgcgttgcctctgcagttacagttctatcctaccttcatttggcatataacgccagttctactttgaacgtgcctgctaaatgtcgtctacgattgcctcatagatg

SEQ ID NO: 35677 - DNA, 250 bp, Glycine max
acataacggggaccagttaaaccactataccccaagccctatacaatcaaaccttaacacacacccatttgattcagtttccatggctagcctcaaggttgcatttttggctgcagtgctctgcatggttgtggtgagtacacccatggcacatgcagctatcacgtgcgggcaagtgacgaatagcctgattaactgtatcccgtaactccacatccgacgaatgtcgccgtctggatgcttccaagga

SEQ ID NO: 35678 - DNA, 370 bp, Glycine max
gcatcagcctggattcgtcctttctctgctctttgtcctctctgacacatttggggccttggttactgtgtttttgcaccagggtattgggagggacgtttagagttgctgagtctggctccttctctgggaaagacgatcagtaccctccaccacgaccactcactgaggctgacgagggtcacaaagtgggcccttttacaggcgcctattgctgagttcattgcacttttgtcttcctcgacattactgtgcccacagttatagggtacaagcaccagccgggtcatgctgatgcctgtggtggggttggcattcttggcattgcatgggcctttggtggcatgatcttcatccttgtctactgcac

SEQ ID NO: 35679 - DNA, 139 bp, Glycine max
ggaacctttgcattctattcattcaagattcagcaagtgcgttttggaagcagagatcgaaatacttcgagatggcccgtacaaagcaaactgcgggtaagtcaactggaggaaaagctcccaggactcagcttgcccc

SEQ ID NO: 35680 - DNA, 245 bp, Glycine max
gaagacgacaaaaggggaaatagaacaagagaggataagagaaataacttgtgcatacaacagtacagcgtcccgttgtctttttctcagatggctcgaacgaagcatgcggcacgcaagtctaccggcggcaaggcgccgcagcagcagctggagactaacgcggctcgcaagtccgctccggagacccgcggcgttaagaagccgcacaaattcaggccgggaatcgtggcgccacgctagat

SEQ ID NO: 35681 - DNA, 407 bp, Glycine max
tgccgaagaaagaacgaacaagaaagggggaactcacaaactccaataacacaagggagaaagcaagctcaacccagagttttaaaaatggcagcagcctcctccatggctctctcttcccatccttggctggcaaggccgtgaagctgggcccatcagcccccgaagtcgggagggtcagcatgaggaagaccgtaccaagcaggcctcctccggaagcccatggtacggcccagaccgcgtcaagtacttgggcccattctctggcgagcccccgtcctacctcactggcgagttcccaggtgactacggctgggatactgctggggcttcggccgacccagaaaccttcgccagaaaccgtgagctcgaagtgatccactccaggtgggccatgctcgggggcc

SEQ ID NO: 35682 - DNA, 334 bp, Glycine max
tacggcagcgaaagggacaaagaaaggggttctaatgtgtgattgtttgttgttgtaactcgttcttcatcttttgttgttctgtgtttgtgtttgtcttttcactcacctgaaaatgtcttgctgcggtggtaactgtagttgctgaagctcatggaagtgcggcaacggctgcagaagttgcaaaatgtagccagagatgagctacactgagtcagacatcatcgagactttggtcatgggagtggcacctgttaaagcacaatttgagggtgctgaaatgggtgtgctcgctgacaatgatcggtgcaaatgttgatcacactgctcctgc

SEQ ID NO: 35683 - DNA, 336 bp, Glycine max
aggggggattgaggggtcggtctgcgtcgagtcatgcgtctctccatttgcacgacgactaggaggagtgtaggcgttggcgtccatggttaaccatgtcattgtcttgtggcctccgcactcaggattaccattctccttctcctctctcgcctcggtcatcgtcgcatgcttcaatcgcttactcgagacgctgatgaatgacttcttactatgggtcgatcactatcgtggtctctgtggcccacttgttctggctgttgcttatattccattgactgtcatggctgttccatcgtcagtgcttactcagggtggaggttatcctttttgggc

SEQ ID NO: 35684 - DNA, 301 bp, Glycine max
ggtagtttcaggttttcttttccttcagtttcacaagaaatggatagcacttttcactttcttcagtacgttctcactgcgatatggctcgtgagaggcatagggatcgcaattccagcggtggcaaagggctacgtatccagctcgccaccaaggacgctcggaattccgctccggcgaccggatgagtgtagaaaccctaccgcttcatgcccggatgcgtgtcgctgagggaaatcagaaggtactagaagatgactgagcttctcaacaggaaccttccatttcagaggtcttgtga

SEQ ID NO: 35685 - DNA, 202 bp, Glycine max
gcgggagtggcgcgatggtatcatggtgaaggcgatggacgggcgcttcatcagaagtttcggcacactggagaagagcccacgctctttctgattacaaacagcagaggaatgcaactgttacacttcagtgtctatggagagctaaagtggcacggaaagagctcagaaagcttcggatggctgcaagggaaactggggc

SEQ ID NO: 35686 - DNA, 322 bp, Glycine max
acgcgtcagcttaagcgtccgtagagcagcgagaggacaagagaagggcgaaatgaatatatgtacagaagaagaacaaaggcttcagcaagaattcagacacagtggagaagatcccaagctctttctgattacaaacagcataagaacgcaactgttacacttcagtgtctatggtgagcgaaagtggcaaggaaagagctcataaagcttcagatggctgcaagggaaactggggcacttatggaagcacacgacaacttggacaaacttgttgaggagcttacatggacaatagatatccagaacagatgaggacgga

SEQ ID NO: 35687 - DNA, 265 bp, Glycine max
gagtcactgagggatccactcaagattgccacaagaaattcatccttacatatcccatcacagggtgccatattaagctggaatccaatgacgacctgaagcttcgagcagttcgggacaagaggttcccccacaaggttcctggtgatgctctgagtgaagagttgaacggagatgtgatctggatcacctctgggtgtgacagatacagattccctatgtcccaaggaatcctgatcactagtcgtttttgatcttagctcca

SEQ ID NO: 35688 - DNA, 221 bp, Glycine max
aagatacaggggtcactgacacagagagacactcgtcacagatcccatttcaatctcatgactatgcgcgaccttcgtgaacattcatatccgtcacgcagggatccacgtcggaaattcctgctgggaacactattgactgcatgccggcatccacctagaaggcatcattccctccgacgccaccttcggtgtagcccactacacgttcaaaatcttct

SEQ ID NO: 35689 - DNA, 333 bp, Glycine max
ggagcgaagaagatattagggtttttgagtgcggtgcggcgatcctagcactctcttctgcagctttcgccgacagcttcattcaccatggctgagcaaaccgagaaggcttttttgaaacaaccaaaagtgtttctcagctcgaagaaaactgggaagggaaagagacccggaaagggtgggaaccgcttttggaaatccattgggcttggatttaagactcccagggaagccatcgaaggaacctacattgacaagaagtgccccttcactggcaatgtttccatccgtggccgtatcctggctggaacatgtcacagtgctaagatgaac

SEQ ID NO: 35690 - DNA, 364 bp, Glycine max
ggcagttcaattccaatatattccattctctctgtgtaattccctacctctcccgtcaagatgcagatcgtcgtcaagaccctcaccggcaagaacatcagccttgacgtggaaagctctgacaccatcgacaacgtcaaagccaagatccacgacaaagaacgaatccccccggatcagcaacgtctcattttcgcctgaaagcaacttgaggacggccgtacccttgcaggctacaacattcagaaggagagtactcttcacctcgtcctccgtcaccgtggtagcatgcagattctcgattagacactcatcgggaagacccataacctagaaggtgaaagctccgacaccatcgataacg

SEQ ID NO: 35691 - DNA, 323 bp, Glycine max
gacagacaactattccgcttaaacctgctactgagtttccacactggataccttacgtcttccgaattcgaacttcatttgcgatatggctactgaaaaagctcacatcaacattgtggtggttggtcatgtggaccctgacgaagcaaccaccattaacgagctgaataatcctgttgtggagaaagaagctccagggcatgccatatcatggcatgcacgtacggccaccgaagggaaccagaccattatgttaacaaaataatctggaagcctaatgtatcagtgtcatcatcactgtgtagtttaagctatcattgcta

SEQ ID NO: 35692 - DNA, 319 bp, Glycine max
gaggcgaggtagccatagagtgatactgtacagagtgcgttgttgctccttcgccataactccctgccaatatgggtatctctagagattctatgcacaagaggcgtacgactggtggcaataacaaggcatgggcgaagaagagaaagtatgagcttggtcgccatcctgctaatactaagctgtcaatcaccagcacagtcaggatgatcagggttagaggtggaaatgtaaatttgaagtcactgacattggaaactggaaattactcctggggaagtgaaactgtaactctcaagactcgtatactaaatgtggt

SEQ ID NO: 35693 - DNA, 284 bp, Glycine max
gacacacgtgtcatttcccacttctgagtaatcatcaccgatctcagctcatgaggtagaggtttttttcgatgcattacacgttctggctggacaaatatcgtcccaaaaccctcgaccaggttatggtccacagcgacatcgctcgcaatcgcaacaaattgctcactgaacacgattgcccccatttactcttctatggcccatcaggctcttgcaataaaacccgaatcatggttcttctcacgaagatgttcgtacctgatgccgaaaacgtgaacgtg

SEQ ID NO: 35694 - DNA, 388 bp, Glycine max
ggaccataataacctcaacgccagcaccggcggctggcagttacccgaaactctccaggagtcaacgcagttgaccaatttctcttgtatgggctgcaacctcaccggcccaatacctcaatttctcggctccatgaactcactgtcgtttttgaagctctctaacaactacttaacgggtgacattccccggagtttaaacgactctgcgttgcaggttctgtggctgaacaaccagcagggagagcgtctcagtgggggaattgatgttgtggcttctatggtttctctcacgagtttgtggcttcacggaaacgctttcactgggacgatccccgagaacattggggctttgagctctttgaaggagctcaaccttaatgggaac

SEQ ID NO: 35695 - DNA, 398 bp, Glycine max
ccacgcgtcaatacgactccaaaaaaacaacaaaagggggtaagtttaaattaacattgtgttgcaattgaggagttaaggtattgattgtaaccaaaaaaaattagaaatggagaatcatcgacgtcgtactcaagtgacaacaagcgatgatgaagacgaacaagatcaagaagaggtattgaaacggtctcgtcctgtggaagacgctaatcctattggcgagcctcttaactattctggaaaagggaaaagcacgaagtggcactatgactcctttgaattcaatggcatccaatatactattggggatcatgttcatttcaaacccgatgaaaatggccaaaaaccatatgctggaattattaacgacattacacatggaaataatggcaatg

SEQ ID NO: 35696 - DNA, 249 bp, Glycine max
gtgagacaattagcttcttctcgctggactgctgctactcagtttgctatagttgctagcctttctgcattaagccatcaccttcaaaagccaagtagtgaagacaatagagatatccttgataaaagaaaggatgcaattagaacacttcaagaagttctagtggggaagcatgatgaagacatagaagagacactgtataaataccatattcctacagatagatggtggtctaacctctgtaaagtc

SEQ ID NO: 35697 - DNA, 277 bp, Glycine max
gacaatataacgctttataatgcgtaatctctcctttctcccttaacaccgttacactatcgttcttcgctgcttcgctgaatctcgctacgccgaaagcacacatctgacaccataaccgcctgagaaccggttgaatcgcaagggcgctggtgctggcacgaagcaatcgacgaaagctgctaaagatactaacaagccacagagacctccaagcgctattcgtcgttttcatggtacgacttcagatagcagtttaagaacgagcatcctaaca

SEQ ID NO: 35698 - DNA, 270 bp, Glycine max
gaagagtgaagagggaatagaatggctcccaagggtttaatctttttggctgtgttaagcttctcagcactgtcactgattcgttgtcttgctgacgataatggacttgttatgaacttcgtacaaggaatcatgccctcaggctgaatacatcatcaaataataagtcaagcttctctacaaacgccacaagaacactgcattctcctggctcagaaacatcttccatgactgtgctgttcagagttgtgatgcttcactgttgctgga

SEQ ID NO: 35699 - DNA, 346 bp, Glycine max
ccggctcgacccacagcgtcagtcgggtggcaaaaaaccaccaaaggggaagtcaaggtggggtggacgaccacggagaagttatcgcacgacacgtgaaagaatccatctggtatgtgcgatcgatcatctcctctgctaaatacaatggaactgatagcccagcagctaagctactacaatggcactgacccagcgaagccgatctacgtggcggtgaacggacgagtctacgacgttaccacgggaaaatccatctacagccccagcagcagcaaagccatgttcgccggcacagacaccggcaagaccctcgagatgatgagcaagaacgacgatgacatct

SEQ ID NO: 35700 - DNA, 360 bp, Glycine max
gagtgcagaaatggtatcatgatgaaggctatgcctgcgctcaggtcgttaatttcgggaacctcaacaccaaggaggttgtttgtgaggttgttgaaggggatatcacacaattggatattcagttccaggataagcttggtaatgttgttgaagggaacacccaagtccctgtcattcaaagagagcttccccggcagctgcgctcaggttacactttcaatattgaagcagggaagcaagctttaagaaatgtgaactcccttgctttgttttcaaatattgaggtcaatccgcgccctgatgagactaatgaaggaggtaaaattgttgaaattaagctaaaggagttagaacaga

SEQ ID NO: 35701 - DNA, 298 bp, Glycine max
ggtacttggttatgaacatcagatattggctggttatgaacgtttgtaaattttgtcatcatggcagggatcatgctggtggaaatgaaaagataaagcaattggtgcctggaatcaagccacaccaaaggtcacataagctattatgttactggcaaagaggaggagcagcctgctgtttttactggagacacactgtttattgctgattgtgggaaatttttcaaaggaactgcagagcagatgtatcagtcactatgtgtaacattaggttcattaccaaagccaacacgagttt

SEQ ID NO: 35702 - DNA, 325 bp, Glycine max
ggggcgatctaatggaagagtgaattagagatatcaatatattatgataatggagggatacaataagaaggttatgaatgtggggattgtgtttggcattggcatgattgggattggcaatgggcaatactcgttttgtcgcatgcccaaccattggtttgccggattcaaacccaattttaattgggaataacctggtgattccttcactggcttgttcctcagccattgccaaggctgatcttaaatgcttctgccgcttcaaggattcgggccttctctctatgtatggtgttgatcccaacaagtgcatggaactccctgt

SEQ ID NO: 35703 - DNA, 369 bp, Glycine max
gatacagtagtattttaattgcaacacgttacggccaacttaattaattaaacaaaaacaaggtaattaattaattaacaagaattaaaaccaaaaaaaaggctcccaaaggtttaatctttttggccgtgttatgcctctcagcactgtcactgagtcgttgtcttgcggaggataatggacttgttatgaacttctacaaggaatcatgccctcaggctgaagacatcatcaaagaacaagtcaagcttctctacaagcgccacaagaacactgctttctcctggctcagaaacatcttccatgactgtgctgttcagagttgtgatgcttcactgttgctggactccacaagaaggagcttgtctg

SEQ ID NO: 35704 - DNA, 307 bp, Glycine max
ggatccaacaaagaaaaatggaaatgtaagaatacaatgcaataggaaccctcaaagtgatgcaccaatcataaaacctctagatcctgaagaattcaagaggcaaggctatatgatggttgatttccttgctgattatattatgaatgttagccattatcccgttttaagtaaagtagaacctggttatcttaaacaaagattaccaacttctgctccatgtggtccagaacccattgaatccatacttaaagatgtgcaagatcacatcatccctggcctcacacattggcaaagtcctaatttt

SEQ ID NO: 35705 - DNA, 153 bp, Glycine max
aaagaaatcaaaagatgatgaagatggaaagaagaaaaaacagaagaagaaaaaaggacccaaattgcaccaaaagggcaaatgtccggtttcatgttcttttctaaatttggaagagagaatctaaagaaaactaatcctggaatttcattt

SEQ ID NO: 35706 - DNA, 382 bp, Glycine max
gatgtcatagtattatcattcattctcatctttctctcttctctctccacccaaaccctaactctcgaccctgttcccctctcgtatccgtcatgaaaggaggaaagtccaagaccgaatctaagagagccgatcccaaacttgctgtgaataagaagggagccgccaccaaggctaagaaacccgccggcaaagggaaaggaacgaaagaacctaacaagccaaagaaggcttcaaattgcttcctccgtttcaaggaaggatttcaggaaggaattcatcaaaaaaaatcctgaaaacaaagcagtgtctgctgtgggcaaagctgctggagcaaaatggaagaccatgtctgatgctgaaaaagcaccttatgtggcaa

SEQ ID NO: 35707 - DNA, 334 bp, Glycine max
  unsure (1)..(334): unsure at all n locations
gaagtacaatatgtgggcttccacattaacaacagaaggcccaacggagaactcgaaaccccaagttgaatctttgtgtctgctatagcactggaaagttgtagccgtangtagcagttgcacacggcgcaaaggggaacaagaagaagaagatggtgtccttgaagcttcagaagcggctcgccgctagcgtcctaaagtgtggcagaggcaaggtctggctcgttcaaatgaagtcaatgaaatctccatggccaattctcgacaaaacataagaaagttggttaaggatgggtttattatcangaagccaactaagattcactctcgctct

SEQ ID NO: 35708 - DNA, 364 bp, Glycine max
caagccttcagttaggtggcaaaaagacgccagaaggggaactaagtggtgaataattccggatcagggaaccatgcttataggaatgatgatgactcaaggtgtgtgggtttgcaatagtgatggtggcagtgcaacttctggtggacgtgagtctcaaagtacaggctgtgaaatgtacccctgtggatctgaatccttgtttgggggcaataacttcctctcaaccaccatcagaaatttgttgccacaaggtgagggaatcttggcaatgcctctgtggttagttaaaaaccccaattctaaggccatatgctaattctccggtttcaaaaagggttgcaaccccttttggggtcccctt

SEQ ID NO: 35709 - DNA, 291 bp, Glycine max
agggggaagagaaaaaggcacaaagcccaagttgtggggcccaatcccaactccccggttaacaaaaaccaaaatatcaattaaattctcggaaaaacaaagtttcatttcaattcagtcttattattagggtttgccgattgagagagaaagagaaatgggagaacgaaaaggaatcccaatggctttggggctcttggcgatgaccctcttcttcattgcttcctcttcctctcacctcgttcgcgcttccgatgacgccgacgacgcgatcttctacgagtcgttcga

SEQ ID NO: 35710 - DNA, 195 bp, Glycine max
ggcacttcaattgcaatcaaattagttcattctctttgcgcagttccctagctcgcctttcaagatgcagatctgcggcgagaccctcaccggaaagaggatcacccttgaggtggaaagctctgacaccatcgacaacgtcaaggccaagatcgaggagacggagggaattcccccggatcagcaacgtctcag

SEQ ID NO: 35711 - DNA, 322 bp, Glycine max
gaagagggacagtgcagataagttttgatgagaattctatttccattaggtccatcttgatttggggttattagcttttgttagttgagtgtctgtttttcttgtttgctttaactggtactacttctgctccctagttatcctacttgtttgctttgttccttgtttttagtagcttcggttagctgtgtctcaccatgctttgttactctccattttcatatttattttttggttattgttatgaacctagaacaattggatgcatttgtgttttttacatgtggttggctaatgctgttaatattttatatcttttgac

SEQ ID NO: 35712 - DNA, 309 bp, Glycine max
gatagcatatcatgaggcgttcgcaacttgcacactcaattttctcactcaagcgtcgttcaaggctcgtacaaatgaagcggttcgcaagtctacgggtgggaacgatcctaggaagcacatcaccaccatggctggagtaaactctgtatctacgaccgattgagtcaagacgactcatcactatcttcttgcaactgttgctcttcgagagatcatgggctaccaaaatagcacagagcttcggatgcgcaagctcgactttcagcgtcctgttcgtgagatcgcgcaagaagtcaggactgattt

SEQ ID NO: 35713 - DNA, 302 bp, Glycine max
tggacagatggattgatgagcactcacatgccatgctacttcagctcgatcagcaaaggtgtggcaaccattatggcctcgtactcgacttggaatggactaagaaatccatgctcagcaggatcgtattactggcttcctgaataagactctccatttctcgggctttgtcaattcagaatttgagggtcttgagaagatcacctctccaactcgtgcatgtaacactgagtcacttgagcccggagtttctgcaggcattgacatgttcatggtttcaaagcattacacacaactcatag

SEQ ID NO: 35714 - DNA, 338 bp, Glycine max
gagacatagcgtcaccgtcagttgaatgaaaactgggctcgctgacactgcagaagcggctcgccgcgagcatgctcaagtgtggcaaaggaaaggtttggcttcacaccaatgaagtcaacaacatctccatgaccaattctcatgattacatagtgaagctggttaatgataagtttaacatcaggaaccacaccacgattcagactctctcacgtacacgtcgaatgaatgagtccaacacgaaaggacgtcactctggatacagtactcgtaacggtacaacggaagcaaggcttcccactaaacttccatggatgatgaaaacgcgtgtgctc

SEQ ID NO: 35715 - DNA, 377 bp, Glycine max
gggaggagtttcttcgtggatcttaccctcttgtttgcatatattcacattcttctgtctccgcgtcatctccttctgaactaagaaatggggttgtctttcaccaagctttttatccggctctttgctaacaacgacatatgtattcacatggtaggtcatgatgcggctggtaagattatgatcttgtacaagctcaacctgggatacattgtcacaagtattctcacaattggattcatgtgtgtacactgtgcattatgagaatattatctttacagtatgggatgttggtggccacgataagatgcgtcctttatggatacactacttccacaacactcacggtgctatccctggtggtggatatcatttat

SEQ ID NO: 35716 - DNA, 317 bp, Glycine max
aggggagagagcagcgagtgttgtgttggcaattaggacagagacgatggatgccgctcaagttggagggaggagccactgtcggttcccttctccgatgtgttgcaatttctcactgttcacatcgctggagccgaagatcactagaggttcttcagctggaatgtgacgtatggtgacatttaaccacttggtgttcaccaaacgggaatattgataaacgggcaaatcttatatccagatattcattctgttaccaacgacatcctcatcatcaatgtcttcaacagcttggctgagccctttcttctctcttg

SEQ ID NO: 35717 - DNA, 317 bp, Glycine max
tgtcgagatgacgacaggacggaggtaagggcgcgcagcgtcgttacatgcttggagtaggatcagtgatattgctggtgtggtggcttcctgtgctgacacgccagctcagggtggctggtgtggtgctggtgctcacacacattagagcactacgtcgatgagacatgatagtggccataaggtaatcaatttcgacagtgaaaacttcgggaacagacacggtgagcacattgctacttagagagaaggcaacgagcatcatttgagaaggcgccaggaagacgctgacatcaacaccttcttaaggggagttg

SEQ ID NO: 35718 - DNA, 345 bp, Glycine max
cggggttctaatgtgtaattgtttgttattgtaactcgttcttcttcttttgttgctcagtgtttgagtttgttttttctcacaactgaaaatgtcttgctgcagtggtaactgtggttgcagaaactcctgcaagtgctgcaacggctgcagaagctacatgatgtagccagacttaagctacactgagtcaaccaccatcgacaccatggtcataggagtaggacctgctaaggctcaatttgaaggtgctaaaatgggtgtgctcactgataacgatcgctacaaatgtggaccaaaatgctcatgcaactcctgcacatgcaagtgaggtgttaggatagc

SEQ ID NO: 35719 - DNA, 195 bp, Glycine max
gattgttggcttgtgctctgctcgtgcctctagggttatcatatctccatttccatttcctctctctcagtttccaagaatcttaagccatgggaaagtcctaaccaaacgttaacgccgaataacaaaaaggcctttaaaaagggaagaagaagctcaaaaggctcaacgctgaaaagaaaatcgctcctccaa

SEQ ID NO: 35720 - DNA, 353 bp, Glycine max
cgcgtcaggggttctactgtatgtgattgttgtgactcgtcctccttcgccgtaacctcctcctttggtggttgggtggttggtttttcccccaacctgaaatgtccttccgccgggggaactggtggttccggaacccctggaagttccggaaccggtgccgaaggtggaagatgttcccaaacctgaactacaacgaattaaccaacaacgaaaacttgggcaagggaattggaccaatttaagcgcaattctagaatgctgaaatgggtgttcccgctgagaaaaatagctgcaaatgtgtagctaactgtacctgtgaaccctgcacatgcacatgaggtgtttgagag

SEQ ID NO: 35721 - DNA, 236 bp, Glycine max
tgggatttcaatggcaactcaaggtcgggtcattacctgcagagctgcggtggcctgttaagcgatcaagtccttacatgtccaacacgttcatgtggttccgcctcacgctgtcgaagtccgtgtcgacctcctcttgagcgcgctccgccacaccgatgcttacacttggggcggcgaggatcccaagggtcccttcacctgtattctcggccatgaagctgcagggattgtgg

SEQ ID NO: 35722 - DNA, 281 bp, Glycine max
ggccctcgaaaatcaataagatgatggctatgcagaacatgcctcgtcctacaggtgctgatgctgctggtcatccactatgtgagctagatctccatcctcgagtcgaagagtgggatagacggaagatgtttgggggaccttggtctgatccagatgttttggattctgcaaatgatgcctaagacttgtgagtttaattcctcttgagtccagctcattggacatttgtgatgtctatgttggagccgtcggcttatggctaatgaagctcatgatgt

SEQ ID NO: 35723 - DNA, 345 bp, Glycine max
gggttgtccacatgtgcagaacttgaagcttcgtacgagtgcttttctgtcatacaagggattactatcaggtttcatggctgccccatgagtttagatcctgtttttgccagagtgacttcgtcttcttcatagtgcgctccttggtgtcctttttaactgtcgtttgtgtttaacgttccatatttgatctccctgcgtttttataactgtgcccatgtcgattttcttcagctttactcggtcatgatcatttttagcatgggggtcctatttatcctatcccttctgaaccgtgtcccttcttgtcccttggccgtcatgttcctgttttaccttcctctt

SEQ ID NO: 35724 - DNA, 315 bp, Glycine max
aggggcctcctaataatgaactggaacaacctcaaaccgaaaacaacaatcccaaccaatattaataaacaatacaaaataaaggaaaattcgagccacaacctccgcggaatggggtgcagcgcggggatcattggtgtggacttggccaaggatattctccaggcgaaccctaataactacgcggtggtggtgagcacggagatggtggggtacaactggtaccaggggaaggacaggtctatgcttatcccgaatagcttcttccgcatggggtgttctgctgttctgctttccaaccgtcgaagggactat

SEQ ID NO: 35725 - DNA, 299 bp, Glycine max
gggtccattttgcgcaggcaatgggaaagagcaaggttctttgttgtggggggaactgggtatgttgggaagagaataattaaaacaagtttaaaacaaaggcatgaaacctatgttcctcaacgttcaaaaaaaagtccaaaccttgaaattaagcaaatgctgccttcaatccagaaaccaggttctcaacttgtggaagcctctgtctctgattaccaaaacttggtggaagctgttaagcctgtggaagttgtgaattgcaccatgtctggggttcaatttttgctctcacaact

SEQ ID NO: 35726 - DNA, 309 bp, Glycine max
atcgacgaagcggtaaaatgagtcagtatgcttcatcatgatgaactttgggaataattattcggacgatgccttcacgcacctgatttggtgggcatattattggagcagacagttggaactcacgatccgctttccattttccctttagttcctaatgggtgtgacttctctctgctccgggattggctggttgaatttgtcagcgactacaagactgaaacatcggtcagacatggatgccatgctatcattcaggcagactgtgtcagtcgattgtgtcactattacaatgaggtattgcatggg

SEQ ID NO: 35727 - DNA, 224 bp, Glycine max
aaacctaacctaaccctccaaacaatccaaccggtgccaaattccaacaattttccaagggcttcggcaaaggttaattcccgtgccttggttggtgggcttgcttgggtcaccggaaacaatgcccccaaaaaagccttttcaaccaacgggaaaatctttaaaccaaaggttaccaacaaccttaaaactggaaggtcaaaaggatccggatttgtaacctt

SEQ ID NO: 35728 - DNA, 418 bp, Glycine max
aagcccggcccaacccacacgtcagcccacgcgtccgcccacgcgtccgttacggcgccaaaaaaaccaacaaaagggggcacctgaaaaacatttaatttccgaattaaaaaatctaaaccaggtcttggcaaccttacttgaatatatcacggcgtgtgtaatccaaaggtacccatcacacacacgccgataatatgggacaacagcgcagtttgtgcgcacagagcgcaaatttctcacaggtcgcttctagatactccgatatctgagagtgttgattatatactgtgcaaccatgtttgagattggtgtagttcacagctgatgaaataactgctatcatgaataactttaacgagcctggatcacttgctccaactggattgtttctcgctgccaacaaatacatggtcat

SEQ ID NO: 35729 - DNA, 266 bp, Glycine max
gtacacagcctcaacaaccctaaggcaatgcagacgcagagcagagatctcacgcacatcgggtgccagatatcacgccacagtgttattcgcttattatcaacatgccataccccaagtcacggttttgccgtggtattcctgataccaagatcacgatttacgatgttggtatgatgtacaatggtcttgatgagtttcctttctgtgtccaactggttacttggaataaggcaaacgtttctacttacgtcctggaagctact

SEQ ID NO: 35730 - DNA, 276 bp, Glycine max
gacgtttttagggtttacaccgatcagccagacctcccgcagcatccatggttctcacggctgaaggatgcctaatcagtggcgccaagatctacgcatgaaagggcaatcgctttgttcgtggtgattctcaagttttcctgtttgcaagctcaaagtgttcgaggtatttcgacaatcgtctgaagccttcaaatctcacctggactgcaatgtatatgcagcatgtcaacttcgacattgctcaagaagctgtgatgaagacgatatctgctg

SEQ ID NO: 35731 - DNA, 266 bp, Glycine max
ggaacctttgcattctattcattcaagattcagcaagtgcgttttggaagcagagaccgaaatacttcgagatggcccgtacaaagcaaactgctcgtaagtcaactggaggaaaagctcccaggaagcagcttgcaaccaaggctgcacgtaggtctgcaccaacaactggtggtgtgaagaagcctcatcgttatcgccctggaactgttgctcttcgtgagattaggaaataccagaagagcactgagctcctaatcaggaag

SEQ ID NO: 35732 - DNA, 354 bp, Glycine max
ggcacaagtttgttgacatagctataagcaatatgatgaaaataaatgtgcttgttttgtttgttgctacagttttggtagcatatgaatgccatggctcagactaccataagttccctctccaaatgaaaactgggtttggtgggcaatacagcactgaagtggcatgtgccaattggtggcatggtgtggaaccaaacaacgtagtcaagtggcaaactgttcctgcagcttgccgatagtacataactgactacgttctatgataccaatatacatcagattctaaaacagttaaccatgaagcttatttctatgctaaattcctcaaactcactaacacagatgtctttg

SEQ ID NO: 35733 - DNA, 324 bp, Glycine max
ggttctagtgtatgtgattgttgtgactcgttcttcttcgtcgttatcttcttcttttgttgtttgtgtgtttgttttttctctcacctgaaaatgtcttgctgcggtggtaactgtggttgcggaagcgcctgcaagtgtggcaacaggtgccgaagctgcaagatgtatccacacatgtgctataccgagtctcacaccacacgagaccttggcacatgagtgtgaccacttttagcgcacatctcgagtgtgcagaaatgtgtgttcccgctgagaacgatggctgcaaatgtggagctaactgcacctgcaacccctgca

SEQ ID NO: 35734 - DNA, 303 bp, Glycine max
ggtctctacaagagaagcatttgtttgtagaagacaagctccttcggatgttgaataagcaggttaatcattttactggaactggaaacactccaatgagctaccctttgcagcctgctattgaagaaattgaaaggtatgcagaggagcagtgcgatgtgagaacagtaagaatgtgtcaaggtatcttaaaagccatagcaagtcgtccggatgacaaatatgtagcttatagaaaggggcttggtgttgtttgcaacaaggaagaaggctttggtgaagatgattttgttgttgagtttt

SEQ ID NO: 35735 - DNA, 319 bp, Glycine max
ggtatttgtgagtgtgtgagagagagagcgagcagtttcagacacagagagaggggtttgggattggagggattgacgctgcgtctcttcctcttctctttcgatccatccctcattcctaatcctccaatccaaccacctcagcctcacactcacatatacacatatctgaacgcgtatcgtccctcctatggcttcaaagcgcatcctcaagcggctgcagcggacttgcagaggacccagcaacttcttgcagcgctggtccagtacctgacgacatgttccattggcaagcaacaataatgggtcctgctgatag

SEQ ID NO: 35736 - DNA, 331 bp, Glycine max
ggggccgtgcagcacataatagcgtgtggtggtcggagagaagaacgggatggagtgcgcggcgaaggggagcggaggaaggtgcggcggcagcggcagcggcggtgccacaagactctgcgctcgctgcgaagccgttgcatattgctctctctctcaccagattgcacactggagtcgtcacaaacacgagtgcgataggttgcaacagcaggtgaagagtgtcgaagtcctcaataattttcccttcactttctctcgcgaatccacgtttcaggtttgtgtgaagcaggaaactaggtgttcattttttagcaagagaggccttcat

SEQ ID NO: 35737 - DNA, 369 bp, Glycine max
cgcgtcatccctgcagctgtgagtagaggagagagtgagttattgggcttcatgcattcatgccaactggtttgggagtgctgaaaattgctcagtcagtatggtctgtattacactcggctgggttctggggatgagtcagtactcgtgctcgatgttatgagatggtcatggctttgtcactgtacactcctgttgcttttctggcttggtttccaattgttgcacaatttcaaacgcgtatgctgtacattcaagtattcagcgctggtttgcaaatgttccgtattcttggttgccagatgaatgaacttccttcgcgtagcattgaagatgtagtcaccacataagggttacttacgacgagtc

SEQ ID NO: 35738 - DNA, 373 bp, Glycine max
attctagggccgacgcacccgtccacccacgcatccgttacgctgcaaaagacaacgaaagggaaggaaagtggtcaattgttgaaccacgcaactacaaaaatgggtaaaaaagccaagcaaccttgtttttcctgggtggaatttaagtttaacaaaaacaacttgccaatttggaatttaaacatcttttagtcgaaacaatggatcgacactttggcaatgtgaatgagctagatatcatgtttcatttagaaaaggtacattttatgttggaggaaattgtcatgaatggttgcattgtggagacaagcaaagcaaatattctgtctccaattcagcctgcggataaaacttcttaagagaaataaaa

SEQ ID NO: 35739 - DNA, 379 bp, Glycine max
gtgattgtgattacctctgatgatgaatcaaacgagtagcaagctgtgaagggaaacatggcaagggaaacatctgccattaacactgccatggccttcagttctgttctctctgcaacaatcattgctgattgcggacttccacgggattttgtgatgaacattgatgcaactgacatggagtatgaactggcagcagccgagtatatcgatgatatcgacatattgtacaatgagactgagaaatatggttgtgtgcatgactacatgagttcgcagccagatatgcatgccaagatgacgtgaatccttgtggactggttgacatatatgcataggaagtttgagctcaagccagaaacgctttattcgaacatga

SEQ ID NO: 35740 - DNA, 275 bp, Glycine max
aaaaggtcaagaaaaaacggaacaacaatggcggtaaatccaaccaagttaacgaatggggcttcaccgtttcgctgatgaaaagaagtgttgcattgcaaaaagggctacccattcttggtgtattcaggacttttgcagcagttggtgttgatcctgccatcataggtgttggccctgctgctgcaattcctgttgccgttaaggctgcacgtctaaatcttgatgatactgatcgttttgaaataaatgacgcatttgcctcccaattcgtg

SEQ ID NO: 35741 - DNA, 394 bp, Glycine max
  unsure (1)..(394): unsure at all n locations
gtccacccacaagtccggacagaatgggacagccgcaactttaaacagagcaaaaccaaccttaaaaacctctggtttccggtacaaatataaggatttccaaggaaaaaaaggttgcaataaaaaaacccctgattccctttccaaaaaagaatggtaccatatcaaaggcccttccctcctccaagtcaagaatattggcaaaaccctcgtctctcgtacccaaggaaacaatattgcatcccaatgactcaaacatcgggtttttgacgtctcattggctgatctccaaggggatgaagaccactccttcaagaagattcgtttgagagcttaggacgttcaanggaagaatgttctgacaaacttctggggaatggatttcacaactgac

SEQ ID NO: 35742 - DNA, 371 bp, Glycine max
gagtggcacgccgagtacaaaagaagccgtcaaaagcctgaccacgcagataaaggatatggcactgaagttttcaggtgcatacaagcaatgcaaaccatgcacagggtccagtagctacaaaaaaggacataggccatatccagattttgataccatctcagaaggggttccatacccttatattggaggtgcaagctcaagttcaacccctgcatgggacttcacaacctctcactaccctggtggaagatctgaccctagatttgctggggcatatggcggtgaccgcaccccgagaggacgtgactcatcatcagtttgtgatgtagtcttagaggatgaggatgagcctaaggagtggatggcac

SEQ ID NO: 35743 - DNA, 297 bp, Glycine max
gacacgcaactatttctgactacgtcttgctctaagcttctcactctctctcaaaaatcgttctcttcgagtttagggttttgttttgctgctgcctcgtgtatgaccttctcaaattcaacgcgttttctcctcagcttcatgatgctcccgttgtttaggatttggggtgattctaaggcttcaaaagattccttggagaattttaatccatttaaccatgcaggactgaatgaactaatggagtctaaaggtgggaaaaagaagtctagtagtagtagtagtatctcaatgctc

SEQ ID NO: 35744 - DNA, 405 bp, Glycine max
aggcgtcagtacagcagcgaaagggcgcacaatgggccatcacaaacctaccagtgacggtttttggtgagctgtggaaattggaaccactatctgaagaaaggaagagaaaatggcaaagagaaatggactggttattgtctcctaccaactatatggtcgagctagttcctgctaagcaaagcagttccaatggtggcatttttgagataatgaccccaaaagctcgtgcagacatccatatgaatcttcccgcacttcagaaattggactctatgcttattgaaacactagatttgatgatgaatacggagttttggtatgcagatggaggaagccaggcggaacggaggagggacacaggttcacagcatagcaaaagatggtggcttccatcatcccaag

SEQ ID NO: 35745 - DNA, 378 bp, Glycine max
aacaggcgtcagtacagcagcgagaggagcacagaagggggactatagatcggttctttgcttggagtgaatacgaatcaatttatggtcacttgcgttagtcctggaagaaacatatacaccactcacacaatcagattctcgatttcttggtgggtttgagcgatctcgttagtgtgacaaaataagtgaaatgtctcagacgatgaaattgacgccgaatctggatcagcacagcacgaatgtactgaacctcatggtgctccagccaatcgatccgttcatccaacagattctcttaacagccgcgcatgtctccttctactacttcgacatctatagcaaccactacagtcgcaacgatgttgaaggatctct

SEQ ID NO: 35746 - DNA, 445 bp, Glycine max
aacaggcgtcagtagagcagcgaaaggggtacagaagggatcgcatttcatggtactcaacctcaatatgatcacaaatgcatatccactaccttttttcgaagtctctgattgtcctaaaggcaccggtaatggaagagaagaagccggcggagaataaaccagcgtcggagaatgtaactgtggagaagaatccgaacgctgataataagatctcgactgaaggaaggagctagaagtatacgatgcgcacgatgaagagcgtggagacatacaagatgtacatcttgaaggtcctcaaacaggttcagccagacattggtatttccatcagcgccatgggcagcatgaacagcttcatcaatgatcttctctataacctcgccctagaagcgttgcgtttggcccgcttcgacatgaatcccaagatcacctcgagggagat

SEQ ID NO: 35747 - DNA, 383 bp, Glycine max
tgggacacaaatagtatctattagactcactagagtaattgcggaatcagctacaattttctaataatggcgaaagacgttgagcatgtcacagaccatggtgaatactccgcgaaggactacgatgaccctcctccggcaaagttgatcgacacacatgagcacataaagtggtccttggatagagccgccatagctgagttcatagcaacactcctttttctttacatcaccgtgttgaccactattatctacaatagacagagtgacatcataatccccggtcacaacgaatgtgactgcgttggcattttgggcatcgcttgggccttccgtggcatgatcttcatccttgtttacagcactgccggaatctctggtgc

SEQ ID NO: 35748 - DNA, 372 bp, Glycine max
cgtccaagctgcaaaaagacgaccgaaggggaactcaaaaaccacactaccatagcataacccttcgaaatcctcctttaacgctcctcgttcgcaacctcaacctttccctgtctctgaaaaagattaaagttgtccctgccttactgctcgccgttctcggtgggaacaagaacccctccaacgattacatccacggaatcctccgctccgttggaatagaagccgattaagatatgaatgaaaccttcctgtccgaagtttatggttatgagataattgaaccaattgctgccggttaagaaaaactgggctcggttccctccggtggccgttgttccgttgcccttgccgctgctcctggttgaagtt

SEQ ID NO: 35749 - DNA, 396 bp, Glycine max
  unsure (1)..(396): unsure at all n locations
caaaaagccaccagaaggggacaacttcagacaatccataccccaaagaccaagccaagcttaacccttaatttaaaaaatggaacaaccttcttcaatggttccctcatcccaatccttggctggaaaggccttaaacctgggcccatcaccccaaaaattggaaagggtgagcattaggaagaccgtcacaaagcaagtctcctcaggaagcccatggtacggcccagaccgagtcaagtacttgggcncattctctggcgacccccgtcctacctaatcggtgagttccaggcgactacggctgggacactgctgggctttccgcagacccagaaaccttcgccaagaaccgtgaactcgaagtgatccactccacgtgggccatgctcggag

SEQ ID NO: 35750 - DNA, 219 bp, Glycine max
aaaagaccaccgaaagggaaattccagaaaggaaaaaggaaccctaactggataagtcaaacatcaacatgtccgacgaagagcaccaattccaatccaaaggaaacgcccgttcctccaaaacctaacctcaacaagccggtaacaatcccaagaacggctacatcgtcatcaaaggacgcccctgcaaagttgttgaagtttccactttcaaaactg

SEQ ID NO: 35751 - DNA, 409 bp, Glycine max
ccaagccttaattcgggtgccaaaagaccaccaaaagggggttggaaaaaggggaatgaatccaaacccacataatccgggggaagcttcaaattacctcaaaattgtccccaaccctaacggttctcttcccttctcatcattttaattttttccaatcaaaccatacataacataagcaccgctcttttctctccgaaatctccatctcccttcacttctgagctctggacgagatcccagatctcaccatctttcacgcactcttccatcagattcaccctttcgtttaacgcaaactcataacttgaaggttaatggctgctccatcggcaagggctcgtgccgattacgattatctcatagagcttctcttgatcggtgacagcggtgttgggaaaagttgcct

SEQ ID NO: 35752 - DNA, 307 bp, Glycine max
ggcagcgcttgagaccaagccccactcaaccaccacaccactctctctgctcctcttctacatttcaagtttttaaagtattaagatggcacaaacattcctatttacctcatagtcagtgaacgagggacacgctgacgtgctctgcgactacatctcagattctgtcctcgacgcttgccttgatgatgacgcacagagcatcgttgcttgctagatatactccaagaccaacttggacatggtcttcggagagatcaccatgatggccaacgttgactaacagaagatcgtgcatgagacctgc

SEQ ID NO: 35753 - DNA, 382 bp, Glycine max
ggaaacagagagtgatttcagtgagtgatcggtgttcacttgatctcagcataagcgtcagcgtcaattgaagaagatgccgatcagaaacatcgccgtcggaaggcctgaagaggcgactcaccccgacacgttgaaggcggctttggctgagttcatctcagccttcatcttcgtgttcgccggctcaagctccggcatcgcctacaacaagctcaccgacaacggcgctgccacccctgccggcctcatctccgcctccatcgcccatgcattcgccctcttcgtcgccgtctccgtcggcgccaacatctccggcggccacgtcaaccccgccgtcaccttcggcgccttcgtcggcggcaacatcaccttcctccgc

SEQ ID NO: 35754 - DNA, 368 bp, Glycine max
gaatgaatagtttaatattagacacgagttgtagtctcagacgctgttattgagtcaagatgggttctttggcaaagaagggactcaacaattacgtcaaacagctccagcaacaccctttgagaaccaaggtaatcactgcaggggtactatcagcgatcagcgatgttgtgtctcagaaacttaccgggatacagaaaattcaactcaaacgacttcttttcaaagtgatttttggagccgcttatcttggaccctttggacacttttttcatttaatactggataaaattttcaaaggaaagagagattcaaaaactgtggctaagaaggttctgattgaacagttaacatccaatccttggaac

SEQ ID NO: 35755 - DNA, 439 bp, Glycine max
attcccgggtcgaccaacccttcggacaagccttcgttacggcggcaaaagaacaataaatgggggtaccaggtccccaaaccatggctaaacccaccaggaaatttattggttgtgtttgaagacctaggtggaaacccaattggaacctttttggttaaaagggatatagatagtgaatgtgctgatatttataagtggcagccaaatcctataagctatcagatgcaaacgtcctggaaagcacctgttagaccataagttcatttatcatgtagctcgggacagaaaatctcatcaatcacatttgctagctttggtactccagcaggttcatgtggaaacttccatgaatgaagctgtcatgctcacaagtcgtatgatgcctttgaaacgaattgtgttggacagaactggtgcacagtaacagtgtcacctg

SEQ ID NO: 35756 - DNA, 357 bp, Glycine max
acctcaagggaaggttaagccaacgtaataatttggcggtccgccttgactgagcaacacttcgtcatggtcctcaaattgaccgaaagggactctcactcacaacagaaaccgtcatcatcatgatcgtcatcaagggcaccgaagcagactcatcgctgacaccacgatcgcttaccatgcaacgctgtgcaacctacaggaggagtcaggtcagatgctcgttgtgaactcggataatgtgggatcaaagcaactcgacaacatctccaattggtcaccgtcgcgacgcagtcgtcctcatggggaacaagaccttgatgaagcgctcaatcaggatgcacgctgacacaaggc

SEQ ID NO: 35757 - DNA, 391 bp, Glycine max
gatatttagcttcataaactccatgtcccttaaatgtgtggttgacatacgcatatcagataccatacacaactatggcaattcgagggtattctcattactgatttctcaacttgcaatccaatcagtttcaacatgcattcctaagcgattcattccatgctcaatgaatgccatattcacctttctggcctctatgaagcggttctcacaaacatctacgcctgcaatcaactttccactatcactcgaacttccctcggtcccaatgggatgaataagatggttataaatcacttggccaagctttttgtcacgaacgatgctgggacgattgtgaatgaacttgaaattcaccatcctgctgccaacgtttttggctttggcttgg

SEQ ID NO: 35758 - DNA, 368 bp, Glycine max
agggggaattcaaatccaattaaatccaatccccccggggaattccctaactccccccttaaggatgaaattcttcgccaaaaccctaacgggaaaaacaagcacccttgaggtggaaagctctgatacgatcgagaacgtcaacgccaagatccaagagattgaaggaatctcaccggaccagcagcgtctcattttcgccggaaagcaacttgaggacggccgtacccttgctgactagaacattcagaaggagagtactcttcaactcgtcctccgtcaccttggtgagatgcagatcgtcgataagacactcaccggcaagaccattgccctaaatgttgaaagctccgacaccatcgataagg

SEQ ID NO: 35759 - DNA, 371 bp, Glycine max
gtgcgagagagataggggttgagtagggggacacttttcagtgtcagttgccattcccttcgtgtgttcttctcgtgtgtttcctagttgctgtgtactgggtcgtaggggtcagtcgttcatgattctagtggttgttgcgcgcgtcggaggcacttggtgactaaagctgctcgttggtcagctctggtcacgggctgatgtgatatagctgcagctcttcatgcccggattggtggctctgagggatatcatggtgtacctgaattgcacttttgttctgatccggattctcccattccagaggctcctcagatgagtcgctcaggatttcaggtcagttgttcgtttccagagtgatcgctgtttct

SEQ ID NO: 35760 - DNA, 317 bp, Glycine max
ggtcgtgtttttgatttgagaattgcgatcgagtcttttgacacatggcatcctcgttggcaccatctaccagcgccgccactgggttgcggctcacacactctctccgcttctctcctaagcccaacagcctacgctttgccacctcgcctggtgttactctgttatgcacgagggttactgcccacttagatgatgttgatcttgattgatcgcctactgcgacttctcctcctatggatcccatctctacggagcttcactcttaatttccttagcattaccatcctcttccctgttggaatcttattgcctgt

SEQ ID NO: 35761 - DNA, 340 bp, Glycine max
aaaaggggccttcaaaagcgtaacaaacccaaaccgttcaaaaccacaaaaaaacccaccaatggggcaaaaacccgcgaggtgttataggcaaattaagaacaaaccataccccaagtcacggttttgccgtggtgttcctgatcccaagatcaggatttacgatgttggtatgtaagaagaacggtgttgatgagtttcctttctgtgtccatctggttagttgggagaaggaaaacgtttctagtgaggccctgtaagctgctcgtattgcttgcaacaagtacatggccaaatttgctggaaaagatgctttccacttgagagtcagggtgcaccc

SEQ ID NO: 35762 - DNA, 424 bp, Glycine max
ccggccaagccttcgtgggggtggcaaaacttaatcaaaagggggtggttctggctggcaaaatcaatgggtatcaactgggaatcctaacctcgtcttcatcgctacgaagttcagctaaggccgacgaagctgtggttgtgccatatcccacccatatcgatgtcaagctcattaatcgctggagcttcgaggatattgaggttactgatatttcactggttgattacattggagtcacggcatctacgcacgccacatatgttcctcacaccgccggaaggtactccgtgaagcggttcaagaaagcgcagtgccccattgttgacaggctcactagctctctcatgatgcacggtagagacagtggcaagagactcgtggctgtgaggatcatcatgcatgctatggagattactcattt

SEQ ID NO: 35763 - DNA, 372 bp, Glycine max
agggaaaggaaggaaggaaaattaaccttaaaaaatcccttggttaaggctttcaaattcccaaaggtccaactttgcaattgacatgggtaacccatttctcaatcccactgttgatggtttccttaaaatcggagctgtcgcagccacccaataagctgctgaaaatacttatcatattatccaaaaggggaatatctcaagtcgtgatttcgagaaaactttgaagaagatgtgtaacagaagtgtatattggggaactatagctggcgtttatgttggaatggaatatggggtagagaggatccgtggcaccagagactggaacaatgccatgattgggggtgcagtaactggggccctggtatctgc

SEQ ID NO: 35764 - DNA, 344 bp, Glycine max
ggaacttccaaattgcatttctacacatccctagcctctgtccgtaccgtcgcttgacaatggtttttcatgtgcgaaaccctgacctctgcgctcactttcgtctctctcgcttgtcgatcgattacgtcaatgtcttcttcgaagatcgtttctatgacggttgggaaaatcgatgggttaatcagagtggaaagaagatcagaacgtcgctggggaatggaatgataactctggtcaacggaatggcaacgctaatgacatcggtaatcatgtcagtgacgattacatcttcgaaggtaattcaactgactagattgacttccacgacatcggtaagaaac

SEQ ID NO: 35765 - DNA, 266 bp, Glycine max
ttgtgacaagtcactgaaccttatcagtacgaagaaggacaatcccgcaatgggaacagtggagagcttgaagttcgtggtgtggtcagagtacatcagagatcgtgccactttagtggttgcctatggaatcagcattaatcttgttgaggttacctgaaagtctaagctcaaagctcagtttccgagtcccatcgagtacgcggggtttaccggtgacttcgcacctgcacctggcattgcgacattcagagggatgcgctgtc

SEQ ID NO: 35766 - DNA, 358 bp, Glycine max
gaattagtcatagtagtttcttcctatttgaacaacgtaggatacaaccctgacaagattccttttgctcctatatctgggtttgacggagacaacatgactgacatgtccagaaaccttgactgggataagggtccaactctgccacatgcacttgaccagatctctgaacccaagaggccttcagacaagcacctcacgctataccatcaggaggtgtactatattgaaggcattggctctgtacctgtccgatgggttgagactagtctcttgaagcctcccattgaagtgacttttgcatcaaatgaactgagattccaagtaaagtcagttggaatgcaccacacacctctca

SEQ ID NO: 35767 - DNA, 331 bp, Glycine max
acatcagtaatacaggtacttccttagaagcatggccaacatcaacgatggcacgttatcacaagcacgaagataatgatggtcgcaacgttgaccagtccggcaacatttagacacgatccgacgaatacggcaacccatgtacatgctgctggtgtaacctatgtgaccaccatgactgctgctggtggttacaatgattagcttcctaggcaacaggagactaccaatgcctacggctatagacactgggagacagcattcaaggcgtggctacaatggagacacgaatccgcatcatcaggtgactgatggctatgctgatgaccac

SEQ ID NO: 35768 - DNA, 412 bp, Glycine max
ggtcaggaattaccgggtcgagccacgcgtcagcccacgcgtccgcccacgcgtccgatttcctctcagaaccctcgatcactcccacgcgctcctatatcctctccttcaccgtcgctctctccaacgatcacaacaacatcgtcatcccatggcaaacgccgcatctggtatggcagtccatgatgactgcaagttaaggtttttggagctgaagacaaagaggacacaccgtttcatagtttttaagattgaggagcagcagaagcaggtcattgtggagaagcttggtgagccagcccaaggctatgaagatttcactgccagccttcctgctgatgaatgccgttatgctgtttatgaatttgagtaactgactgaagggaatgtccccaaaagcagaatttttttc

SEQ ID NO: 35769 - DNA, 410 bp, Glycine max
cacgcgtcagcccacgcgtccgcccacgcgtcagcccacgcgtccgcccacgcgtccgcccacgcgtccgaagaaaccttagtttgatattttgattggttctgtggagagtttttttttctttggtgtggtttttggtttgtgctgtttttggttgggaataacaatggccgatgaaggaaacaaaagcaataacttctattcgatcttggggttgaagaatgagtgcactgaattggagctaaagaatgcttataggaaacttgcagagaaatggtacccaaatctttgtttaaccaacgggaattcagaattagtggaagaagctaagaaaaaatttcaggaaattccggaaacctattcagttttaactgacgccaacaaaaggttaatgtacgacgtgggagtct

SEQ ID NO: 35770 - DNA, 382 bp, Glycine max
gggagtcacacacacactctctctctctctcttgaccaaaaaaatcaacaacataccaagctagctaacatgcaggaggacaagaagatgaaggtgaagaaaggattcctcgctgttcaagtgggtttagaagacgacgacgaaggtggctcttcccctcaaagattcgtgattcctatctcatacctttatcaccctctcttcgagcgccttctggacaaggctcgtgaggtttacggctaccacaccgatggcccactcaagctcccgtgctccgtcgacgatttcctccatctccggtggcgaatccagaaagagtccactcctaaccaaaaccaccataaccagagccaccatcggccttcaacacgctctgcaactc

SEQ ID NO: 35771 - DNA, 417 bp, Glycine max
gagacaaacaaacaatttaccagctatacttgttccttttgaaggttagaagtgctacaatacaaacaatggcagctactcaggaagatgtgaagcttttgggtattgtgggaagcccatttgtgtgcagggtccagattgcccttaagttgaagggagttgaatacaaatttttggaagaaaatttgggcaacaagagtgatttgcttctcaaatacaaccctgttcacaagaaggttccagtgtttgttcacaatgagcagcccatagcagagtctcttgtgattgttgaatacattgatgagacatggaagaacaaccccatcttaccttctgatccttaccaaagagccttggctcgtttctggtccaaattcattgatgataagattgtgggtgctgtatcgaaatctgttt

SEQ ID NO: 35772 - DNA, 359 bp, Glycine max
gaaataatgatgatgattttgagccccctttaattccttaccatagcgaaattcccaggattcgtctctttggtgttcttggtgtaacatacttcatacttgctccactgatactgccatttctcttgatctacttttgtttgggatacatcattttccgcaatcagctgctgaaagtttacgttccaaagtatgagactggaggagagttttggcctacagtgcacagctccacaattttttcattgatactgatgcatataatagccattggtctttttggtttgaagaagcttcctctagcatccatattgattcttcctctttcaattctcacacttctattcaatgagtattgc

SEQ ID NO: 35773 - DNA, 320 bp, Glycine max
gaagatgctcatctttgatccaaacaggcgtattacagttgacgaggcgttgagccacccatacatgtcacctctccatgacatcaatgaggaacctgtttgcaccagacctttcagttttgactttgagcaaccatcattcactgaagaagacatcaaggaactcatctggagagaatctgtgaagttcaatcctacaaccatatatgtttagtgaaatatctgatgactaatatatacattttatgaccactacttggcaagttgcagcgcacagaagatatgaaaacgtattggagatactgagattcactgaattt

SEQ ID NO: 35774 - DNA, 411 bp, Glycine max
gactgaatcaagacattaatggcattatatatagtttgcatatctttgaagatatgggtttccattgtgaggaaaaggatagcatacatctgcaaccttgcgcagcttgcaggatgttacgccgcagatgtgacagtaagtgcgtacttgcttcatatttcccaaccaatgaggttgataaatttgctggagtgcatagagtgttcggtgctagcaacgttatcaaaatgattcagatggtcgaggaaacaaagagaggggatgctgttaaagcgatggtgcacgaggcgacggcaaggctcagagacccagtttatggcagtgctggagctatttatcagttacaaaagatgattgaggaactgaaagcacagctggagtccataaaaactcctgtgtcagaacaaaaag

SEQ ID NO: 35775 - DNA, 411 bp, Glycine max
gaaacaaggaaggtgaagcatcaatctctttccattccccatccttcagtttgatttccaagccattcagattattcagctgatgtacaatggatgtgatggtcaagtccgagtgaggttgcagtcccaaatcattttcatccatctggggtgttctatacttcatgcatcgaagtagataatcgtttgattctatgaaagaatcgcatcgttgcatgtccacaccatagctctcaaacaccattctcttcgccatatggactaattctcctaacaacttagcatactcattgatgctttcactatatggaaaattaaacctctactatgagcaattaattgttcacaatcatattatatataaacaaaatatagctaggaaaataatatatgtcgttgaaagaaataata

SEQ ID NO: 35776 - DNA, 349 bp, Glycine max
ggcagctactcaggaaaatgtgaaccttttgggtattgtgggaagcccatttgtgtgcagggtccagattgcccttaatttgaagggagttgaatacaaatttttggaagaaaatttgggcaacaagagtgatttgcttctcaaatacaaccctgttcacaagaatgttccagtgtttgttcacaatgagcagcccatagcagagtctcttgtgattgttgaatacattgatgagacatggaagaacaaccccatcttaccttctgatccttaccaaagagccttggctcgtttctggtccaaattcattgatgataagattgtgggtgctgtatcgaaatctgttttc

SEQ ID NO: 35777 - DNA, 317 bp, Glycine max
ggggtcgaccaagccttcattaaggtggcaaaaagacaacagaagggggaagccaaagaaaagaaaatcctcaattttctgagcagccaaacactctctctctgtctctcgaaaattctcagtttgcagagaaaatctgaatcatgtcgtggcaagcgtatgtcgacgatcaccttctgtgtgacatcgaaggtaaccacctcactcacgctgctatcatcggccaagacggcagcgtttgggctcagagtaccgacttccctcagttcaaacctgaggagataactgccatcatgaatgactttaatgagcctaga

SEQ ID NO: 35778 - DNA, 327 bp, Glycine max
tcagtgacacagtcacacaagatcgctcattggactcttcatatgctgaaacgttgaaaacacagtgtcccccaccaccacccagctcagacccaacagtgtctcttgaaccatccacgccaattcgtttggacagtaaatactatgagggattgatcaaccaccgcggcttgttgacttcggatcagacattgtacacgagccaatccacaaggggaatggttcaaagcaatgctaacaatggtgccagttgggctgacaagtttgccctagcaatgcttcgcatgggttctatagaagtgcttactggctccgatggtgagatca

SEQ ID NO: 35779 - DNA, 266 bp, Glycine max
gaacctttgcattctattcattcaagattcagcaagtgcgttttggaagcagagaccgaaatacttcgagatggcccgtacaaagcaaactgctcgtaagtcaactggaggaaaagctcccaggaagcagcttgcaaccaaggctgcacgtaagtctgcaccaacaactggtggtgtgaagaagcctcatcgttatcgccctggaactgttgctcttcgtgagattaggaaataccagaagagcactgagctcctaatcaggaagc

SEQ ID NO: 35780 - DNA, 131 bp, Glycine max
ccactggaaatgacacacacaagggctgccaccaaactgaaagtaattcggccgctctacaggatccaatcttacttacgcgtgcatgctacgtcacagcccttcgatagtgtcacctagattcaaatcaa

SEQ ID NO: 35781 - DNA, 203 bp, Glycine max
gagcatagcagcatcatacaaagcattgaattcaaaaacttaagttcattccttgtgttttgctttcttcctcaaaaccaaacatgtcgaacacatgcggcaactgcgactgcgctgacaagactagctgcaccaagggaaacagctatggtgttattgtagagactgagaacagttacatccagaccgttgtcaaggatgtt

SEQ ID NO: 35782 - DNA, 280 bp, Glycine max
gtcagtggggctgcgataagagcacaaaacggggtggcggggtgcgtcagagtgaggcgagaatcaagaagcgacacggatccagacgcgttcgcatcggcattcttggagcactgcaacgccagcttcgacaccactcgcaacactctcgcgaatctccaagaagatcgttcgattcactcttgcgacggtcagaacatccacggctcctaccacatcgtcgtcaaactcaactcacatcccttccaccagtgccagcactccatcatcaccgtcgatt

SEQ ID NO: 35783 - DNA, 412 bp, Glycine max
gatacaaatgttgtcatgatacactcggtcctgttatgtgctgtcatttactcactcgggttgaactccatcataaagtgtgtcctaagatgttcaatcatagtcatcaataacaatgacccttcttcttcaagtgtgagcaacaacaagccttcaccgagattggccaacacaggaatcaagaagaaagtcctcaagacttttcctactgtgagctactcaacagagatgaaacttcccggtttggacatatagtgtgtgatttgcctctcggagtttgccaatggtgataaagtgcgcattatgccaaagtgcaactatggtttccatgtgctctgcattgacaagtggctaagttcacactcatcatgccccaagtgcagacagtgcatcattgagacatgtaagataa

SEQ ID NO: 35784 - DNA, 238 bp, Glycine max
gaccaacaaactaacaatttaacaactatccttgccccatttgaacgtccaaaatgccatcctccaaacactggaagacattccggaacacatgaaacttatggctactgcgggaaacccatttgggtgcagggtccagattgcacttaagttcaaaggagttgaacatcaaattctggaatcacaattgggcaacaatagtgacatgcatcacaacaatcatcctgttcacaacaac

SEQ ID NO: 35785 - DNA, 432 bp, Glycine max
gaaagacacagaaggggaagcaatgatgttggtaaatcccaaaatcctcaagaaaactggtgtcacaagccagggcaaagcttcttcttgcaacggttggtattggcctcacaaagatcattttcttggtcatggctttgtttttgcttgacaaagttggtacaaggcgtcttttacaaatcagcactgggggaatggtttgtgggctcacacttttggggtttagtttgaccatggtggatcgttctagtgaaaagctcttgtgggctttgagccttagtattgtggccatttatgcttatgttgctttctttaatgttgggcttgggcctgttacttgggtttatgcgtcggagatttttcctttgaagttgagggcgcaaggggctagtataggagttgcggtgaatagaaccatgaatgctgtggttt

SEQ ID NO: 35786 - DNA, 169 bp, Glycine max
tgttggctggggtgctcatggtggagatgccggttcatttaaagaccctggcggtgttgacagaattggttcctatattgtaaggcaagctgcaaagagtgtcatggcaaatggccttactagaaagtgccttgtgcaagtttcctatgccattagtgtccctaaaccc

SEQ ID NO: 35787 - DNA, 250 bp, Glycine max
tgcctggtgatgggcccgggccaggaattggctgcgttttaacaaatccgcgaggggcattacctgaacgctgcgattcacgacagcatgaagctgttcccaccgattcaattctattcgaaattcgccactgatgatgacttgttgccatatggcactttctttataaaaggcactatggtaacttaccacccttactctattggccgaatggaaaatattttggggccctattgtcttgacttcatgc

SEQ ID NO: 35788 - DNA, 295 bp, Glycine max
tagggacatttcttttgacaagcgaatcttatctcgaagatggctaaaactggtgccacggtgaaacatactcccacccgctaatttatcgtcacattagccgctcacttcaaaaaatctggaaagatcgagcttccatcatggcatgatcttgtaaagacaggtgttgcaaaagaactctgcccacaatatcctgattggtactatgttcctgctgcctccattgcccgtaaaatctacctccgtggtggtacaagggttggctgtctcatcatagtctatgattcatgctatc

SEQ ID NO: 35789 - DNA, 331 bp, Glycine max
gttattaattgaagtttttgaagggactatgaggttagagaatgttcaagttttgccagatgatatatatgtgaacgacattgttgatactgcaaaattagtcagcaagtcctcgttgcagtggtttatacataaagttcaagatataattatactaagcacacttaggcatcttgtagtaaatgatgctaataaatcaagatattctcttgaatacttggacaaagataagactattgttgctcatatggctggaagaattgatgcttacataaagatgtcacatgattggcctatattttgttcttcatataatctgttattttctaaa

SEQ ID NO: 35790 - DNA, 182 bp, Glycine max
ttcttctgcgataagactacagaatgtgatgcacgattttcaaaggaagttgagtaccttcttaagaaaggatggattccttgcttggaattctattttgatcacggtttcatgtaccgtgtacacaacaagtcacctatatactactattgactctactggaccatgtgtaatctgcctat

SEQ ID NO: 35791 - DNA, 337 bp, Glycine max
acgcatccgcccactcgtccgtactgcttctaaaacaccacatagagactacacaaactctcttatctgtggccacataaacatgtatccttccttcccctttttctcattaaaatcacatcttactgaatattacatgtcttcaccattattttatcaacaggattgtatactatctttacaaaaccatgctcctatgttgcataaacatcttcaatctttctgcctaaactttcatatactggtcacaattgcctcacttaaaaactttcatctaatcgcttcttcataaaactgaccttctataccataacaccattacatcatcctccaattt

SEQ ID NO: 35792 - DNA, 257 bp, Glycine max
taggctctctatttaaacaacttgttttttatattctgttctgtttcacttttgcgaggggcatatcctggaattcatgacctgcgcttcttccaattaatacataaagcttctgctaacattgcaactttagtttcagattattttccttatcttgaaaagggacaaatccctcccaacgtatcctatcttaatgtgaaaaccatataattctactatgcatttaaaccttattgtctaattattctaatttatta

SEQ ID NO: 35793 - DNA, 212 bp, Glycine max
  unsure (1)..(212): unsure at all n locations
taatgggatacctatggtggctggggtgcgcatggtggaagtgccttttcggggaangaccctaccaaagttgacagaagtggtgcctatattgtaaggcaagctgcaaatagtgtcgtggcaaatgtccttgctaaaatgtgcattgtgcaagtttcctatgccattggtgtaccttaacccttgtcaatgtttcttgactcttatagaac

SEQ ID NO: 35794 - DNA, 242 bp, Glycine max
ccctctccgattacaatattcagaaagaatcgacgcggcatgttgtacttcgactccggggagggatacagatcttcctgaaaacactcaccgggaaaactattactctggaagtggagagttctgatacgatcgataacgtgaatgcgaagattcatgataatgaatggattccaccggatcaacaacgtcttatcttcactaggaatcaactctaaaactgacacactctatcctattac

SEQ ID NO: 35795 - DNA, 298 bp, Glycine max
cacctccccacctctacgctcaaaacacagaagggttactgaaaatatggcggatctatcaaactgtgggcgttctcatgcttctcattggaaaaccttcttggtttgctccttgtccggaaaattccctacaatccgccaaccgtaataatgctttcattcggtacaaggaaaagaagaaaacaccgattttttacaaaaaagttaagtattcctctctcaaagcaaaggctcatgtcacaaagcctgttaaaaggccgtttttcaaaacccgtgacctctattattatgacccttt

SEQ ID NO: 35796 - DNA, 272 bp, Glycine max
tgtgtatcaacccatcaaacaagatcacgatgttgttaaacatgtctggtggagaggaataaaactccctacatctcaaaattgcacacaagttttttaacgcaaactgcttaatgaactgtgaatttgcattgattctttatcacaactatcatcaactttaacatacatccgattatcccatgaatcaaatttctcatgtattttaaaagtcactacattatgttaatctcttcatccactttataaatccctattcttttatacaattt

SEQ ID NO: 35797 - DNA, 191 bp, Glycine max
ttgggggaaccagaatgaagccaatgcgaagatagtaattggtactggtgagtttatggcccctgaatatgcaatggaaggtctgttttcagtcaagtctgatgtatacagttttggtgtattactactatagatttttagtggcctcataatcactatctttcgtcactcagatgactcaaccctcatat

SEQ ID NO: 35798 - DNA, 232 bp, Glycine max
aataccacacaacgggaactaaacatatgaagaatatggcgtccttaagctcctcattagtgctgctccgtgctgctccaagtgcaacccgccaagttccggctgactatgagatgcccataatttacaagccacctgcatacacacggccggtttataagcgcccagttgaagaactaccagtgtggctacctccagtgtagaagcctcgagttgacaaaccacctgttta

SEQ ID NO: 35799 - DNA, 315 bp, Glycine max
gaaatggatctccaccaatgttcaatcgactgtccgttctctccctccaactggtttgactgtggaaacacccttcattgataactctgaatctggtcagcaaaggttcaggacggttagtgaccatttcatacctgtgttccacaaaaaggcctacttgcattggcatactggataacgatacgattaaattgagtttactgaagctgatagcatcatcaatgaccgtgtgtgcgactatcatcactaccaacatgtaactgctgatcatgagggctatgactaccaccatgacgaagaacatcatgaacatca

SEQ ID NO: 35800 - DNA, 367 bp, Glycine max
ggcagttcaattccaatatattccactctctctgtgtatgtccctacctctcccttcaagatgcagatcttcgtcaagaccctcaccggcaagagcatcacccttgaggtggaaagctctgacatcatcgacaacgtcaaggccaacatcgaggacggcgaaggaatccgccctgaccagcaacgtctcattttcgccggaaagcaacttgaggacggccgtacccttgctgactacacgattcacaatgagagtactcttcaccgtgtcctccgtcaccgtggtggcatgcagatcttcgttaagacactcaccggcaagaccataaccctagaagttgaaagctccgacaccatcgataacgtca

SEQ ID NO: 35801 - DNA, 404 bp, Glycine max
ggaactatgaactgtgaatatcatcatcacaattaagatgagtagtgcaacaagcaaggcttggatattgtgacagccagtgttggagccgtggaggctttgaaggaccaattgggtgtgagcagatgaaattatatatgctttgaggtgtgctcagaagcacatgaaaaaccatgttagatccttgtctcaagcgttaaagaatgtttcttcttctggtctgttagcaaattaaagggtgagaaggccaaacaggctaaagagtccttgagggctgtcatgtacttaagctgttgcggtcctaactgatcttaaaggagacaactgatttgaaatgaatattgctttatgtgtaaatagagatgatagattgtatgaaaattgtaattccaaacggcaatatt

SEQ ID NO: 35802 - DNA, 405 bp, Glycine max
ggaagaaccaaaacctaattagacataaactggccaactgttgggaacatccaaatacattagaatttcctgattcgagcaataataaattgtcaggcaagattccacagtccatgggtacacttgttaatttggaagctttggtcttaagacacaacaattttattggagacctaccattcaccctgaagaactgcactcgtttagatatactagacttgagtgaaaatttgttgtctggtccaataccgtcatggattggacaaagtttacaacaattacaaatcttgagcttgagtgtaaaccactttaatggaagtgttcctgttcatctctgttatttgaggcaaattcatatcttggatctttcaagaaataacttgtcaaaaggaattccaacttgtc

SEQ ID NO: 35803 - DNA, 354 bp, Glycine max
ggaatcagcatgactacacctaatggacggttcatgacacataaaaagatctgtttgtcaacgagtgactttcatctagaaggttggaatcccatgtggtctgtatcatgcatattaacagggcttctttcattcatgatggataacagtccaaccactgacagtgtcaacaccaccactgttgagaagcatcgtctagcataatcttcgctttctttcaactgtaagaatgctacattcaggaagatcttccctgagtatgtggagaagtacagtcagcaatagctttctgaatatgctgctccacagagggtctcattggatacgtctcccgacaacagttcaaggccagtt

SEQ ID NO: 35804 - DNA, 342 bp, Glycine max
ggcagtactttgttgttcataaatcgctgctgtgtttgtcttagtgtgtttgttattcactatcgtcattcctgttcctcaagctttgtagtgagcagatataatggctgttgaaaggtctggaattgccaaagatgttacggaatcgattggtaaaacccccgtagtatatctaaataaacttgcggatggttgtgttgcccgagttgctgctaaactggagttgatggagccatgctctagtgtgaaggacaggtaactagtttccattgtcatgactattgaatccttgagtttaagttaatgctttcattagcattatgctttgcatggcattttttt

SEQ ID NO: 35805 - DNA, 348 bp, Glycine max
gttggtatcatggaagaaaatcatgagaaccagaacgagttatgacgaatttgagagcagtatgctgattatagctgaattggctaaactgggcatctcatatatccatccatttgcaatcacgggtgttgttggcttcatagggactggacttcctccttctgttgcattaagagctgacatggatgctcttcctatgcatgaaattgtggactgggatcacaatagtacagtacctgaaaagatgcatgcatgcagtcattatgctcatgttgccatgcttcatgatgctgcaaagatcctcaaagagcatgataatgagatccgacgaactgttgtacctgtttt

SEQ ID NO: 35806 - DNA, 440 bp, Glycine max
gcgtccataccgagcgagaagaacaacaaaagggggctccgaaattttgtaacaatggccaaaaacggtggcttccttgtcggaattcttgtcttggccttggacattgctgctggcatacatggaattcaagcagaaattgctcaaaacaaggttaacgacttgaaggtgtgggcacttgagtgtacggatccaagctatgaatctttcaagctacgagttgctgcttccattttcttggtctttgctcatgcaattgctcacttgcttggtcggtgcatttgcatgcaatccaaagaagaatgccaaggagccacagccaatacggttttagcagtgacttttctcattttatcttggatattattagggattgctttttccttgctgatattacgctcctcagccaactcaagatcaagagaatcgtgtgggatatc

SEQ ID NO: 35807 - DNA, 364 bp, Glycine max
ggtgacgggtggagcgaaccgtacaaagaagataacgctaacgcgttgtttctggattcaaagacacggagtcaatggttgacccctttttggtcgacgctctccagaaccctcgtcactgcctcaccattttgaggatggagctggacatccagaagtttttgaataatgctgatcagcagcattttgagtttcaacatttcccttcttcctaactccgactggctgcacaccgtgttgctcaacactacaacatgcaaacaatggttcaagataatggcttagatggccatcgaagtaaaattctggtgaggaagttaccacaaagcaagtatcctgtggttcgattatgtgagatacctgc

SEQ ID NO: 35808 - DNA, 361 bp, Glycine max
acgaaagggaacaagggcacacaaaaaattccaattaccttccaaaactcaacctttcattatatattctccctatatagtattttcttaattaattaatggatagagttaaggacttggcatcaaagaacgctgctgttatatttaccaagagttcatgttgcatgtgtcacagcataaagcaacttttctatgagcttggagcaagcccagcagttcatgagcttgacaatgattcctatgggaaggaaatggagtgggctttgaggggtatgggttgtaacccttcagtcccagcagtgttcatacgtggaaaatttgtgggctcatccaaagatgttatatccctccatgttgatgg

SEQ ID NO: 35809 - DNA, 263 bp, Glycine max
gggcctcaggttgacaagagacaacttgcaacgattctttcctaaatccagcaagtatagaaagaaagtgcagcccttttgacaaagggcagaataatgggcaacaacggttactacattgagcccacaattttcaccaatgtcaaagagtgacagcctatcctataagaagacacatttggaccttgtgatgcttctgatgaatttaagactagttaaaattcaatcaagattgccaaaaatagacagtaaggcctagcatc

SEQ ID NO: 35810 - DNA, 368 bp, Glycine max
gatcatcacaaactatatactaatctccatcgaatagtgttaatttgtctttctctatctctatcggtcatgggtgcttttgcttttgattaggaaagctcctccagcgtggctccggcaacactctacaaagctctgagtaaatatgctgacactatcatcccagagattattggggctatccagactaatgaaatcgttgaaggaaatggaggacccggaaccgtcaagaatagaacacctagtgaaggtgaccacaccagtttcgtgctgcagaatgtggatgcaattgactaggctaactttgtacacgactacagcatagttttacggactgggttgcatgatattttggacaacgtcacatt

SEQ ID NO: 35811 - DNA, 226 bp, Glycine max
tgggatgtctcagagagtgacccgtatgcatcatgtccgatgacgagcatgacttcaattctcacgcggatgcgggggcgtccaacacgtatcctcagcaagctggtaccattcgcacgaatggctacatcctcatctaatccagtccttgcaaggttgtagaggtctctacctcaacgacaggctagcatggacgtgcacagtgtcactctgtttcacttgatat

SEQ ID NO: 35812 - DNA, 405 bp, Glycine max
ggcaccgcttgagcagacttaacaacagcacaaagcgggttactgtctgttcaagctaccatctctctctctctttcttagtgcctccttgccagaagttaaaatggcccaagaaactttcctattcacatctgaatcagtgaacgaggggcaccctgacaagctctgtgaccagatctccgatgctgtgctcggtgcatgcttggagcaggaccctgacagcaaggttgcctgtgaaacctgcaccaagaccaacatggtgatggttttcggagagatacaaccaaggccaacgtggactatgagaagattgtgcgtgacacatgcaggaacattggttttgtctctgatgatgttggtcttgatgctgacaactgcaaggtcctcgtcaacattgagcaacag

SEQ ID NO: 35813 - DNA, 325 bp, Glycine max
  unsure (1)..(325): unsure at all n locations
agaacaagaggaacagagaatgtaaagaaggaggagggaaggagaaaatatagaggggtgaggcagaggccgtggggaaaatgggcagcggagataagagacccattcaaagcagcaagagtatggttaggaacatttgagacggtagaggcagcagctagagcctacgatgaagctgcccttcgttttaggggcagcaaggccaaactcaacttccccgagaatgtcactctccgacaacctcaattcactgtttccacatcaacagacccatttcaactctcgggtaccaacctttatgatcatangatgtttctgacttcta

SEQ ID NO: 35814 - DNA, 403 bp, Glycine max
agagaaaacagagacaaaagacattttaacatctccattgaaatatagacatgagtgggagctcatgttggggaaaattagcaaaggcaacgtttgtgttgttggagatgcatttcaccccatggcccctgacctagggcaaggtgggtgctgtgccttggaggatgggattattttagccaggcatctagccgaggcattcaccaaaaaaactggcaaacatgttgctaaagagatgggtgaagaggggtgatttgaaattggtctcacattttagggacaaacttttccctgctttcctagctgagctgctgttgaagaaatcagattttgattgtggaaaacttaattaacacgcctaattgatgtggaataacgtaattaaccatgcatgcatgccctc

SEQ ID NO: 35815 - DNA, 374 bp, Glycine max
gtgactcgacatccaaatgaaatttcatttagctagcccagactgtcaattcgatgatccgcaatagtagtggtgtaaatgattctattctccataaatgcaaaaatagatgtctgcatgaaccaataatcgagacgaaaggtacactcgattgggttatatatagttacgaggattcccaaggtttatccccacaagcttactagactcatgatacttcacatacatgactgttatgttagtcgatgtaactcacgcagttttgttcaatatcactgctaccataggacagtaatcaccatcctctgcccgtcaacaacgctctaagaggtttggatattgtcaactacatcatcagatcagttgaacacgct

SEQ ID NO: 35816 - DNA, 295 bp, Glycine max
ggcaaaaacgtatgataaaaatggggtgtttccatctcatagtggacagtccgtgctttgtagtggttgtggttggagtgcttcgagtctcgttacgatgcacaactagatcgctcgttttacagagacacgtgtcctaacgttcattccattgtgcgtgaagtggtgaggaacgttttcaagatagatcccggcaatcgtgcgattcgcaggagacgtcagctttaggagtgctttgttcagcgatctgacgcatcagttctgtggaacagcactgctatcatagatagtgagg

SEQ ID NO: 35817 - DNA, 387 bp, Glycine max
ggcagccaaagaaaagaaaatcctcaattttctgagcagccaaacactctctctcggtcccccgaaaattccaattttgccaaaaaaaccgaaaccaggcccggcaaacctatgtccaacattaacctctgtgtgacaaccaaagggaacaactcaatcacgctgggaacaacgggcaaaacaggaacgtttgggctcacagtatcgacatctcccagtttaaacctgaggagataactgccaccacgaaagacatttatgagcccggatcacatgctccaactggagagtatctcggtggcaccaaatatatggggatccacagtgaacccggtgctgtcattctacggaagaagggtcctcctggtgttactgtgaagaagaccg

SEQ ID NO: 35818 - DNA, 168 bp, Glycine max
ctgggagagaaagagagacagcgacgtcggagcctggtcatggtggttcggcggtcaacaagttccgcatgtctctgggtcttccagtggcggccacggttaactgctccgaggtccacgcggcgatgaatctctacataatgtcggtgacagggatcactggccgtt

SEQ ID NO: 35819 - DNA, 260 bp, Glycine max
ggagcgatgaaatggccacagcaatcgaattcattgagttgatcacaggggcgacgattccatctcttgggttacggacctggcaagctgaacctggtgttgtagctcaagctctcaccacagccattcacgttggatacaggcactatctgacatgtgctaatgcgtaaaagaatcaagcagagatagagatcatgcacataagatacattctgatgattgtgtggtcaaacgtgaggacttgaggatcacctccaaac

SEQ ID NO: 35820 - DNA, 397 bp, Glycine max
ggcacatccgtcatgcagcaatgccgtcatttcgggtggacagtgtcgtccagagatgcagagtctagcccagaaggcttccgaatggagcggtgtatccatacacgacgctttcggcatcgacgacaccaatcacttccagaaactcagcgaccacaccttcattaacctctccatcaatttctatggcatggtttacgataacgatgaagaatggtttcgtgcaatagacgcgaattctgataaggagaatgccattcacaaccaacatgagttcttcgtgcagcaaatgggtagtcatccacgcattacgcatagaagaggacaccgtgctcgaattgctcgacatcgaccatttcctgtcacgcatcaagctgtatagaggtggttacatcac

SEQ ID NO: 35821 - DNA, 269 bp, Glycine max
agactcgctcaacccgggcaaagtatcgcggtgtgtgtcaacttgctctgcacatttgtcattgcgcaggcctttctctcaatgctgtgtttcttcaagtttggcatcgtcttgttcttctctggatgtgtcctgctcatgtccacctttgtgcttttccttctccccgagacaaagaatgtcccattgaagagatgactcagagtgtgtggaagcaacattggctgtggaagacgtttatttaagatgattgtgttaaagaagagaaa

SEQ ID NO: 35822 - DNA, 241 bp, Glycine max
ggggggacctcccgcaacatcataaccataatgcctacgtgtaccggcacagacgacatcatcaccagcagggccgactacagcagcgacactgtcactttcaagtccgaaagccctacagaagcacgccgatttctgacgttcgacatgaagctgatggacattcataatgaacacattgcgattccggaggcacagtatcaagctactgttaacatgagatcctctgagtttgcaacga

SEQ ID NO: 35823 - DNA, 219 bp, Glycine max
cggggaggaagccacatagagacacattacagagtgagttgttgctccttcgccaaaactctctgggaggatgggtaccttacgagattcgatgcacaagaggcgtgccactggtggcaagaagaaggcctggaggaaaaagagaaagtatcgagcttggtcgccagcctgctaagcactaaactgtcaagcaacaagacagttatgaggatgcgtgtt

SEQ ID NO: 35824 - DNA, 350 bp, Glycine max
gaaggaaaagtagctgtattcacgaaattgacacatgcatagtatttcaggatcttcttcaacagacagcctgatgagacgattatccacaatgtcaaaatcagctccatcatctgtaatgtccatgcaatgcttcagtaccattgcaagcattcctcccgatcagcagcatatgattttcgccctgaaacaacttgcccatggaatgaccctggacgactacaacatccagaaggaatcaacccttcatcacgtcctcatgctgcgaggtggcatcattgagccttccctcacagctttggctcccacatacaatcacgacagtatgattatgccgcaagtgctatccc

SEQ ID NO: 35825 - DNA, 329 bp, Glycine max
gaccgtggagatagaaggagcttgagggattcacatcactgtccacagagaaatcgtagattgcgagaaagattctgaatcatgtcgaggacagcctatgtctgagattaacttctgtgtgacaatctatagtaagcatctcagtcatgcggatagcatcagctacaacagggacgtttaggctcatagtaacggattccctcagttgcaacctgacgagatagctgccatcatgaattactttaatgagcctagatcacttgctccaactggattgtatctcggtggcaccaaatatatggtcatccacggtgaaacccgtgctgtca

SEQ ID NO: 35826 - DNA, 315 bp, Glycine max
ggtatttgtgagtgtgtgagagagagagcgagcagtttcagacacagagagaggggtttgggattggagggattgacgctgcgtctcttcctcttctccttcgatccatccctcattcctaatcctccaatccaaccacctcagcctcacactcacatatacacatatctgaacgcgtatcgtccctcctatggcttcaaagcgcatcctcaaagagctcaaggacctgcacaaagaccaccaacttcttgcagcgctggtccagtagctgatgacatgtttcattgccaagcaacactcatgggtcctgctgat

SEQ ID NO: 35827 - DNA, 325 bp, Glycine max
gattgtggatgtgctactctaccgagtaagacttggcacatgtatgacaagcatcctctaagtctaaactatttcgtggaagggagtttgagggaacatgaatgtggcatttgcaatgagaaaatgtctccgaagcaatggttttattattgtgatgattgtgactctggtgctcacccttcttgtgttgttggcaagtctaggcgtgtgaagtttggacgcagtttcaaatatgatgttcactcacaccctcttgctttggttgaagaaactgagcagaacaatgaatgcggagcctgtggtgaacgctgcaatggatggacac

SEQ ID NO: 35828 - DNA, 376 bp, Glycine max
gttggatgatggctacaagtggacgaagtacggacagaaagtggtaaagaatacacagcacccaagaagctactaccgttgcacccaagataactgtcgagtacagaaacgcgtggagcgcttggcagaggatccaaggatggtgagaaccacatatgagtggagacacgtgcactcgccatcaaatgaacttgaagactcgcaaaccgcttttgaacttagtaacttcctgtggtagtagcatacaccatcataatgtctacatagatgtatagttcagtagatcgtggagactacagatgaggaccgaatacgtagagaggaatgagtaaacatgacagtgtatccaggaaatggtgcatgcatacgttggttc

SEQ ID NO: 35829 - DNA, 393 bp, Glycine max
cggtcaggaaatcccgtctcgaccacatccgcaagatcgcgacgaccgcgcgcgacgaattcggcgtgcgcgcggtgatccatccgcatgcgggcggctacatcgagttcgccgacgagatcgaccggatcgtcgccgatatcacggccgacacggtcggcctgtgcctcgacacgggccacctgcattactcgggcatggacccggagacgtggctgcgccgccatgcggcgcgtctcgactacgtgcatttcaaggacatcgacgcggccgtgtacgacgcggtgatgggcgagcacatcgcgttcttcgccgcgtgcgcgcgcggcgtgatgtgcccgatcggcaagggcgtgctccactacccgtcgattcggcgcgcactctacgaca

SEQ ID NO: 35830 - DNA, 348 bp, Glycine max
gaactgttgatcgagtcagactcatggcgtgacgttccgattttttattcacgctcttgcggactaacatgctcatctgtcataaaatttattaatcatgtcgttccgatcgaaagactacaattaccatcggtgaattgcccatagtacaagtgagattgaactgaaaactgcagctgctgatgtacgttttccgatcacagttcagaccacacactgtttcactcgcaagatatagttgcaaacatgcatgacatcaatgggtgaagattcatgtcaatgtcagaaatgtgccacagaggaacgctccctatgctcaggtaaagtggttgaaatgtggactgacca

SEQ ID NO: 35831 - DNA, 377 bp, Glycine max
gacagacaaacaaacaatttaccagctatacgtgttccatttgaaggttaaaagtgctacaatacaaacaacggcagctacacatgaagatgtgaagcttttgggtattgtgggaagcccatttgtgtgcagggtccagattgcccttaagttgaagggagttgaatacaaatttttggaagaaaatttgggcaacaagatctgatttgcttctcaaatacaaccctgtacacaataaggttccagtgtttgttcacaatgacaagcccagagcagagtcgcttgtgattgttgaatacattaatgagacatggaagaacatccccagcttaccttctgatccttaccaaagagccgtggctcctttctggtccaaa

SEQ ID NO: 35832 - DNA, 381 bp, Glycine max
cccgggcctgaccacgcgttcagttacggctgcaaaaaaacaacaaaaggggacagacaaacagacaatttaccagctatacttgttccttttgaacgttagaagtgctacaatacaaacaatggcagctactcaggaggatgtgaagcttttgggtattgtgggaagcccatttgtgtgcagggtccagattgcccttaagttgaagggagttgaatacaaatttttggaagaaaatttgggcaacaagagtgatttgcttctcaaatacaaccctgttcacaagaaagttccagtgtttgttcacaatgaacagcccataacagagtctcttgtgattgttgaatacattgatgaaacatggaagaacaaccccatctt

SEQ ID NO: 35833 - DNA, 144 bp, Glycine max
gtcgcgataagatcatatactgggacagacctacagacgatttaccagctatacgtgtgcctttttaacgttagaattgccaccatacctacaatagcagctacgcaggatgatgtgaatcttttgggtattgtgggaagccca

SEQ ID NO: 35834 - DNA, 344 bp, Glycine max
ggtggagtataattgctgcgtgtgcatggtgcggcataaaggcgcggcgtttattccgtgcgggcacacgttctgcagaacgtgttcgagggagatttgggtgagcagagggaactgccctctctgcaacaatttaattttggaaattcttgatattttctgaacctggtaataattttcattaatctttcaatataacctttttaatctctatctatgaatttttctttttctttgggtttggggaagaaactatttccactattagattaggatcatgtggttatgatgaatttgtccgtgacctgtgataacgatttgttattaaccaaatggacttacta

SEQ ID NO: 35835 - DNA, 396 bp, Glycine max
aaaaacacaaaaaggaattgtgaacaattgaatttcagattttgtgttccgtcagtccgtggttttagagaaattgtatcaatggattctcaggcaacagcaagaaggatctagggtggccaccattgatattgttacccatttgcagaatgagcttgaatatggaggagaggaggcaccagtgtccccaaggcagccaatgcatcaacagaattcccagactgcaatgcacaacactaactttggtgcgtccataccctctaatgcatttggagcaactgtggcaagacaggggatacgtgctggacaacctgatcaacaaccaaagaactcagtgttctcaaatgcactctctagtcctattcgacgcatccttcagccatatcatttggcaca

SEQ ID NO: 35836 - DNA, 379 bp, Glycine max
cgggtacccagacttgagctacaccgagtcaaccaccaccgacaccttggtcatcggagtggcaccagttaaggctcaattcgacagtgctgaaatgggtgttccacgctgagaacgatggctgcaaatgtggaccaaactgctcctgcaacccctgcacttgcaactgaggtgttgggagatcaagcttcaagcacacatagcccttaattaggaataatgatatactactaatgtgtatctaaaaacttatgtattatgtctgtgattgttttcgtgcactctggtgttttgtgttaaacaaacatccttacaatacaatggtcatgtcttacctttcagccagttcaactatattggacttgatattggtgtctta

SEQ ID NO: 35837 - DNA, 310 bp, Glycine max
gggacaagatttggaaggcctaagtatcagagagctttagaatttggagcatcagcttgaaagtgctctcatacacattatatgactgaagaagcaactgatcgtggaatcgatttcagagcttcataaaaaggataaagccctacaggaacagcacaacactctcgctaagaagatatatgatatatagaaagcactagtccaacaagcacaactggagcgactctggtgatgaactggatctgacttcctctgcccttgttccccaaacactggtgacatcacacattacaacctcctcacatgtcat

SEQ ID NO: 35838 - DNA, 346 bp, Glycine max
  unsure (1)..(346): unsure at all n locations
ggagttgccaatttaattcttgcgaaaaatgttggaactaccattcaacatggcacttcggtttcccaatttggatttcaagtctttaccctttgctgagaacctcaacactgaattgctaggtggcgtagttgctcttgttgccgttggctttacggttgcatatatttattatcgcacaaaacaccccaaaggaggcttggacccgaaaaatttcaaagaatttaaactcataaagaagactcagctcagccacaacgttgcaagattcagatttgcccttcctactccttcttcagtattaggccttcctgttggaaaaaacatacttgctanggggaaagat

SEQ ID NO: 35839 - DNA, 322 bp, Glycine max
aggaggaaacggcaggatatggttgggtcgggcatggagaccttactctcgtgttgtttttgccttctcaataatgtcagatatcattgcccctgaaggttggaatgatttcaacgacccttcaagagatcagactatcttctacggagaatacaattgcttggggcctggggctaatacgaacttcagggcaccttatgtacagaaattaaatgaaacacaagctttggcattcctcaacacaagttttattgatggcgaccaatggttggaaacttccaaataagcttagcttcgcatacctgaatccatttcctatttg

SEQ ID NO: 35840 - DNA, 344 bp, Glycine max
  unsure (1)..(344): unsure at all n locations
gattgaccgaacaaagactatggctgatgtctacggtgctttttttgattttgcttctatgttggagcccaaggttgacaaaaacggtcccaatgcaacaaaaacattgagcaggctggaagctatacagaaaacttgcagagaatctggtctcttaagtaaaaggaaatcttacattgtgaatgatgaaagtggatatggctcaaccatgattgtcatattggtcatcatggtttccatcatttttgcttatctgtctgctaaccaccataatagctagtgtaagttctgttgttaattttaatgtacggttganattgtaagaacaattatccttatctata

SEQ ID NO: 35841 - DNA, 383 bp, Glycine max
  unsure (1)..(383): unsure at all n locations
gtccaaccaagcctccgtaacggtgccaaaagaccacaaaaagggggacaaaaccctaaaaaacccaaagccttgaaaagcagaaaaaaaccaaacaatggggcgaagacccgcgaggtgttatangcaaattaagaacaaaccataccccaagtcacggttttgccgtggtgttcctgatcccaagatcaagatttacgatgttggtatgaagaagaaaggtgttgatgagtttcctttctgtgttcatctggttagttgggagaaggaaaacgtttctagtgaggccctggaagctgctcgtattgcttgcaacaagtacatggccaaatttgctggaaaggatgctttccacttgagagtcanggtgcacccattccatg

SEQ ID NO: 35842 - DNA, 374 bp, Glycine max
gaagctaacgggaaatcacctacaaggttcgcgtccaattttgacattttcagcaaattttgaaaaagatgcacattggaaactattaaaggagattttgttacagatatttgaaacaccaaaggaccacagaaaggccaagcctttccatgatcacgtttttgttttctcaatagttgatgaccatatatggttccggaattatcagatctctgctcatcataatgagtcggacaaattacctagaggtggccttgataaaatgacattgattgaggttggtccgcgattctgcttgaacccaattaaaatatttggtggcagttttggaggcccaactttatatgagaatccgctctatgtgtcaccaaatc

SEQ ID NO: 35843 - DNA, 260 bp, Glycine max
ggaagaaggcaaatcgcgaagactagatctgatctgagagaatggctcctcggtctagcagcaaggacgcccaagaccttttccgcgctctttgatcattgatctctatgtcatctatgccgtattcaccgcgttcatccacgttgtttacatggctttggttggataattccacttaactcttcctatcacgagtactttcttgtgtatgaactgctgttcttgctgtttgtctcaggatccacgtgaataaagagaat

SEQ ID NO: 35844 - DNA, 311 bp, Glycine max
gggagacttaaagttgtaaaatttgactaacaatgtttgttgaccccaaatttaagtggttgcaagaaagctgcaactcctggccatggctatgccaggttccctttacatatggtccattgtggttggcatatgctatgcggtgccgcttgccattacactgccaactgcctcagagttatttggcctcaaaaattatggtcttatatacaacattctcaattttaaacttccctttgggtcgttcctctcttctggtctccctgctggcattctctatgatttggaggcaactaccaccgcacgaagag

SEQ ID NO: 35845 - DNA, 369 bp, Glycine max
tacagtgataaacgagaagctagatgacccggatatgactcaaacaaagcttagtttggatataattatgttgactatgaatggaagagagagaacggaaaatgactggaaacaactcttcactgaagcaggattcaatcactacaaaatatttcccatctttggttttagatctttgattgaggtctatccttgaacatttttatgatgtgtgtgtcacacttaacgtgttaattgtatttaatagtttgcgtgttgtgagctgaataaagctatgatggcatagcattgtcgcaacttctggtggaattacattatgttcctccccgctatgttgttaaatggtctgtgtacggatttcgcattcct

SEQ ID NO: 35846 - DNA, 203 bp, Glycine max
aggtgccatcatggccattcagactcattatcttggcaccgtggaaaggaatggatctacgatcatgtgtggtctaactactcctgatagtgactatggatggatcgataacagccaccatgagattgcgactcaggtcattcatccgctatatccttaaattctacatcatcacatatttgaagcgactgaggcttctaaac

SEQ ID NO: 35847 - DNA, 325 bp, Glycine max
gggcaagttgacttggaagagaacaccatgatgatttagcacaatttatgccaggaatgggctatgctactgaagcacttcatttgcctggaatatctaagaggttggagtttgatttggcaattaagagcaatgatttgagaagagctcttcattgtcttcttaccatgagtaatagcagagatattggacatgatggtactcaaggacttggtttgaatgacattcttaatttatcagataaaaaaccaaattaagtatctgattaaaaacaagatatagttgaaggtgttcacggtatactgaaattcgcaaaagagttttt

SEQ ID NO: 35848 - DNA, 295 bp, Glycine max
ggggtcattgggtatcattgcaaccattgctaatgggttcgttgtaggtgccaacatcttaccagcacgcccattcagtggctgttcaatgaacccaactcgctcattctgcacacctgtggtcacatggacacttcgctgctaactggatccattgcgttgtgcccattgactgaaagacgtttggctgacctgatttatggacacgtcttcattggttcatataccagcgtcccaccctctgaaaccaatccctgagcatcaacttgaaaaatatgacttcttgttctatcca

SEQ ID NO: 35849 - DNA, 364 bp, Glycine max
gataccaaaaacaaaacacaagccaagtgaaagtgagaaaacataaaaatcaaagagcataatgtcagggatcattcacaagattggggagacccttcatgtgggagggcacaagaaggaggaggagcataagggtgagcaccatgctggagaatacaaaggggagcaccatggtgaacacagtagtgagtacaaaggagagcatcatggtgaacacaaagctggacagtaccatggtgagcacaatccagagcacaaagatgggttcctagacaaagtcaacgacaatattcatggttatggccgctcctccgatggcgagaagaaaaataacgataagaagaagagcgaccatggccattag

SEQ ID NO: 35850 - DNA, 209 bp, Glycine max
gatgaggatgaagatgatcaccatgacgaaggactagaaggtgatgcatcgggtaggtcggcgcagaccagctgtgaagagaagactcgcaaggcaatgcttaaacgtgggatgacaccggtcacaggtgtcagtctagtgacactcaagaagatcaggacgagctggttcgtaatctcaaaaccagacgttttcaagagtccaatatc

SEQ ID NO: 35851 - DNA, 258 bp, Glycine max
gcatatggaggtgaagatgaggcttttttaaggaaagttgtcactcctatccataacgtgattgctaatgaagctgcacgtaccagaaaaggaaagtcaaaacattcacaatggagaaactatgacgatttaaatgaatatttctggtccgctgattgtattcgattacgttggccaatgcgtgctgatgctgatttcttttgcctgccatctgaaaagctggtttttgataaatcaaatgtctgctgcaggagttct

SEQ ID NO: 35852 - DNA, 356 bp, Glycine max
ggcagttgttagcgaaggctgaaagaataacgatggtgggagtggtgatagaagatgaagttgttgttgctccaactaacttttcaatggttgaagagggaatttatcgctctagtttccctcgttcttcaaatttctcctttcttgaatctctcaatcttcgatccatcatatacttgtgccccgaaccctatccgcaagaaaatttagagtttcttcaatcgcaaaatattcggctctttcactttggtattgaaggcaagacggatctctctgtgtctgccgttagagataacatactggaggccgttaaagttttaattgatgtgagaaatcatccagttttaatccactgc

SEQ ID NO: 35853 - DNA, 332 bp, Glycine max
actgacggctggtgtcataagtcatcgatctgatgaccggcagctagcgttggcgaggacacttgatgccttgattgaagggacgccatcccctgagacagattcatgcctctcgtttggtccccgtgctccaaagtctggttcaggagcatgtagcaggcatgtgcaaggaccatttattgaagcatttgtgttcacgatctggtggtaggaattacgttgaatattgtagtctgcaagagcttgcacaacatcatcagccatccagacatatgatatatcgaagattatacatgctaactggagttgactttgtagatcagctaacattg

SEQ ID NO: 35854 - DNA, 311 bp, Glycine max
  unsure (1)..(311): unsure at all n locations
ggcgccaatggagttttgttctgagaattcgaatctaggatttgtttgagcgttcgcgaaggatcatggtggggttcagaaacagatacatggttatggaggtttttctgaaccctaatanggacaaaggtggggatgattctgttatagttacacagtttaatgtctccaaagctgtaagagacagcatattggtgaattttggggagtgtggtttggcttcgtcattgggatcgtttcagggaagtataacggcttgtaaaaatgctgccttgaaatgtgaggagtcaaaatttgagcagtacaaactc

SEQ ID NO: 35855 - DNA, 434 bp, Glycine max
aagaggacgacagaaggggggactgaaaattggggaactcacataaggggcacccctgcggttccaagcagccacccagataacaaaaaagcagctttacaaagtggacaacctcaaccagttcaatactaccatgaccaacatcaacatccctacgtgcaacatagcccagttgacaaaccaagcaacagtcccatggagtcaatccttaacatgttcgattcatggagcaaaaaagctgaagccaccgcacacaacgtctggcacaaccgtgagtcttcctagctactctatttcatcctagttcaagatgaaactctcaataaaaatagcaaatttagtccctatttttacctttgtctttcatataataccatgaattagattaatcaatggtgtcaattttaataaaacattgggaaagacaaattttg

SEQ ID NO: 35856 - DNA, 369 bp, Glycine max
gatgatgacagcttaaaagagaagattgcagaaatgaacacagaattgctgaaacaaaaggcagaaatgctggaggagtattttggcattcatattgatgagcatggaaatgtctctagacttcctgtgatacttgaccagtacacacctgacatggatcatgtccctgaatttgctctttgtttgggcaatgatgttgattgggaagatgaaaagaattgcattcaagcagtttcagctgctttgggaaacttctatgctatgcatccactgatgttgcccaatccgtctggtgaaggtttgcttttttacaagaagagaaaaatgatggatggttatgctgaagagaatacctgtgataatactggg

SEQ ID NO: 35857 - DNA, 346 bp, Glycine max
gaaagaggtttggcatgttgctgatgttccaaagaatgataaattccagtatacatactttgcacataaaataaacagctttgacactgcccctaaaaaattgttggcatcagactctcgtttacgtccagatagatatgcacttgagatgggtgatctatccaaatcaggggcagaaaagagcagtttggaggacaagcaacgcactgaaaagaaaatccgagaagccaaagagcataaatttacaccgagatggtttgatttaactgaagaagtgacatcaactccttaaggtgatttggagatctatcaatacaatggtaaatacaccgagcatcgggctgct

SEQ ID NO: 35858 - DNA, 317 bp, Glycine max
aagcgatacgacaacagaaagggggcaaaaaccgctcaatggatccccgtactcgagggggtattacacatgcaatagcgtcaaaaggtctccgacgcggacacacatggaccgtactccggacgatccggcaatgtcgactgtgacatatgaatgagagcaccgtcactcgattccagagaacatttccggtcgagtgtgtttgagattcaatcacagtcaaggtagctgcaagcttaatctgacattagtacatcagtagattaaatcacaagggaaacatagtcggctctcaccaagatcatcgtaatcaacat

SEQ ID NO: 35859 - DNA, 298 bp, Glycine max
ggaatacagatggatacagacgcgttggtccacgtatacgtcgatcactatgacatcaccttcgatatcaaccggaacggtttaccgaaactgtatcatgatggttccatgcatatcttcgaataggcataagattcatggcacctctagcatcgtttctcatcgcacgtcactcactttcgaacagtgctagtactccatcgcgactgtcgactgccacactttcggtgtcaacaactggcatgcctatcgttgtcatgagaaaacttcaactcgctggacattacgacactctcaa

SEQ ID NO: 35860 - DNA, 337 bp, Glycine max
gaacaagaggtatattgctgcccgtattttcagtcaccctgctgtcactgctgaagaaccatcgacaggtattgagcaagagtagagcttatggcacaaaaatgttccatggacacctgcgtggccccttggatgatttccagtaccacatatgcacattacagcacttgtatctatgctggcattaacattactggcatcactggataggttatgcctggtcagtgggaaattcaagttggtccatctgttggtatctctgcaggcgatgaggtgtaggctgctcactacattttggagacgattacagagatatctggcacaattgtatcaattg

SEQ ID NO: 35861 - DNA, 266 bp, Glycine max
gagagagtttcatgttcggtaatttttgatttgataatttcaaccctcaatttttttttatatatccaccaatccgcaaagtgcaaatttcgaatctttcacgtaatgggttcttctcttttccctcttcggcaccgatcgatccaatgctcttcccataggtacgatctgacacaccaagctcagagccaaattggttcgtctcggggacatgggtgctgggaaatccaaccgcgttttgcgcattgtcaaaggtcaaattcccg

SEQ ID NO: 35862 - DNA, 409 bp, Glycine max
gacagacacacaaacaatttaccagctatacttgttccttttgaaggttagaagtgctacaatacaaacaatgacagctactcaggaagatgtgaagcttttgggtattgtgggaagcccatttgtgtgcagggtccagattgcccttaagttgaagggagttgaatacaaatttttggaagaaaatttgggcaacaagagtgatttgcttctcaaatacaaccctgttcacaagaaggttccagtgtttgttcacaatgagaagcccatagcatagtctcttgtgattgttgaatacattgatgagacatggaagaacaaccccatcttaccttctgatccttaccaaagagccttggctcgtttctggtccaaattcattgatgataagattgtgggtgctgtatgg

SEQ ID NO: 35863 - DNA, 316 bp, Glycine max
acgacgggggatgggggttccatttctcaccagcttctgcttgttcggactctcatcgctcctctgctccgcatttctcatgggcacggtcaagatcgggatcaacgggtttgggctaattggccgtttggtagcgagaatggctctgctgatagacgatgttgatctcgttgccgttagctactctttcatcatcaccgattacagtgtcatacatgtttcagttcacattgttcatgggcactggcatcatcacgatgtcacggttttcgtcgagaagtcccttctcttcggtgactgccagtcactatttttg

SEQ ID NO: 35864 - DNA, 390 bp, Glycine max
gaggcacgcgtcagtccagactgtcagtgcgctgagagagggatagagagcggggagggtgatgaacctacagagagatacaatgcagcgtgagttgttgctccggctccacaattctctgtgaacatgggttttgctagagattcgacgcagattaggcgtggcactggtggcaagaagaaggcctgtaggaagaagagaacgtctgagcttggtcgacagccggctaacactaagctgtcaggcaacatgacagtcacagaggatccgtgttagaggtctacatgtgacatgaagggcattgtgattggatactggaaagtacgcgtgaggaagtgaagctgtacgtcgcagtactcgtgtactacatctggtttacaaaggctcaac

SEQ ID NO: 35865 - DNA, 260 bp, Glycine max
gaagaaaggctaggattcttcgcgtttgccatgtcgacgactttttagaccaccgcagacgcgcatccagtgtttctccaagaacgctacatcttcatgatggaaactgcttataacgcctatcgcagattgtcgtatctggattcccatgcactggatgcgttacccccattatcagttctctcgccggctttctcggaactcaccttttgggccgtaggcctgtaccgtggaatatcaggctttttgttttaatttct

SEQ ID NO: 35866 - DNA, 239 bp, Glycine max
tggcgatgccagagatcatgtctgaggaatcaaatcccgagttggcattgtggaagcgttgggtggtagctcaggcagtcacaatctctgtcgggatgatatcttatccgttatacactgtccgtaggacgatgatgatgcaatctggcattgaacagccagtgtagaatagcactctggactgctggaggaagatctatagcacagaatggttggcttcattttaccgtggtgcagtt

SEQ ID NO: 35867 - DNA, 311 bp, Glycine max
ggttgaatgggccttgaaactgaagggtgtaaagtatgagtatattgaagaagatgtctacaacatgagcagtctagttatggagttgaacccggttcacaagaaggttccgattcttgttcatgcccagaaaccaatcgctgagtcattcaccattcttgaatacattgatgaaacatggaagcagtatccactattacctcaagatccttatcaaagagcacttgctcgcttttgggccaatttcggtgagcaaaagcttatgagagcagcacgaaaagcaatgacaaccagccgggatgaacgcgcaa

SEQ ID NO: 35868 - DNA, 365 bp, Glycine max
gattggaaagatatcaaagctaaggctaggtagctagctagtactaaaaagctagattgatcgatcatcttaatttccacgggaaaaaaagaggtgataatggaatcatcacttgttgaagacattgtgattgtgggagctggaattgctggtctcgcaacatccttggcacttcacaggctgggtgtcccaagtttggtgttagaatattcagatactttgagggtcactgggtttgctttaacaacatggactaacgcttggaaagctttggatgctcttggcgtaggaaccattcttcgtcaccaacatgtccagctaaaagagaatgtgactaaatctttgattttaaggcagcaaacatc

SEQ ID NO: 35869 - DNA, 375 bp, Glycine max
gagtgacataaaaagtgaggttcacaagcatctggtacacacaattagaacgcagagacgtatgcaaggtatatcgaaacgaatcaacaaaatgcacactgaggcgcataacaatacgatcaactccaacattgttgttgctgtccttattgcaacagttgctttagctgccatatttaacgtcccgggccagtatcctgagaaaccaaatgaactctcacctggaatgtctcctgtggaagcatatattgctccacatattggattcatgatattcataatctttgaatctactgccctcttcatatcattggctgttgtgattgtccaaacatcagtggatgttattgagacgaaatcaaagagacccatgat

SEQ ID NO: 35870 - DNA, 373 bp, Glycine max
  unsure (1)..(373): unsure at all n locations
ggggaacaagattgacaaacctggggttctgtctaaagaagctttgaccgaccaaatggatctgaagtcaattactgacagagaagtttgctgcttcatgatctcgtgcaaaaactcgactaacattgactctgttatcgaatggcttgtaaagcactccaaatcaaagagctaagaggctcccttaagttttgtactctaatgtaatttcagtgacatatatctggaagttgctggaggcatctgcatggctaacttggttgcagattactttagtcctgcccntttctcatttgcttcttaatgtaatatcatgtccaatgacgtgtatcaaccaagatgaaatccaggtcaagggttgtttggtcgtgct

SEQ ID NO: 35871 - DNA, 383 bp, Glycine max
agcccaagcgtccggccaggcgttcagagaccccttggcgggctgcaaaatgccgaaagacgggaaaaaagcccggctttcaaaccctagcaaccttcatcaacccccgaactccgaaccccttcatcatccaggtcaaggataaaggttagggagcccaaggaggaaaatgtcaccctttggtcaaaaccgttatagacggtgaacatgtttccggcgtggctcgcatctttgcctctttcaatgaggaccttcatccatgtcacggaatttgtctgggatgcgaaacccttgttcgcatcactggtgggatcacagttaaagctgacatagatgaatcatctccatatgctgctatgcatgcagcacaggatgttgctgcc

SEQ ID NO: 35872 - DNA, 355 bp, Glycine max
gcacttcaattgcaatcaaattagttcattctctttgcgcagttccctacctctcctttcaagatgcagatcttcgtcaagaccctcaccggaaagaccatcatccttgaggtggaaagctctgacaccatcgacaacgtcaaggccaggatccaggacaaggaaggaattcccccggatcagcaacgtcacatcatcgccggaaagcagctcgaggacggtcgtagcctcgccgactacaacatccataatgagtcaacccttcaccttgtccttcgtctccgtggtggcatgcagatcttcgtcaagactctcactggcaaaaccataaccctacaggtcgaaagctctgaca

SEQ ID NO: 35873 - DNA, 305 bp, Glycine max
gaaacacatgttgagaagaattgcagcaattttcgtgataagctttttggctttggcatatcaagccattcaccctccacccccatgaacatgtggtagttcccctgaaggtcctcttatcacagggccaacgattaagctcagagatggaaggcacatagcatacaacgaacatggtgttcctagagaagaagccacgaacaagattgtgttcttacatgggttccgttccagtaaacatgatgctgtgattgcaacacaccttccccaaggacttgttgatgaacttggagtgtacattgtgt

SEQ ID NO: 35874 - DNA, 318 bp, Glycine max
tgggggcacacgtgaagcttcatggactttggtaaactccctacactttgatggtggtatggaccttacagtttaaggatagaccagatccacacatataagaacaccgctacaatcagagtcttcaacttcgtgaatacaacccattagactctaaaactccagtgcttgtccataatggaacacccctaagtgagtccatgcttactgttgaatacattgatgagatctggtcacataagtcactacgtcctgctgatccctacgagagagctctggccatgttttcggtcaaatatgctgatgatgaccagtttt

SEQ ID NO: 35875 - DNA, 353 bp, Glycine max
gtgtgatgatggtaacaagaaggagaacaagagtgttagtgagtggtgagagtgcgaagaacgtgagggctacatatcatttatataaccctgagcagattggttggaacttggtcactgccagtgcctactgcgctgcatgggatgccaacaagcccttggcttggcgtaaaaaatatgcatggactgctttctgcggacccgttgggcctcgtggcagagaatcttgcggcaagtgcttgagggtgacgaataccggaactgggactgaggctacggtgaggattgtagatcagtgtgctaatggaggcttggacttggacgtcaacgtgttccgacaattggacactaat

SEQ ID NO: 35876 - DNA, 234 bp, Glycine max
cccaggcgtcagtagacgagtgagcggaggcgtgagcgggagcaagattaggacttaaggggggtgtcaacgttcaaaacgtcatgagcgtgttgctttccgtgcttgaaggacgtcctagtgatggcattagggttgatcttgtcattaactcatttgtagtgagatttattcaagcaggaattgaggcaagcatcattattcttatatggggaactcgtttgaaattgaata

SEQ ID NO: 35877 - DNA, 344 bp, Glycine max
gacggtttggccaacctgtccatccatccaaaattccccatcccgcaactaatttaattagttacttttccgttaattatcttccttccctggctcgagcatccaaaaaggttggttttttttttttttagaagaagaacaagataaggaagatgattatgatgactatggatgggatgatggacgaaggggtgttggatcatttgataagaaagcttctggaaaggaaaggaaggaaacaagtgcaactctctgagtccgagatacgttaactccaagtcaacgcccaagaaatcttcctctctcagccaattcttctcgacctacgtgctctcatccgcaac

SEQ ID NO: 35878 - DNA, 297 bp, Glycine max
gattccattgtgtagtaaccagtcagcgttagttcttcagtaacttattgtgggattcgattctaagattttgagattgtccagctgtgggtgtggaaacagctgcagctgtggcagcaactgcggttgcaacaagtactcatttgacctgagtgacgttgagtcgacaaccagagagactcgagttttgggtgttgggcctgtgaacgctcagttggaaggtgctgatatgggtgttgcatctgagaacggtggctgcaactgtggatgaagctgcacctgtgactcatgcatctg

SEQ ID NO: 35879 - DNA, 352 bp, Glycine max
gaagacagttagcatgcaaaagagggatccagataaacaaattataccctaaggagttgctaaacccaagctgtgggttttgcagtttctttgggttgaagcacttccgtcttcgagttgaggcattgagcagagcaacgaagctcctcccaaaccaatgactttggtcgacagcgcttccttctgaatttcctagacccttttggcttcacgatgggccctcgacagtgccaagtctgcaaccaaactcactccaaatacaagtgcccttcatgttacttaccttattgttctctggtctgtttcaagacacacacagaatctccatgcgtcaagccacagccttcagaga

SEQ ID NO: 35880 - DNA, 263 bp, Glycine max
  unsure (1)..(263): unsure at all n locations
gaatatgattatattttcctttgggatgaggacctangagttgagcatttccatccagataagtatgtttctattatcaaacgtgaagggctggagatatcacaaccagcactggatcctaaaaaaatcagaagtgcatcatcagattactgcacgtgggaggatgtcatcagtgcacagaacgacatataaagctagtaatgatggtaaagggtgtgataaaagcagcactgccccaccttgtacanggtggatagaaatga

SEQ ID NO: 35881 - DNA, 326 bp, Glycine max
gtccactccaatccaccagaacatttgttcaatggacagcatcctcgtggtaaatgccgtctcgccagatcaaccatcatctcagggcatataatgggatgtcataagcgtccatcccgtataattgattttcgaccgaatgagaaaaacatatatagtagaatcgtagccatagaatatcaccctaatctagatgcatacctttgtctcatatactatgtggatggtgagccaaaatatattttacacctcacacgggctataattggatatcccagtgtttctggtacagaagttccgatgagtctgggaaatgccctaccatt

SEQ ID NO: 35882 - DNA, 298 bp, Glycine max
gatcagactgtgaccaatgaacacgttgttgctgaccttcaacatcatgttaacaggcctgtcgatcgatcgaagttcctgtaatggaataacatcttccaacgtaagccttctggccgttttggcactggtggcccgcatgatgaaactggactcactggaagagcgatcatcattgacacctatggtgggttgggtgcccatggtggaagtgccctttcaaggaaggaccctacgaaggttgacagatctgatggctaaaacgtgaggcacggcgcaaagaatgttgtgacattgg

SEQ ID NO: 35883 - DNA, 219 bp, Glycine max
tactcatatcacttataccattctctctcgcacgcacacgcacctcgataaccacatggttttacccatggcatccaatcagatcgtgaacgaacttaaggatcgtcatacggcatctcctacctcatgcatcgccagtcctgttgctgatcacatgtatcactggcaagcaacaattatgggtcatctagacaatccttatgcttcaagtgttttcct

SEQ ID NO: 35884 - DNA, 442 bp, Glycine max
aattcccggctcgacccaagcgtcagtccaggcgtcagaaggctgctaaatgaggacagaagggcatgtgggtaatggctcatactggcggaccttgacgcgccaagacacgttctgaagccacggcagaggactgtgcgataggtatatgcagttctgacagttccatcgagagccatggtggccgtgagtggaatcaacattgcctttaaccgtgaagcagttggtccagcattgatcccggctttgatgctggcacgggaagggaaattgaggtgggagactatagaagatataaggtgtggaatgtgtgtgaaagttatatgtgatcacataagccttgatgtgagaattgggttaccagatgtttggacaatagattcgagtgatacattacagatctatgaaaaagagtgtgaatgagtgcatttgatggaagatg

SEQ ID NO: 35885 - DNA, 384 bp, Glycine max
  unsure (1)..(384): unsure at all n locations
agagtcccggctagacgtacgcataggtgcgagaggacgacagcaagggacagacagacaaacaatttaccagctatacttgttccttttgaaggttagaagtgctacaatacaaacaatggcagctactcaggaagatgtgaagcttttgggtattgtgggaagcccatttgtgtgcanggtccagattgcccttaagttgaagggagttgaatacaaatttttggaagaaaatttgggcaacaagagtgatttgcttctcaaatacaaccctgttcacaagaaggttccagtgtttgttcacaatgagaagcccatagcagagtctcttgtgattgttgaatacattgatgagacatggaagaacaaccccatcttaccttc

SEQ ID NO: 35886 - DNA, 367 bp, Glycine max
ggtccaagtccttatcatctcctctctctaacggttgcggatcctcacttccagacacggggccaaggcacttcggtcgacccatttcatagaatggtggatggcaggacgccaacatacgtatggtcaagcttgtgctcttaggtgattctggtgttagtaacagctgtattgttctactatttgtgcgtggtcagtttgatatagcatcgattgtacctgttggaccctctttattgtctcggacaatcacactgcaatattctacatcagtgacgtctgaaatttgggatactgctggtcttgagaggtatgctgcgttagcacagcgatattaccgtagtgcaacagttgcagtttactgttt

SEQ ID NO: 35887 - DNA, 295 bp, Glycine max
ggttttgaatgtactttggacagagttgtagaggatcttaaaaattacagtgacttctgtattcaccggcttttacttcattatggtgtcaatgatagaaaggggatccttccagataagcatgttatgctttctgcaaaatgtcgggccttatcagaacttcttccttcactaaaggagggtggtcatcgagccttgatctttaatcaatggacttcaatgcttgacatattggagtggactttggatgtcattggattgacctataaacggcttgattgaagttcacatgttg

SEQ ID NO: 35888 - DNA, 231 bp, Glycine max
  unsure (1)..(231): unsure at all n locations
gtgacgcaaagtccacagcaaattacgtttggaaanaatgtgatggttttgagttaaaacaatcatctaatgcgctcgatttaaggtttattccagacaacatggaattcaaacacccgcctcgggatgttgctactgatgtgcctgcaaattatgagtgcaaagatttctattctcgagcacttcatcacattgaggttaatcttacttgggatgatgattaacctcttc

SEQ ID NO: 35889 - DNA, 290 bp, Glycine max
tgggacttcaattgcaatcaaattagttcagtctcgttgcgcagttccctagggctggtttcaagatgcagatcttcgtcaagaccctcaccggaaagaccatcacccttgaggtggaaagctctgacaccatcgacaacgtcaaggccaagatccaggacaaggaatgaattcccccggatcagcaacgtcttatcttcaccggaaaacatctctatgacagccgtactctctccgactacaacatccagaatgagtcaacccttcaccttgtccttcgtctccgttgt

SEQ ID NO: 35890 - DNA, 292 bp, Glycine max
tatcacgtttttatcccataatgtaggaactcatcgaaagagtgagcaaaaatgaattatcaaaactggactatccttgtctaaatgacccaagtccaactttccacggtacaccttatgctggaccagtaactcaaaatcctcctgctcattcaatgagatcaatgcgtacaccaacttgggctcgacctataagctctgattatggatattcaatctattcggtgctaaaacacgcatccattgatttcaagaaaattgggcaaagaatatttatattcattgttattgg

SEQ ID NO: 35891 - DNA, 198 bp, Glycine max
  unsure (1)..(198): unsure at all n locations
acacaaataacgaatcatatttagagtttggacattcacctgaggtgcagagttctntatcacattgcagagaaaatgtctttgattccaagtttctttggtggcagaaggagcaatgttttggatcctttctccctctatgtttgggacccttttaaggattttccttttcccacttctatttctgctgaaaattca

SEQ ID NO: 35892 - DNA, 268 bp, Glycine max
ggatgaaatgatttctaaaactagttctgatgggtgtacaactgctcttggttggaatctctcttgccttgaagaagccaagcctatgattggcgtgactcaagctgtccagttcctaatccagcttcttcaatctgactctgatgttcaatgcaagcaagattctctccatgctctctataatctttctactgtgccctccaatattccatgccttctttcatttggcatcattagtggcttacaatcccttcttgtatgccaaggg

SEQ ID NO: 35893 - DNA, 188 bp, Glycine max
  unsure (1)..(188): unsure at all n locations
taatggggagcaaaaccctaatccctatttggctggctcantagtgtcatttacgcgtctcttctctgcagcgactatgcctaaccctaaggtcttcttcgacatgaccatcggcggtcaatctgctggccgcatcgtgatggatctctactccgacgtcactctccgcaccgcctagaacttccgct

SEQ ID NO: 35894 - DNA, 352 bp, Glycine max
attcataagtgtgacagaaatggaggatttaaaggaaaaggtcgatgaaggggaaccaacgcaaattaagtatagaggagtacgtaggagaccatggggaaaatttgctgcagaaattagagattcagctagacatggtgctcgtgtgtggctcgggacatttaacactgctgaggaggccgcaagagcttatgatcgtgctgcctttgagatgagaggtgctacggccattctcaacttcccagatgaacaccctccttgcaatgtgacttctcttagcaagaagtcctcatcatctaacacctgagattggtaaacaagttgtggtatttgagtgcttggatgacaaatt

SEQ ID NO: 35895 - DNA, 361 bp, Glycine max
ggtgatagactcctgaagcggtatgttgttgctgatcgagagatccaggaagaaaaggttgatagctctcttgagtttcttatattggctagtgatgggctatgggatgttgtctcaaatgaggaagctgttgctatgattaaaccaattgaggatgccgaggaggcagcaaagaggctaatgcaagaagcatatcagcgaagtagttctgacaacattacgtgcgttgtcgttcgttttttgtcaaaaccaagtgcatcttctcatagtaactctggctaaatgtccttcacttcgaatgctaatgtatatctggtgatggattaaaaaaatactggatgttggcaaaatcagtttatta

SEQ ID NO: 35896 - DNA, 190 bp, Glycine max
gactatgagaggcttgggaacatagcgttgagttaagcaggagtttggggagtggcagggcctctattgagtggcatagcagcggtggggacttcatttgtgggtaatggatcgtgggcggcgttagtgcctctcatggctggttcattagcttcagtagttaatgctttttaacattgtggccatatat

SEQ ID NO: 35897 - DNA, 266 bp, Glycine max
gacactaattaacagagcatgaaaacaaccttcgttgggtgggttcttgatcagtgtcaaaaccaaaagggtggttgcaaattgcaatggctaatcatggtgttgagggtggttccttcactgcaaaggactaccatgatcctcctccatcaccattgattgatgctgaagaactcacacattggtccttctacaaggcttttattgctgattacattgccacaatgctcttccttttcatcacattgctcactgtgattggttac

SEQ ID NO: 35898 - DNA, 173 bp, Glycine max
ggagttgagaggatcgtgatgcgggcagtaaccgatatgccgtgaggggcaaaaatgaagacgattctttccaccgagaccatgaacattcctgacggcgtgagcatcaaagttcatgccaaggtcatctaacttgatggcccccgctgaaaattggtgctagactttaagca

SEQ ID NO: 35899 - DNA, 293 bp, Glycine max
ccctttatgcagaacttaagtgtagcctatggtctgcgagaaatcaaacctggtgaacctgttctggactggcctacaagaagacaggtggctctgggaacagcccgtggcttagaatatctccatgagcattgcaatcctaagattattcatcgggatgttaaggcagctaatgtattactagatgaagattttgaagctgttgttggtgattttggcttggcaaagttagtcgatgttcgaaaaactaacgtgacaactcaagttcgtgggacaatgggccacatagctcc

SEQ ID NO: 35900 - DNA, 269 bp, Glycine max
gagcttttgctgcagccttgatcaatgatgccttgtgggtcatgaatgtggtctcatcttatggtcccaacacactccctgtggtttatgatcgtggccttattggaaccttccatgattggtgtgaagctttttcaacatatcctctaacctatgacctccttcatcttgattgactcttcactgctgaaagccacatatgttaaatgaagtatgtgttactggaaatggatcataattataatgcctgatttgcatactatcattct

SEQ ID NO: 35901 - DNA, 239 bp, Glycine max
ccactcatcctacgcttccaaaagcacaccgaatgggtattcaattccaatacattccattctggctcgatatttccctacctctgccggcaacatacacatcttcgtcaagaccctcacctgcaataccatcacccttaatgtgtaaatctctcacaccatcaacaacttctaagccaaaatccattacaatgaatcaattcctccttaccatctacattatcattttctccttaaaa

SEQ ID NO: 35902 - DNA, 315 bp, Glycine max
gctacgagtaacacaacgcaacgagaagactacacactggtgcctaccataaactacaagatgcgtgaacatttgctaggggtggtgacgcaatgatctatgactagaatatacttaatcaatacattcatgatgataatgataatgagacccgattttcaatattagcacgagaacctatgattcctggcactgattggcgatttcatactaccatagtattctatttaaaagaaggtcctctgatacttatcagagcccttgctgatcatgctttgttccacattaaccttacacagattgaaaatcttatct

SEQ ID NO: 35903 - DNA, 225 bp, Glycine max
  unsure (1)..(225): unsure at all n locations
tatgactacagaatgggattcatattttccttgcgtttcccttgcgttttggctcactttctcggctggccaaacacccctctctctcctccaataaccgaccagctcaccgacgaccatatcgcctaattcatagaagccttcatcctcttctacaaggacngcgatggttatattactactaaagaacattatactgtgatgctgtcactatggcaaaaccca

SEQ ID NO: 35904 - DNA, 306 bp, Glycine max
ggaactgactggaggaaagcatctaggcaatgttcaagggagagattcaagagtttgagcctaaatttgatgaaagatggctcgcttcagcttcatgatgaaattactggtcaagctgtggtggtttgagtgtaaagtaatttctttctgtagcctcatgccatgcgctcactcagttactcatttttcttgcaccacctattgtgcttgaaatatcgtttgcggaatctctccaaggaagcaagttttgggcaggtttgagttttagtggttgaagcattctaatgatcttgagtttgattatgt

SEQ ID NO: 35905 - DNA, 250 bp, Glycine max
taaggtaacgcatccaagaaaagaaaatcctgacccgttttcttcgtaggcgggcactctgaaattctcagttatgtcgtggcaagcgtatgtggatgatcacctactgtgtgaaatctaaggtaaccacctcactcgcaccgctatcatctgccaatactgaagcttttgggctcataacaccaactaccctcatttcaaacctgaggaaataactgccatcaataatgactttaatgatcctggatca

SEQ ID NO: 35906 - DNA, 244 bp, Glycine max
gaattaccggtcgaccactctccgacggctgccataaactacataaggggatgtgtgaattaaaatatattcaattttgctgttctcggcctaaaacgagtgggagatgggtcaatcattcagttgctaccaagtcgatcagtcaaatgtggttatcaaggatcatttgagaaaatttgatgatgtcctatatcctgtatgtcactgcctgccttggtgtctatggtaccatattgctggtaat

SEQ ID NO: 35907 - DNA, 320 bp, Glycine max
  unsure (1)..(320): unsure at all n locations
tgggagaggctgaagcggcaaatcgcgtctaccgagttccacagcgggagcttatcttantagcttaactctttctactggcgtggcgctgctggatgcttttgatcaatagaacaggaagaggagtcagccaaaaagaaagaccaccaaaagtaatgaccaccaagatatgcatagtgattcgatcttttgatcacccatttttggaaaaccattttggggggcttaatcctttcacacagaagattggattgcctgaatcacgagtcttatatactgggttacgatcaccttatattgataaaaagttcagagaacaa

SEQ ID NO: 35908 - DNA, 177 bp, Glycine max
acagcagcaaacatcttcacaaactaggtaaagagtaatattattcttcgaatcgcattttattattcataatgggtgttttcacatttgatgatgaaaccacctcctctgtagcaactgctaccctttacaaagctctaattgcagatgccgacaacgtcattccaaaagctgtag

SEQ ID NO: 35909 - DNA, 402 bp, Glycine max
  unsure (1)..(402): unsure at all n locations
gacagacaaacgaacaatttaccagctatacttgttccttttgaaggttagaagtgctacaattacaaacaatggcagcttactcaggaaggatgtgaagcttttgggtattggggaaagcccattgtgtgcaggtccagattgccttaagtgaaaggagtngaatacgaatttttgggagaaaatttgggcaacaagagtgatttgcttctcaaatacaaccctgtacacaagaaggttccagtgtttgttcacaatgagcagcccatagcagagtctcttgtgattgttgaatacattgatgagacatggaagaacaaccccatcttaccttctgatccttaccaaagagccttggctcgtttctggtccaaattcattgatgataagattgtgggtgct

SEQ ID NO: 35910 - DNA, 335 bp, Glycine max
aggcgtgcgaagacgtgtgagaggtaccagagcagggcattcactgtgtcggaaaaggaagacgagatatgagatgagtgtctgacgataacgacaaggtggaagagcgttgtcgatgtcgatagatagcactgaggctggtacgaactttgaacctgaactgaaacccgtcgatcgctatatgacatgtccgttactgttgcgagtgatcactaaaattgatagtcaccattctatgtaatactttggcgtgcgatgcaagtagctgaaggacgcggctcatatttacacctgtatggacactaatattcgagaactaactgatatcgtcatag

SEQ ID NO: 35911 - DNA, 220 bp, Glycine max
cacgtaggggttatagagagactacatagtgatcctgacttttaagcgcaacaatggaggtcgcaaccaacacggccgaagccacctcaagttcattcgatgctacgactggcgcaaatgctgtgctaaggaccaagctatcaagaggtattttgtgaggaacattggtgaacaggcttcagatagagatattcacgaggcttcgatctatgaacaatta

SEQ ID NO: 35912 - DNA, 391 bp, Glycine max
  unsure (1)..(391): unsure at all n locations
gggtctccactacgcattcggacaaaccctaacttctttttgctgttgttgggcaccaagatgaaagtgaacatcttgcaatggcatgctgttgcttcatggacttgggatgcccaggatgaaacctgtgggatttgtaggatggcctttgatggatgttgtcctgactgcaaacttcctggagatgactgcccactgatttggggtgtatgcaatcacgcatttcatctgcactgtatcctgaaatgggtgaattctcagacatcacaagcgcattgccccatgtgccgtanggagtggcagtttaaaggatgagagctcaggttttcattttctttttcgagtgtgaccagagagcaatgtaaaatggtatgggtaattcgaagatgta

SEQ ID NO: 35913 - DNA, 315 bp, Glycine max
tgatcagcaactacaacgtgagaaacatggcttccttaagctccttagtgctgctccttgcagctctaattctatcccctcaagttcttgcaaactatgagaatcccccagtgtacaagccttccactgagaaaccaccagtttataagcccccaattgggaagccctcttgttaccaaccttcaagtggaaacccccccatttataaaccctccattgagaaaccacccatgtacaagccccccagtgggaaacccccaatggtccaacccccaattgaaaaacccccaatgtgcaagccccccatttagaaac

SEQ ID NO: 35914 - DNA, 334 bp, Glycine max
ggattagggtgggagaggtactatgatggagacccaaacctctaccaatttcacaagcactcttcaattgacctaatttccctcgccaaaagatttctccaagttcaactccatcaatatgtatgatatattcatcaagaaccccaatgtcttccatgtccgagataagtgagtcttcatttgttgatgtgccactatagtagctcctctccattcaccttaaatccttcatttgttggtggaactgcttttaccattggtgttaatatcggcttttattggcctctacttcctcatgttggtgtgctctgctatatagctagctatagtttga

SEQ ID NO: 35915 - DNA, 381 bp, Glycine max
aggcgttagtacacgtccgagaggacagctgtaggtggtagtacactagatccacacgcatgatgagcttctcaaatacagccgtgctcactggaacgttccaatcatactgctcattgatcaccacgtagcaaagcacctagtaagcgtctaatacccagatctgaccttgagtatcaaccaactactacctgtgtgtacttaccacatagccatggctcggttaccgttgctattcatgggatgatgaaatagccagtgcattctcgaactctgatcacaaagctgacgatacagagcctgagacgaaggattgctaaacacatgaagactgatatgcgcttgcaaatgcactctatgactggattgcatgaagctgat

SEQ ID NO: 35916 - DNA, 313 bp, Glycine max
ggacaacataaccctcttctcaataataacggttatgtcattcttgttatcagtacctgtaactttgttgatggagggtgtcaaatttacccctgcttacctgcaatctgctggattaaatgttaacgaagtgtacatcagatcacttcttgctgcactatgtttccatgcatatcagcaagtttcttatatgatactgcagaaggtgtcacctgttacccactctgtaggaaattgtgtgaaaagggttgtgatcatcgtgagctctgtcatcttctttcaaacaccagtatcaccaattaacgcactgggg

SEQ ID NO: 35917 - DNA, 340 bp, Glycine max
tgcaggcgaacaaaacaagtgttccgaatagattatcctaagtctttgggaatagtgctgcaatggcttcaagtcaagatgaggtgacccttttgggagctactggaagcccatttgtgtgcaaggttcatattgccctcaagttgaacggagttcaatacatatatgtactaagaaaatttgaggaacaagagtgaactgcttctcaaatgcatcccagttcacaagaaggttccagtgtttattcacattgagaagcccatatcagagtctctggtgattgccgaatacattgatgagacatggaagaacaaccccatctagccttctgatccttacc

SEQ ID NO: 35918 - DNA, 384 bp, Glycine max
tatgaggggttcacacaagcaaacgtgataccagctattcgcggtccttatgaaggctagaagtgctacactacagacaacggctgctactgatgatgatatgaagctttcgggtattgtgggaagcccatttgtgtgcaagcttcacattaggcttaagttcaagggagttgaatacagatctgttgaagaagattcgagccacatgagtgacatcggtcctcaaatacgaacgctgatcacaagaacgttccactatgtgctcacattgatccatccatagcacagtctcttgtgagagttgcatacattgatgagacatggtagaacatccgcatcttacctactgatccttaccaagaagccttggatcgtttctggttc

SEQ ID NO: 35919 - DNA, 283 bp, Glycine max
taccggtccggaattcgcggcacgcatcaggcgacccgtcaggcgacgcgatccggacttgctgctacgaagacacagacaggggtggtagtgtggcagcgacacgtatcaacttcaataatcgcatcgcaaaagcagcttccggggcatctgatcgtctcccaaaatgaacgacgcagatgtctcgaagcaaatccagcagatggtgcggttcatcccccaagaaactgaggaaaaagccaacgagatctctgtcttcgccgaagaggaattcaatatcgag

SEQ ID NO: 35920 - DNA, 328 bp, Glycine max
tatggcattgtaactctgaacgatgaaatgaaatggagttcccagacacgcgtttgtctctgagatcgagcttgacgttcggagagacgctgtgctcggtgttcattccgctcataggaatagtcgaagctttggttttcacattcgccagttgcttcgatttccaatctcccaagaagaataagaaacattcttctaccttcgatgacattctcaccctcgccgaggattctccatttttaagttgctgatttgtgtgtggcagttagtgttaatgaaatcgaggcgttgcatgagttgttcaagaagttgagtaggtctatcattg

SEQ ID NO: 35921 - DNA, 341 bp, Glycine max
gagagacatatatattatgtcatattggcatactagattccaatgcttacttgcttcacattctatactatctaccctttgttggtccgcgaacttctttgttcctccaacatataatacctcatctatcatatttcaatatgatctcttcgctacactctgaatcacacacaatgggtctctgggattccttcctcaattggctacgcagctcgttttttaaacacgagatggaactttgacttgtcggccttcagaatgctggcaagacttctctagtcaatgcaattgctactgtaggctacagtgaggacatgatatcaactgcaggctcaacatga

SEQ ID NO: 35922 - DNA, 326 bp, Glycine max
gacagacagacaaacaatttaccagctatacttgttccttttgaaggttggaagtgctacaatacaaacaatggcagctactcaagaagatgtgaagcttttgggtattgggggaagcccatttgtgtgcagggtccaaattggccttaagttgaaaggagttgaatacaaatttttggaagaaaatttgggcaacaagagtgatttgcttctcaaatacaaccctgttcacaagaaaggttcagtgtttggtcacaatgagaagcccatagcagagtctcttgtgaatgttgaatacattgatgagacatggaagaacaacccca

SEQ ID NO: 35923 - DNA, 418 bp, Glycine max
acgactgaatgggagggagcaacaagcagtgtaccgggtatactgggaccttgagaaggttagaagtgctaccatacaaacaatggcagctactgaggaagacgtgaagcttttggacatagtgggaagcccattcgtgtgcagggtccagattgcccttacgttgaagggagttgaatacaaattctcggaagaaaatttgggcaacaagagtgatttgcttctcaaatacaaccctgctcacaagaaggttccagtgtttgtgcacaatgagcagcccatagcagagtctcttgtgattgatgaatacattgatgagacatggaagaacaaccccatcttaccttctgatccttaccaaagagccttggctcgtttctggtccaaattcattgatgataagattgtgggtgctgta

SEQ ID NO: 35924 - DNA, 347 bp, Glycine max
tgagtgtgtgagagagcgagcgtgcaagcagtttccaagagaggattcgtgattatcaactcgagggattgatcctggtttcttgctcttatatgtctatttatcccttattcataatcttactatacagcatcgtgattctcacactcacacatacacacatattaaactcatatagatcctacgatggctttaaagcacatacttgaggagctcatggactagcagaacgtcccatcaacttcttgcaacgctattaccgtaattctagacatgttccattggcaagcaactattataggtactgctgatagtccttatgctggaagtctattccgtagtactat

SEQ ID NO: 35925 - DNA, 280 bp, Glycine max
ttatggggtattgagattaacttatgaaagaagatgcgaggcgaacaaatgaagctgctgagctttcgagcgagaccatttggtaaaaggattgagtggtctataaaactatatgcattgcagtatgagtatatagaagacgatatctgctacaagactactctcattctggagtagaacccgattcacatgagctttccagctcttgttcatgcataataatccattatagctgaatcattcataatccgtgaatacataatatgaccatggaatgcaa

SEQ ID NO: 35926 - DNA, 297 bp, Glycine max
ccaagaggtttacttatgggggagagagagagagagagtgagagagagtgatagatggtgtctatgaaactttagaagctgcttgccgttagcgttatcatgtgtggtagaggcatattccggcttgaccctagttatgacaatgaagtctccatggctgacactagacataacataccgaaatcggttaaggatggtttcattatcatgtagccatctaacatccattgtagatcctgtgctttgataattacggatgccataatgaaagtacgtcactctgcttatggtaagcct

SEQ ID NO: 35927 - DNA, 311 bp, Glycine max
aggcgtgagaacacgtgagagaggaccaccgacggctgtaatcgcgtgagaaagttcattgaagctactaagccttttaccgtattggaaccatgtctagaagaaaggttatagatgccatggaagagaacgttactctgggcccatgtggtagagatggctaacatgtgtgcggcgtcggttacatgtgcgtctactatgaatcgatacatttattcatgtctgtgatctgtacgagagggaaacacttgatcggatcacaagctgaatgagcgctaaggctggcagatatgaatcgtgtccctattctg

SEQ ID NO: 35928 - DNA, 417 bp, Glycine max
gaacacaacctggggtgttaaatagaaaagaggagtttgagaatggcaacgatcagcgcggttcaggtggagttcctggagtttccagcggtggttacttcaccagcctccggcaagacctatttcctcggcggcgcaggttcaatttcatttaatttctgcatgcctacctccaattaagtttctatgataagaaattaaacaaaagaatgaattgaattatgtatgtatatgcttgtaggggagagaggattgacgattgaggggaagttcataaagttcacaggcataggagtatacttggaggataaggcggtgccatcactcgccgctaagtggaagggtaaaacttcagaggagttagttcacaccctccacttctacagggatatcatttcagggccgtttgaaaagcta

SEQ ID NO: 35929 - DNA, 399 bp, Glycine max
ggagaacaaaacaagtgtttcgaatagattatcctaagtctttgggaatagtgctgcaatggcttcaagtcaggaggaggtgacccttttgggagctactggaagcccatttgtgtgcagggttcatattgccctcaagttgaagggagttcaatacaaatatgtcgaagaaaatttgaggaacaagagtgaactgcttctcaaatccaacccagttcacaagaagattccagtgtttattcacaatgagaagtccatagcagagtctcttgtgattgttgaatacattgatgagacatggaagaacagtcccatcttgccttctgatccttaccaaagagccttggctcgtttctggtccaaattcattgatgacaaggtttttggtgcttcatggaa

SEQ ID NO: 35930 - DNA, 375 bp, Glycine max
  unsure (1)..(375): unsure at all n locations
gctttcggaaaacggtcaaggaagaagaattactcatccaaaaaggagcagaagatagtgatggtaaccagaaagggtatcataaacacaaccacaggattactatatctgatgttgtgttcaagcacaggtggagcaacgtgagttcttcagaccttatgtttctgaattcggagatgctcaatgatacatcaagcaacagattcagcagcaacctggaatcaattacaagaggggtagtggtggaaaatgagcaaattatgaacatcaaggaggagatggagaggaagatttcctttgagaacaaagttgttggtgcactaaacaacatcgtttcagatcataaggaagatcctncttttacatcagattctg

SEQ ID NO: 35931 - DNA, 370 bp, Glycine max
gacattgagaagctatctgatgaaacagccgcaaattttgtaatgcaacagctcaagaagatgtgtccaaaatcttctaagccagttcagaatcttgtgtctcgatggggaacacgtgctaaaactctgtaggatgctactatgatgaagtaggaaaaccacttcatgtggattatgagattcttccaccatttgggaactaattatttgggggggaacatgcatgcttgtcaaacaagggattttggcgtgcatggaacttactcagctggagtcatggctgaaaaaaattgtgagagctaatctttagaaaaactgggccacgtggaaaagctatctctagcttctgtaggcatgaaatgcttgaaac

SEQ ID NO: 35932 - DNA, 421 bp, Glycine max
gacagacaaacaaacaatttaccagctatacttgttccttttgaaggttagaagtgctacaatacaaacaatggcagctactcaggaagatgtgaagcttttgggtattgtgggaagcccatttgtgtgcagggtccagattgcccttaagttgaagggagttgaatacaaatttttggaagaaaatttgggcaacaagagtgatttgcttctcaaatacaaccctgttcacaagaaggttccagtgtttgttcacaatgagcagcccatagcagagtctcttgtgattgttgaatacattgatgagacatggaagaacaaccccatcttaccttctgatccttaccaaagagccttggctcgtttctggtccaaattcattgatgataagattgtgggtgctgtatccaaatctgttttc

SEQ ID NO: 35933 - DNA, 210 bp, Glycine max
gcgtccaacccgatgtcagcacacgactcaatgggactcacataggtcaacgtcaggttcatacttcatcacatcccggggaagttctgaaacctaaatcatacatagctataattcatgaggggatgcgctatgtatcccacgtcattcatgactgggaaactttacattcacttcactgtagcatttccatattcacataactctgat

SEQ ID NO: 35934 - DNA, 404 bp, Glycine max
ggatgatgacgaacacattctcggcatcaggattgttggaggtgaccatacgctggggaactattcttccataatcaccgtccagcgacaggtcatcgatgggagacccggtacaatggtgatcgaatcatttgtggtggatgtgccccatgggaacaccagggatgaaacgtgtcacattgtggcggctttgctcaggtggcatccgtgctcctaaggttatttccccccatagattagtctctcatccgtcgctgcagattaagattacacccagttgctccaccagaggttcgacgagcatacaaacggataatgatctcatcatccaatctatcatcatcatcatgaggcgcaatctgagccttccaatcgacattccaacaggtttcacgcccacttgc

SEQ ID NO: 35935 - DNA, 402 bp, Glycine max
ggagaacaattggacggcatcgaaagccacgtggcacgcgccaattcatacgtgcggggtggggtccagcagctgcacgtggcaaggaagcaccaaaagaacacccgaaagtggacatgcatagccatcatattgctcattattatcatcttgatcatagtcctccctatagttctaagaaaatgatcgatcacatattctaattggtatatggtggtggctgcgaagaacttggactagttcaaacttcagagattgttagtatcttatattagttaagtcaattcatatgctgcctagaccattgcattagaaaaatatataccttggcctttgtgattagttttattttttctttttttgggtcgcatcatgtgttgattaaattatattttccacgta

SEQ ID NO: 35936 - DNA, 324 bp, Glycine max
gattgtggcgcagacggatgctcggcaagctgtgtccttggaggaagcgtggacgagggtgcaaggcttatcgcgatcctggggccgatgttcggttcatagacgcactcgcttcggttcaggaaatgaagactctctgtcaactttctccccatcttcccaaactcgatgaggcaaaacgtctatacttagtcctcaggaacttgaagacgttggtgatgaacttgctatttatccaatttccttgattggggtttgcatacaagcaatggaggatgcactcactgctattaaaggaagcgctgttcctcctccgggaaacat

SEQ ID NO: 35937 - DNA, 345 bp, Glycine max
gacaggcaaacaaacaatttaccagctatacttgttccttttgagtgttagaagtgctacaatgcaagcaatggcagctactgaggaagatctgaagcttttgcctattgtgggaagcccagttgtgtgcacggtccagattgcccttcagttgcggggacttgacgacaaatttttggaagaaaatttgggcaagacgagtgatttgcttctcaaatacagccctgttcacaagaacgtcccggtgtctgttcacaatgagaagcccatagccgactctcttgtgattgttcgatacattgatcagacatggaagaacaaccgcatcttaccttctgatcctta

SEQ ID NO: 35938 - DNA, 371 bp, Glycine max
atacgggatcgagcagaccactaagagggggtccattcataattctagtagaactcaggatgcacttttagcggctgcatgtgtctcattgtgaatttgcttgataactgtatgccttcaataagtttgatacattttcgcagactatatagaaactttatcaggatactcatactcagcgcaatattgcaatgttgaatgatgaactctatgaagtccaccagataatgactcgcaatgtgcaggaagttcatggtgtttgtgaacacgttcgccatgtcagccaaatgtccagtcgcatatcatcaaaatcctcacatatatgctgatcacgctatagatttagaccgggagaaatatcatgctgcaat

SEQ ID NO: 35939 - DNA, 314 bp, Glycine max
  unsure (1)..(314): unsure at all n locations
gatgagaggctggttgtgcacgccactgctgcggctgctgctgggggtttggctgctgtcgttaccacgccgctggaggtcgtgaagactcaattgcactgtcagggtgtctgtggttgtgatangttcacaagcggatcacgtggggatgttatgacgacacgactgggcaaagatggttacagaagggtgatgcgagggtcgattccaaggatggtcttgtcatgctcctgctgcggcgacttgctggtctacatatgaagctgggaagtccttattggaagattgcggtcagcagacagacactgggaccg

SEQ ID NO: 35940 - DNA, 400 bp, Glycine max
cccacgcgtccgcccacgcgtccgcccacgcgtccgcccacgcgtccgcccacgcgtccgcacacaactactacaagtacttccctacaagcagaaccaacaacaactatggcacgttatcaaaagcactacgatgatcatggtcacaaggttgacgagtatggcaacgttgagaagcacaccgacgaatacggcaacccagtacatgctgctactgtcacctatgtagccaccagaactgctgctggtggttacagtgatgacattaagaggcaacatgataccaccaatgcctacggagtagacactggtagacagcattctagtggtggctacgatggagacactaatagacatcaaggaactactggtggctatgatgctgacaccaatagacatc

SEQ ID NO: 35941 - DNA, 285 bp, Glycine max
aggtcacacggccgtaaaagttctgtcacatgcatatgcgtctgttttgatacaagctgcatatcgcggtcatcaagttagaacatgggaagcattgacgacgttgacgcagatacatgaagtcaggaacgaggtgactgatgttcgagaccgtgttcaagcctttgagagatcgtctgatcttcaaaatgatgacaagcaagaaattgcaattggtgagaccaatatgacacccctagcgaagttggatactaataatggtttgcatccaagtaacaaggagat

SEQ ID NO: 35942 - DNA, 416 bp, Glycine max
agaaaaaaaaaaaacaaaaaaaaaaaaaaaaaaaaaaaaaaaaaaaaaaaaaaaaaaaaaaaacaaaaaaaaaaaaaaacacaaaaaacaaaaaaaaaaaaaaaaaaaaaaggggcggccccccaacaggttcaaaccttacttacccttgcatgcaacgtcacaccccttcaacactgtcacctaatttcaattcacgggccttccttttacaacttcttcaccggaaaatccctggctttacccaccttaaccgccttccaccaaaaccccctttcgccacctgcccttttcccaactaggccttcatcgatccccttccccaacatttgcccacccccgaatggacaacgggacccccccttttgcggcccattaacccccctggctatcccgctcatgcctcttcctccccc

SEQ ID NO: 35943 - DNA, 403 bp, Glycine max
agcccacgcgtccgcccacgcgtccgcacacgcgtccgcccacgcgtccgcccacgcgatccgaagaaaccttatcttggtattttgattggttctgtggagagtttttttttctttggtgtggattttggtttgtgctgtttttggctgggaataacaatggccgatgatggaaacagaagcaattacttccagtccatcttggggttgcagaatgagtgcactgaattggagctaatgaatgcgtataagaaacatgcagagaaatggtacccagatcgttgttcagctagagggaattcagatttagtggaataagctactaaaaaatttcatgaaattccggaagcctattcaattttatctgaagccaacaaagcgttaatgtacgacatgggagtct

SEQ ID NO: 35944 - DNA, 442 bp, Glycine max
gcatgatgtgttttctgggtgtggttcacttcactgttgattcaggcacgctgtggtggaggaactagcggagtttggtgccacagtgtacacttgttccaggaatgaatcagagttgaatgcatgcttgaaggagtggagcagaagggattttcggtttctgggttggtttgtgatgcgtcttctccaccccaaagagagaaactcattcagcaagtggcaactgccttcaacggcaagctcaacatacttttgcttggcaacaaacaagttgttaatgagataacatctcaaacgccgattaagccgatggcagaaacgcatgaagtttcaaccttggtgactttcctttgtctgccagcagcatcctacatcactggacagattgtttctgttgatggaggattcactggtaatggatttcaaccaacatgagaaattc

SEQ ID NO: 35945 - DNA, 213 bp, Glycine max
cacacacacagctagcagatattacatacacgtgaatcactaattaagccatggagaagaaatcaatagctgggttgtgcttcctcttccttgttccctttgttgctcaaaaatttttggtgcaaactaaggaaaaaacttccaaaaacctgcttgtaaaataaaggggccaatccttaacaattggaacttccaagattaatggaagaacaa

SEQ ID NO: 35946 - DNA, 419 bp, Glycine max
  unsure (1)..(419): unsure at all n locations
attcctcgatgccttcctcccccaattccaattgcacaccgacgaaaggcgcaggtggtgaaatcgtgtcaccaaaacgagagctctgcttcggctcacacagaccactcctcaaatccaaaggcatccgctgctgatggaaatggaatcatggaaaaacctgtgtgcagaaattgcttgggaagcggtgctgtgctttgtgatatgtgtggtggcacaggaaaatggaaagctcttaaccggaagcgagctaaagatgtttatgaatttactgagtgtccaaattgttatggtcgaggaaagcttgtctgccctgtttgtttgggaactggttttactaataatacaggtctccctaaggngcctgaaacaacgaaactgcttgataagatttataatggacggctacttccaaactc

SEQ ID NO: 35947 - DNA, 445 bp, Glycine max
agcccaggtttgaattgtgttctatgctaagattttgtgtcattgtcagatatataaggaggggtacaccagatgctggctttgctctttttgaatctgagtctctgaagtggccaggttttgtagagtttgatgatgtaaatgggaaggtattaacatactctgctcaagacagcatatacaaggtatttgacctaaaaaactatacaatgctgtactctatttctgataaaaatgtccaagagattaagatcaggtaatttttcttaccgtgcttgtattatttttacttttagaaaacacttccatccatagatgtgatgttctatggtcaattggtcatgcacaactttctgaaattatatcacattaactattaaatttttaagaatatattagttttttctacattttatagtttctttgggcgatcctggtttctata

SEQ ID NO: 35948 - DNA, 324 bp, Glycine max
cttcagcatgatgcacatggggtttaacaacttctctgggaagttccctccagagattgcaagtattcccattgtggtgctaaacatcacaagtaaccagttttcaggtgaaatccccgaagaaattggcaacttgaagtgtttgatgaatcttgacttgtcttgcaacaacttctctgggacgtttccaacaagtttgaacaaattgacagagcttaggaagttcaacatctcatacaaccccgtaatatccggtgtgggtccatcaacacgacagtttgctacctttgagaaagattcatatttaggcaacccctttcggat

SEQ ID NO: 35949 - DNA, 293 bp, Glycine max
accacgcgtccgcccacgcgtccgcccacgcgtccgctcttttcttctcctcctcctccctcaccaagttaaccaaagcaatgaagagactaaaacacgaggattcacaccaccaggacaactcctccgaacaacagcagggaaagtgtaggttcccattaatagccattatctctcttttctctctcttcgtcggcctcctctttgctctcacgcggagcgcctctctccgccacacgcgtcgtcgacgtgccgatctcgaccggcactcctcctcccacctccagcttcgg

SEQ ID NO: 35950 - DNA, 340 bp, Glycine max
cccacgcgtccgcccacgcgtcggcccacgcgtccgcacaaactagaagtattattattcttccatttccattaaaaagaaaatatcataaatgggtattttcacattcgaggacgaaatcagctcccctgtggctcctgctactctttacaaagctctagttacagatgccgacaacatcatcccaaaggctcttgattccttcaagagtgttgggaacgttgagggaaatggtggccctggaacagtcaagaggataactttcgttgaggatggagaaaccaagtttgtactgcacaagatagaagcagttgatgaggcaaacttgggatatacctac

SEQ ID NO: 35951 - DNA, 441 bp, Glycine max
gcaacagcaagcacaaacatcaaacagagtcattgttattgtaacgtaaaatcacatggagaaggaagctttgaaggaccaaattgaaactccaaagcactgaacgaactcaattgaaaccctagcacagagtcatacatagatagtagcgtggatagcagtgtgtgatgcggtgatcgcgatcacgatgaaaaatgcaaacggcttgatttcgacgacgtcgtctaatacggcacagtcacaatccactggcctcaagacgtatttcaagactcacgaaggccggtacaagctttattacgataagacttacccttccactcttcttcactacgctcatggcaaaaccgtttctcaggttactctggcacatctcaaggacaagccggtgccttcgacgccgactgggcagtcttcaactttcagtgccaccagtggggt

SEQ ID NO: 35952 - DNA, 441 bp, Glycine max
  unsure (1)..(441): unsure at all n locations
gcttgcttgagttgccaactttaagtttgtcaatttccgtgctgcttggttggttgcaattgcaagtgaacaattggctagtgtgtactagttttgaatcacaatggcagaggatgatggttacacgaaagatggaacagtcgattactgtggaaatccagctaataaaaaggaaactggaacctggaaagcctgcccctatatcttaggtaattgttgtgttcgtttaagtccaaggtangatgtgatgtgtatgtactgtgttgtgtgtgaaatatttatcgtttcaagcttctatttgcaggaaacgaatgttgtgagagattggcttaatatgggatgagcacaaacctggtgctttatttcaagaaccggctaaatcagcatagtgctactgcttccaagaatgtctctaattggagtggaacttgctatatcaca

SEQ ID NO: 35953 - DNA, 392 bp, Glycine max
ataaacctacgcattctcacaatctcttcacctctgttatgaccatgggatacagaacctgatcactcatcatcatatccgcaatggacatcagtgaacgtttgtctcttctccacgatggccgtatacactgtcgctacgctctccggagaggctctcgatcctcatggcgccaccagccatgtctacaatgacgacggcagtaaccccatgtggcactaccgcgtgaaattctccgtcaacgaatcgctggccaacgagaatcgtttgtctcttgagatcaagcgcgtctcagaccgcaacctcagtgacatcgttatctgcagcgtccatgttcctctcagggaactcatggacaatcgcggagacgacagttccttccgccacatcag

SEQ ID NO: 35954 - DNA, 439 bp, Glycine max
atgcaattgcagggtaacaacaacaaatgaagaggtgcaaaccctaaacacaaacactcacttcaacccacaggtcccacccctccgaaccctctcttcctcgaagcggttcgagggttcctcggagttcgtgaagctcctcatcaaggacttcctcaactcaatctccgacgaccaccaccgcgcctccccctctccctccgtctccgactggtggcgcactgtctccctctacaccgaccagaccggcgccaacatctcccgctccgtctccatcgccggcgagtactccgacctccgctactcccacggcacacacctcacccgcctctccgtgcaggacgtcatcgccaccgccgtccaggccaagcccttccccgtcgaccaccgcaacgggatctacctaatcctcaccgccgaagacgtcaccatggaagac

SEQ ID NO: 35955 - DNA, 133 bp, Glycine max
gttcactttagtttgaaggcaagttttgaaacattgtttgtcatttcagtttcatgatgaagcatatggattaacatgagccctgtttaaactgcacttttattgcaaagaacttgtgaaccccacgttatgc

SEQ ID NO: 35956 - DNA, 440 bp, Glycine max
attttagaatatatgtggggattctattataagtgaagagtgaagcaacagaaaaacttctcatagatcaattctgttctatttttctctgattttcttaaagctgaaagccatttttatctcccctatgactgacttgatttatttgcagcccacagtagacatcaagacagtgttatctcagttaatggacaggttgtcaaattatgctgcctctagtactgaagtattgcccgaatttctgcaagtggaagcatttaccaaattaagcacagcaattggcagggtgatagaagcacaagttgacatgcctattgtgggagcaatagctttgcatgtttctcttcttacatttactctccgtgttcatccagatcgacttgattatgtggaccaagtactgggatcatgtgtcaagaagctttatggaaaaccaaagc

SEQ ID NO: 35957 - DNA, 430 bp, Glycine max
cccggctggccccacgcgtcagaaatactagttctactcttatcattgtgaaacaaattgcccaattgttcgaggttgaatatcaggttgaaccttgcagcaaaggctacaatagtagtgcttgcattgatgtcagaaagacaagcttccctatgcaaactggtggatatgtcatctatggtgttggtcatcagcatgttggtgcaaatgaatcaactctatacggacaggatgggggagttatttgttcttcaataccaaaatatggaaatggaaacgaagcagggaatgagaaagggtatgttgtaggaatgtctacatgttaccctcgacgaggtactatcaaaataaaagatggtgaaaccctaactctagagattatctacagcaacaaccaaagccacagtggagtaatggggcttttctacat

SEQ ID NO: 35958 - DNA, 409 bp, Glycine max
acggtgtctgatgcggttcacttgacttttggttgtggtcttcttacattttcgttatttgttatggctgcgtctaggaagaaagccgatagagagtatacttatgggtataaaaggctagaagtcttgtctgcatttacaaatgccctgtttcttttgtttatgtcattctccctagcagttgaggcacttcatgcattcatacaagatgaatcagagcacaagcattacttgattgtttctgcagtgaccaatttatttgtgaatcttgttggtgtatggttcttcagaaactatgctcggattaatctcacttacagaaatgcagaagatatgaataatcactctgttttcctgcatgttgttgcagattccattcgcagtgcaggtctgatattggcatcctggt

SEQ ID NO: 35959 - DNA, 389 bp, Glycine max
  unsure (1)..(389): unsure at all n locations
agggaaaaggtgggaaccacttttggaagtccattgggcttggatttaagactcccaaggaatccattaaaggtatctctctcattcactactatctcttataaaatgtttattctatgcaatgtgaatctatcaggttattgttctatgatgaagatccaccttaaagtgtacagaagtatgttcttcattagtgtaggaaatggaatttggtttgggtgggaaggaataaggttgctgcattagagcctaatgaagtagaaacattgttgggcttcccaaggagccacactagaggaggtggaataagtangactgacagaaagtgacccattatcaggtttctctccatttctccttgtctggctactttaagataagtttcgctg

SEQ ID NO: 35960 - DNA, 435 bp, Glycine max
cccacgcgtccgcccacgcgtccgcccacgcgtccggtctgcaccaataacccctagaacagcttcagtagtaggaacacctgttgtggcatctccacctgtgtcatgtccaccctctcagcttcactcaccatctctaacaaggtcacctctacttcaccctgaggatggagatgcaccacgtcgtaaaacatctaagactccaaagactccaagaacccctagaacccctagaaccccacttagaatctctaatttgactccaaagttcatcacccctttgggaagccctatgagaaaagctctgaggttcaccaagcttgatcctcaggatgcttggcttccaatcactgagtcaaggaatggtaacaagtactatgctgcttttcacaccctttgttctggtattggaattcaggcccttgttctccctgt

SEQ ID NO: 35961 - DNA, 395 bp, Glycine max
agttcactcttcctcccttgccgcaacggttttagcgcatcttcatctagatttaccgaatatgggtacggaaaaggttcacatcattattgtggtcattggccatgtcgactctgggaaatccactaccatctgatcaccttgatttataagcctggaggcactgacaaacgtgttactgataggtttaaaaaggaagctgcttacatgaacaagaggtccttcaactctgccttggtgctcgacaatcctacggctgagcgtgacagatgaatcaccattgatattgctttgtggaactctgaatcaacatcgtagcattgcacagttattgatgcgcctgcacatacggatctcattaagaatatgactactgggacatcccaatctgactg

SEQ ID NO: 35962 - DNA, 320 bp, Glycine max
agcgactctgatggatacgtacacggtggcatacggggttcctcgctcgaagtggttggatttggcgggtcatcagaaggacctgaatgcacccgctgacgaaattgataaactagtcattgactggctggacgagcaccttcagaacaaacctttgggtgaatacgttgaaagtgatatcacactttatgcacgtgatgatatcagcacctactagttcacaggtcgattggtctgatgctgacaccatatcctcagcgacaaccttgaagtcgatcctgtcaggaactgatactgctactgcgattctcacacgggca

SEQ ID NO: 35963 - DNA, 397 bp, Glycine max
cccacgcgtccgcccacgcgtccgcccacgcgtccggtctgcaccaataacccctagagcagctgcagtagtatgaacacctgttgtggcatctccacctgtgtcatgtccaccctctcagcttcactcaccatctctaacaaggtcacctctacttcaccctgaggatggagatgcaccacgtcgtaaaacatctaagactccaaagactccaagaacccctagaacccctagaaccccacttataatctctaatttgactccaaagttcatcaccccttttggaaaccctatgaaaaaagctctggaggtcaccaaccttgatcctcaagatgcttggcttccaatcacttgaatcagggaatggaacaagtactaatctgcttttcacaccctt

SEQ ID NO: 35964 - DNA, 299 bp, Glycine max
tggcaatagcaactgctgctgcaacttccatctttcctgctattgagccagggactgtatgtctcattattgagggtttattgtttacatggtggatgtgtggcattcacactggtcaagtgcgccaatctttacagaagaaatatcacttgaagaattcaccgtgtaatgcatgttgtgtgcactgctgctttcactggtgcgcccctttttctaagaacactaggtatatgaaattgactgttttttgttcctacttttttatctataattgtctctttttaaatcctttttccttt

SEQ ID NO: 35965 - DNA, 378 bp, Glycine max
  unsure (1)..(378): unsure at all n locations
gttcactcctcttctcttgccgctacggaattaccacatcttcatctagctttaacgagagataggctcagataaggttctcctcatccttgctgtcattccccatctcaactcctcagnctccactaccaccctatcacctgacacactagctctgcaagcatagacacacttcgaactgatacgtgtaaataggtagctgcttacacgcacccgaggcccttgaactctgcctgggtgctcgactgacctgcggcttagcgattacgaggaatcaccattgatattgctttgtggaagtttgaaacaacaaagtattattgcacagttattgatgcgcctggacatacggatttcatttataatatgaatactggg

SEQ ID NO: 35966 - DNA, 398 bp, Glycine max
ggtgaagcgggtctactatccaggcttgccgagtcaccctgaacatgagcttgccaagaggcagatgactggtttcggtggtgttgtcagttttgaggtgggaatttgacaagttgctattcaaacatgtggtttcctaataacactattttttttttcttttatcaagaatggtgtattggataacatcatgtgccatattttttttatagttaaattgccaatattgcagattgatggagatctacataccacaataaaatttattgattcattgaaaatcccatatattgcggcctcgtttggtggctgtgagagcattgtggatcaacctgctattttgtcttactggtactcatttggattccatgttcaatttgtcatgttgatgatttttg

SEQ ID NO: 35967 - DNA, 393 bp, Glycine max
aagcgtgtaacattagattctttggtggttcaatatttgaagcatcagcatcgccaatggccagctcctattaccactcttcctccactgtctcttctgcatccacatgtctgtcctgaaccaaagcgaagcctagatgccccttctaatgtgacagctcggcttggtacacgtgaatttaaatatatgtatgggggagtgcatgggaatcgcagggatcgtcaatttgtttacagtcggtttaggccgtggcgtacttgtcgggatgatgctggtgccttgttaacatgcattacatttgttggggactcttctcatattgctgttggaagccataatggggagctcaaattttttgactccaacaacagcaatgttgtggagagcttcaca

SEQ ID NO: 35968 - DNA, 332 bp, Glycine max
ccaaaaggttccaacctaacttccccttacggcgacgctctacacttcaaagcttacatatgcgtgcattccacggcccacctcttcaaaagtgccacccgggtacaacccagtggtcgtccatttaaaccgccttgacggggaacccccttccgtaaccgggcttaatcgccttgcggcccatcccgttttccctacccggcatttccccaaccaggccggcaacggtgaccctccccagaactggccactcctgacgggggattgggaggctccccgtagcggcacagtaacccttgcaagtgtcctagttacgcccattttgacttcca

SEQ ID NO: 35969 - DNA, 399 bp, Glycine max
  unsure (1)..(399): unsure at all n locations
agcataatgtttccggcgaagaagccttgaagaagcgcgctgcgatgaaccgggccgggttcgggtcgggggccgtgtttggtgcgacgtccccgtcgccacccccggggaatgtggacgggtttacaatcgggaagtcggagacggngggattgggggttggggctggcgggcagatgacggccgcgcagcggatgatggcgaagatggggtggaaggaanggcaggggctggggaaacaggagcaggggatcaccacgcctttgatggcgaagaagaccgatagacgagccggggttattgtgaatgccagtgacaacaacaatagcagcagcagcaagaaagttaagagtgttaacttcaatggtgtgcctaccanggtgctgctgctcaagaaca

SEQ ID NO: 35970 - DNA, 233 bp, Glycine max
cacatgtatggttcattatatatatcatacctgaaaagaatgtcaggggtagggagaaactatcaattataaatatcactgtggagagtgcaagggaaagaaggttattgaggatatgacagtccttgaatttattgacgagcacgggatgtagaataggcacaagattacattcactggcgaagttaaggaggctggggagagtagtattggggatatcgtcattgtcatta

SEQ ID NO: 35971 - DNA, 423 bp, Glycine max
atttacaatgcaccgagtccctcgtcattctcactagtagccagacaaaacccaaaaccacacgcaataacaaaaaaacaacatgcggtgttgcattccgacgttgttgctcgtaaccaccgtactattgtcggcggtgcacggagttttcctccctctggagcggagcattcctccgacgggccaccgcgtggaggtggcggcgctgaaagcccgcgacagggcccgccacgcccgcatgttgcgcggcgtcgccggcggcgtcgtcgacttctccgtccaaggcacctccgatccaaactccgttggattgtattatacgaaagtgaagatgggaactcctcctaaggagtttaacgttcagattgatacgggaagtgacatattgtgggtgaattgcaatacttgcagtaattgccctca

SEQ ID NO: 35972 - DNA, 425 bp, Glycine max
acaaacattataatttctattacatacattttgtagctaggatgagcaagttactactcattcgtgttgctgggttcgtggcaacctttgtcaccatggtgatgatgatggtgcccaaaaacgtgagtgcccaaaacataggtgatgacatcgtcacacaagacttcttcaacagcataatcagtcaggctgatgatggttgtgcagggaagaacttctactcacgagatgctttccttaatgctcacaattcctacaatgagtttggtaggcttggtaatcaggatgactccaagcgtgaggttatttttgctacatagaagagattaacggtgcatcaggggactactgtgacgagagcaacaccgagtacccatgtgcccctaacaaagcgtactatgggcgtggaccaatccaactatcat

SEQ ID NO: 35973 - DNA, 211 bp, Glycine max
gacgcacgcatccaccgacgcgtccgcgcacgcgtccgcccacgcgtccgcccacgcgtccgggcagcagggggatattcaaagttcgtcgccagccagctaagtctgcgccttcggcagatccgtaggcgggagtacgcgtggtggctcccacggaagccaggtgcgaagcaggctgagaggaggggggaggtagaatgagctggggaaa

SEQ ID NO: 35974 - DNA, 393 bp, Glycine max
agctaccttacgctctctattgctgctccatgcaggtctaaatccattccctcaggttctggcattctatgacaatccctcagtgttcaagcctcccattgaagaaccacagtctagaaggccccagttgagaagcctcctgtttagaatcctccagttgaaaaccccccagtttagcagcctccagtacagaagccaccaggtgtcaagcccccagttgagatacccctagtttataagctcccagttgagaatccaccagtgtacaagctcccagttgacaatacaccagtgtataagcccccagttgaataacccccagtgtatcagcccccagtatagaaaccatcactgtaaaactcccagttgagaagccccagtttacaagccccc

SEQ ID NO: 35975 - DNA, 433 bp, Glycine max
acggacgcgtgggcggacgcgtgggcggacgcgtgggcggacgcgtgggttgtcaccgaaactttaatgcggtttctaaaagcaagggactgggatccttgcaaggcacataaaatgttggttgactgtttaaattggagggtgcaaaatgagattgacaatatattatctaaaccaattgttcctgctgatttatacagagcggtgcgtgattcacaactcataggattatcaggttactcaagagagggtctgcctgtctttgcaattggtgttgggcttagcacatttgacaaagcatctgttcattattatgtgcagtcacacattcaaattaatgaatatcgtgagcgtataatcttgccttctgcatcaaagaagcaggggcgacctattaccacttgtataaaggttttagacatgactggtctga

SEQ ID NO: 35976 - DNA, 424 bp, Glycine max
aggaatttcaattcaaaaatcatatgtagatccctccatcaactatccaaggaattttcgaagagcactaatggtctcatggtcccatcttatgctttgtagaatcaaaaaaaaaaataaaaaaaaaaaaaaaaaataaaaaataaaaaaaaaaaaaaaaaaaaaaaataaaaaaaaaaaataaaaaaaaaaaaattataaaaaaaaaaaaaataattcaaaaaaaaaaaagattatcaagtaaaaaaaaaaaaaggtcagaaatatgggtgcaattcgtaattaggcttagcacatttgacagagcatcttttcattattatgtgcagtcacacattcaattttaatgaatatcgtgaacgtataatcatgccttctgcatcaaacaagcaggggagacctattatcacttgtataaaagttt

SEQ ID NO: 35977 - DNA, 413 bp, Glycine max
aacacacgtccgggcaataataggtctgatgatgcgttacacgttctgggccgcaccgcgcaaactgatgtaacaacgagtccatatccatggccgacaagtccgggtaatctttgaaatttcatcgtgatcgggatagatcattgcagagttttctagctaatgtagataacgaataactgtgcccattaaagcagagtttatgctatgtatctcaacgagctagacattactagtcctaagtgttatccctattttctaaaacactgacatgttgtgcatccgaagttcaagttttttagtgctacatacgatcagtgagtgcctattagtctgtacgttgactgtctaaattgttctccgaatgaggttgcctttcagtacaatactttcttgggaagcaagtcatcttc

SEQ ID NO: 35978 - DNA, 445 bp, Glycine max
  unsure (1)..(445): unsure at all n locations
cgggtcggncacgcgtccgaagtactgaggttcttcattctggctcaggcgttgcgacatccccgtcccactctcttcttcagccttcttggagtctctcacgccagttgcacacacatctactggggctaaggtcggaacgatggctgcctcttaaaaacatgtgcatgacgcatgtactcagacctagtcatagccattctcagcgaattcggcaatggtccaaccccataaacgaaccgtgctggtcactgggaccccacagtcaattcctgcacaatgtacagctctgagttcgaagactgctactgcgaatgtatcaaggtgttgctttcattaggtggtcgcattggatgctacactttggcgtcactacaatacgcatgagtcgtttcaatgttgctgtggaacactttcttgggaggcaagtcatctacttcgccac

SEQ ID NO: 35979 - DNA, 369 bp, Glycine max
cagaaggttcgttaaagtcgaagataaattaatgcaaagtagttagttggcagatagaagaagatcatcatcataatcgatccgttacaattagggtttctgattggagcataatagcgtattatcatctcatctctcagcagcagcagcatggcggagcaccttgcatcgatcttcggcacggagaaggaccgcgtgaactgcccgttctacttcaagatcggcgcgtgccgccatggcgatcggtgctcgcgcctccacaaccgccccagcatctcgcccaccctcctcctctccaacatgtaccagcgccccgacatgatcacccccggcgtcgacccacagggccagaacctcgaaccccgcaag

SEQ ID NO: 35980 - DNA, 383 bp, Glycine max
cggtcggcccacgcgtccgaacaagcgtatgcccacgcatccgcgcgggcagccgctgcgatctacccaatgcgaccgaaaatgttcgtctgcacctatacacgcaccgggaacagatttagcgcgtagaggcacctccattggcggcaagcaactcgatccgcaatgggaatcgatttgcatgcaggatgtaggtcaactataacgaatccatgcgcccccagatgcgattaaatctacctcaagctgtccgtaaagctgtaccatgttcatggtcagaagactgggagtaacttcaacgctgttgtctccaaacgccattgcatgagcagggtcaacaagccgtcgctgtccctctcgtgattgatccgttacacgattgg

SEQ ID NO: 35981 - DNA, 421 bp, Glycine max
  unsure (1)..(421): unsure at all n locations
cagccgtccgaccacacgtccgcctttttttttttttttttttttttttttttttttttttttttttttntttttttttttttttttttttgtaaggattgctcatctttattataatttattattgatgaagtgagatacagatatatcataagtctcacaattatatgggaaaaggaaagaagaaaggaaagactggatacattggaaggcaacttaagttgagaacagagtgattggataagtctccaagcaagaaagtgatgacaagtaagttgaagaggattagttgcaatcctgatgtggcaggaagccagaacagccttgagatcgatggtttaactcgctttgctgttgaagaacacaacaaaaaacagaatgcccttttggagtttgaaaaggtagtaagtgcaaaacagca

SEQ ID NO: 35982 - DNA, 281 bp, Glycine max
agaaggtatcacagcagcctatgacacgctcagcattggctcgaaatatcttgaatacggtacaacccgtgctgactatcacgtccatagggattctaccctgaagttggagttgcagcttcgtagtggcatgcattctttgtcagaactttgagatggattctccatcactttagttgttgatagttcagatatcaatgaaaagctcaatgcaaatatccaaagacaggagggtattccatcagatcagcagaagcgtatttttgctgggatgcatatgc

SEQ ID NO: 35983 - DNA, 367 bp, Glycine max
cccacgcatccgcttgatccttctttttctccttgaactcaaacatggcagatgaggtggttctgctagatttctggccaagtccatttgggatgagggtcaggattgcacttgctgaaaagggtatcaaatatgagtacaaagaagaggacttgaggaacaagagtcctcttctcctccaaatgaacccggttcacaagaagattccggttctcatccacaatggcaaacccatttgtgaatccctcattgctgttcagtacattgaggaggtttggaatgacagaaatcccttgttgccttctgacccttaccagagagctcaggctagattctgggctgattatgttgataagaagatatatga

SEQ ID NO: 35984 - DNA, 389 bp, Glycine max
atccagctaaagatatttcactcactggtcacactaccaacagagcattctggacatggcatcatctgtctcttacgtgcttctacttcccgatctgatgattgtcgcctttgctggggagttaaactgatactttggacatcacatgtggagatttgacggaccaatatactaaaccacggactagttacgctctctttcagtggaaataccatcttgcccaggttttcagacaagaaacgattaaccctgtgggaagattgacatgccgctcaagcatgtccctggaaacactgctggcaccgtccctgccgatgaactcactccaaaaggatcaacttgggatcatttagactatgaacttcttggagttctgagtggtgatctat

SEQ ID NO: 35985 - DNA, 267 bp, Glycine max
  unsure (1)..(267): unsure at all n locations
acagagatggaattgatgatgtcaaggaagcagcttccagagcaacaagggttagaagttcagaacccaaattcaataaaggccctgcagcagaaaattcaagcattacagcggggaaagaacacgaatggagatcctgagagatgaagatagacgacttcgagctcaactgatggatactgctgaagcactgcaagctgcaggtgaacttcntgtgcaacttaatgaagcagaagaagctgtcattaccgcacagaagcgggcgat

SEQ ID NO: 35986 - DNA, 434 bp, Glycine max
  unsure (1)..(434): unsure at all n locations
accatttaaaggcagcaagaagcagcattcaatgcccaatgctcatgtgcgttcagaactcaaagatatggatcaaattcgaaaggagaggcagacaaaggccaacagggtttcttatataaagagcaagtcgacaaagggtaaaaggtttggtaaaaatggtaaaaaaaggaaaaggcaaatagagtttgtttgaagctctagaaattaattagttaaggagaaaaggcttgccaatgaatttttatattttggagtggtaaggggggggggggaaaggagaaacccaactgnagaaaaagtgactttttgattttgtttttttttcttggttcaccaacaaattttgtttgttcaaagtaatgattcttgcacttgttgctgtacatggatcacacatctgtgcgcttccttttatatttgaagttcccctt

SEQ ID NO: 35987 - DNA, 412 bp, Glycine max
accacagcgtccgcagatttttagttgtttaaaattctgttttaaaattctaaaattttaaattctttataaaaagtatccaaacaataaattctaaattacagaaattcaaattctctgataaattactttcctcggttaaaattttctatccaaacgtactctaaggttaatcagttttaagatagaatttcaacagtgaaataaacttgattaacaacttaaccttttgttgatcattttttttttctgaatcaagatatctcttaattgaaagtcaaagattaatcttttgagataccgagatttatttaagagattaacatctttcaaacatatgtatgttttttcatatgtgcaggccaaaaatcaaacttatgaccacatatttttgttgaacatattgggttta

SEQ ID NO: 35988 - DNA, 430 bp, Glycine max
atccgactttttggaggaaatgcacaatggaaattctttacgcagcacaacaactcttgggaatgaaaaagaacgagagagagtttatgacactatcttccgcctgccatggagatgtgaattgcttatagatgttggcttctttgtctgcttcgattcatttctttcgttgttaactgttatgccagcgaggatcatgatgaccatttggaggcttctaaagacaaggcagttcaagaggttgtctacaatggaagtttctgattttggctgttttcttattttgagtagtggtgttgttcttttgcaacaaacagatatcagcttaatatatcatatgatccgcggtcaaggaacaataaaactatatgtggtctacaatgttttagagatatttgataaattatgtcaaagttttaatggggatgtg

SEQ ID NO: 35989 - DNA, 385 bp, Glycine max
cgatccagttcactacttccatgatgctagtttcaaccatgtgaagttgttgtgcgtgctgtgtttgttgttgtgtactgtattggaccttcataaccaaccatgaatctcagcatcggcaacggatccacttcgagttctcctccgaaagccggagattctgtcgccgaccagtttccggcgggtccccgggtgctagtggtgaatcatgaacccacctatcttatgatcattgatacgatgcgccgtgcatgtctctactaagtgacgatgtgtcatcgaactcaggttgcatcgtacttctcgatgacagacgatcaccggtttgataacgtttaaagcgatgtgcatatgccacatatggatggatttaagcttttggggc

SEQ ID NO: 35990 - DNA, 426 bp, Glycine max
acgcgtccgatcgacagatgcagatcttcgtcaagaccctcaccggcaagaccatcacccttgaggtggaaagctctgacaccatcgacaacgtcaaggacaagatccaggacaaggaaggaatccccccggaccagcaacgtctcattttcgccggaaagcagcttgaggacggccgtacccttgctgactacaacattcagaatgagagtactcatcacctcgtcctccgtctccgtggtggcatgcagatcttcgttaagacactcaccggcaagaccataaccctataggttgaaagctccgacaccatcgataacgtcaaggccaagattcaggacaatgagggtatccccccggaccagcaacgtctcatcttcgccggaaagcagctcgatgactgccgcatcctcgccgactacaaca

SEQ ID NO: 35991 - DNA, 325 bp, Glycine max
cggtcgaccacgcgtccaactcagtcacagccctcatcttcatatcagacatctcaacctcaaggttcatagaaggagaatgatccaaatactacaactacttttgtgggtaatttggatcctaaggtcgctgatgatcatctgacgcaagttttcatccagtatggagaattattgcatgtgaagattccagcatgcaaacgatgtgcgtatggccaattcgcatacaggagctgtgcgtaacaggcatttcaggtgtataatgggacactgttgagtgagtaaaatgttcgtctttcatgtggccgcattcattcaaacaaac

SEQ ID NO: 35992 - DNA, 387 bp, Glycine max
agtggaagaggtggaagtggggggcatgatggaagctggggacacggtggatactgggggcatggcaaatcaaacttcatggcatttgagtttccttattgacaatcccaaacagtctacagtttttgatattctcttgggaatttctcaagattttgaaattgctggtaatactcttatgccagctttttctgttccacaggctactgccagatcttctgaaaatgcggaatcctctgcatgatctggaatttgtgttatctttcgcttgttcgtttgtgtaattcaataaatgaaattaggcatgaccctcttgttgagtatgctctgcctatttgaaaatttccacacctcttttaactgtcgtaatgatgtgtgaactgtgtg

SEQ ID NO: 35993 - DNA, 429 bp, Glycine max
aggaagacattccgcgtttgcgggaggaggatcgagcagaaagttgctatctgctgtttttggatcaattgaacagacagaaacagaaggatcaatcctcgcagccatcagttttgaggacaataattttatgccattggaaagaaattttaatatcaggattctttgcattgcttaaggtagttgctctgtcttcaggacctcttcttttgaattcttttatattggttgctgagggtaacgagagtttcaaatatgagggttttgtgttggccatatcacttttctttacaaaaaacatagaatccttatcacaaaggcaatggtacttccgctgcagactcattggtgtgaaagttaggtcgttgctaactgcagccatttatagaaaacaattgaggttatccaattctgctagattgatgcact

SEQ ID NO: 35994 - DNA, 389 bp, Glycine max
  unsure (1)..(389): unsure at all n locations
acgcgtcagattttatgcatcagtgatcacaatagaaatgatgataaagctcacaattcatctgttgctcccataataattatacgaagcctaacatccgttaaaggtttaaaaagttattaacctccggaaacaatccttaactaaccttggcaaaatcaaggggtaaaataataaggcaataatgaaaacaattaagctaagggcttttagcatgtgagacccgaagggacagcgcatgaagtagtagcangtaaatcaagttctgaatgggaaaagaaacttgacttattttggcaangaaggctgaatggtcangatcccttggaagtaatgactgctaaggagaagatagatgctgcagcaatggaagtantggattcatatgt

SEQ ID NO: 35995 - DNA, 294 bp, Glycine max
acgcgtcagtgttattcttactagagttgattcttttccagtagctttactggctgttccttttggcgttaagaatgaaaatctgagttctaacgccactaaccctaagctgacgcgacctcttgagaactgttagagtcccaaataactgggtgaagagtgtccttttgcatttgtgaactaatgtgtaataatttattcacttaaattaaagcgcattactatgtgcaatgagtgtgtttaaatattaaaaaaaaagcaacaagaggacacccgggaggctgctctacaagg

SEQ ID NO: 35996 - DNA, 410 bp, Glycine max
gacgacgcgtcagagcagacgcaccacatgtccacgtttgattcgcagagtgagaagcacatgcggtataccgataccaggattgatgaacaggagaggaggatttcgatcaaggcggttcccatgtcgctcgtgctggaggatagcaattccaagtcctatttgtgtaacatcatggacacgcctggccatgttaacttctccgacgagatgaccgcggcgttgcggctcgctgatggcgctgtcttgattgtagatgctgctgaaggagtcatggtaaacacagagagagcgatacgtcacgcaattcaggagcggttgccgattgttgttgtaattaataaggttgacaggcttataactgagcttaagttgccaccgaaggatgcttatcataaactaaggcatac

SEQ ID NO: 35997 - DNA, 399 bp, Glycine max
  unsure (1)..(399): unsure at all n locations
acgcgtcagcccacgcgtccgcccacgcgtccgcccacgcgtccgcactttccttgcagattcttttccaaggaaaaatttgggagttttgggggaaaaattaaaagtttaattaaaaaacggaaaggttaagttgaaccggaataaaaggataatcttgttgcttcaactctgtcagtcaagtggtccgagggcgttcttcatgttactccgggcaaaggcaagagcagtcagtcctcagtcaagtatggccatagcctagttaaagggaaagcaaaccatccgatggangactaccacgtagcaaaatttgtgcagttcaaagggcgagagcttgggctttttgctatatatgatggacacctgngtgacagtgtaccagcctatttacaaaagcat

SEQ ID NO: 35998 - DNA, 301 bp, Glycine max
acgcgtcaaattcacctcactcaaactcgggattacagaaaccaacaacagttcctgccacgaaggttcacggaagttgccggaaactgcacttgggttgtttgggttaaccttggttctgcaacttccttctcacaccaagtgcaaaatcaaaagcaattcgccacctcccaacacctccaagcccaaagccccgtcgtcccttcattggccaacttcacctcttaaaagataaacttctccactaagcaatcatcgatccccccaaagagcatggccccctacttcccgcccctccttc

SEQ ID NO: 35999 - DNA, 412 bp, Glycine max
cgcgtcaacccaaacgtccgattttcagacgaacaatggcaggtaagggttcgacgtgcttcctcctcgagtttgctcattctcgccatcctccgtttcaaattgccgctgaggaatcatccgaaaaagaattcgtgctcacaatggattactccaactttcacgaaaatgttcagaagccacgatttcatcgccctcgagttctaagccccaaggggttgccactggtataaaccttccacccgagtatgacaaaaccggctccaacctgaattatcaagattcccccggttgttttgccaaaatttgaggcaaataagggaatgatcaatgacgtgcatctcaatatgatgttaggggatacccaacaattaagattctgagaaatgggggacagaatgttcaggaatac

SEQ ID NO: 36000 - DNA, 430 bp, Glycine max
agcccacgcgtccgcacaaagttgggacgtggcttgtacaaaagcacaagacggctttgctcgaagctctggaaaaggtcaaggctgagttgatgattttaggtttcatttcactgcttttaactttcgggcagagttacattgtcagaatatgtattcctgaaaagctcgcagacattatgttaccatgtccgtataaggaagccaaaaaggcatcagatagtgaagaggaacatcgtaggaaacttttgtcctatgagcgtagatatttagctgctgatactgcctcgttcaaatgcagcagggagggacatgagccacttttatctgtcaatggattgcaccagttacacatcctcatattcttcttagcagtcattcatgtgttttacagtgctatcacaatgatgcttggaagactaaagatacg

SEQ ID NO: 36001 - DNA, 411 bp, Glycine max
aggcgtgctcagcggcagcggcactgtcaccaacgtcacgctccggcagccggcctcgccgggagcagttgtgacccttcatggaagatttgagattttgtccctgtccggttcttttctgccgccgccggccccacctgcggcgtcaggactagccatatatctggctggcggacagggacaggtagtaggtggaagtgtggtgggaccccttgtggcctcaggtcccgttgtcatcatggctgcttcatttggtaatgctgcttatgagagactgcccttagaggaagaggaaactccggtggcagttgctggcaacggaggattaggatccccaggaatcccaggaacccagcaacaaccgtaacagcaacagtacagagcattttgatgcatgtaagttggacaaat

SEQ ID NO: 36002 - DNA, 356 bp, Glycine max
agattgttgtgactcgtacttcttcgtcgttatcctcatcctttgtcgtttgtgtgtatgttctttctctcagctgaaaatgtcttgctgcggtggtaactgtggttacagaagcgcctgcaagtgcggcaacggttgcagaggctgcacgatgtcaccatacgtgagctacatcgagtcaaccaccaccgataccttggtcatgggagtggcatcagtcaaggctcaattcgagagtgctgaatagggtgttcacgctgagactcatggctgcatatgtggagctcactgcacctgcaactcctgcacttgcaagtgacgtgttggagatctaaagcttcatgtatcgatggccc

SEQ ID NO: 36003 - DNA, 293 bp, Glycine max
gttacctagtcgtggccccagagcatcccttgttgtcatcattggtttccattgcccagagcaaacatgtagaggattatgtagaccttgcctcaaggaagagtgaccttgagaggactgaacttcagaaggaaaagactggggtctttactggctgttatgcaaaaaatccagcaaacggggaagccattccaatatgggtggcagattatgttttggggagttatggaacacgagctatcatggctgtgcctgcacatgattcacgtgattatgaatttgccttgaagtat

SEQ ID NO: 36004 - DNA, 277 bp, Glycine max
cgttgccattctcatcctcttctttctctctctaccattgccatggatccctacaagcaccggccatccagcgccttcaattctcccttctgggacacaaattccggtgctcctaattggaacaacaactcctccttaaccgttggggccagaagtccaattctgctggaagattatcaacctgtggagaagcctgcaaattttgatagggaacgtttcccaaaacgtgttgttcaaggcaagggggctagttcaaaaggtttccttgaagtcaccc

SEQ ID NO: 36005 - DNA, 339 bp, Glycine max
agctcaagctttcagaaaaagaaagagccagattgcttctgctgttgaggatgctttagaagttgcagaatttaaggggtatagcctacgcactcgagattcgttgtcctgctggtgccctgactcaattggttttaaccttattgaacatgtgctttgccacattgttaagaatgaaacgccaggtgctgttttggtttttatgactggttgggatgatataaactctttgaaggatcaacttcaagttcatcctttgttgggtgatcatagccaagtagtgattcttgcatgccatggctccatggccagctctgagcagaggttgatatttgaaaa

SEQ ID NO: 36006 - DNA, 407 bp, Glycine max
cgtttttctgacactgcattctcttcccctttcaaagatttaaccttatttgctcgcagatatgcgcggttactgattcgtcgatggtatctgtcgaaaaaattcacatcgaaagggaacgaacacggaaacgccctcgtctcgcgtgggacgtagctcctccctccgcgtctgaggtaagcttccttcaattccctaattcatattaaattacggtttcttcttttcatagctttttcatcgtttattgtacgcacaacgggctctgccggtgcccggtgatgaaggtttcgaaagaaagcatgtttcgcctccgaaaatggacgacgatcgagagggccattatgtcttcaatcttggcgaaaatctcactcctagatataaaatcctcagcaagatgggtgaag

SEQ ID NO: 36007 - DNA, 434 bp, Glycine max
attctccggtcgatctatgcatccacgttttttatttctcacataactcctcttttcctcacctcaatctcacttttttttgtggttttctcttttgggtcttcagcttttcaagtgaagtcccaaagatcaaaatttcaggtttctggaagctaattaattattggcaatgagcaacctcaagctaggtgtggaagttgtgggtgctcatgaccttatgcccaaagatggacagggctcatgtagtacttatgtggaacttcactttgatggttggaaatttcggactacaactaaagagaaagatctgaatcctgtttggaatgagaaattttacttcaatgttactgattcaagcaaattgccgaatctcactcttgatgcctgtatctaccattatagcaagagaaataatttcaaaattttcccggggt

SEQ ID NO: 36008 - DNA, 395 bp, Glycine max
  unsure (1)..(395): unsure at all n locations
ccaacgcgtccgaaatgtaggttccttaaggagctggatttgcaggaaaatgaagttgatgaccacagaggccagtggctaagctgctttcctgattgctgtacatcacttgtttctcttaattttgcttgccttaaaggacagattaatctgggggctcttgagagacttgtggcgagatctcctaaccttaaaagcttaaggttaaatcataccgtgcccctcaatgcactccaaaggatattgaggcgagcacctcaaatagtggacttgggtattgggtcatttatccctgatccaaattcaaatgtcttcattaagctaatgaacaccattatagagtgcaagtcaataaccagtttgtcanggttttttgaggttactcctcgatgcct

SEQ ID NO: 36009 - DNA, 347 bp, Glycine max
aatcgtttgaagtgacatgtttcaatttttaaaggagagaaagaatattatgaaagacagtttgctactctaaaatcatttgaagaagttgactccatagtaatatcggactgcactgatgtagaagacattggaaaacaagctgaacatgaacgggcaatgaagatttctaattatgcaaatgcagttttattggcattgaagatttatgtgactataaggagtggatcaatagctgttgcagcatcaacattggattctcttcttgacttcatggctggtggcatactttgctttacccaccttgcaatgaaggatataaatatgtacaaatacccaattggaaa

SEQ ID NO: 36010 - DNA, 335 bp, Glycine max
acgcgtacggatgatcatgtcatatcagagcacttttgaccgtcatggatatcaatggactagttgagcagaacgttcaatctagaagccctgtatctactatttcaggccagatggcatctcttgaagtggactccattgagaagcttgcaatggaactgtggtaacagcctgagaaatctggttctaaagtttcaacagttctgcatagatcagtaaagctccgtcacatgatttaaacgcttcatgcatcggtttcgatgtagaacaagttgtatgaggaagagcagttccttcagttcacgcagacccattcgtcacaaacacttgcagct

SEQ ID NO: 36011 - DNA, 404 bp, Glycine max
tcgacccaagcgtacgggagttttggtgttgtgcgtttgtcatattgcataaacgaatttacggctgacacgacagatgagtaagctcagcctatttgaaaatttcgacacctctttaaattgtccaagaggtatgtgaaatgtgtgtaacttggacttacaaaagatggttcaagcacttccacaatacagtgaataaattgacaagctctccctccatgtagagattgcaggaaaaattaacagaatcattagggagtcatgacttcgggaacgtgggaagctagagcaagatcttgtttttggagatgcacggatgaaagatgtgatcaaatttttgactacatacgaagatacaagtcgttgaaaaaagttgcgcttgataatgattcttgcgtccatat

SEQ ID NO: 36012 - DNA, 357 bp, Glycine max
acttgagaagacatcaaaaagcagatgttgaggtttgcatgctcttccaaactttgaatttaagtatgactgtactagtatgttacctaagtcatctaaaaaaaacaaagctcattgtggatgaaagttatgctgcttaatttaatagggattgttggctttctatggtcttcctctaccacacacactggttcaaggaactacccaacccctttcatccttgcctgatggagttcaatttgaaatgcacaccttgccggttgatgcaaaggcagtagcagatggagacactataactgtgtatgttagcacaacagaccccagggaatcagcatttgtccctggaaatgtgcatgc

SEQ ID NO: 36013 - DNA, 382 bp, Glycine max
cgacgtaagcgtatagatgattatgctctggatttgatttcctctcaaattgcagaagcacgagattcagagccgccgccatcaacggcaaggaccgctcctcctcgtccctcttagccgccgccaaggactcccgctccgcctccgtcaccgcccctatctccaagaattccaacgcttccgacgaggaatctgaaacagacagcgaggagtctgatgttagtggctccgacggagatgacacatcgtggatctcgtggttctgcaatttgagaggaaatgaattcttctgcgaggttgatgacgattacatccaggacgacttcaacctgtgtggattgagcagtcaagtgccttactatgattatgctctggatttgat

SEQ ID NO: 36014 - DNA, 426 bp, Glycine max
  unsure (1)..(426): unsure at all n locations
acccacgcatcagcggacgcgtgggcggacgcgtgggcggacgcgtgggcaaggagctggggttttatttgcagcttatagattaatagagaagatagttcttctactctactgtggagatattcctgaaagatactcagccatagcatcaaaatcccgtgagtgctttgggttctttcgacgtgggtcaaggttgcttggttggtggtcaatagatgaaggaagtagagaggaagaagctagacttttttgtgctgggagtcctgggtataatactttcacccctgatacggtgaagaaaatgcctagggcagatctggttgaggagatttggagactacaagctgcattgggcgagcagacacaagttacaaaatttagccaggatgagtatganagacttcaaaatgagaagatcttatgcag

SEQ ID NO: 36015 - DNA, 419 bp, Glycine max
gacccacgagtcagcagtgaaagacgtggtgtcgaaattgacgccgcttttgacgaataacaagcttttggattcggtcgctgctggtaccaaattgaaagatcttcaggaatgggctgggaacgacagatttataagagtgatgcctaataccccagcagctgttggccaggcagcatctggtattatatataacttcttcgttttttttactttttaagagcatattgtgtttagttcctcagttactttcaatacacagcagaatgtgagaatggatgctgcgtgaattagttgtttaacttggtagttccgtaattgactctctgaattcaaaattgtcagttatgttgatgatgaatgatgctattttatatgatggaagttgcacatgatttgctataagagtccatgttttg

SEQ ID NO: 36016 - DNA, 403 bp, Glycine max
atcagttccttgccttctacaaattctaatgcaattcaagaaccagttgctagagacattcatgggacctcagctaagttggaagagccgaaggaatccgagtgcaaagttcagactgatctggagctagattctgcaaagggttccgaaattgaacttgcaaattcggggaaacctatagatttattggaagaggaagatgcatgcccaatctgtttagaagaatatgatgcagagaatccaaaactcgcaacaaattgtgaccatcattttcaccttgcatgcattctggaatggatggaaagaagtgaaacttgccctgtgtgcgatcaggatttggttttcgaccctcccattgaataatacatcaacataggagttcaaatatactgtgtagtgtttg

SEQ ID NO: 36017 - DNA, 396 bp, Glycine max
acgcggacgcgtgggcggacgcgtgggtaaattctgtagctgttgctccaaatgatagtttagtatgtagtggttctcaggatcgtacagcttgtgtttggagacttccagatctagtatctgtagttgtatttaaaggtcataaaagaggaatttggtcagtagaattttctcctgttgatcaatgtgtagtaacagcatctggtgataagacaataaggatatgggctatatctgatggctcctgtttgaagacatttgaaggacacacttcaagtgtgttaagagcattgtttgttactcgtggaacacaaattgtttcttgtggtgctgatggcttagtaaagctgtggactgtaaaaactaatgaatgtgttgctacttatgattatcatg

SEQ ID NO: 36018 - DNA, 384 bp, Glycine max
aacgaacccttgggggttgtcctcaatttccgggaccaggtaaaaaacaattttaaaaacctgtcaaaaaaaggttcaagaggaattttgccaaacatgaattcaatttacattcaagaaaaactggttcctgtcatccgcggcctgatcacttcattggagagtgtttcacatggtagtagtaattggagagatgaaacttccttgtcttttcaagtggatctgtctccgtcaccaagtaatttgaatggacaaattgaaggtgctagttcaacaaaagccccgttattgggaaaatctaacaagccagataagaagaaagtaaaagatcatgtgattgctatgagagacgttgagttggaggagcatcggaaatctacagat

SEQ ID NO: 36019 - DNA, 307 bp, Glycine max
gttttctttcgcttgttcgtttgtttaattcaataaaggaaattaggcatgaccctcttgttgagtatgctctgcctatttgaaaatttccacacctcttttaattgtcgtaatgatgtgtgaagtgtgtgttattttaaaaaaaaaaaacaaaaaaaaaaaaaaaaaaaaagaaaaagaaaagggcggcagatcaaaaagagttaaaactaaggtaagcatgcatacgaaatcaaaaatcttcgatagtgtaaactagtctcaattgacaggcattcgttttacaccgatcttgattgggaaaaac

SEQ ID NO: 36020 - DNA, 406 bp, Glycine max
  unsure (1)..(406): unsure at all n locations
aatcagattacataaaagatttatcctgaaaattttcagatgcttgctaattattattggggttaaacatctgcagtggattaccttcatggattctgaaggacgagtcacagattcagaagctttgagaaaaagagtattttatggtggacttgaccacaaattacgaaatgaggtatggggtttgcttttgggatattatccatatgaatcgacatatgctgagagagaattcctgaagtcagttaagaagtcagaatatgtgaacataaagaaccagtggcagagtatatcctcagcacaggctaaaagattcacaaaattcaaggaaaggaaagggcttattgagaaagatgtggcgatgataatccanatgtaaatgttctgcgagatatcctgttgacat

SEQ ID NO: 36021 - DNA, 420 bp, Glycine max
aacccacgcgtccgcccacgcgtccgcccacgcgtccgcccacgcgtccgcggacgcgtggggttgttggaaaaggccaaaaactatgttgcggagaaagtcaccaacatgcccaagccagaggcgagtgtcaccgacgtggacttcaagcgcgtgagccgcgacagcgtcgagtacttggccaaggtctccgttcagaacccttattccacttccattcccatttgtgagatcaagtactccctcaaaagtgctggcagtggtgaagggagatagcagcaggaacaatacctgacccagggtcattgaaggcaagtgacacaacaatgttggatgtgccagtgaaggtgcctcatagcatattactgagcttggcaaaggacattggtgcagattgggacattgattaccaattggata

SEQ ID NO: 36022 - DNA, 381 bp, Glycine max
cgacccacgagtacgcagctatacttgttccttttgaaggttagaagtgctacaatacaaacaatggcagctactcaggaagatgtgaagcttttgggtattgtgggaagcccatttgtgtgcagggtccagattgcccttaagttgaagggagttgaatacaaatttttggaagaaaatttgggcaacaagagtgatctgcttctcaaatacaaccctgttcacaagaaggttccagtgtttgttcacaatgagaagcccatagcagagtctcttgtgactgttgaatacattgatgagacatggaagaacaaccccatcttatcttctgatccttaccatagagccttggcccgtttctggtccaaattccatgatgat

SEQ ID NO: 36023 - DNA, 320 bp, Glycine max
gaaataaccgggaagccacacaaaggtaaagatgtaaccgaaaggtttgaagaagccccaacaaagttttaaggccttgtgcctaagcaagcacaatttcctaacaacacaacaaactcaagtggctgatctattaattccattgagagagttaacccacacagatgctaatgttgcataccacttgtgggtactggtatttccaattgtctgggttacattgaataaagacgaacaagtaacacttgctaaaccaatgattaatcctttgtccaaagaattacataagaggcagcaagccaacagaccaaatgttgtgc

SEQ ID NO: 36024 - DNA, 328 bp, Glycine max
cgactcaagcgtcagataatagagaggcagctaagaaatgcaggcttaagatcaaagcacatgttcaacagctaaagtcgaatacgattatgctgaatcagcttgaacaagagctacaacgtgctaaaactcagggcatgttgttgggtgtatgcacacttttgggtggagagcaaggcgttccggtcataactactactaggattacagatgcagcagtgttttaagtccaatcatcgtgacagatcttttagcaacacatcctaggattggcacggaggctagagatcttcgtcgtgcctccagttcacgctcttagcactgtttg

SEQ ID NO: 36025 - DNA, 389 bp, Glycine max
agaaaaaaaaaaacacaaaaaaaaaaaaaaaaaaaaaaacaaaaaaaaaaaaaaatacaaagtaaaaaaatcaaaacaaaaaaacaagctacaaatgcaacacaagtttgaaatcacaaaacaatgcataaaaaaaagggggggccccccaaaaggttccaaccttacttccccttgcatgcaatttcaaaccccttcaaaagtgtccccaattttcatttcacgggccttcgttttaaaccttcttaactggaaaacccctggctttccccactttaacccccttgcagcaaatccccctttctccatctggcttaaaaccaaaaaggccccccccgatgccctttcccaacatttgcacaccctgattggcaaatggaaccccccct

SEQ ID NO: 36026 - DNA, 293 bp, Glycine max
gcgtcagtctcaatctcaatctattattattattcctcaattaataatgggtgttttcatattcaatgatgattacatatcccctgtggtccatgcaaatcttgacaaggttttagttacatatctcgacaacatcttcccgatggcacatgattccttcaagagtgttgacaatgtttacggaaatagtggcacaggatacatcacgaatatcactttccttgaggatagataattcaagtttgtgctgcatagaatagaaagcattgatgacgctaacttgggatacattt

SEQ ID NO: 36027 - DNA, 403 bp, Glycine max
gacccaagcgtcagcccacgcgtccggatggtgatattgaaaagaagtcgagagctattgacgaagagaaggcgaaagaggaagaggacgcggatgccgaaatgcagctcaacatcaaccaagagtctgatgagttcagattgcctaccaaagaggagcttgatgaggaggctctccgcccacctgatctttccaatctccagaggagaaccaaagagattgttcgtgttctttcaaattttaaagctttgaggcaagatgggtcaacgagaaaagagtatgttgaacagcttaagaaagatttatgtactctactctagagtttctattatctagtttcaatcttgtcttgtaaaagaaaaaaatgaagaaaaaagaataaattaaatgggaaataataagg

SEQ ID NO: 36028 - DNA, 426 bp, Glycine max
gacccaagcgtcagcccacgcgtccgcccacgcgtccgcccacgcgtccgcaagattcttgcaggtcgaaggagatatatgggtcacaaaagaacaattagaccaaatgcaaagaagcttagcacgatattggcaggaaggcatcaaatggactgggatacctttgccaaaaaggttaagtcatgccagagaggattcatgggagagccagatgagatgagacctggtcgaggtgaatttcatgaatttccaagttcttgcgtgtgcaagagaccatatgtggatgaagaactcagcaaagaggtatatcgttccccaaaactcgttgcaattaaccttactgcaaaagcttattcctcctcgaatggaattagaagaggcaggacatgaagttaacttgaaccatgaggttatccggaagggggg

SEQ ID NO: 36029 - DNA, 337 bp, Glycine max
  unsure (1)..(337): unsure at all n locations
agatttgaacgctatcttgtgggagaaatcctaactgttggtgctgaggctggagaactaaaggctggaacaaaggtactagtttaactaccgtgaaggaggtgaaatagaaatggaaaaatgacaaagagtactattcactgacatgaatgcttatgaggtggatttggggactgatgcaaaacactgcttctgtaaagcaagtgacttattggccgttgtggagtaaggttttggccattgaacgagacanaaagggagcaatcttttttgtgatatctttgataagtgtatttttagtagaataaaccattttttttcattggtgttaaaaatt

SEQ ID NO: 36030 - DNA, 403 bp, Glycine max
  unsure (1)..(403): unsure at all n locations
aattctaaggccgaccgacgcgtcaacccacgagtccgcttctattaacaagagacctattaatctttctctttccaaccctacgttcacagtcagaatgcactgctgaagaagcttacaagtggagccagggacgtgccatttttgcaagtgggagtccatttccccctgttgagtacgagggcaaagtgtttgtgcctggccaggccaataatgcatacatattccctggatttggtctcggtttaataatgtctgggaccattcgagtgcatgatgacctgcttctggctgcctctgaggctttgggcggcacaagtgagccaagaaaacttttgataaggactcatatacccaccatttcacancatcagaaagatttcagcacacatagctgccaatg

SEQ ID NO: 36031 - DNA, 389 bp, Glycine max
aggcaccttgcagaatcaattttctctctcaatcgtctttcatggctcgtaccaagcaaaccgctcgcaaatccaccggtgggaaggctcctaggaagcaactcgccaccaaggctgcaagaaaatctgcacctaccaccggtggagtcaagaagcctcatcgctatcgtcctggaactgttgctcttcgtgagatccgaaaataccaaaagagcacagagcttctgatccgcaagctcccctttcagcgtcttgttcgtgaaatcgcgcaagacttcaaggtaagttctaaattcaaaaacaaggttttaaatattggttgcggtcctgttgtggtttcattgagaacgttgatattgcagcaaatcactgacattttttgttgatat

SEQ ID NO: 36032 - DNA, 402 bp, Glycine max
aggatgcttatagaattggtgaatttccctattggtttcaccagacttggacaacaagcttacagctatgtatctcattagttatactttttcgtgctgttggatgggcaacaattgcctccttggtggtgatagtaatcactgtgctttgcaatactccacttgcgaagttgcagcacaagtttcaaagcaagcttatggtgacacaagatgagagattgaaggcttgttctgaggctcttgtgaatatgaaggtgttgaagctgtatgcgtgggaaaccaattttagaagttctatagagcgattaaggaatgaggagctcaaatggttgtctgcagtgcaattaagaaaggcatacaacacctttctcttttggtcctcccctgtcttggtctctgctg

SEQ ID NO: 36033 - DNA, 434 bp, Glycine max
gaccaacgcgtcagcccacgcgtccggagaattgttcctctcttctcttccattcgtgtacgcgcaaaagaatcatgacgagttcctctgctgccgctcgcaagaatctgagtaagattgcctgcaataggctccagaaagagctcgtggagtggcaggtcaatccccccactggtttcaagcacaaagtcacagacaatctccagaggtaccagattcttctcaatccacaccctaaatattatcgatttcgtgcttccattattcctttacattcctttgctttgtttctctctggaaggtgggtggttgaagtcactggagctcctgggacactttacgctaatgagacgtaccagcttcaggttgattttcctgagaattacccactggaggctcctcaggtgatattcttgcatccggctccgctgcat

SEQ ID NO: 36034 - DNA, 450 bp, Glycine max
aattctagggctcgacgacgcgtcagcccacgagtccgcccacgcgtccgcccacgcgtccgcaaggaagaaattagtcctcaaagtaactattgtgattccaccaacacacaatggccttgttatccaggacaaagttacaaaggcagaggaccaattcaactctcatggaactacaactatgggccagcagggaaggctttgggatttgatgggttgagaaacccggatgtggtgtcaaacaattcattgattgcctttcaaacaggtctctggttttggatgacagagcaaaagcccaaaccttcttgccacaatgtaatggttggaaaatatgtgccaacacaagctgacatagcagctaatcgaactaaagggtatggcctagtgactaacataatcaatggtggacttgaatgtggaattcctgatgattcaagggtgaatgat

SEQ ID NO: 36035 - DNA, 440 bp, Glycine max
tcccgactcgaccaacgcgtcagcccacgcgtccgcccacgcgtccgctctgatcagaattggagtttcacctcagtaatctgcataataaagatgtggtgtattcgaggattacatagattaccaaggtgaatctctaattttgattagagaacaacaccaactatatcaaggttttgttcttttccagttgaggttaccaatactcttgtatgattgtctttgtatgaatgaagatggatgatattggcattgctgttacactgacaatggtttgaatggattttatgcaggcaagccctttgtgaatgtcttgaaggaagctggtgtgcttcctggcatcaaggttgacaagggcacagtcgagcttgctggaactaatggagagaccaccactcagggtctagatggccttggtcagcgttgtgccaagtactacg

SEQ ID NO: 36036 - DNA, 321 bp, Glycine max
aggtccgtcgccatcatcgattcccatcggccttagccagtctaaggtttcggttcacgacgctatcgtacacatagcgagacgatggatttacgatcaaggccgagtcatcaggttggtcgaacctttcgtcttagtgcatcacgttatatgtctgacatagacgatcagatgcctactgccatcgatccatttgcagatgcaaatgccgatcactcgggtactgggtcacacgactatgtgcatattcatgtacagctgcgctgtggtaggatgagcctgacaaccgttcacggattgacataagaagtcagctcttat

SEQ ID NO: 36037 - DNA, 387 bp, Glycine max
  unsure (1)..(387): unsure at all n locations
aggggacctcaaagataagtgtaggattggatcagggcctcagaatgagtggtatttcttcagccataaggacaagaaatacccaacaggaaccagaacaaatcgagcaactacagctggtttttggaaagcaactggaagagacaagtccatataccacactaattccaagaggattggcatgaggaaaaccctagttttctacactggtcgtgctcctcatggccagaagactgattggatcatgcatgagtatcgccttgatgaagatgatgctgatgttcaagaagatgggtgggtggtatgcanggtcttcaaaaagaaaaaccaaagccgaggtttccaacaagaacttgaagaagaagagcacttaaccacccacatgag

SEQ ID NO: 36038 - DNA, 353 bp, Glycine max
acgcgtcagcggacgcgtccgcccacgcgtccgcccacgcgtccgaaaaaaaaaaaaaaaaaaaaaaaaaaaaaaaaaaaaagaaaaaaaaaaaaaaaagaaaaaacaaaaaataaaattaaataaaaaatagggaggtcgttcataaggttagctcttatacttattcatgaatgtaatgtttaatacttttatatagtgtaacctggggttcatttccctggtgattcctctttgaagttcgtgaccgggaatttgttgggctttactaaacattaacgtccttgcagatcacccggctttcgttttcagccttcttagtggagaagcctacgcgttttgccctttcaaac

SEQ ID NO: 36039 - DNA, 123 bp, Glycine max
gcgtccgccatactcaacctcctactgagggatggggccccacttcttgccaacgtgtaaccataccttgcttatgcaaatgatcaaagcagtcctcgtgactatgctcggtttaaccaacaa

SEQ ID NO: 36040 - DNA, 389 bp, Glycine max
acgcgtcaaccgacgcgtccgcatttcccgacgaccaatcggagggaaggggctcgacgtgctgcatcttcgtgacagcaccttcacgccgacgaccttctgagatggccgcggacgaatcagcggtcaaacaatgcgtgtccacgcacgatcatgcccacctacacgactctgtgcaggtgcactatctcaaccgcggctagttccatgcaccaaggattggccacggaacgaagcatgtccccgagtaggtgaaatcagccacgaccatgagtagacacgattcaccagttgtgatggtgaaaagcaagtccaatgcggagaccaactaatagactgcgtcaccatacgatgccaggggaatggccccagatctgattctgcgacat

SEQ ID NO: 36041 - DNA, 294 bp, Glycine max
cacgcgtcagccaattgatgctccgcctctcctcgctcgtctccaacgccaccctccaacagggcttcttcctcagtaacatctccctcggaaaccccgatgaggtcaagggactcttcctctgccgcggtgaagtcaccccctccgtctgtcacgactgcgtcgccgccgcggcaaccaatatcacagacctctgcaccatcccaacagattccgtgatccggtatgaccagtgtatgttgcgctactccaagctttccttcctcaataacatagtccctggagttcacttga

SEQ ID NO: 36042 - DNA, 385 bp, Glycine max
  unsure (1)..(385): unsure at all n locations
aggaaatgcatatgctaatagcacaggtttcaggggcggcagagatatgcatgggtgcctgttgtttggtacttctaatgatcctccgaagttgatttttactactggtgggaagcagcttaataggaatctgagtatatatcaggcaattcagagacagcttgtgctagattaagatgatgatgagagatttgctggcagtgactatgtatctggtgatggaagcagtctgtgaggtgatatttacaccatcacttatcagagggcagataaccagccagataaggcgtctactggaggatcaagttcaaatacgtcatcatctgccaaatctgggtcggccttanattcaagctcagaagctaaattgcatcagacatctgtt

SEQ ID NO: 36043 - DNA, 291 bp, Glycine max
cacgcgtcaagcaacgcgtccgcccacgcgtccgataaaatcgaagtcccttaggtcttcatcttctgttctgatccatgtatggcttcataacgcatcttgaacgatctcaaggatttgcaaaacgatcctcctacctcatgctgtgcaggccctatggctgaggacatgtctcactggcaagccacaatcatgggacctgctgatcacccataatcatgtggtgtattcctagtttcaattcattttcctcctgatcatcccttcaagccaaccaaagttgcttttccg

SEQ ID NO: 36044 - DNA, 435 bp, Glycine max
cgggccgacccacgcgtcaggtgtattataaatttaagagtgcaagagattatgattcaattcccatggacggtcctttcatctctgttggtacattgaaagaaaaaatatttgaatccaagcatttaaggaggggtactgatttcgaccttgtggtcaccaacgcccagaccaatgaagaatatcttgatgaagaaatgttgattcctaaaaatacctcagtgttaattcgtcgggttccatgaaggccacgtttaccaattgttactgaaatagaacataaggtggaaaataaggtggtggaatctgaacctgaaaatggaagcctaccagctgaagatacatctgccatgaaatatcctgaagattcagattgggatgaatttggcaatgatttgtattcaattcctgatcaagtgcctgttcaatcaagca

SEQ ID NO: 36045 - DNA, 372 bp, Glycine max
acccacgcatcagcccctttttacgttgcagtcatcgagcgctacaacttttcaaatgtattgcacagattttgggtatactccattgataagcctcatattcaatgcagcaattttaatcgacgaattgacattcgtatcactggatacgattatacatccggtgtgtgacaatttcaagggtttttatacgtgcctagtgtgcacaagctgggtgtgcaaccaatacgtgtttggtggactatcttctgcctcaatctctcagactagggtctatggtggttctctctctcattaccaatcacctagtctggacccaatcatctacaatatgtggatccggtttaacatgatccatgatgtcggtgccaa

SEQ ID NO: 36046 - DNA, 420 bp, Glycine max
gcacgcgtcaacacgagcaggagactgggcttttcaaacatgtagcttcctttttggcaagttcttgcagcagacaagcatcaggtgatggagacacattacctttcattgctgcaagtgtttgttgccaaggagcagaaattttaggggggaaacctagctcatcagggtattgctgtcgagagacatgtatgaaatgctggaaagccgaagatgacaagccaataacaatggtttcggggactgtggtaaatggtaacactgagcaaggggttgatgtgttgattccttcatcatctgggaaattatgttgcatttgctctaaaagtaagtacataagggtgcacccagctagcactgatgtgctaacagtgcttctgctgtccttaccatctacaacatgggctggcatcacagatg

SEQ ID NO: 36047 - DNA, 405 bp, Glycine max
  unsure (1)..(405): unsure at all n locations
cccacgcgtcagcagtttaactcagttaaccaagttgaacccttaaacaaaaatttaacaaaaggtaaacttcaattccaaatgaacaacaacaaaagcaaccccaacccaaatggaataataaaataataaaagtgaagccgaaatttccggttgaaacccaacaagcttttaacttgaataaaggtaattcagaggctttcaacttaaaaagaaaaaatgcacggaaatgttgctgcaacttgcccggtggtgctgctggtgcatcatcccttttgtttgtttactctcttgactatgcncgttaccgtcttgcaaaatgatgcaaagctgcaaaaaagggtggagagagacattcaatggtctcgttgatgtctacangaagacattggcatctgatggtgt

SEQ ID NO: 36048 - DNA, 359 bp, Glycine max
cgtcaggccagccttcctcgcccgcgttagctctgtccatttccgtgctgcctggttggttgcatgtgccagtgagcaactggcctgtatgtacgactgttgactcgaactggcataggatgatggttacactaaagatcgaccagtcgagcactgtgtacatccggcttcatccttgggagcctggaacctggaatgcctgcccctctatcttacgatacgaatgttgtgatagattcgcttatgatgggatgagcactaacctggtgctttaatcctagaaccggctgattcagcatagtgctactgcttccatgaatgtcgctaattggagtcgaacgtgctctatcacaccattg

SEQ ID NO: 36049 - DNA, 412 bp, Glycine max
agccaacgcgtccgaaagcataaaggaagtagtgagcaatggagggtttgatgtcatcattggcacagatgtgacatatattcctgatgctatattgccattgtttgcaactgctaaagaactgattgctcccagtggaaacaaggaagatgataatgttcctgcacttattctttgccacatctttcgccgagtagacgaaccaaccttactttcggctgcagcccatttcgggtttagattagtggacaagtggcctgctggaacttcaactaatttgtctcatagaattattggcaattggtttgttgacaatgatttaaaggatgatcttcctagtacagcattaaacatcttgctcttctgcaaggagtgatattgaacaacttgattcttctcttcattactatta

SEQ ID NO: 36050 - DNA, 427 bp, Glycine max
agcggacgcgtgggcggacgcgtgggcggacgcgtgggcggacgcgtgggttctcttcctccctggaagaaaaagaagagtcaccgctacgacgccgttcgtgcttttttgaggtgccacagtcatgtttgggcgtggtggaccaaggaggagtgacaactccaaatattatgatattctcggggtttccaaaaatgccagtgaagatgaaatcaagaaggcctatagaaaggctgctatgaagaaccatccagataagggaggagatcctgaaaagttcaaggagttaggtcaagcatatgaagttttaagtgatcctgagaagaaagacctgtatgaccagtatggtgaagatgcccttaaagaacgaatggggggaggaggctcgtttcataatccatttgatatatttgaatcattttttggg

SEQ ID NO: 36051 - DNA, 410 bp, Glycine max
agatttgatccaaattttgacgaaaaagaatctctgcttcaagataagcttcaaaatgcagttgattttcagaccgagtgtcctcagacatctaaaactggtcagtctccaattacacccaattccaatgaagaacaatttagcagtgtcaatgagttagcaaatatatgtcagaagcaaaagcgtcaactagagaagggttctaattttactagtcctaaaaaatcaaggaatgatgaacaaggcatggctgttgctctctgtgagatggcagctgtagtttcaactgtgtctgcaaaaaagatcgatacctcaatatcaatagagaatgtcatagaagcagtgcaagcattgcctgatatggatgatgagctggttttggatgcttgcgatttcttggaggatgaaag

SEQ ID NO: 36052 - DNA, 409 bp, Glycine max
agcccacgcgtccggcttacgttttggcccatcccgaatacaacaaaccctcttcacattacatgtcatcacatttcatgcatggatacatatccaatcactctgttctcaacgtacattgccttccaatgtatctaatctttcctgtctacgatccatatcccagattggtgtgagacttaggagatatctgtatctcacatcagtactaatcacatttgctaaacatgaacactcattgcattgaagggtctgatatggaatttgccgcttacaacttgctttgtgtcataatgcattcaaataataacagagatcttgtatcatcaatggcaaggttatctcacgaagcaaagaacgatgaagctgtaaaagatgcccttgccgttcgtgctgctgtaacttcagg

SEQ ID NO: 36053 - DNA, 415 bp, Glycine max
aggtctgattgcagatgtttgatatagtgctagctccaactcccaatcatctgcattcacttcttcacaatacacctatcactaatccaacgattaacatcatcgaatgttttatctaaggtaagctgcacaatctctgcctcactgccgtttgcgcatctatcaccgccagctcgcaacggttgtcatcgtgtcagagacacacgatcacagtcgcggtgcgtatggaaacctcgacatacagaggatctccactcttccatatgtatatgataagcactcacagtacatcatcaactgagtgtcaatcacacgagtaataccatcattagcagttactccactaatcacagtgcacaatgttcctacggatgaagggacacaatagcagtagatatgcttcatgccatcggag

SEQ ID NO: 36054 - DNA, 404 bp, Glycine max
  unsure (1)..(404): unsure at all n locations
aaccaacgcgtccgcccacgcgtccgcgtccttccacgtggccttgcaaacagggcacaccaagcttccatgcttgcgtacatgcgctgcgatgcacgggaaatgaaacgcgtgaccgcattccgctgtgtatatcgccgtaccctgtcctgtcttcacgctgttcaagcaaattccacagctactctgctcaaccataacaaatcacaatcattgaatactccatacatgggaatcttaaaaagatgaaagaagcatgacataccctgaatttgaagctgttcttgaagagggagagcttgagangggagcgtggagaagttggatttgagactgatggtgatttcgttgctctgggggtgttcttgctttgaactctgggactatcacttaatgtaactgtt

SEQ ID NO: 36055 - DNA, 422 bp, Glycine max
agcccacgcgtccgcccacgcgtccgcccacgcgtccgcatattcttcttcttcttgttcttgttctatctgtgacgagcatcatggcctcgagagcagtgctattgttggctatgtgtgtgcttccggccatggttgtggccattcgcccagcaaagaaccctttttgcgtgaagggtcgcgtctactgtgacccttgccgtgctggttttgagacctcagcaaccacctacattgccggtgctgagattatgttgcaatgcaagagcagggttagcaacgaggttgtgtacaccaagaaggggtacactgactcaactggagcatacacaatgtacgtggacgaggatcacgcagattaaatatgcagtgccaagcttgtaagcagccctcaccctcaatgcaaggaagtcaccccgggc

SEQ ID NO: 36056 - DNA, 245 bp, Glycine max
tacggtcttaattccggggccaccacgcgtccaacagccgagtacctcaccctcgtcgcttccaagcccgacgagtacgagaagctcggctcctaagccctcatcgggctccccggcaactaagccacacgtttcaactaacccggcgagatctaaacccagtatgccatcgtcatccgcggtggggaatttggttttggggctcctcgcgcgagcacgcccgtgtcgcgctgggcgcctcgggc

SEQ ID NO: 36057 - DNA, 375 bp, Glycine max
aacaaagtggtccaattgctataggcgtgaatgcacttttcatgcaaacatacattggcggtgtctcacgctctctcatatgtaccaagatcaggatgaaacacggtgtgtaacgtgtaggatatggtgcaaaaggcttctcaattcatacgcttggcaggaaaacacactggatcatcaagaattcgtggggggagaaatggggagaagatggctattacagactctgcagatggcatggcaagtgtggtacaaacaccatggtttctgctgcaagggtgacgcatccacacttaacacctacatagaattatgcatcttattaactatgcacttaaggacatctatttcaataatttgcactctaggtgatgt

SEQ ID NO: 36058 - DNA, 440 bp, Glycine max
aacaagcgtccgcccaagcctccgcgaaaattccgttgagaacaataacaatgggcttcaaagaattccaattcgaagatgaaaatcgtacatggcaatgctggttacatacttgaagacgttcctcacttcgccgactatattccaaatcttcctacatatccgaatccgcttcgatccaatcctgcttactcggttgttaagcagtatttcgtgcacatggacgacactgttcctcagaagggcctcggcaaaaggtatactttaaatcggatgaagtgcatgcatgcattgtcacgtgtggtggactctgccctggcctcaacactgtcataagggaaattgtctgtggtctttcctacatgtatggtgttaacaaagtccttggcatagatggtggttatagacgcttttattccaaaaacaccattactttaaca

SEQ ID NO: 36059 - DNA, 428 bp, Glycine max
  unsure (1)..(428): unsure at all n locations
agcgaccatctcatccacgtcaccgccgtcgatatctccgtcgcagacctcctctccccgtcgtcgtcgtcgtcgtcgtccgatgtccctccaatcgtcaaacagctcttcgccttcgaccacggtatgagttacaccgctcagtccacgccaatcatggccttccaggtcaacgacctcgccgacggcatcttcctcggctgcgccgtcagtcatgccgtcaccgacggcgcctccttctggaacttcttcaacaccttcgccggaatctcaatacgagccacgaactctcnctccatcctcccggattttcgtcgcgaatccatcatcaactccaatgtcgtgctccgcctgccacaagaaatgcaagtgacctttaatgtagacgaggcttttcgcgagagaatcttcagcttcagccgctaatc

SEQ ID NO: 36060 - DNA, 372 bp, Glycine max
aagcaatcggagggtaagatttctacgacgtgagcaaagtggatagccttcaacttcccaatttcgttaccccgcaagggtggaattgttgattgcatggcacaagtttgcgcgaaaacattaactctgtgtagcctgcagatcttcacgtcatcaggtccgatggcaacgtcatcacttgcaataatgcttgcgatgcttgtacaggtaatagattctgctgcactggacctatcaataccgcacagacatgtcaacctaagatcgactcgcatattttccaggatcactgtccccatgcggattcctacgcttacgatgatttgagcaacactttcagatgcttcaacaagcctgaatatacgatcacat

SEQ ID NO: 36061 - DNA, 427 bp, Glycine max
actcatctgttttgacacagcacaagaaacagagtgaacacagaaccatcgccatgcttgatccaagaacacagcacaccaccaagtcttttgaattgtacgacgcagcaccacacagacctcacacatgggaagctacgaacagttccggtttgtggccctcgaaagcagctttcgacgaggtacaggttgatgattccggactatgtcacctccatgtggacaacgagccctgcacgccgcaagaacaacctccgtagcctctcgccgacgtcgatgacgcaagccatagtgagtgggcagacggagctcatggagatggtgaagaacatgccagagtccaactacgagctctctttgaaggacctcgtggagcaccacagggttgttgatgctactagacatgagacaaatgtggtggaagaga

SEQ ID NO: 36062 - DNA, 374 bp, Glycine max
tccatacctcgcgcctgccgctaatggggcgccttccatgtcaggaaccatggcgtacccccttcactcatcacctcccgccgccgcgccggcctcaccatcttctcggacactcacattcctgacaagctctgggactcctgctcggcctccgctcacgaaggttactgaagcaaaatgctcgcatcaactatctccgatgaaaacgatgccgttcaggtcctcgattgaaaggactacttcgaccaccatacgctgctactctcacgccggaactctaacaggtggccggagtttcataccgactatcgtgagctggtggcgacgtataacgactagatgacgattctggcgcaaaagttgctggctttgat

SEQ ID NO: 36063 - DNA, 425 bp, Glycine max
cacgcgtccacaacgcgtccgcccacgcgtccggcaaattaaagtggttcacgaaccttagcataggctctccttgggtgctcttcaaacatgggaaaacagagcataccccaattctctgccctcaactgcatcgatctctccaaccccgagatcaatcaatccgtcaacttactcaaagaggcatgtttggattccggttttttctacgttgtcagtcatggaatacggcaggaattcatggacgaggtttttgcgcagagcaataagttcttctctcgtcctcacaacgagaagatgaagacgctcaggaatgaacaacacaggggatacacccctgttcttgatgagttgcttgatgctgaaaaccaagtacatggagattacaaagaggggtattatattggtgttgaggaaggtgaaga

SEQ ID NO: 36064 - DNA, 428 bp, Glycine max
actaaatgtttcaactatgaaggagaatgtggcggttcggcttttcactgacattgatcctaactatgaccctctgcagtatgagtatcctgtgaagacaaattttccgcagtttgtgttccatcagagcgggacggggacaggttgtgagtgtgcggacaggtgtgttgaggggtgcttttgtgccatgaagaatggatgggattttccttagaatcagagtgggattctcttgagagggaagcctttggtttttgagtgtggcccattttgtcgttgtcctcctcactgtcggaatcgtgtcacgcagaaggggttgaaaaatacgttggaagtgttcagatctacggaaactggttcgggagttaagtccatggaccttattcaagctggtgcttttatatgcgagtacacatgggttgttctga

SEQ ID NO: 36065 - DNA, 433 bp, Glycine max
atccgaaacatctttccctccccttctgcttcaaaaagcttcgcttcgcggacttcttccttctccgctgctcatgcactcttcggatagaccgttccgctactggagcgaccgcgggtagtccacctcatctgctcactatcagatcctagagtacagtggtcgctggtgtcatcgaagggcttgatgggaagatcgctatcatggacaatgaaaatcgttacactggaaacttgacaagtcatctaaagcctggtggcggcgattttggaaacttctacaggcttccttctgtcaatgatttgagaattgacatgttaccatgatccatcagaattctccttgaatctgctattcgtacttgtgacaattttcatgtcaaatgcagaagattttgataagatactcgattgtgaaaataattctacgaagc

SEQ ID NO: 36066 - DNA, 215 bp, Glycine max
taaaaaatggtacacttgctatgggcgtgaatgcaattttcatgcagacatacattggtggtgtctcatgcactgtgatatgtagcaagaaaaggctgaaccatggtgtgttacttgtgagatatggtggaaaaggattctgaatagaagagatggtgggcaagccatgatggagcatgaggaattcgtggggggagaaatggggagaagatggc

SEQ ID NO: 36067 - DNA, 106 bp, Glycine max
cccacgcgtccgggacatcatatggaaaagataaagaagctgccaagatggagttggtataagcccttaaattgttgtatgaacatgttggagacaagactgattt

SEQ ID NO: 36068 - DNA, 408 bp, Glycine max
tgaagaaatctgcatactttttggtattaaagttggacacttctgacattaggcaaatgtctgagctgatttgttgctcacattccctgctgcagatttgagaattgagatcttccttctcttgattcctaatgttgtaaaattgtgaaataaagatactgggttataaggtgtgagaatttagatcatttgctttaatttgatttgtttattttcccaggtaacgtctccttatggaaataaccttcaccacaatgaaaatgccacgcaaggtcaatttgcatttacaacagcggagagtgggaactatgtggcatgcttttggatggatggttaacatcaagaagaagcaactggtagccttgactggaaaacaggaatttatgccaatgattgggagtctgttgc

SEQ ID NO: 36069 - DNA, 410 bp, Glycine max
aacacgccttcgcacaattttgattgtgatttaatggatttaattcactacgaaagtgcattgtacctatgaataacatccataattgatgccacaatttgattgtgagttaatggatttggttctcttatttgatacttcaggagtacatgttaagggcagagtttcgtcttcccagtatagtagatgaggaagcaactcctgagagaaaagctcctatacgtgtaaaatttgagataccatattttactgtgtctgggatacaggtattgctccgtgtactgatgtacaatcttcttatattctgaatattgttatgcctgtatgcatctctatcttattaaaagatgaatatgtcatgtattttatatctcacatttgtcaccattgatgtctcacatgtcattttg

SEQ ID NO: 36070 - DNA, 264 bp, Glycine max
agagacacgtgatttgattgatcggtataagaggttgaacggtaggatgatcaggctattccgttcaatgatatgtgcaaatgcgacagtagactcacaacgattcaaggggaatattgaagaagttagcactgctggacatctagtgggcacagagtgctaaattacatggacagtgaggctgtcaaaactcaagccaacaactagtctgcttcacaaggagggcaaaatcatatcataagcgagtagacaagtagctttatg

SEQ ID NO: 36071 - DNA, 436 bp, Glycine max
aggagtttaaaagaggacatgaagaaaaacctttgaaatgaccgaccttggtttgatgagttacttcctcggcatagaggtaagtcagagaaatgaagggatattcatctcgcaaaagaaatacacagaaggcttacttaagaaattcaagatgtatggttgcaaacctattgctactccactcataacaaatgagaaactacagaagaatgatggagcaccagaagctgatgcatccaaataccgaagtctaattggaagcctcctatatttgacagctacacggcctgacataatgtatgctacaagtcttctatcaagattcatgcaaagcccaagtcaaatacactttggagcaggaaaaagaattttgaggtatctacaaggaacaaaagagttcggtatatggtatactaccgaaaccaactcaaaatta

SEQ ID NO: 36072 - DNA, 419 bp, Glycine max
acaggtgtatttactggtgtcttctgcttcttgcaagtagcaagtgcagagctgcaacaagcattacacattcatcgcatatctgaacaaacttcattgaaaagactgacagatttaacttatttgaagcggcaaatcgagattcctttatatgggattatgttctctcggaaattgttacagggtactgaattgggagctgaagaatgacaatttctgcaaatgggcagtcggtgtcaacgccagattagcaaaattctggatgactcggatcttgaaagcatcattgatggctacatggattttgatatggctgaattcattttgcatgaagttctggttgactctctaagctcgagtcatgatcaagagtaatgcacaaggtattcgagtattcaatgaagttgatgagaagatca

SEQ ID NO: 36073 - DNA, 258 bp, Glycine max
aacccacgcgtccgcccacgcgtccgcttccgatctctttaccttattgctcgtggcaccggtggcattaatccttgtgtctcatcctatggagcagatcagtttgatgatactgactcggctgagactgaacgcacgagttctttcttcggttggttctatttttcaatgaacattggcgctcttagtgcatcttctctattggtttggatacgcgatggtgtgggttcgggatggggctttggtattcctgctgta

SEQ ID NO: 36074 - DNA, 425 bp, Glycine max
aaaaagccctgtatgattctgtgacggagcaatataatgtgctgaaatctgcaatacatggcaaaaaaggatttgaagcatcaactccagtagtttctttgtcacagtcatggaagtagatgaaatctgcatttcttcattgcaatttgctctgatgcaggctccaactgctatgttccctttcagaagcaagttacaagacttcagtcaaacaatttcaactgattcacttctgagggactgcctattactacaccggtcaccgaatgatttagcttgttggaagtttgcagtcaaatacatatttttcatttcatttttccttttgctcttggttgccgttatcagcattcaattcatctggaatctgtttcagttcagaatgttcaaattctgctgcttactgtacaggtctctcttagttc

SEQ ID NO: 36075 - DNA, 173 bp, Glycine max
cgcccacgcgtccgttcaaaccgacaaaaaaacttgttacgatggtttcttccgacaaggagccaggagaggaagtccttcaagcatggtacatggatgatagtgattaagatcaaagactcccccaccacatagaacccaatgagtttgtctcgttggaccaacttgctgaa

SEQ ID NO: 36076 - DNA, 209 bp, Glycine max
cccgcctccacccacgcgtccgattgtttaaacctaattctcattttttcatcgttcgattcttctcctcctaaagaggcagatcttcgtgaaaactttgaccggtaagaccatcacccttgaggtggagtcctccgacaccatcgataacgtgaaagctaagattcatgacaaggaatggatcccaccttaccagcagagacttatct

SEQ ID NO: 36077 - DNA, 388 bp, Glycine max
caatggattctcactaatgatggaacacgacagagaaaggaaaatagcacttgttgcggctggtgcagcagctggtatttcttcaggcttcaatgctccagttgctggttgtttctttgctattgaaactgtgctgaggcctcttcgtgcagagaactcacccccatttacaactgccatgattatattggcttctgttatctcgtcaactgtatctaatgttttacaggggacccaatcagcttttacaatacccgagtatgatttgaaatctgctgctgagctacctttatacctgatattgggaatgctatgtggtgttataagtgttgccctgactcgtttggttgcttgggtcaacaaattacttaagattattcaagataag

SEQ ID NO: 36078 - DNA, 417 bp, Glycine max
gtggtctccaactgatccaattaacgctctttttgctcctgagatcggacgccgtcggcagcctgacaacgtctatctggttcaaatccccagcaaaatggaactcaggcagataaacctcttcagtgtcactgactgcaatatgtactggcaaatcaatggagactacctggctgttaatgtacagaggtacacgaaaacgaagcataccacatacacacgcttcgagcttttccgtataaacgaacaggatatacccattgaagttttcgaacttgagaataagaatgataagatcattgcattagcttgggatccaaagggccacaggtttgcacctattcatggtgataaccctaaacctgaactgaacatttactccatgcatactggtcagaacatccgactatcaaaact

SEQ ID NO: 36079 - DNA, 381 bp, Glycine max
gtcctggattgggtctttgctgatggtccacctaagaaggcagttgtctatgataagaatcgtaaacaagattgccatgccattgtccctggggctatacctgatgaacagtattgggttgaggaagagcagctgatatacagaaaatttcaggaggagaggaggttaagagaggatgcgatacgtgcaaaggctgaaaaaacagcacaaatgaaagctgaaacaaaggaaagaactttgaaaggatttttgctttctcaaaagcatattgtattcactgaccctctcgatgttcaagcaaggagtacagtgacaatattttataacccgtccaacacaaatcttaatggaaaacctgatgtttggtatatatgtacattt

SEQ ID NO: 36080 - DNA, 400 bp, Glycine max
gacccacgcgtcccaaaaatcccacttcctttttcttctttttatgatccttgtgattaggctcattagaagcttgcatatataaagcaggcggtacaatcctaccttattggcaataacgccattgctaaggagctaagtattaatgggcaactgcacaacatgcatatgaaatcagctcatggaaaagctcaagaatctatttaccgccagaggaatcccgttgctccagagaatggaagagggcaccagagaatgatagacctacacggtctgcacgtaagtgaagcgattcacgtgctgaaacacgaactgagtgtgctaagaagcacggccagaaccgctgagcagcttttgcaggtttacatctgtgttggcacttgtcaccatactcggggct

SEQ ID NO: 36081 - DNA, 350 bp, Glycine max
ggaaatattgttggctgcatcttattctttatatgcttctcacgctgtgtattggagctggattttctggtctggggcgttctctgtcttctgttgtgacaagagttgcatcaatttttgtatttgcatcattctcttcccttctaagcattgccagggtgcctgcacttaagaaagaaatcaaggttcgtttcattattggagttgatggacctaagcatgttcggttggaatatatgacagaaaagcattctcttcaagatcgagttgaaatgttgtgagcttgacaacatgtacaagtctcatctgttctaatatatgggcacatcattcttaaacatttccttaac

SEQ ID NO: 36082 - DNA, 177 bp, Glycine max
atcctgagggacgtgctactcacataatcatcctcaatgctgctaacattctccccttcaacacaccaatcaccaaaataccatactactatacaatgatatttgacaagttcttccctcataactcatccattccttatgttcctagattaccaaatgtcacatgtaacacatcca

SEQ ID NO: 36083 - DNA, 284 bp, Glycine max
ctcacgcgtccggagaaaccaagtttgtactgcacaagatagaagcagttgatgagggaaagttgggatatagctacggcgtagtgggtggtgctgcatttccatacacatctgtgaagatcacatttcactccaaattggctgctggtcccaatggaagctctgctggtcaactcactgttgaattccaaaccaaatgagatgcttaatccaaccaagaccaactcataactggaaaagccaaagctgatggctctttcaaggccattgaagcttaccttttg

SEQ ID NO: 36084 - DNA, 308 bp, Glycine max
ctgacacgaaatgcttcattaccattatgattgacatatcataaagtcgtatattcagcatgtatgaccaaatcattggccctgttggctctgctactgtttacaaagcactcggtgctgatgccaataacatgatcgacatagctgttgattcctttaagagtgttgaaaacattgcaggaaattggggacctggaacaaataggacaataactttcggggatgatggaaaaaccaaatatgtactgcacaagatataagcaggtgataatgcaaacttgggatatagctacaacgtagtgggtgga

SEQ ID NO: 36085 - DNA, 336 bp, Glycine max
tactcttcttctcttgctgctagggttctagcgcaacttcttctacatttaaggacgatgggtaaggaaacaggttcacatcaatattgtggttattgcccctgttgactctgggatagctcactaccactggccacctgctctacatgcttggacgcattgacaagcgtgccattgacagatctgataaggatgctgctcagatgcacaatacggcttatgagtatgcctgggtgcttgatcagctcatagcttagcgtgaaagacgaatcacaattgatcttgccctgtggaagtttgaaaccactcagtactattgcacagacattgatgccc

SEQ ID NO: 36086 - DNA, 364 bp, Glycine max
  unsure (1)..(364): unsure at all n locations
atgtgctcatgtattttttgagaggaagtctcgcatggcaaggcttgagagctggcaccaaaaagcaaaaatatgacaagataagtgagaagaagatgcttactccaatagaggtcttatgcaagtcatatccattggaattcacatcatacttccactactgccgatcattgcggtttgaagataagcctgattattcttatcttaagagactctttcgggacctatttatccgagaaggttagcttcatatatatatatatatatatatgtngcttaatgagtcatgaaattctattaggcttgtaaaatcttgcttttacaggttatcagtttgattatgtatttgattggactatgctga

SEQ ID NO: 36087 - DNA, 400 bp, Glycine max
aaacaaacaaaacagccaccgtcatactcaagaagaagaagaagaagaaagtggttggagaggttggtggcaaacatggggatgcgcgacctcgtttcgggcgctgcggcatgtggcgactcttcttcttcttcctccgcaaaccctctcgcttccctcgccaacgcccttattggctcttcctccaaaactccggaaaggttgaaggagattcccacatccactcccactgaccctacatcccaattttactccacagctcttcccgccaatcagcttcccggcaccgaactctatgagcctctattgaatgccaactctcatgcttcggaatttttgcataagttccctggcaccaccggccttgatgagacgtgggatgagatacaacctgatgggg

SEQ ID NO: 36088 - DNA, 214 bp, Glycine max
cgagcgtgggctcactgtcaaatacttatcaaaaggagatgctgagcccaaccagagacggaactcaaaactggaaaagccaaggctgatgctctcttcaaagccattgatgcttaacctttagcccatcccgattacaactaatcctctacaacttacttgtcatcactttcttgcttggagacttatccaatcactctgttctcaacttaag

SEQ ID NO: 36089 - DNA, 192 bp, Glycine max
cccacgcgtccggggagtacaggaagaagcacaagcatgtgtccatgagggccttgagggagtggtccaagcatatcttggaagggctgaattacttgcatttgcatgatccttgtatcatccacagagacctcaactgcagtaatgtgttggtgaatggtaatactgaccaggttaagattggtgacttgg

SEQ ID NO: 36090 - DNA, 381 bp, Glycine max
gtcctccgtctccgtggtggcatgcagatcttcgttaagacactcaccggcaagagggtaaccctagaggttgaaagctccgacaccatcgataacgtcaaggccaagatccaggacaaggagggtatccccccggaccagcaacgtctcatcttcgccggaaagcagctcgaggacggccgcaccctcgccgactacaacatccagaaggaatcaacccttcacctcgtcctccgtctccgtggtggcatgcagatcgtcgttaagacgcttagcggcaggactattaccctagaagtcggaagctgcgacgccatcgacgaagtgaaggctgagattcaagacaaggagggaatccggggagccagcagaggctgatct

SEQ ID NO: 36091 - DNA, 386 bp, Glycine max
agagcagccgtggcatgttgtctctgctacatgtatgaaaaacaatacaagaatgccaaaaattgaggcttcactgaataatactgatttacattttactcctaagaagaaagatcaggaggaattctatttttcagatagtcattttatggattgtgatatttccaatttcttggtctctgaacaaggtaaaatgacatcatctgatctagaatcacatttgatgggagcagagaaaactgggccttggtggcgcactgctggaaaagatgagttggcttccttagttgctcggaagtcacttgagcatattgtgaattgtgatctccctcatccccagactaagcatgttagtcccaaaccccccttccccgaagggggttgac

SEQ ID NO: 36092 - DNA, 419 bp, Glycine max
cccacgcgtccgtccacgcgtccgccaaagcctctgatggttgcgaggatattgtttttaatcccaatgttttcactgaattcaaacttgctgggagtccagaggaaatagcagctgatgaagataatgttagaaaagttagtcaatatcttactgatgtggtacttccaaagtttatacaagacttgtgtacacttgaagtttcaccaatggatggccagacattaactgaagcattgcatgctcatggaattaatgttcgctatattggcaaagtggctggagggactaaacatctacctcatctgtgggatctttgtaataatgaaattgttggcagatctgctaagcatattatcaaggacttattgagagagacagaggaccacgatcttgcaccagcactatctcatttctta

SEQ ID NO: 36093 - DNA, 183 bp, Glycine max
gtctaaggggtgccctgagatcacatttaacaatggtgaaggctgtggccgttcttggcagcagagagggttgtaactggaactattcacttcgttcaggagggatgatgaacaaccaccgacatctggaatctaatgctggagctataactggtcttgaatggattgataaaatgtcttgag

SEQ ID NO: 36094 - DNA, 430 bp, Glycine max
cttccggttatgaccggtgtgaaccaaactccggggaaaagtccctggtccagttggaagactttgcaaatcacaatgcttttgagttacttgctaaatatgggacaactcatctcgttttcaatgacgatatacaggggactgcatctgttgttctagctggagttgtagcagccctaaaactcattggtggtacattgcctgagcacacattcctcttccttggtgctggagaagcaggaactggtatagccgagctaatagctcttgagatgtcaaagcaggtgatcaagccaacagttttgattggatcatcaggagtgggaagaacatttacaaaggaagtagttgaggctatgacttcaaacaatgataaacctctcattctggctctctccaatcctacctcacagtctgagtgtacagctga

SEQ ID NO: 36095 - DNA, 435 bp, Glycine max
cccacgcgtccgcccacgcgtccgcccacgcgtccgccccagcagcgtgtgctttcttcgttcgtctcttacatcaggtacattaattaagataatactacttctgaagtgctgttgaggttatggagcgccagggtcatgattatgcaactgcatctgctatggcatatgctcagcaacaacgacaagctgctaatatgcaacaacagcagcagtttggatttcatccccagcatcagcagtttccttcgtcaatgcacggttctccttttatccccccaggtcctggtcctgcacacccccctatgcaacaattcccttatcatcctgccctgcagcagcagcaacagccacttccacaattacaccctcatgcccctcccccgcctcatcttctacttcagcagcagcagcagcagcaccaaggaccacctg

SEQ ID NO: 36096 - DNA, 429 bp, Glycine max
cccacgcgtccgatctaaacttccttgttattcaccatattcagttctcaaatgctattcacagggatgacttggtaagtggtgctggctctaatgctgtagccgttctggctgatgggctcgtagatggactacttgacggaagctccacggacaaggtatccagaatttatctagaaacactgtctttgaacttagctcatggctgcacaagagaaatacaaagctgagatgtcccatgtcatcctgggcaaacattggtgatctgatgaagaattgcacaactgctggagaagacattatactttgctggtgttgctatcgcaatcatggtatgcatcgtcaatggaccaggggagatggctgacgcagactatggctatgctggaggcactctcagtgagattgacctttatgttgggaagactg

SEQ ID NO: 36097 - DNA, 402 bp, Glycine max
gtcttccatttgtgtgtcatacacttgttgcgaagcctgttcagctgtcatataacaagtctttaatcctgatcataccatgtcatacccacaatgtacgaaacaagggctcactgtttaacacattatctgctattacagcgatctcagtttgaccttggattgcccttcttccactatgagcttgttgcttcgcaatgctaagcccctatttgactgtatatgagactcaatcgactactctttcaattactaccattcattccattactatcattgtacttaaatgactccaacaccaagtacagttttcacgacagcactggtcaaacatggatactatatgctacctacgctcatgaaggacgcaccagcactcttgctaagatagcttctaatgca

SEQ ID NO: 36098 - DNA, 291 bp, Glycine max
  unsure (1)..(291): unsure at all n locations
acgaccacgcgtccggtgtatgtccctacctctcccttcaagatgcagatcttcgtcaagaccctcaccggcaagaccatcacccttgaggtggaaagctctgacaccatcaacaccgtcagggccagaatccaggccagggaaggattcccccggacccaccaccgcttaatttcgcccgaaagccacttgaggaccggcgtacccttgctgactaccacattcagaaggagagtactcttcacctcgtcctncgtcttccggggtggcatgcagatcttcgttaagaca

SEQ ID NO: 36099 - DNA, 402 bp, Glycine max
tcccgatcaatcacaaaaattagttaacttatcggaccttttacttcgcttcaaagaaaaatactcagaataagggcaaaaagaaaaaaaaaaaaaaacgtaaaaagaggtgcaacacgaggacttcccaggaggtcacccatcctagtactactctcgcccaagcacgcttaactgcggagttctgatgggatccggtgcattagtgctggtatgatcgcacctgataagtattgcacaatcaatactatattctttgctgccgacggccgattttcatcgacttttacaccgaacgagccacggtgcccacgatacatttatctcccgatcaatcacaaaaattaattaacttatcggaccttttacttcgcttcaaagaaaaatactcagaataagggc

SEQ ID NO: 36100 - DNA, 384 bp, Glycine max
atcaatcgtgcgattcataacaggcgatgatacattcaacgatgaaatgaactccgctgcggcttatgatactctatacacagacctagttaccgatgccgacaacgttatccaaaacgctcttgatagccttcaacagtgttgaaaacgctgagcgaaatactgtcccaaaaaccactaacaagatcactgtacttgccgatggagaaacccacatagtgctgcgcataatagaaagcatcgatgaggccaacttcggatacagctacagcactgttagcggcagctgcattggcaaacacgacgtttaacatcacattggactccaaaccgaatgctggtcccaatggaaggcctactgggaagctcaatgtcaaatgcgac

SEQ ID NO: 36101 - DNA, 391 bp, Glycine max
cccacgcgtccgcccacgcgtccgcccacgcgtccgcccacgcgtccgcccacgcgtccggcttgagcaaggtgatcaaaaggaatgcaagaaacttctagaagatgggaagagtacactcgacagcatgacagatattgatccatctgtatatgctagctattactgggtatcatctcagtttcataagacatgccaagaatttgctgagttctacaaaagtgcccttctctatttggcatacacatcagtggaatctctctcagattcattcaagctggatctggcatttgatttgtccctctctgcccttcttggggataacatctacaactttggagagctacttgcccatcctataattaagagccttctggggacaaaggtggaa

SEQ ID NO: 36102 - DNA, 439 bp, Glycine max
cccacgcgtccgcccacgcgtccggctgatatgactggaaaagagattgaacgggctctactgaaggaagttatcagtaatcccagaatttttgtgtttgaacaccattttgctatagatcttctcacttgtcaggatcgatctgatatgatttgtcttggtgttgacacactgaattctaaaaccctagagcttttaggtgattagatttctttcaaaggtcactttacttgcgtcaggtggagctggacatatttatcctaaaactacaaatcctctggtagccactggagatggaattgccatggcacaccgagctcaagctgtgatttccaacatggagtttgtgcaattccattcaactggcttaactgatgaaaggcttcctattaaaccaaccaagcctcgggaaaatgcatttctgattactgaagctgtc

SEQ ID NO: 36103 - DNA, 397 bp, Glycine max
gaaggtttggaagaatcgcgatggagggtgaggaaggaggaggcataaggctgagcaagcgaatcgcaaacggagaggttgactacaagacgaaatccggcaccgcctggagccactcctatctcaaccagaagccatggcaccctctttcttaccccaaccaacgccgcaagtggatcgccgaacagacccacgccaatcgccaacgccgcaccgaagaggtttctcgcgagttcgctcaggagcaagagttctttcgccaaaccgctctcatctccaaaaaagagaaagaaaaggtccgaatcggattcttttttctttctctgcgtcttccctcgtttcatgaattttgaaattagggtttggggtaggtggagctcatgcaagctggtaagtt

SEQ ID NO: 36104 - DNA, 440 bp, Glycine max
cccacgcgtccgtgcagtgaagaagattgaagacaacaacactgtggatttgatagtcgacttgcgggctgacaagaagaagatcaaggatgcagtcaagaagatgtatgatattgagaccaagaaagtaaacaccttaatcaggtgagtctttatgtagagatgcttttagaatttgttagatgatatgatattgctaatgacaatggtatgcttgcagcgaatactattactgagacatacatgtggtgtgctttatggtttgtggcatgctggtgtgacaacgggttcatgttgcgcacagggaaactttgaaatgtggcatatgaaactcaatgttgccataacatgcaaatgagacagcaaatttgtatgagatacttgcatcgatacttacaacatatcattacttctgaatgtagattgttctgttgcacgcc

SEQ ID NO: 36105 - DNA, 226 bp, Glycine max
cgcgatataacgtataccagaccaaaatcaatctgaggagtcagaaagccatggatccctacatgaatagggcatcaagcgcgtgcaattatcactaatggactacatattacggtgctcccatatggaacaataactgatcgataactgatgaatatagaggtgcaattgtgttggacgattaccatttggagcataagcttgcaaactctgacagggaacggat

SEQ ID NO: 36106 - DNA, 443 bp, Glycine max
cccacgcgtccgtgctgttgtaacatctgctggtcaattatttacttttggtgatggtacatttggtgctttgggtcatggagacaggaaaagtgtttcattaccaagggaagtagagtctctcaagggtcttcgaacagtgcgggctgcatgtggtgtttggcatactgctgcagttgtggaagtcatggttggaaattcaagttccagcaactgctcttcggggaagctgtttacttggggtgatggagacaaaggtcgacttgggcatggtgataaggaagcaaaacttgttccaacccgtgttgcccttggtaatgttaaacccaatttttgtcaagttgctttgtgtcatagtctcactgttgcacttaccactaagggccatgtctatacaatgggtagtccagtctatggccagttaggaattccttaagctgatg

SEQ ID NO: 36107 - DNA, 441 bp, Glycine max
gtaattttaatgaatattgaaataaatttaaaaaactgaacaagctggagcagtttactcaggtgattaattctttgctcatgtatatttctgatcttcagccaaaatattagtcaaggctctattcaattgaaaaagtttttttttcttttaacaggaactgagtgatatgactgccattaaagctgaagacatattaaccactctgcagagcctagaattgattcaatacaggaaaggtcagcatgttatatgcgcagatccgaaagtgttggatcgccatcttaaagctgctggcagagggggcctggaggttgatgttagcaaactgatctggactccttataaagaacaaagttgatggtcattggtcatatccatcaaggaaatactatgataatcctttggcgtgctatagctgcagctgccagtgtaacgttt

SEQ ID NO: 36108 - DNA, 447 bp, Glycine max
cccacgcgtccgcttgtttataatgtggttattatattatttttaacccaatttttttgtgattatttgaaattgaccaacaactcaagttctattttgtcttgatccttcactcttctctcacgctcagagaatgtgtagagaaattgcagcttttgaaaacacctgaagaacgtcaacgcaggttggaggaaattccagaaatacacgtggatccaaacatggatccaagttatgagtctgaagaagatgcaaatgaagtggatgataaaagacaagaaaactacatgagaccaagagggtctactgcatttggaaggagggggagagatattgtttctcctagaagtggttctatttcaaatgattcttggagtggaacatggaattattctaatgtgaatcatgaactcggcagaaatttgtctaataagggattttcaatca

SEQ ID NO: 36109 - DNA, 437 bp, Glycine max
cccacgcgtccgctttatgaatataaaattttggtggatgcccaaaaaactaacctttttattttttgcaggttggacagcatttggattcttgtgtttttcttggagcaaacagtagctattcagctttagaggatgatcatgtctacttggaagaattagttgaaagccctcagtctaggtctttgagaggaagtgtggatgaattaccatctcagaatagtgcagttaacaactccacagaattgatcattgagcttcaggctgttggcccagagcttaccttttataacacatcaaaagatgtaggagggttattaaacctgtctaataaacttctacttgcacagttggatgcattttgcaggtgagttcctctacttaatagattaatatgttaggagggctgaacatttggcatggtattcaagtgtatc

SEQ ID NO: 36110 - DNA, 278 bp, Glycine max
catctgccccactgaatcaccacacctcttttcgatttcgctacccctttctgctctactggtaccggtcaagttttaaaggggtaaagatggcagatacaatcctatttaccttatagtcgatgaacgatggacaccctgacaagctactgcgaccaaatcttcaatgctgtactctacgcttgcctcgagcaggacccagacagcaaagttgactgcgaaacatgcaccatacccaacttgctcatggtcttcgagaaatcactactcaagccaac

SEQ ID NO: 36111 - DNA, 251 bp, Glycine max
gtgattatgttcaatggattggctgaactttccatggtcgtttcacggcttcctgttttctacaagcaaagggactatctcttcttcccttcatgggtatatgcacttcctgcatggatcctaaaaatccccttgacttttgtggaagtgggtgtttgggtattccttacctactatgccattggttttgatccatatgttggaagattgtttaggcaataccttgttcttgtactagtaaatcaaatggc

SEQ ID NO: 36112 - DNA, 427 bp, Glycine max
cacattagttcagtctctaagtgcagcttcctacctatccttacaagatgcagatcttcgccaagaccctcaccggaaagaccatcacccatgaggtggaaagctctgacaccatcgacaacgtcaaggccaagatccaggacaaggaaggaattccgccggatcagcaacgtgtcatcttctccggaaagcatctcgaggacagacgtaccctcgccgactacaacatccagacggagtcaacccttcaccttgtccttcgtctccgtggtggcatgcagaccttagtcaagactctcactggcaaaaccataaccctagaggtcgaaagctctgacaccattgacaacgtcaaggccaagatccacgacaaggagggaatccctccagaccagcaacgtcttatcttcgacggatagcaacttga

SEQ ID NO: 36113 - DNA, 390 bp, Glycine max
gaattggaaatctaggatgctatgcttatcacttgcagtgcttactgaggctctcagacgatctacgtgacacacacactgattgagcgttatccctaaaatgatgtgttgcaacatatttagtacggtgtggtgacacagattgctactgaggacagagttgacagagccaattagatctgcataccttaaacaccaacttcaacatcacctaaatgcggtggtgagattatcagattcatcatctctagtctatttgatcaaatgcttaaataccgagacgatggcctatgatctgaccatggatactacagatatcatgattgcattgaccctggaggatctttcaatagctttggcacatctgcagatgacaacactcataggaac

SEQ ID NO: 36114 - DNA, 232 bp, Glycine max
gaattttatgcaagcaagcactctgtgaatgtaaagaaggaagctggtgtgcttcctgtcataaatgttgacatgggcacagtccagctgactagaactaatggagagaccactaataaatgcctaaattggctctatcagcattgtacccattactacgaagctgttgcacattgtgccaaatggcgtgcagaagtgaagatcggtgctaactagccatatgatctgacta

SEQ ID NO: 36115 - DNA, 448 bp, Glycine max
ctcacgcgtccggtcttggtaagatcaatttggctcacgatgaagtcagatctagggtgtcaagagctttgcatgctgtaagcctgtctgactacatgaaggtattaaggatgacaaccttgagcactcatacaaatgtgtgaattatacaataaatgaactgtccttctgtgacaatattcacagatctgtccaaactctgagtggcggtcagaagcagagggatgccattgctggtgctcttgcttaagcttgtaaagttctggagtcggatgagctcacaacatacttagatgaagctgaccaggttgcggtcatcaaagctgtgaggaactcattggatacctttgcagaaggtacagcattatgattcacccatcgcttggataaactggagtatgcaaatggtgccatctacatggaggatgggaaagtaaccatgcatgga

SEQ ID NO: 36116 - DNA, 445 bp, Glycine max
cccacgcgtccggtttaattcaaagacacttattccatttgacattagaggccgtgttcgaatacttcatcctccagttatgacttgtttcccattctcatttggtaagaaagtgcgctttgtggcaacacatgatccagatattgatgaagtactctcaggcattcaaaatgtaagaatctatacctacaaagaactaaaagttgcctctgacaatttcagtccggccaataaaattgggcagggtggatttggttcagtttataagtgaaaccttaacaatattatggtggatgatcagggactgctaaaagatgggaaagtagctgccataaaagtactttcagcagaatcaagtcaaggggtaaaggaatttatgacagagattaatgtaatctcagaaatagagcatgaaaatttggtaagctatatggttgttgtgtgg

SEQ ID NO: 36117 - DNA, 369 bp, Glycine max
ggagcattggtggaccccaaatgccattacttatggtgccgtgatgcatgggctacgtagggagggaaaattgtccgaggcgtgtgatttgaccagggaaatggttgaaaaaggcttgttacctactacaggtgaaattaacctgctaatacagtctctctgtcaaaatcagaaggtagtataagctaagaagtatacagaggaatgtctgaataacgagtgtgccattaatgtagtacacttcactactgtaattcatcgcttttgtcagattggtgacatggaagctgctctatccgtgctagatgacatgtacttaagcggcaaacatgctgatgctggcacatatacggcattgattgatgcatt

SEQ ID NO: 36118 - DNA, 447 bp, Glycine max
  unsure (1)..(447): unsure at all n locations
ggatccacatcgttctcttcctctcttctgtcttcttctccttcaacattcccaaacccaaaaaggttttgattggggttaccgagcgaacaggtgttttaacagctacaaaataagtgatttatgatatgatggagtttggtgtgaatttcattcactgattcaacgattaggatcaactgtcattggtttttttgtgttgggactagaaatgtcaatgtcaggatttgaagggcaatgtagtaatgatgagattagagagaggaggtccgatgttgagaactcagaagacgagatgcggtcgttgagaattgngaacttgaataagaaggcgatgaatgcgtcatctagattcactcattctcttaagaatagaaggaaaagggaaatcgattatcgggttccgtccatgtccattgaagatgtaagagatgcgcgggaggagac

SEQ ID NO: 36119 - DNA, 128 bp, Glycine max
tcggcttacattccgggcgaaagtcataatttgcaggttcatactatggagttaataatggaaggcagcgaaagatcctaacaagccagtgtggcctccaagtgcattgttcgtttgcatggaggaat

SEQ ID NO: 36120 - DNA, 239 bp, Glycine max
gctacgcaccagtttcactgcatacacttgtgagaaaactctgcagacatgttggtttatcacgacctccttacaggtgatgagcttctatgggactgcttccgttacaatgaaattgataatgggatgctgtgggaagttgaggggaagtgtggagttaagggagcggttggcgttgacattggtgcaaaccctatctgctgaaggtgtagaagatgatggagtcgatgacgcagctg

SEQ ID NO: 36121 - DNA, 447 bp, Glycine max
atgtcttcttctcttcctcctcgtactctccgacttctccatttccgaatcacaatccccctgggctgccaagaaaaaacgcatgagagacaaagttcgcaatatcttttaccacgcatatgacaactatatgactcatgcatttccgcatgatgagcttaagcctatctctaaaactttcaccaactctctaagtgagttgggaaatttgaagcttgaacacttgcctcaagactacaacggctctgcccttacgcttattgaatcactgtctagccttgttattatgggaaattatactgaattcgagagggcagtgctctggctttcagaaaatctgacatttgatgttgatgcgcgcataaatctttttgagtgcaacataagagttcttggaggacttgtctctgctcatttacttgcatctgattcttcaaagaagttttt

SEQ ID NO: 36122 - DNA, 410 bp, Glycine max
cccacgcgtccgttgcagtgtacccaggaaatgtcttggccttgcacatgtctaaaccacaaggatttaagtactctagtggacagtatatttttctgagctacccagatgtctcgccttttcaatagtaagtgaacattggttttcttaatatttatatagcttattaccattaaaatcagggagagacgttaacaaaaaaattaatttgcttctttgtaaatttcccatttcttttagttgttaggaagtagtagatatatatcagacttgggaaaatgacatggttggaaggattgacaacagtttcacattttattgcatgttatttattatgagatttatttttattataactataaagatttatttgattaaagtttttagttttttttaaggaaaaagatttt

SEQ ID NO: 36123 - DNA, 376 bp, Glycine max
cccacgcgtgcgggatcccatggcttctcttaattggccttcttggaggtatggattgaggcattgataccggctattcaagcagagaatcaccaaggaaggtcaggaggacgtagcagaggactggatcgagaagtatagcccctgggatgtcgtgaggcatgacattttataccccatcagagtctatgctcatgttgaggttaatcctgattgaagccgaaaatgggttgtacgagaggttgcgcatgcactggcttatgaagtgccaattacaggttaccacaccaagatcaccatcagtcttggtctatcgaatgcaaaagctagtgctgaagatttcaataaatatggatataatgatgctcatcatgat

SEQ ID NO: 36124 - DNA, 319 bp, Glycine max
caatcaccaagatgactacctcacgttgttttacataggactccctatgaacaagggtgttaaacagtatcatggcagctgatccatcatgccatgcgccactatcagtcaaagcaaaagcacgcagccactcctcggaaacagctgagattccggacatggaagtaccgtagagaatttctcaataagcggcgtcaggctattaaaagacaagctgcttgcaagggcttacaagcacggaagcaatgtcgtaaaatcggatggtcagctggtgtgcttgagacagtgaaccagcgttggcttttaaagagaaaaggct

SEQ ID NO: 36125 - DNA, 404 bp, Glycine max
  unsure (1)..(404): unsure at all n locations
ctcatgatcgttgtgaagccgttgtcacaatcgcttatgatgtttaggctcgtatcagagaccctgtctatggctgtgtctctcacatttttgccttacaacaacaggtaccattatatatgttattacaaacctcatcaaaacttttaaacttttttttctctagaaataatagatcttgtcatgctcatctttaatgtttatatatcctgttagacatcaaataagtaacacattaacacctatttaatgtaggacaaaacttagatggagttctaatggtgtttttgatgttatttaatcagaattggagtttccaaaatacctaaagaattgtatgtaggttatattcttttatggttntcaataacggaagaaatagacttaaatatctaaacatttgc

SEQ ID NO: 36126 - DNA, 403 bp, Glycine max
cccacgcgtccgcccacgcgtccgcttacgcgtccgcccacgcgtccggcattaagctagttgttgaggcgatatgtgctggtatatttaatgacctaggaagtggaagtaatgttgatgtttgtgtgataaccaagggacataaggaatatctcaggaaccaccttctaccaaatcctcgtacctatgtcaatccaaaaggctttgatttccccaaaaagacagaggtcctcttaacaaagattacaccgttgaaggagaaggtggaagtgattgaaggagatgctatggaagagtaacaatcattccaaaaaaaattggtgtatgagtatgaaacttgattagtgcaatggctgtgatatttgattttgtactttcacaactttggcttttattaccaaaa

SEQ ID NO: 36127 - DNA, 398 bp, Glycine max
  unsure (1)..(398): unsure at all n locations
ccaagccttcggacctgccggacggcttagcctcgggtgcatgattcaatggaccagccttggaaaggtggttgtggggggcctattccgctgcccttttcctggtcctattcctcggcttgaagttggttttccaaagcagaaaattgagaaacataccaccaggtcctcctccttttcccataataggaaaccttaacctnctcgaacagccaatccaccgtttcttccaacgcatgtcgaaacagtacggcaacgtggtttccctctggttcggttcacgtctggccgttgtcatctnctctccaacagcataccaagaatgcttcaccaaacacgacgttgcctttgccaaccggctaccttctctctcgggaaaatacatcttctacaacaca

SEQ ID NO: 36128 - DNA, 358 bp, Glycine max
  unsure (1)..(358): unsure at all n locations
agaacatacaccttttctcgtggcccgagcactgccgtacttatttgactagggtggctgccggcangatgaggcatccacaatggcaaaccaacactccagggaatgatatagctgatgaagagtctttcaatgactcactaaaggatgttcaggacatgtcccttaggctctcaattgatgctgacttagcaggtttaagttctggacccgacatgcaagaccaagtgaagcgtctcctaagcaggatgaagaagccagattctggtggttcaaatgacactgatggtgggaataagatgcctgacaatgtaactgggaaatatcctctactgtggagaagacgtcggttgattgt

SEQ ID NO: 36129 - DNA, 357 bp, Glycine max
ctagcgtgtgccaaatatgctgtgttcggtatggattatgaagggcatggacgttctgaaggtgctcgttgttacataaaaaaatttgataacatcgttaacgattgttatgactttttcaagtcagtcagcgagctgcaagagtataaggcaaaggctagattcttgtatggagagtccatgggaggagcagtgagccttcttttacataaaaaggacccttcattctgggacggtgcagttctcgtcgcacccatgtgtaagatatcagagaaggtgaagccacacccggtggtggtcaacatattaactaaagttgaagatataatcccaaagtggaagatagttcccacaaag

SEQ ID NO: 36130 - DNA, 285 bp, Glycine max
cctgactcttgtacacatatgcacattttcgagaattaagtgcaaggtaagtgcttcaagtgactagcatgaagcgcatattacggacaaatgaacgtagacagtgctggtgaagagagtgcagatctcatcctcacggccactggacttacggtgcactcacgctatcttcgtatcaactatccattcacccattagagagcacttctgttgcactcaaagtgctatccttggaatcctgatcctgatatatataagacttggagacagagtacgactgtctat

SEQ ID NO: 36131 - DNA, 443 bp, Glycine max
cccacgcgtccgcccacgcgtccgcccacgcgtccggtcatcagattcttctgagcaggtccggtctgctttggcttcagtaataatgggaatggctccagtgttgggaaaggaagcaacaattgagcagcttcttcctattttcctttcccttttgaaggatgaatttcccgacgtgcgcctaaacattatcagcaagcttgatcaagtgaatcaggttataggaattgatctgttatctcagtctttgttaccagccattgttgagcttgctgaggataggcattggaaggtccggcttgcaattatagaatatatacccttattggcaagtcacatgggggttaagtttttcgatgacaagctttgtgctctttgcatgcaatggttacaggataagggtcaatcaattcgtgaagcagctgctaacaacttgaaacgcc

SEQ ID NO: 36132 - DNA, 425 bp, Glycine max
cacacatcgtacgaccgaattcactgcaatcctaattctgcacttcgcgagcattcgaagatggggctgatgatacatctcatcatccttactctgtcagacactactatcaccgttatcgcagagtacatatacaccattgactccggaatggccctgattcagcgacacggggactatcccaggaccagtgcacagccttatctatcttgctaagcagctctatgatggttgcagcataggcgatgctaacatacaagacggatcaaccattatatacgcacttgccattagcagtgacccactcatattgggcaacactatcaccgttatgaccgatactcacactgcagcttgataacacattattactaacgtgaggcacgatactcacaacgtttacagccttcctgatgatcatgctg

SEQ ID NO: 36133 - DNA, 348 bp, Glycine max
tcatgacttcttcaatggtgcctgcagaaaccttgtttgtactgatcttttcactaggggaatagacattcaagcagtcaatgttgttattaattttgattttccaaagaactcagaaacttatctgcacagggttggtcgttcagggaggtttggacacctaggtttagcggtgaacttgatcacctatgaggatcgcttcaatttatataggattgaacaagaacttggcactgaaataaaacaaattccaccacacattgatcaggcaatatattgccggtaactggtggtaaatacccagattgtattcacaaccgtggtgaatagcattggttgatgcgaatg

SEQ ID NO: 36134 - DNA, 380 bp, Glycine max
cgaaaaattgaggattttgttgcaagagcaaaggaaacagcatgtggcagagttattggagaaggtggaatcgaatgctcttcatttgttgagacagaaagatgaagaaatagcgcaggcaacaaagaaaagcaccgagttgaaagaatttatgacaaggctgaaggaggttgaagccgtttgcaacccaatcatcagtgctgcgtatcagagatcaggaggagccccaggtggtgcaggtggcgaaggcgaagacgaggatgattctcacgatgagctctagattagtctaaatttttatcatatatgggaaattaagaattcccatgcgctctgcgcttgctttcttggtgccgatgataagatacttgtgaaattac

SEQ ID NO: 36135 - DNA, 309 bp, Glycine max
ggatggcccttctgcttcggctggaggttgctgcagtggaagagtacctatcataacctatctgcatcaatgtagtcctttatgtcttctcttctttcattttgggtttggatatgaagatatatatgttctacgtccattcataaaatcagataattgtataatgttttctttttaatcttgactttgtttctttgaaaaacccaaactcgtgctggacacgatagcaaagaccaacatgattctctcgatatgcatctacttacgtctaaattattaccaggttcgcccactctagagttcccatgc

SEQ ID NO: 36136 - DNA, 426 bp, Glycine max
cccacgcgtccgggtgccctgtctaatctaggccatatatgctcgatgctgttggacggtaggttgtcaatgcagctgactcatctatgttcggacaagatggtagacttatctgaacttcaaaaccactatctggaaatggaaacgaaacatggaatgagaaaggatatgcagtcagaatgtctacatgtaacccttgacgaggtactatgaaaataaacgatggtgcatacctaactctaaagatgatatacagcaacaacgagtgccgcattggagtaatgaagattttctacatctaggaggctgaacaactgtcgcacgaacacctgctatgacatgatgcatgcgtactaagtgaatagatcttggaatggatccaacagactattatcttatatgatatctatatgagcaaatgaatat

SEQ ID NO: 36137 - DNA, 367 bp, Glycine max
agccgaagtaggccgagtatctcttgctgaagtgagtgaccgaggtgaagccgcagggcagggccacctctagcaccgacagggtggagtgctgcagcaggcgccgtccttcggtgatgcgcaattccaggtagtagcgcatgggcgcggtgtcgagctgctcgcgaaacagccgctcgacctggcgccgagagcggccggcgtagtcgcacagctgctcgatggtcaggggctcctcgatgttggcctccatcagggtcaccacctagcgcagcggcggcgtcatctgcaccttgagcgtctgattgacctggccgaagcgcgattcctcgaaagccaggatattgaccaggccatcggccagggc

SEQ ID NO: 36138 - DNA, 250 bp, Glycine max
cagaaaggcccaatcgaaggcaatgaaagtagcgaaaaagttgaaaaccagtgagggtggcgggctattccaacgattcgaatccggttggtgactctaatctcaacgagaagtttgtctggcgcaagaagattgagcgcgatgtttcacaaggtgtgtctattgatgcgttttcaatgaacgcagagagcaagaaacagagagacaggtttgctgaatttgaaaaagctactcagtgaagagaggaatg

SEQ ID NO: 36139 - DNA, 383 bp, Glycine max
cccacgcgtccgtccacgcgtccgcacacgcgtacggaagcatgctggaccatggcgggcatcacagctgggaacacaaagcagattcaggatgtaattgaggctagtataattgctcctttagtccatgtgcttcaaaatgctgagtttgatatcaagaaagaggctgcttgggcaatctcaaatgctacttcgggtggatctcatgaacaaatcaagttcctggtaaggcaagggtgtattaagccctggtgtgatcttcacatatgtcctgatcctaggattgcgacagtgtagctggaatggcttgagatcattttcgaagtactgaagctgagaaaaatgtgaaccatactcatggtgtgaatgtaaatgcatatact

SEQ ID NO: 36140 - DNA, 373 bp, Glycine max
cccacgcgtccgcggacgcgtgggcgccattgctattgtggaaaaacagacaggaggttcgcttatgattcgcttacttgcgtcaactgaaagtaccaaaaccctgccacacctgccctcacaacctcgccttctgttccccctacgatctccgcaatttcatcgtacccggtcacaacaacctctacctcgccgacgtcgccgattccttcgtcttatctctctctgctcatgacaacatatgcagcgtccagattgcgttgaatgtcgttcaacgccggtgtgtcaaagtttcttccggcgattccgtgcaagtgagccgatttgtgcccactgaagacttcaacctcgcactgctaactcttgatttgga

SEQ ID NO: 36141 - DNA, 429 bp, Glycine max
atgacacattactagtaaatgtgtactctcatgttacgaacacatttctcaatcaagagcatgagcactgaagtatgctcgcataacatccctaaggtgaattacatcatatggtcagagatgcagttctaattcaaacagtgatgcattgcatctaatcagatcactcagagcatgcatatcactatacaccttatacattgaaagaagctgagtggatgagcatggtgtatgatgattatttttgcactcatttgttgctatacggacaccctaatgagatattgctttgaaagcagagaatgaatcactagctatccagatatcggagaagctgcattcggaaaatatggtcgtattattgtctcaatcatattgtacactgaattatattcatgttgtgtggaattcatcaccttggaaggagac

SEQ ID NO: 36142 - DNA, 400 bp, Glycine max
tacttgcgatctctgcttgagttgcacccaatgaatacgaaaattttaacaaaaaaggatgcaagcatgctccaaatgggttatatgatagcaaatggggttacggttgttggggaggatcatgttaaggtcgcaggagcaagtcacaccaatatttcctgcccaattagaaaggattcgcaacaaaattgtactacacttcagttggcattggaactcctaggcacaactttgatttagtcattgatctttctggtgaaaacttatggtacgattgtgacactcattacaacttatgattctacagacctatagcttgtggctcaaagcaatgccctgaaattggatgtgttggttgcaatggccctttcaaactcatgtgcacaaacaatacatgccc

SEQ ID NO: 36143 - DNA, 387 bp, Glycine max
ctctgtcagaaccaaatagtacctttcacatcatcaaaactcatgctccaaatgggggggttacacctttgaattcattttttcacacatggacaagatcgacgtgcctacgttcttcgtgtgccctatttcattagagctcatgaaggaccccgtgacggtctccaccggcatcacctacgaccgcgacagcatcgagaagtggctcttcgccgaggtgaagaacgacacgtgtcccgtcacgatgcatactctccattccggacctcactccgaaccacacgctcctcaaactcatccaagcctggtgcaccttcaacgcctcctacggcgtccagagaatccccacaccaaaaccaccggtcgacaaaaccctcatcgagaaac

SEQ ID NO: 36144 - DNA, 337 bp, Glycine max
gcccgtcttcttgaacttggttacaaacaacaactcaagcgtgatctttcgtaggaggcgatttcaaatttctccctctcgtcatccgtttcatcagtgctgactggtatcaccactctatacaacactgggttgaactacagtgtccccgtctcactgcagtacgcgggactctattataggagtgccaagctagctgtccctacattggcactctatgactcctggattactggctgcatacaatatcatcaggtcagtcttcaggttcaacatgcttacatcttacactcgcacagcttatccactcttattattcatactacaacctcctgct

SEQ ID NO: 36145 - DNA, 366 bp, Glycine max
tatactagcatgggtgtatgcccacagcatgacttgctgtgggaatccctaacaggaagagagcacctactcttttacggcagacttaaaaatcttaaaggttcagccttaacacaagcagtggaagaatcgttgaaaagtgtaaacctttttaatggaggagttgctgataaacaagctggaaaatacagtggaggaatgaagaggaggcttagtgtcgcaatttcattgattggagatcctaaagttgtttatatggatgaaccaagtactggattagaccctgcatcaagaaacaacttatggaatgttgttaagcgtgcaaaacaggatcgtgcaatcattcttaccacacattccatggaa

SEQ ID NO: 36146 - DNA, 383 bp, Glycine max
aagcaattgtgattcctgaagattttctttgccctatatccttggaactaatgaggggtcctgttattgtagccactggtcagacatatgagagatcttacatacagagatggatagattgtggaaatacaacatgtccgaaaactcagcagaagctccagcatttgacccttacaccaaattatgttttaaggagccttatttctcagtggtgtatagagcacaacattgagcagccaacaggactaaccaatggaaaattaaagaaaagtgatggatcgttcagagatgttacaggtgacatagcagtaatccaaactttggtccagaagctctgctgcctaactgatcacgagcgtacagcagctggcactgatctctta

SEQ ID NO: 36147 - DNA, 429 bp, Glycine max
agaaaaagttaaccataacaaatatcccgccacgtccagaaagaagtgccgtcgggagggctgacgtgtacttgtatcatcgtttgacttgccagctttacagtgttagctgcctcctatgatgggaggagtgtcgggcggcgacgactacttcgttcaaatccaccaaccgaacaagcccggcgaccctttcatcatcaccttcaattgccccgacaaaaccggtctcgcttgcgatatctgcagaatcattctcgatttcggtctctgcatcaccaaaggaggtctctcactttcatggaattcttcgtttacagatcctattccattttattcttatcttaatttaatggaccttcttttgaatatcattcagatgtttcaaccgatggagtgtggtgttactttgtgttatgggttattccacac

SEQ ID NO: 36148 - DNA, 410 bp, Glycine max
cccacgcgtccgcccacgcgtccgcccacgcgtccgcttccctcacgaagaaggtggaggattgcccagattttgtcttttcctgttcttttatggccaaatgaaagaaagtattctctgaagtaatgaatctgtgccatgtttgaagtagttgatgattatgatatcatacatacttttggatcaattgacatgatcatcaatgcccggcttttaggttcctacaggtcttgatcactaattatctgcaaaatatattcagaaactcaatgactgcaaatacgagtatttggttcatattcagtatccatcggtcaacctatgtatgtactgctatactaccatgacttgatcaataggataggcaatcttgactcaagctatggccattaccttttactggtgcacat

SEQ ID NO: 36149 - DNA, 337 bp, Glycine max
cgacaagcaaacgaaaagtaaatcaatcaatcgttggaatctctcaacttatcgctgcttcctggtacgtccattttctcttttgtttctatgttatcttgttagggtttccttctcaattgcaattgcaattcgcacattattattgattagttttagatttgggggtttccgtttcaatggacgacggcgagctggatttctcgaaccatgaagtgttttcgagtccgaacatgggggagcttccgagcagcggttcaatggacagtttcttcgacgagcttctcaaggacacgcacgcgtgcacccacacccacacgtgcaacccttccgggcc

SEQ ID NO: 36150 - DNA, 411 bp, Glycine max
  unsure (1)..(411): unsure at all n locations
attttagtatcacatagactatccaacgtggcaaattgtcccagattgtgacacgtagagtggactttgatacaaaatttaaaaaattgtcaaatattttcttcttcacttgccatagaatcttctattttattttgtctgaaaaaaatcccatattttagttccatacagcaacaaatctggcttgaagtttttcttatttatttcctataaaatattcattgcctttctccatcatcttagccttgatatatccatgaaaaagggaagtataaatatgttgattaagagtccatccagcttttaacaatgccccaaataattcttctgcctctctcattcttccatcttcacanagaccatccagtaatgcagtgtangtgacgatatttaagttaactccaacctact

SEQ ID NO: 36151 - DNA, 415 bp, Glycine max
cccacgcgtccgaaagactccttttctctctggtcacgaaggcattactcaatcagcatcgtggaaggaaggtttagtgcaaaaacatttatctggtgaattacccattggtcgtgagtgcagctttcttcaaacagttttcaatgcaactaatgtgatggctggagtaggcattctgtctacaccttatacattgaaagaagctgggtggatgagcatggtgttgatgattctttttgcagtcatttgttgctatacggccaccctaatgagatattgctttgaaagcagagaaggaatcactagctatccagatatcggagaagctgcatttggaaaatatggtcgtattattgtctcaatcatattgtacactgaattatattcatgttgtgtggaattcatcaccttggaa

SEQ ID NO: 36152 - DNA, 410 bp, Glycine max
gccacacgtccgtggaaacgttgcgcgacgcacctacaacccgacctctgctccggcggcaccacactgtccgccaaatggctctgccacacagctcacaacgcgcccccgtcgggcgcccctgatcgacaacaccctatccacaccggcagaggccgctcactcttccgtcgccgacgacggcgacgaagatccctcggaggcggcttctgctacgagcgcccgcgtcttgccggattccctccagtacccgcccagcttcatcagcgcgattcccgcacgctcaccgtccgacggcagcggcgacgggattgatgccatgacttatgtgacgaacattctctcttcgatgtgtatgacgtgcgcgattgagtctcctatgcaattggcgccaaagctctctgcgagac

SEQ ID NO: 36153 - DNA, 371 bp, Glycine max
aaaaaacaaacaaatacataatagcaaaaaaccaaaaaagccataaacgaagaaggcagggatacaacaacacaatcacttctatgccctatgtagtacagcatctggctactggttcacagtggctctcattgacaagattggaagatttgctatccaattgatgtgattctagttcatgactgccttcatgtatgctcttgccattccttatcaccactggactcatatggataaccggataggattcgtggtgatttattcgttgaccttcttctttgcaaatttcgcacctaatgccaccacattcgtcgtgccggcagagatttttccagctagattccgatctacttgccatggaatctcatcag

SEQ ID NO: 36154 - DNA, 409 bp, Glycine max
cccacgcgtccgcttttgcattgaatttagcagacgcagagccaagtgtcgctgattctgaattgaaggatgatcttaaaccatcatatcatgtggctcttggttcagataacacatggtatctatttacagaaaagtggattaaaacggtatatgggacaggctttcctaatgttccattggctgaaggggatgctcgacctcgagaaattatgagtattctccttgataaggaggacatgaagtgggataagctttctcactccgagcatggtggtttatggttcatggaaggatctctagatacatggtcttggagcttgaatgttcctgttttgagtagcttgtcagaaaatgatgagctactactacagtctcaagactacaaagatgccattgaacgttacaa

SEQ ID NO: 36155 - DNA, 410 bp, Glycine max
  unsure (1)..(410): unsure at all n locations
ctcgctgtgggtgtcaagcttacatgcggattagcaaaacaacagaatttggagctccagaatggcgtgtgactggttttgctaaccatcacaatcatgaacttttagaaccaaaccaagttcggttcctccctgcatacagaactatctcggatgctgacaaaaaccgaatactcatgtttgccaaaacaggaatatctgttcatcaaatgatgaggcttatggagcttgagaagtgtgtggaacctggatatttgccttttactgaaaaagatgtaaggaatttactccagtcatttaggaaattagatccagaagaagaaagcttagatttattaagaatgtgcagaaatattaaggagaaagatcctaattttaaatttgagtacacacttgatgcanacaaccgt

SEQ ID NO: 36156 - DNA, 424 bp, Glycine max
cccacgcgtccgcgggtgtattcctgatgataagtttggtgggttcaaagatgtgggcaccaatgtgtcttgtgttgtttcaaggagggacatggcaacccagatgagcccacaggggatgtgcaggtagatgaacacttaccgtgacaagatggtccaagaaacatagggccttattcactggctgaggctcagaacaagtcaaaagctggaaaaaagaaaaagtaagcactcaattgtcaacttgggatgtttctgaaacgccaaaacctgccccaaaggcaaaaagtgaggaagccaaaatctctgcatgggagaacttgcaaaaggcaaaagcggaggcagcaatacggaaactagagatgaaattggaaaagaggcgagcatcctctatggattagattatgaacaagcgtatattggc

SEQ ID NO: 36157 - DNA, 406 bp, Glycine max
  unsure (1)..(406): unsure at all n locations
aaagagcgtgtacttgttcttgctgctacaaacaggccttttgatcttgatgaggctgttattaggaggcttcctcgacgattgatggttaatttgccagatgctccaaacagagaaaaaattctcagagtcattttagtgaaagaagatttggcacctgacgttgattttgaagcaatagctaatatgactgatggatattctgggagtgacctaaaggttgtatgtatatttatgtatttttcacttcctttcttggtttctggagaaggtaccatctgtttctacataaaatattctcattgttatcttttgattgcagaatctgtgtgtcacagcagctcactgtccaatacgagagatcttggagaaggaaaagaaagagagaagcttagctntgtctgag

SEQ ID NO: 36158 - DNA, 309 bp, Glycine max
gtctttgaccccagcaaacagcaagagagaaatggaagcagcatcgtccacaatgctggtactgatactaattctagctctgatatgctcacggaaggttctgtactggttatggctgagactatagatactagcataactgctcaaatagcaaggtttacgaggcatttcatacacatgcaccttgaaggactacacgtagctcacaggattatgaaatgtatacgatagctcatgaatgtgatggggactttcacaggggcatatggggtttcttgtttgaagtgattggatttgaagcattatgag

SEQ ID NO: 36159 - DNA, 421 bp, Glycine max
cccacgcgtccgaaatctgatgcccacagaatggtgaggactggtcttcaaaaagaaggatcaagagtgatttttggtgttcctaaacctgggaagaaaagaaaatttatggaagtaagcaagcattatgttgcagatgggacaagcaagatcaatgatggaactgattcagtcaagctttcaaatttcttgatacctcaaggtactggatcacgtgggtggaaaaatagttcaaaaaatgataccaaggaaaaactaggagctgactccaggcccacctttaagtctggaaagtcgcagagtgttttgggtagagtggtcccaccaaaagaaaacccattatcaaactctcgtactaatgatttgacaagtcatgcagaaaggatcaaggattcatcaagtcattttaagaatgtatctc

SEQ ID NO: 36160 - DNA, 437 bp, Glycine max
gctatcttgcccctttcagaaggaacatatatcatttgcgcgatttttgtgaaggatgtggacgtccacatggaaaagaagaattattcaattacagacagtcttcattaaggaatgtcattgaaagatgcgttggagttttgaaagcaagatttccaattttgaaattgatgccaagttatcccattagaagacaaagattaattctcattgcttgttgcactatacataattttataagaatgcaaaatggcgtggatacactctttgaccaatatgctgaacaactcgtggacatggatgagcaatggttaagtgtagagcaacaaggtgtcaacaaaaatcaagcagctaaagtggcacaagttcgacaaaccataacaaatgaaatgtgggaagattaccgtaaatcttaaaagaatttatattaaatgtta

SEQ ID NO: 36161 - DNA, 438 bp, Glycine max
cccacgcgtccgcccacgcgtccgagagtataaatcctaggttgcctccacctttgttgtcgaaagaagactggcgtgttgcacaaaggtttcatggtggtgggtcttcttcaattgagggatttggggactggaggaagaatgtagctcccaatggcgatagttcgtctctattttcaatgcagccaggattttctgtgcaacaggtagagaatgatttgatggaactgagcaaagccagtggatggaatgtctctaggcagggttcaagtcagatgctcgacagacatatgggtggtttgacaagaatgtcaggagctggtcttggtgggaggagaacgagttatactgacattcttcagcaggaaggacttgagcaacctacaatgttgtctagcaccatgtcacgtccagcgagtcacaatgcatttggtgata

SEQ ID NO: 36162 - DNA, 444 bp, Glycine max
  unsure (1)..(444): unsure at all n locations
cccacgcgtccgcccacgcgtccggaaggaaccgtctccgttaaggtcaaatttcctcaaccggcaactaaagcgcgccggagctctccgccgccgcgtacggcgaatcccgacgcctcttattcttatgctatattcgatcgcccgcgttccgcgactctcgtcgacggaattcccggtgactcaccggtggcctgtggaaaatcgcttcgttgaatattattatgaagaatctgagcaaggacaaggattgcagcaggagcaagagcagcaatggattcgttccttcttccttcaagttcatatcgtcttgcattaagaccgccttttccggcgtccgctccgccggagccttcgtcgccgncttcatctccggtgacggacacgaccgcagagaccagttcttgatgtggaagacgcctncaatgtaagggagcttgtctc

SEQ ID NO: 36163 - DNA, 366 bp, Glycine max
  unsure (1)..(366): unsure at all n locations
agaaaacctaagcttagaattagaaacaaagaaaagaagaaaggaaagaattgatcgttgaaaatgcagggaggaaagaaagcgggagagtccattaaggaaacagctacaaacattggtgcttctgccaaggctggcatggagaagaccaaggccactgtccaagagaaggcagaaagaatgacagcacgtgatccggtgcaaaaggagttggcaacccaaaagaaagaggcaaagatgaaccaggcggagctggacaagcaggcggcgcgtcagcataacacggcggccaaacagtccgncaccacggctgggcacatgggacatggccaccacaccaccggaaccgggactggaaaccgcacg

SEQ ID NO: 36164 - DNA, 446 bp, Glycine max
aaatcaggttgggcatccaatcaggcccttgctatttacattggtatgtcatttttccgcactgcagcacacaagttccacaaatttctcaaaaagaagtgccccaccgatgttgccaagtacctggtatatcttgggccgagtgatgaggccatgaggtttttgtttcctatatttgttgagttttgtttggagaattttcctgatgagatcaagaggttcaggagtatggttgagtcggctgacctcacgaagcctcacacttggtttccgtttgcgcgggcgatgaaaaggaagataatttatcattgtgggccgacgaatagtgggaagacttataatgctttgcagcggtttatggaggcgaagtccgggatttattgtagtccacttaagttgttggcgatggaaagttttgacaaggttaatgcgaaggggatttactg

SEQ ID NO: 36165 - DNA, 353 bp, Glycine max
cccacgcgtacgttcagaatttacgtacaacccatcataatcacacatgtaccagcaagtaaactgtgatccaactgaagaaggaagcctctgtgccatcatgtgatcactttgcatttctccaaaaccacagcatattgaatttcaatgattgatgctgtgggaaaatggctcgagatttaggttgacagataacactagatttattgtgaagcgatctgtgttattcacgcttaactggatctcctttaaccttattatgtgtcatgctatgttcatctttatcgtgtctgttataaggaggatgttatatcattttgtgccgactaatagtgtgaagacttataatgctt

SEQ ID NO: 36166 - DNA, 395 bp, Glycine max
gagagagagagagagagatctagtagagaggctagtaggtggtcctcgaacgaagatgttggcggtgttcagcgggcaggtggtggaggtgccggcggagctggtggcggcgggcagccggacgccgtcgcccaagacgaaggcgtcgcagctggtggggcgcttcctggccgcctccgagccggccgtgtccgtgcagctcggcgaccacggccacctcgcctactcccacaccaaccaggcgctcctccgccccaggtcgttcgcggccaaggacgaggtgttctgcctgttcgagggggtgctggacaacctgggtcgtctgagccagcagcacgggctgtcaagcaagggcgccaacgaggtgctcctcgtcatcgaggccctacagacgc

SEQ ID NO: 36167 - DNA, 430 bp, Glycine max
  unsure (1)..(430): unsure at all n locations
aaaactactgcctgcaaggatgctgaaactaagaagtatgtttcagaattgaatgctgaggaggatgatgttgatggcaatggagatgaatgtcgcttgtgtggcatggatgggaccttgctttgttgtgatggttgtcctgctgtttatcattcaaggtgtattggtgtgatgaagatgcatataccagaaggggcatggtattgtccggagtgcaaaatagatatgattgggcctactattgcacggggaacatcacttaaaggggctgaagtattcggaaaggatttgtatgggcaagttttcatgagtacttgcaaccacttactggtgtatgtttaacttcttttgtgtntcttccactccttcatttgttatgctggatgattctggctcaatgtcaacagtgatgggctttggtcttaaatac

SEQ ID NO: 36168 - DNA, 447 bp, Glycine max
caaaatccttagtttgaacaaatgataatctcccagctctcgaagttgtttatcttttgtttcatatgcattacactcatatgtttctcttcaagttctaatttcccagtgcaatactccatattaggccctaatttggacaagcttccttcacaggatgaaaccatccaactattccaactatggagaaaagagcatggactagtgtataaagacctaaaagagatggcaaagagatttgagattttcttgtccaatttgaattatatcattgagtttaatgctaaaagaagctccccttctggctaccttcttggtctaaacaattttgctgattggagccctagtgagttccaagaaatctacttacatagccttgatatgcctacagatagtgctcctaagctgaatggccctcttttatcatgtattgctcctgcatcggta

SEQ ID NO: 36169 - DNA, 261 bp, Glycine max
gtcagactggcagacgcacttcgctgcgtacctaatgaacatgaagcaaagcttcaagtggtggaggttgagaagatctccctttatgcatccagttcatccatcactgaacttcagaaacttgtacttgacccaacacttgtcgcccagatcggttcttgagatcctaatgagactgcagtgtggtcctagaattactcgacgatggttaacctgaggcatattacttgcgctcgaacttacacactccgtcattgaatc

SEQ ID NO: 36170 - DNA, 448 bp, Glycine max
gttatggatgaggctgataagcttctctcccaagagttccaaccttcaatagagcagctgattcaatctcttcctggaaaccggcaaatcctgatgtatgctgctacatttactgttactgtcaaggacttcaaagatcgatatcttcgtaagccatacatcgttaaccttatggatgagctaactctgaaaggtattacacaatatgacgcatttctggaagagaggcagaaagtccactgcctaaatacacttttctctaagctgcaaataaatcagtcgatcatcttctgcaattccgtgaatcgggttgagctactctccaagaaaatcacagaacttgggtattcatgtgtctatattcatgcatagatgttgcaagatcaccgaaatagagtgattcatgacttgtgcaatggtgcctgcagaaacctttgttgtactgatc

SEQ ID NO: 36171 - DNA, 435 bp, Glycine max
cgacggaaccgcgtccatgcggttcatgaccacgtgggccaagttggctaggaaggaaaatttggaccacgtggaaatgatgccgtgctgtgatcgaaataagttgaattcgtacaaggttgatgattcgaggtcccacgaccattcggagtttcgcactcctccgaattggttaggttcattaggaggcagagacactaatgttgtggttgcaatagtgaagctcacagatgcacaagtgaagaagctcaagcacaaggtaaattacgttaacataattaacactactagagctagtagtacttcacgaccttattcaacttttgaggttgttgctgggtatttgtggaagtgtgtgagtaaagcacgttatgaggggaaaagtgaccaacctacgaggttgtctactttggttaattgtaggaaccgaataac

SEQ ID NO: 36172 - DNA, 387 bp, Glycine max
ccgggttgaaccaagccttcggccaagccgtccgttcaaatccgactgaccgaagaaaatattagggtttttgagtgcggtgcggcaatcctagcactttcttttgcagctttcgccgacagcttaattcaccatggctgaccaaaccgagaaggcttttttgaaacaaccaaaagtgtttctaagctcgaaaaaaactgggaagggaaagagacccggaaagggtgggaaccgtttttggaaatccattgggcttggatttaagactcccagggaagccatcgaaagaacctacattgacaagaagtgccccttcactggcaatgtttccatccgtggccgtatcttggctggaacatgtcacagtgctaagatgaacaggactat

SEQ ID NO: 36173 - DNA, 179 bp, Glycine max
cttcgccgaccccttggttccggccaattacccgattctttggcccggttaactaacctcaggttccttgacctttcctttaataacctttaaggcccaatcccaagttaattttccaagttgtccaacctagtttccttacccttggaccggaataggctcacggccccaatcccgga

SEQ ID NO: 36174 - DNA, 435 bp, Glycine max
gtgccaagctcgagagtctaaaattcaaatcctagcttgggttaacttagatatgagtggtctatttttaattttccttatccttcttgttgccgatggggtccttgtccgaggaagtataaatattacagaaataagcttcgatcaaaactatgaggttacgtggggtgataatcatgttgtctccttaaaccaagggaaagaaattcagctcacaatggataactcttcaggatccggttttggatccaagatgtcatatggctctggactattccatttgaggatcaaagtaccagataggaattctgctggagttgtcacagcttactactattcttaatgtatttgatgcagttaacttcacaaggaagaagtcatgacgagttagactttgaattcttgggcaatagagaagggaagccatatagatta

SEQ ID NO: 36175 - DNA, 266 bp, Glycine max
ccgggttggaccaagccttcggccaacgcttccgggaagattgcaagaggtgttgccttcccgacatgtgtgcctgtgaacaacactgcctgccacttctatcttcttgccagtgatgaaacattgttggaagacggcgatatattgaaaattgacatggcttgtcttttacatgggttcattgttgctgtggctcacacccatgttcttcatgaggggcctgttacgggacggccagctgatgctattgcagcagcaaacaccgc

SEQ ID NO: 36176 - DNA, 421 bp, Glycine max
ccgggtcggaccaagccttccgccaagccttccgattaattgcagggcgagcaaccatttcaaatatttcatggttttgccgttggtccgattgaattctaaatttccctcaagtgacaatgctattgggagaattaaagctaagttgatctctggagggggtgatctactttcctatccaaatggcaatggcattgtgataggtaaaaatctggttggtgatgaatctgttcgaattgaagtacagccgaatagaacactggcagcagacacagggctaacaagcaatgttttctctattgacaacgatgaatttgatttggacagccccacagcaggttttgcttccatttctgaggcaattgaagacattcgccagggaaagatggtagtggttgtggacgatgaagatcgagaaaat

SEQ ID NO: 36177 - DNA, 437 bp, Glycine max
cacccccatcacatgtggttgcaattacaaatggtgatgcccgtcttcttgaacttggggacaaacaagaactcaagcgtcatttttcattaggttctctctttctcgtttaattgaattccttccttcattttgtgttcttttttggtttatcattaatttccaattctaggttcttagcttgatcagggccatttgaattttcgccctctcgttttctgttttatcagtgctgactggcatcaccaattcaccaccctctacaacactgggttgaactacggtggccccgtttcaatgcaatatgggtggtttatggctttagctttcaccatgcttgttgcactctcaatggctgaaatttgttcttcaatccaactactggaggtctctattattggagtgccaaacttgctggccctagatgggcacccttt

SEQ ID NO: 36178 - DNA, 260 bp, Glycine max
tgaagatggatttctgaaggcttttaaggttgcaaattttgaatatgttgatgaggctgaagctgcagcagaggggtcatcgccaccgagtttcaaaaagtcactgtctcatacctatgatagaacaatcacttttgcacttctaaacggcagcatcagacatatcttcagactctcaccactagacttgaggaaatgagagtcaaaaggcgttattcagaacagtggatgcaccatcgcttactcccacaagatcttaa

SEQ ID NO: 36179 - DNA, 342 bp, Glycine max
atggctcgtgggccttaaccgacagtgtcccttctaacatgactcttatggtccaggttgacaataagtagcgcatgcaattgttcctcagcaccaaaccttgcaaattgagaacccaagtgaacttggaccctacatcggctagtaccgtgaccattacagaatgctaagcatcttcaactattcattcgacgtgggtttgtactacatcacgccgcataccgtgactctagcttagatgatatggctccaacgctctgatcagacatcccgattggcttgagaggccaatatgggcatcccagttggagaaaatgccactatatcacttggtactgatgg

SEQ ID NO: 36180 - DNA, 364 bp, Glycine max
ctcttacagaattctgcacgccaagtaactgcccttcaatgactgcaggaccaaagtatgagtatcgatgggctgatggtgttactataaagaaaccaatagaggtgtctgctccaaaatatgttgagtatttgatggactggattgaatctcagctagatgatgaaacgattttccctcaaagattgggggctcccttttcaaccaatttccgagatgttgtcaagacaattttcaagcgattattccgtgtatatgctcacatttaccactcacattttcagaaaatagtgagtttgaaagaagaagcttaacttaatacttggttcaagcattttggtttatttacttgggaattcccgtt

SEQ ID NO: 36181 - DNA, 316 bp, Glycine max
taaacctaattctaatttcttcatcgttctacacttctcctactaaatatggggatcgtctttaaatcttttaccactaataccatcaccctatatgtggaatcctccgtcaccatctatcactagaacgctaacattcactacaacgaaagatatactacctgaccatcatatactaatatgtgcatctaaactgcttgaggatttcctaaccctaacctactaccacatccaaactgaatccactattcacatctagcttcttctcatacttgacatgcaaatctttgttaagactttcactgacattaccatt

SEQ ID NO: 36182 - DNA, 391 bp, Glycine max
ctctttctaaacatttggatttcaaagggattacatccgaccttgttactctgaacatcctcatcaactgtttctgccatctgggtcagatcactctttccttttctgtattggccacgattctcaaacggggttatcacccagatgtaataaccctcaccacactcatcaaaggcctctgtcttcgtggggaggttaagaaagcactgaaatttcacgatgatgtcgttgccctagaattccagttagaccgaattagttatgggacattaatcaatggtttgtgtaaaataggagaaacaaaggctgccatacagttgatgaggaatctggaagaacgctccattaagcctgatgtggtaatgtacaatataataattgatagcttatg

SEQ ID NO: 36183 - DNA, 365 bp, Glycine max
gactgaacaagtgatcaaagcatcagaagagaaagtagctctacaaggattgaaagtcacgcgcagcacctaaatgtaaaaaaagcaagaagagccagaacaagagtgtggtgaagcaggtgacaacagcagaaggtcttgatgatgcatgggcatggcgaaaatatggacagaaaccaataaagggttcaccctatcctcgaagctattatagatgcagcagttccaaagggtgtttggcgaggaaacaggttgaaaggagccacttagatcctgcggtttttctggtaacctacactgctgaacacagccatccccacccaactcgaagaaactctcttgctgggaccactaggaagaacaat

SEQ ID NO: 36184 - DNA, 388 bp, Glycine max
cccacgcgtccgctcagattatatatatactccacatctgaagccacaccatcaaactcaacactgaccaaaatggcctcaccccaaacccctctatcccttctcacaattgcactcctttccctaatccctctcttcatcttcttcttcttcaaccgctccaaaggcaaacaacccaaagaaccaccaaccattcccggcgcatggcccatcctcggccacctccccctcctagcccgctccccaaccacccaccacctcctcggcgccatcgccgacgaccacggccccctcttcaccatcaagctaggcacagtaaaagccctagtcgtcagcaactgggaaaccgctaaagaatgcttcaccacaaacgatgtcgcccgttctt

SEQ ID NO: 36185 - DNA, 432 bp, Glycine max
gaaagagggcactgtagacaacgagttcatgcagaagaagagttccaagatgtgctgtgtctttcataaacagaagccctttgacgaagatgatacgtgatgaggatgaacatcactctgatgaacaccctcacgatagtgggttttgctgcatgaatcatgatgatgctggcccaagcagttagggaactgattaagctgagaggttattaatgaaccatgagaggcatatattatgtagagtaaatgattcaagaaacccttgaacttgagtctgaatgtcaggagatatttataatcgcgacattggaactagaggaacattcagtgtcagtttgagtgtcacaaataattggcctagtttactaccaaattggtttcactaacttatgtcatagatgcagttgttaaaagatctatgatgtaatcatg

SEQ ID NO: 36186 - DNA, 347 bp, Glycine max
tccacaccttcaaaagacaacaaatactttcacttttttactacaactgactcacactactgggaatgttcacctatcatcttgaggatatctttccaataacactaactataactcacctaatcctttatgcccttctcatttccaacatccaaacatatcttcatactctcaccattactatcaccttacactaaatcacaacgcattaatcatatcattttatgcaccatctcttacttccacaagatcttataaagctattgatacattatgaccaatataagttactggcaactcatcctttaaatgaagaaaatttaattcaaaatctaccaaatgatctt

SEQ ID NO: 36187 - DNA, 316 bp, Glycine max
tcgaattgaaccatttccatattaccgtccacatatgcctcctactggtcttgcaaacccaccacccccagttcctcctggagcttgacccaaaaggcaccataagaatggagatgtctacaggcctcatatgcctgatgcctttattcgtccaagcattcctatgagacctggctttttccctggttcaatggtctatgaaggatattacagtcctccaatgggctattgcaattcaaatgaacgagatgttcctttcatgggaatggctcctggaccccctgtctataataagtactcaaatcaaaatcccccc

SEQ ID NO: 36188 - DNA, 428 bp, Glycine max
ctatgaccaagtaatgaacctgaagagcatggtggccaaaaccgacgtattccaccttgtttttggcgtgtggaagaccccagccgaacgttgctttatgtggattggtggcttcaggccatctgaactcatcaagataattctgggtcaaattgagcctcttacggagcaacaaatacttgggatatgtgggttgcaacaatctacacaagaggcagaagaggctctttcccaagggcttgatgctcttaatcaatctctctcagagactataacatcagactctctgtggtgtcctccaaatatgactaactacatgggacaaatggctgtggcaatcaacaaactctccacccttgaaagctttgtgagacaggtacgttacatatatgctttgactagtactatattatataaccattatttct

SEQ ID NO: 36189 - DNA, 442 bp, Glycine max
cttttccgtcagcaacattctttattctatatgcctcagcagtataaagaagttgcttactcataagcatgctcaatttcttgtttccctgttgaaactggttggtaatctttgaaccactcgcatacattaagtgggacctgcacaatgcaagacattattagactgaaatgatgataccgctccagcaaggataaaatgtacaacattcagatggttcttactttcaggatcttcttctcaaatatgtcaaacttgtttaagaataacatgaaggatgttttctgtgtagaaaagagaatgacatcatttttttgtgagataagtagaaaagttaactgacaaaaaagtacaaagggacctgagaaagaaaagtatggcatagaaatttctacgtaattgtagtagaagttgaagttaaaaaagactataaaaaggaaac

SEQ ID NO: 36190 - DNA, 405 bp, Glycine max
  unsure (1)..(405): unsure at all n locations
gcaccaactatccaactcacacgaaacctaatggacaagggcatgattggaagcattggtcgagccacatattaccaacctatgcagctgtgggacaaagccacagggaatctcacagatttcacaacccatttttcttttgtcatagattcacagaaccgaagtaaatatggagatgggattgcattcttacttgcccctgctggttcaaagattcctaatgccacaaaaggagcttctatgggtcttacacttgataaccaacaattgaactccacagacaattcatttgttgctgtggagtttgatatctatcagaatggctgggatccaccccatgaacatgttggaatagacatcaactctatgagatctgcttctaatgtaacatggntggctgatatc

SEQ ID NO: 36191 - DNA, 400 bp, Glycine max
aaactcctcaacatctccaaaatttctgaccagagaagaagctgaccagattcctttctcatgcaaacacctaccatcccttctcaaattcttctccatcccacaacactctccccaagccaaggcaatgaaatataccctcaaacaatgtgaatttgaacccatggaaggagagaccaagttctgtgccacttcgttggagtccttgtttgattttgcgcactatctgtttgggtccaatgcacaattcaaagttctgaccactgtccatctcacaaattcaacagccctgctacagaactacacaatctcagaagtgaaagtgatttcagttccaaatgttatagggtgtcaccccatgccttacccttatgcagttttttactgccacagtcagcat

SEQ ID NO: 36192 - DNA, 330 bp, Glycine max
gtggaagatagggttacgccgatgcgcatcgaaatcatcatcagagccaccagaaccctagccgctctcggttagaacgtaaggagaatcagggagcttacctacgtggctcagatgaggctcaagtttcctgagaacagcgttgaactctatgctgaaaaggtcaacagtaggggtctttgcgctatagcacaggctgagtctgtgcgatacaatctccttgttggcctagctgtgcgcaaggcttgctatggtgtcttgaggtttgttatggaaaggggtgctaacggatgctaggtcagtcgtagtggctaattgagagcccatata

SEQ ID NO: 36193 - DNA, 375 bp, Glycine max
gacgtgagagagattgagaagtgtgctcatagcggatcaagaaattctccgctatatgtacacactttaactgagtttgtgaagacatataattactagctactaaaagatggccacagttggaaggaacgcagcatcttcctagctgtttcttaacttgatcatgtattctattgacctaggcttagctagtatggtgcctgaacaaggacatcaatggccaaacttaccaccctagctttgctggaaatggtgcatctatgtattgctaaatcttctacatactagcatccgatgagggcatagtgatcaagcttttgggtgcgcatcacatgatgacatggacgaatgacagtttagcatctgcaggagcca

SEQ ID NO: 36194 - DNA, 253 bp, Glycine max
gttcatctcttgaggaagaagtcttgctttaccctgcatctacacttataaaggttgcgaatgcttacgcggtttcgttgttgattccaactgatgtagtcatagcatacaagtatgcttctgatgctaacactaaaactgtacccgcatcaatcaaaccaaactggaggatgggattacatatatgaaccgagtccaacaaaacattaggtgaaccatttgatatgtcccatacctgcattctaaatgtacc

SEQ ID NO: 36195 - DNA, 360 bp, Glycine max
cgaaaaaaaaaaacccaacctaacccattacctcattcctcaattcaattcaatgttttccctctcaaaacccatcctttctccggttcgccccacccttcctccggttcgctgcgggtcccgcgagctccgcgagcgaatcaagaccgtccaaaccactcaaaagatcaccgaagccatgaaactcatctgcgccgcgcgcgtccgccgcgcccaggaggcccgtgtcagtggccggcccttctcctcaaacctcgccgcaatgctaaacgacatcacccagcgcctgcaaaacgacgacgtctgcacccctctcaccctcgccagacccgtcagaaccgttgcactcgtcgtcgtcac

SEQ ID NO: 36196 - DNA, 432 bp, Glycine max
gacctttgttcactcttctactcttgcttctagggatttagcgcatcttcttctacatttaaggaagatgggttaggaaaaggcccacatcagcattgaggtcattggccatgtctactctgggaaatacactaccactgatcacctaatttacaagcttggatgcattgacaagcgtgttactgagaggtttgagaaggaagctgctgagatgaacactaggtcttatcacgtatgcctgggtgctggacaaacttaaggctgaacgtgaactacgaatccccattgatattgcttcgagtaagtctgaaacatcaacgtattattgcacagatcttgatacacctggacatatggatatgattacgaatatgattactgggacattccaagctgactgtgctgctcttatcatcgattctaccactggtg

SEQ ID NO: 36197 - DNA, 402 bp, Glycine max
cccacgcgtccggggaagtaagatatttctcaccacaaggaattgggatgttgctttacatgttgatgcttgtagcaatccgcatcagttgaggccattgacagaagatgagagtttcagattgctctgcaacaaagcgttccctggagcgaagggcatcccgttagagttggtccagttggagagtcttgcaaaggagattgtggttaaatgtggagggttgccattggctgtggtagtggttggtggttcgctgtctaggaaactcaagtcaagtggtgaatggaaacggaggctgcataatatcagctggcacttgctagaagagcatgagaagatagcatgaattttggccctaagctacaatgatctgcctgctcatttgaagtcatgctttctata

SEQ ID NO: 36198 - DNA, 429 bp, Glycine max
caccctcctccgtcgccgtggccaacttcctcgtcaacatgtacggcaagtgcggtgacctaaccgccgcgcgccaagtgttcgacgaaatcccggaccgagaccacgtgtcgtggaactccatgatcgcgacgctgtgtcgcttcgaggagtgggaactgtcactacatttgttccggttaatgctgtcggaaaatgtggaccccacttcgttcacgctggtcagcgtggcacacgcgtgctcgcacgtgcgtggtggggtgcggctcgggaagcaagtgcatgcttatactctgaggaatggcgatttgagaacttacacgaacaatgcgttggtaacgatgtatgcgagattgggcagagttaatgatgctaaagcattggttgggtgtttttgatggtaaaagacttggtgtcatggaaacactg

SEQ ID NO: 36199 - DNA, 435 bp, Glycine max
gtggacttcggtctctagtgttgcatttcagttagtacctggaaaatcaaaagataggcctggtggaccatggctatgtgttggtctgctaccattgtttgatcctcccaagcatgatagtgccgaaaccattagaagggctctgaaccttgttgtgaatgttaatatgattactggggatcagcttgccattggaaaggaaactgtcctaatgcttgtaatgggaacaaacatgtaccctacatctacattgcttggccaagacaaggatgcttctatttcagctcttacagttgatgagttgattgacaaggctgatggatatgcaagagtatttcctgaacacaaatatgaaattgttaagaggctgctagataggaaacatatatgtggaaatgtacggtgatcgtggtgttgaactcgagaatgagtttt

SEQ ID NO: 36200 - DNA, 426 bp, Glycine max
cttgactcgtttattttaaatctaattaggtttttcttgaggtttaagttataatatcagcaactatggatgataagcaagaaaatttgttaacgttgtccttgcctagccaattggtatcaattgatgaggaactatggcggatggctgaagacagggtgcaagagatactatggacaattgaaccaaatgttttatctgaagtgaacagaaaggatgttattgactatgttcagaggctgattaaaggttactatggagcaaaggtcttgccattcggttctgttccactaaaaacctatcttcctgatggagatgttgatttgacaactctcattcatgaagatgcagaggaggatttggcacaagcaatatgcaatatacttaaaagtggagatgactctgaataccaagtaaaagacatac

SEQ ID NO: 36201 - DNA, 427 bp, Glycine max
gaaactttttcacccccttgataccgcttcaattcaccaatggcaagtcgaggaaaaacccagggatctggcacaaccaaaaagggcatctcccgaagcaacaaagctggtctccaattcccagttggtcgtattgctcgatacctcaagattggcaagtatgctgaccgtatcggttctggcgctcccgtgtatctcgcctctgttcttgaatatcttgctgctgaggcaatttttcttaatcgcctttgatttttgttttcgtgtgttgtcattggatttagggtttataaattagggcttattttcctaaagtttagtggatggttttggtttaatgatcaaccttgaataattgaaatgataaatttactttaatcaatattaattacttttttgaaaggtttatatcacacttggtgtgttc

SEQ ID NO: 36202 - DNA, 426 bp, Glycine max
cccacgcgtccgcagcatttgagtgaggaattgaaacgtaggttctacaagaactggtgcaagtccaagaagaaggccttcaccaagtactctaagcagtatgaaactgaggagggaaagaaaaacattgaggcgcagctggagaaactgaagaagtatgctactgtggttcgtgttttggctcacactcaggtactaaccccacattaatgtgattgcataccttttctttgtttccctgatttcattttatataatggttgttacatatataatgatagtttagcactttcttttcaagcatttatccattttatgggtttattttgccttgtgtcctgagaatgatgaaattcttgttcttgtgcaaatgcagcaccatgaattaggtgctatgagcggcactttccacacgagatttctgac

SEQ ID NO: 36203 - DNA, 427 bp, Glycine max
  unsure (1)..(427): unsure at all n locations
cccacgcgtccgcccacgcgtccgcttttctattctattaattacagggaccatcaaaaccaaaaaagccaattaatagttattcttttggattcttattgttcatcgcagactcaacactctctccagacacttccttcatcaaatggcttctcacgacggcatctccgctgcttcttcagattccgtcttcaatcacctcgttcgtgctcccgaagatcctatcctcggggtaactgttgcttataacaaagatccaagtccagttaagctcaacttgggagttggtgcttaccgaactgaggaaggaaaacctcttgttttgaatgtagtgaggcgagttgagcagcaactcataaatgacgtgtcacgcaacanggaatatattccgattgttgggctagctgattttaataaattgagtgct

SEQ ID NO: 36204 - DNA, 425 bp, Glycine max
  unsure (1)..(425): unsure at all n locations
cggacgcgtggggtacgtagtgtgaagatatagtattgtatgctgcagaatatgattgtcttttgcaatggcggttgttgcgcaaacccctgacatcgccggcgagcgacagtccggccaagacgttcgcacccaaaacgttgtggcatgccaagccgttgccaacatcgtcaaaagctctttaggccccgttggcctcgacaagatgctcgtcgacgacattggcgacgtcactatcaccaacgacggtgccacgattctcaagatgcttgaagtggagcatcctgctgccaaggttttggtggaactcgccgagcttcaggaccgagaagtcggaaacggcactacttcggtgcgaattggctctgctgagcttctcaaaagggcaaatgaccttgtcaggaacangattcatcctacctcga

SEQ ID NO: 36205 - DNA, 398 bp, Glycine max
aaaaaaagaaacaattgttacaagggcattaaatttgtacattcagaagatgttaagatgcgagatctaaaacctagcatatatgctattgaatgcaaattagagaccttacgattgctgacttgggtcttgctagaaccacatatggatactgactttatgactgagtatgtggtcactagatggtaccgagctcccgaattgcttcttaattgttcatagtgtacaccatccattgatatatggaactgttggttgcatacttggtgaaatgataacatgacatccgctctataatggccaagatgatgtgcattagctcagacttatcacacagctgataggttcgcccgatgatgccagcctcggattaatacgaagtgataatgctcgtacat

SEQ ID NO: 36206 - DNA, 389 bp, Glycine max
gccgcgcgcgcgcactctctgtctcttgcgcatggggtggtagcgcagctccttctagatgtaaggaagatgggtacggacaaggttcacatcagtattgtggtcattggccatgtcgactctgggaaatccactaccactggtcacctgatttacaagcttggaggcattgacaagcgtgttattgagaggtttgagaaggaagctgctgacatgaacaagaggactctcaagtatgcctgggtgctggacaaacttaacgctgagcgtgaaagatgaatcaccattgatattgctttgtggaagtctgaaacaccaccagattattgcacagtcattgatgcgcctggacataaggatttcattaagaatctgattactgggacatc

SEQ ID NO: 36207 - DNA, 426 bp, Glycine max
caaatgtgctcaatgatgccttccccatttctcatgatggagagtttggaacaattaacaattttcgacttggaagacttcctaaaattcctgttgaatgggatgagataaatgctgcctggggccaagcttgcctccttcttcacactatgtgccagtatttccgaccgaagtttcaatatcgaataaagataattcctatgggtagctaccctcgaatcacagacaccaataacagtacttacgagctgtttggtccagtcaacttgttctggagtactcgctatgacaaagcaatgacattgtttttagcatgcctcaaggattttgcagactttgccaaatccaaggatcaagagaataacataccacctgagaaatgtttcaaactgccttacaagattgagaatgacaaggtggaaaact

SEQ ID NO: 36208 - DNA, 428 bp, Glycine max
gcggccatctttcccaaaactgggcatagaagttttatctcacaaggctcaaaatcttcaacaataatttatcaggcagtatttcaccagagctaagtcaggcaaccaagttacatgtacttcacctgtcttcaaaccatctgacaggaggcattccagaagattttggtaatttgacctacttggtccatctttcttttaataacaataatctttctggaaaaggtcctattccaatagcatcattgcaagaacttgaaccttagaccttggagcaaattattttgctagcttaattccaaatcaacttggcaatttggtcaagttattgcatttgaatttgagccaaaataattttagggaaggtattccatccgagtttggtaaattaaagcatcttcaaagtcttgatcttagcagaaactttt

SEQ ID NO: 36209 - DNA, 423 bp, Glycine max
tttcaatcctgttgtcagtcgaagttttaccatgtccttaacaagggattgcatatgtcctatggtgcttacccgtggcagtgatcagcttccagtcagtacgaaatttgatatgagaagtgatctgggtgtggtaaggaattatggaagactcttattggaaatggcttcagttgttccagatgggattgtatgtttctttgttagttactcatatatggatggaatagtcaatacttggaatgaaaatggaattttaaaggaaataatgcaacataaacttgtctttattgagactcaggatgtggtagagactacattggctcttgataactaccgcaaggcttgtgattgtggaagaggtgctatctttttttctgttgctaggggaaaggttgctgaaggtatagattttgatcgaca

SEQ ID NO: 36210 - DNA, 439 bp, Glycine max
cccacgcgtccgcccacgcgtccgaatacaacgaatggatgagccattcgtgaccgtgaattcgggctccatattttacccacaactcaaagacctaccacgaaatccagcatcatccatcattacccacccattaaccaatcgaattaagactcaacagaaagcaccacccttttctatgtgggagcagtgaagggcgttcaacgccggcggcggagccataacctggttccccggccacatggccgccgctacacgtgccatccgccaccgtcttaaactcgctgacctcgtcatcgaagttcgcgacgctcgcattcccctctacttcgccaacgccgacctccagccacacctctccgctaaacgacgcgtcgtcgcactcaatagaaaagacctcgccaaccctaacatcatgcataaatggacgcattatttt

SEQ ID NO: 36211 - DNA, 367 bp, Glycine max
cccacgcgttcgaaaaaaagaaaaaaatttaaaattttaaaaaaaaaaagaaaaaaataatgtaaaggtaaaaaaaaaaagataaaagtaaaaaaaaaagaagaaaaaaataaaaaaggacaccatcttacaagacaaacgcttgagtggatgcacattaaagaataaggatcttaaagcagttcacgagataatgaaattggctcacaaagcgatagagactaatgatgtaatagtggatgtgaagctcaagatggctgtgtggaaccagtggatactcagcgtggtaagtaggattaggattcggattgctcgaaagaggaactacgatgaggatgcaaaggaagagcttaattgtaacgttact

SEQ ID NO: 36212 - DNA, 416 bp, Glycine max
tcgcccacgcgttcgaagaaaaattgcacctaccaccggtggagtcaagaagcctcatcgctatcgtcctggaactgttgctcttcgtgagatccgaaaataccaaaagagcacagagcttctgatccgcaagctcccctttcagcgtcttgttcgtgaaatcgcgcaagacttcaagcaaatcactgacattttttggtgatatcggtgccaatgtgaccgatatgattccagactgatttgagggtccagaatcacgccgttcttgcgcttcaagaaactgcggaggcttacttgggggggttggttgaagacaccaaactttgtgcgatccacgcccagagagtgaccatcatgcccaaagacatttcactcgcacgccgcattcgtggagaacgtgcttaggcttataataa

SEQ ID NO: 36213 - DNA, 434 bp, Glycine max
caatttaccagctatacttgttcctttttaaggttagaagtgctacaatacaaacaatggcagctactcaggaagatgtgaagcttttgggtattgtgggaagcccatttgtgtgcagggtccagattgcccttaagttgaagggagttgaatacaaatttttggaagaaaatttgggcaacaagagtgatttgcttctcaaatacaaccctgttcacaagaaggttccagtgtttgttcacaatgagaagcccatagcagagtctcttgtgattgttgaatacattgatgagacatggaagaacaaccccatcttaccttctgatccttaccaaagagccttggctcgtttctggtccaaattcattgatgataagattgtgggtgctgtatggaaatctgttttcacggttgatgagaaagagcgtgagaag

SEQ ID NO: 36214 - DNA, 428 bp, Glycine max
gaaaatgggaggaagaaggaaagaaagggtatcatggattattcaacatctaaacgccgtcgtcggcataatttgtgtgtctgtagaatacaactcattccccttcgaaacttgaaataaacaaaaacccacacaacctgcgatcatcaacacaattaggttttcccctcaatggtcgccaattcccacagagtgggttcttcctacggtggcgctgccccttaccgatcaagagatgggcttagcccccgacccgttggtgcctcagaggagatccaattacgaattgatcccttggacttggacgatgagatcactggtcttcatcgccaagttagaagattgaaacatgtatgtatctgaagacctttttttcttaatttcttttttctatctattcactttgtacttgttatttctttgttttt

SEQ ID NO: 36215 - DNA, 392 bp, Glycine max
aaaaaaaaaaccactttgatcaagtattttatgagtttgaacaagaaagacattaaatggggaccccgagagcacttaaaaggatgaagactgcatgtgagaaggccaaagagaacactttgatcgactgctcagaccaccatagaaattgattctatatacgacggaattgatttctactccaatggtactcgggccagatttgaagagctcaacatggatctcttcacgaaatgtatggagccggtggaaaaatgattgagggatgcttagatggacagaagaagtgttgatgatcttgtccttgtgggtggatctaccagaattcccaaggttcaacaactgcttctagacttctttaacggaaaagagctatgcaagagcattaattc

SEQ ID NO: 36216 - DNA, 440 bp, Glycine max
cttggaactgcaacaatggtgccgcaacccattttgcatctaacccttttgtcattaataatctctgtgaccactctttccttggtcgatgccgccgatcccacatttggcttcacccctcttggattatctagtagctcaaacttgcaaatccaaaagccttacgacgttgcagtcaacgagcgctacagcttttcaaatggagtgcacagattttgggtatactccacggacaagcctcatatgcaaggcagcaatacgaagccacgaactgagattcgtatcgctgtaagccccaactcgtagcttgcttaatcattgtctatgagaaatattagtaatacattcatgacccttatttttcagggtcttgctgattaatattcctaaaacacaacactatggtttttttttggattagatatatttttaatttccct

SEQ ID NO: 36217 - DNA, 278 bp, Glycine max
aagagaacgttcatctcgttatggagctttgcgccggcggagaactctttgatcggggcgtctcgcgggggcactacagcgagcgtgcggcggcgtacgtggcgaggactattgctgaggttgttagaatgtgtcacgccaatggagttatgcatcgtgaccttaagccagagaattttctgtttgcgaataagaaggagaattctgttctcaaggctattgactttggactctccgtgttttttaagccaggggagagattttcggagattgtggtg

SEQ ID NO: 36218 - DNA, 398 bp, Glycine max
cccacgcgtccggtttacctatgcaattctaatacttttatgatgctggattcataatgtaaggccagttattccttcaaactgtccacctgcaatgcgagctttaatcgagcaatgttggtctttgcatccggacaagaggcccgagttctggcaggttgttaaggtattagaacaatttgagtcttcgcttgctcatgatggaactctgactctggtggaaaatccttgttgccctgatcataagaaagggcttctccattggattcaaaagcttgttcctgttgcatcataataatggccctgtgcctaaaccgaaatttacatgagtcttcaaagtgtcctggctttttgtagtattccggtttcattgtaattaatattgaatggttttaaat

SEQ ID NO: 36219 - DNA, 396 bp, Glycine max
ggaatcaaggactcaattcctgcttggattaaatttgctgtacaggctcccggtgaaattccatacagcggaatatactatgatcccctagaagaggtaagattctagacttcttacatgtaggatacacttagaaaaagagatgacaaatctaaatatctctttttccattatgggatagaattgtatctatgacctctctttgtagtactcatcatgacagaacttttaatggtgatatgcaatgatgttgaaagttttgtagtttcttttaagccattggcacactctggctttattcttatattaggaagaaatattccccactcttttgcccaaagggataatggtatgatcgatgtatataagaagtgtatataagaagtgcgatatttt

SEQ ID NO: 36220 - DNA, 407 bp, Glycine max
gccacgcgtcgccacgctccggaccattcagaagaaagaattgatggacatggaacctatgctatcctacaccagcatgaaaagattgagtctatatgattgccagagggagtggatattcgggaagatatgatcatagttgcataaattctcacaaaagagctttaaattctttgctgactttaatttgattctatatctaatctagtttcattagatgctttttatttcttttatttttatctttatgttttttttaatatttgattttttttttatgttctttattatatattttattttttttttattttatttttatatctatttttttttatatttttttatagtttttttattttatttcttttgttttttttttttattttttttatttattttttttt

SEQ ID NO: 36221 - DNA, 350 bp, Glycine max
ggcagaagagatgaatttgttatcatcgccttccagtgccgcttctacttctctatcaccttgctgttttcttccttgctaccctcatcatggtttcacttctctctctctctctctctctctctctctctctctgacatgggtttctggtttggttagcagggttctcttctggtaccttcaaattctccaagaaagagagtagatgtataaagaaagctggaagtatcactgcaaagttcgagttgaagccaccaccctatccactgaattctttggagccaattatgagtgaagagacaatcgaataccattgggggaagcatcacaggacttatgtagaatatctg

SEQ ID NO: 36222 - DNA, 368 bp, Glycine max
ggcacagacatacgcgtaggccctcacgtaacccatttgacgttccttctccactttcgaagcggcatctccgactccacctacctttataaaaattcatgatttcaccgcaaactaaacaatccttcggttcactcttcctccttttcctcgtgttgttgcagaagcgattcgaaatgggcgtgatcgtagaaaaccctaatagttccaagccaatcgtgatccgcgaggtctgggcctccaacctcgaatccgaattcgaggtgattcgtgaagtgatcgatgattaccctttcatctcaatggacaccgaatttcctggcgttgttttccgcccccacgtggtggaccccacaaaaccctacctc

SEQ ID NO: 36223 - DNA, 419 bp, Glycine max
gaaaaagaaggatgcagagcaatctgcagcagagattgctatagagaagcttggcgatttgtacagaggccattgatcccactccacaggaagcacaagaaagtttagtatctcgaattgcctacatattttctgaaaagtttgttgtatgtgatcatccactcagtggtcacattcgagcaactttgttgaggaaaggtgatctttgtggttccattcctatttctgtcattgctttctatgatgcaaagcttttcagcttgtgtaaatgtattaatcctgaggtggagtcaaacccatttttagttatttcatacataatgaatgccactgcaaacttacaccagtttcttgctacttctgaacgacatctctggattagaaggctgagtccatatccacaagatattatagagtca

SEQ ID NO: 36224 - DNA, 342 bp, Glycine max
cagattcggtccttccaatcatcccgagttctggtcaacttttctccattcggcggatttgatcattctgctcctgattctgctcagacaccgcacagagaacaaatccaccattcattatgctttttcgcaacagcgcactggctctaagatccttgccgatactgaagcacctactctagcggtggatcccggaccgatccatgacgtacatgcaccgaccgtgctatgggacactgcggtcggtgacactgatccgggtcgacaggatcgggccgatggtgactggcgcggagtaaccggtcatggaggccatgcacacgcccgtctacgtcaagaaga

SEQ ID NO: 36225 - DNA, 382 bp, Glycine max
cggacgcgtgggcggacgcgtgggcggacgcgtgggttctctcacgtaatggcgtcttgggctcaagtgcctaacctcttcggcggcgccacctcagctccgccgccaactccggcggcgcaccatgacaacatcatgtgctcatccgacgccgccgatgcgctctcgcgcctactccagcgccttccgcccacgctctccctacccacgcgcctaccctcgccttcctccgcagccgccacgtgtcctacctgcctctcccttaacgacgtcctctcctgcgtttccaaactcggttacgcgcaactcaccgatcactcagtcccctccgaactcgccaactcggccgagtcagaagcgctggcactattcgacctttcgc

SEQ ID NO: 36226 - DNA, 353 bp, Glycine max
cccacgcgtccgtccacgcgttcgcccacgcgttcgaccacgcgtccgatggactgcatctagtgctgacagctcagcgggtcgggctcctggctacggtgtcatcaccaacataatcaacggtggcctcgaatgcggccacggccaggataatcgggtccaagatcggatcggcttctaccgaaggtactgccagatgatgggaataagccccggagacaacttggattgtaacaatcaaaggccatttgcttaagcaaattgctcacatatatcatccatatagagaataaatagtatgtaataaaggatctaccatgatcttacatgtactgggaaacttgtttctaaag

SEQ ID NO: 36227 - DNA, 425 bp, Glycine max
  unsure (1)..(425): unsure at all n locations
cgccgctgcctcatttctgttctgttctcgtcacagattgtggtgattctattaggcgttggctgggttcaattgatgagagacaattgtggggatgcttgtttctgtcaattggctctgttttctttgttgggtatttctctattgctgttctttgcaagcttttcccaccttcacacattcccctcatttctgcactgcaaaatgactggtactactgcttcttggtgccattgactctccctataattgtggttgctgtgtactttcattggctcagcatgaagctgttcaagcatgcttaattagcttaactttgccagattttgaaggcagaaagaaatacatgtatgctngtggagcaagcaacaactacctatgacaattgctgcactcctctctcctaatcacctcaaaaagagttc

SEQ ID NO: 36228 - DNA, 351 bp, Glycine max
cccacgcgtccgcccacgcgtccgcccacgcgtccgcgggactgtaactagccgcagcacgaggagcagcctcaggttctcccatcttcactctctctagcaattgctcatgctccttttctcttcttcgtttgcatttcgagattcgtaggaaaaatgatgttgttgacgatgcagtttcatgtctgttttcgttgtcacatttccgaatccgaacgcgatagtagtgacaatattaacaacgatttctttcctcattttgtcgtgttaaaatttatcaccctgctctcggtttcattacttgccgttaattttaatttttggttttggaagaaggaaaagatgtctcac

SEQ ID NO: 36229 - DNA, 422 bp, Glycine max
cttttgacaggattacaaggagaaaccagattatggtcgctgtgttgctattgtagcatctgcgtcgttaagagagatgataaaacctggtgctttggcaatcatttcacctattgtagttggtgggttaacttttaattttacatgtctgcacatatattatcattaataaaaccaggggacaacggcaacagttttgcaaatttttgatgtattgtaaccatgtcacatacatgtgaccaacataattgcttgataggctagatcatatgccaagcaaattaatgtttggaatcatttgagaaacaaattatagatatcgtggtaactttccacccgcaaccaaaaccctttaaaatatatcttcatgtattcataagacaccagtggctatatttagcacatattgttgcacaacctac

SEQ ID NO: 36230 - DNA, 373 bp, Glycine max
cccatcttccagggtccggtgatagctgctgcaaaatgaaccttcagtttgtagatcgtaattcaagtgttgttggaaaatcttttaaattaaccctacctgaagtgaccagtttcccagattttcttgttgaaagaaccaggtttgacgctgctatgcaaagaaattggacacgcagggataaatgcagggtttggtggaagaatgaggatagttcctctggtaattggtgggatggtcgaattctgtgcatgaaagccaagtcttctgaatttccagaccgtccattggaaaagtattccggtccgtaccaggagggacttaattgaaccacattggcttagtccttggaagctttttgatgctgatactg

SEQ ID NO: 36231 - DNA, 349 bp, Glycine max
atcagaggtaccaactttatgtttgtcaatttccttcttgcttcattgtttgcagtggggagcgaacaattggttagtgtgtactagttttcaatcacagatgtcatactatgatgcttacacgacatatagtacaatctattactgtggatatgcatctaatataaaggatactggaacctggagagcttgcccctatatgttatgaaacgtatgatatgagagattgacttattatgggatgagcacatacttggtgctgtatttgatgaaccagattaatgactataccgctactgcttgcaacaatgtatgtaattgcaatgaaacttgctatatcacaccattg

SEQ ID NO: 36232 - DNA, 431 bp, Glycine max
  unsure (1)..(431): unsure at all n locations
gagacgatccttagcattatcacagctcccttaatttgattttctttttgcttgcaatgttttttgtataatcgttgttaggttaaaacttgacaagacgaaatgattatctaaattttcctaggcttatatattatgattgtaatgtaaggattacctgtggtttctttttaaatgttactgaccagactcaattgtcatgtgctatgcttttgtttctcagatactttaaggggcctgaacttctagttgatttgcaagactatgactactcattagacatgtggagccttggctgcatgtttgctggaatggtgtgaattataactataagttactggttatatatggcatactcttgacatttatgcagatggtctaaatttgagcgtacatgattaanaatgtaaaattctcgtcataatttgttc

SEQ ID NO: 36233 - DNA, 391 bp, Glycine max
gtaccagtcccggattgaccgatggcatccacgcctaacgtccacgcgtcccctgacgcgtagggttttcatgttctgtccctgtgatgaatggaacaggatttattgagattgaggaccaaagtttgagtagcagctttattcctttcattgttgtggacgaggatgtttgctcagaaatctgtacacttgagcctcttctacaattaagtgaaactgatccagatattgaaggggcatgaaaaatcaaagccttaaattaagccatggatcttattcatgacacgggttggcttcttcacagaagccagttgaacacaaggatggtttataatgtggatctatttccattgaaacagttcaagtggctcatttagtctcccatggatca

SEQ ID NO: 36234 - DNA, 304 bp, Glycine max
cggacgcgtgggcggacgcgtgggcggacgcgtgggttcgcctggtcttggcatctgggcagcaccaccacccaccaccctgcttagaccaggtcctctctctctctagagagaaagagaagcaagaaaaaacagaacaactaacattaagcttttaatagtaagacatggctcaacccagttccaacggggatctgaataataaccagcagcagggtcaggttcagcaacaacagcagcagggtcagtgggcggcggcggcgcagccggatcagtatcagcagcaatggatggctatgcagta

SEQ ID NO: 36235 - DNA, 395 bp, Glycine max
tggaaaactacagctaattgccgagaaagagacaaaaggagctgtttattgcttgaatgcatttaatggtaaattgcttgctgctattaatcaaaaaattcagctgtataagtgggtgctccgggatgatggtacccatgaattgcagtctgaatgtggacatcatgggcacatcctagcactttatgtgcaaactagaggagattttattgtagttggtgatctgatgaagtcgatttccttgttaatctacaaggtaaattttaaactgttgtgacactagtttctgtctggttttggtaaatttcaactgttgtgctgcttatcgttttggatgaataactgattttttgtatatataatgagtacaccatgttcttttggaatgataagtt

SEQ ID NO: 36236 - DNA, 412 bp, Glycine max
cccacgcgtccgcccacgcgtccgcccacgcgtccgggttcaaaataaatagttagcagagttagttttttgtttcttttccctaaagagttaggctctattggaccgtacgattaagatcgttcggtgaaattgatcacgctggtgccgcataccctagcgttcctgttattctattgtggctgaaacaaaacagtgttgaacggcgaggtagaacgacgacccccttctgcgttttgaccttcaatctcgtaagttcttctatttattaatttattttcaattgaacaccgtgtgttcagatacgtgaaaagattttagtgttgattccatgttgaaagttaggcactgcgtgaatggaaataatctaattgatggatgaggttctgtggtttttgagtttggtggatat

SEQ ID NO: 36237 - DNA, 410 bp, Glycine max
cgcacgcgtccggaatatcttgtcgtttggagcgatccgagaaaaactctgtgcacatgttggagtaccaggacctccttacaggtgatgagctactctctgactcctttcgttacaaggaaattgagaatggaatgctgtgggaagttgaggggaagtgggttgttaaaggagcagttgatgtagacattggtgcaaacccttctgctgaaggtggaggagaagatgagggagttgatgatgcagctgttaaggttgttgacattgttgacacattcagacttcaagagcaacccgcattcgataagatgcagtttgataccttcatgaagaggtttatcaagaattggactcccaagctcgatgcatagcaacaggagttggttaagaagcacatcgggggagcaact

SEQ ID NO: 36238 - DNA, 385 bp, Glycine max
cccacgcgtccgaaaaaaaaaaaaataaaaaaaaaaaaaaaaaaaaaaaaaaaaaaaaagggaaaaaaggataaaatgtaaattgaaataaaaaaaaaaatgaataaaaactaaaaaataaaaaatataaatatgtaatatatatttgaccataataattatatatacctatctatagcaaaaacataactggcagtcatctacatggaccgaactgaaaagtcctttgttgaaggcaacttggattgtaactggtcataggaatcaatctttaagctttttgctgacttgaacattgcacaatttgaacctcatgttgatgttgcctttgcacctccctttctgtatgtcgatcaagtgtgaatactaatcagtgaacggattg

SEQ ID NO: 36239 - DNA, 450 bp, Glycine max
tgtttatgctagccgcgaatcgggttccgtttggaccttggcatcttggactattaggatttgtgcagttgattagccccaacccaacaatgaaatataagctcacatcaacatttgtgaagacattgatcttggaaaggcctctgatcccagctgtgtatgctgttgctgtggctgtgtcgttgaaagccggcaacactggcagaattggtctcgggagctgtccattttttttgctgcaggtggcggatttgtattctaggattgcagtggtggtggtgttgtcaaatgcagcattcatcgcggtttgatatgcgcgcgctgccatgtagtatcgcccgggggtttgatcagcagtgaccaggacattgattgtctgaccaggacctatcatgaggacattggtggtgaaaggcttggtgtaagcagcatcagtagcaacaacagtca

SEQ ID NO: 36240 - DNA, 204 bp, Glycine max
acgggtaccttgagcttggcgttggctgattatgtgttgagagagagccatttcaaacatggatggggtcttctcagtgaagagaacatacaccaattaaccaacacctgatatgctgataccgtgcaaactcctttacttttttgaccaccataattgctgctaaaactaattctagctcgacaacagcaaacgtggtgactc

SEQ ID NO: 36241 - DNA, 364 bp, Glycine max
gtccagtgggcctccctcattcaggctctcgcctccaacaaaacgggcccaccgggcgcacaccttcgtataaccgcattgtcccgcaccggctccggacgccgctccatcgccaccgtccaagaaaccgggcgccgcttagccgccttcgccgcctcccttggccaaccgttctccttccaccattgcaggttggagcccgacgaaacgtttaaaccttcgtcgcttaagctggttcgcggagaggctttggtttttaactgtatgctaaacttaccgcaccttagttaccgcgcgcccgaatcggttgcgtcgtttttgagcggagccaaagcgttgaagccgaggctggtgactttagtgg

SEQ ID NO: 36242 - DNA, 387 bp, Glycine max
  unsure (1)..(387): unsure at all n locations
taccttccaacactggggtcctggttttggtccttcaatggcggaaccctaaccgggcttggctcttaaactttccatgggcctggcccgcccttgcctaaagcctcaattctttcaatcctcaatcttctctcttcttgaccctaaacttcgcctattcctcttttcaaccaaacccttacgcgccgtcatcgacatggcccgcaccgggaagttctttgctggtggcaactggaaatgtaacggaacaaaagactcaatcagcaaacttgatgctgacttgaacaatgcanaatttgaacctgaaggttgatgttgtcgttgcacctccctttctttaacattgatcaagtgaaaaacttaattaattgaccgaatggaatattt

SEQ ID NO: 36243 - DNA, 434 bp, Glycine max
gccacgcgtccggaccagcttgcgaagctggtttgcaattgtatggggggttcagctgctgtatcgtaagatgatctttttgctatctggagggagcgcattaatgatctacgagattgcttaggatctgttgttgtaccaattggcagtctatctactggactttgcaggcatcgtgctgtattattcaaagtactagctgacaccattgatttgccttgtcgaattgctaagggctgtaaatattgttcaagagatgatgcctcctcatgtcttgttcgatttggacttgacagggaatacatggttgatcttattgggaagccgagttgcttatgcaagcctgattacatggcccaacggttgattaacttaagaaatgcctaatggctactcaaaggtcatatgggttgagcatgtacaagcggatgaca

SEQ ID NO: 36244 - DNA, 326 bp, Glycine max
cgtaaactttctgattgtgattcaagactgcgacgacgatgcaagtgatagacactcggctgggcagaacatgtaactgaatacaatcgaactatggacccatacgtgactgaatcctatggagtcgctatcaaatactgagacgggattctaatggccgctgacatgggaggtacggatggatatacccttcggtacaagaatgatgagcgtattaagcctattggaaagcattatcttcttggtactagcggtgagataagtgactttcaggagattctgcgatacctagatgagcttatcatatatgacaacatgtgagatga

SEQ ID NO: 36245 - DNA, 386 bp, Glycine max
tcgcccacgcgtccggaaacatggcttccttaagctccttagtgctgctccttgcaggtcggattctatcccctcaagttcttgcaaactatgagaatcccccagtgtacaagcctcccactgagaaaccaccagtttataagcccccagttgagaagcctcctgtttacaaacctccagttgaaaacccctcaatttataagcctccagtagagaagccaccagtgtacaagcccccagttgagaaacccacagtgtacaagcccccaattgaaaaacctccagtgtacaagcccccagttgagaaaccaccagtgtacaagcccccagttgaaaaacccccagtttacaagcccccacgtgaaaaacccctattgtacaagccc

SEQ ID NO: 36246 - DNA, 381 bp, Glycine max
cccacgcgtccgcccacgcgtccgctgaatttgaagaaagttgggctgttggaaaggtgagagggatgggaaaatgacaatcaggaaaatggacatgtacttgctgagcatgctaccattgatcttgattattatagtacagttgaagagctgatggaagtcggtcctgaaaggttaaaggaggcactggctgccttggggctgaagactggtggtactgttcagcaacgtgcagagaggctcttcctcacatagcacacacctcttgaaaagttggacaagtcaaagcttttgcttttggaggatgcttctagtgaaaagaggaaacgcgaggcaattagaaaacacaatgaaatgttaaaggcttctgaaactggtgct

SEQ ID NO: 36247 - DNA, 376 bp, Glycine max
gcaacacgaacgagttaactgccgatggtactagcactgcaataatttagcctggtgggatgattaagtctggactactaacattcgctattactgctaatcctatttctttgaagaaggggatggattgaactgcaaaggatctgttaaagtactcgaatgatagaaatgtacctgactaaagaactgagcatattcgagctctatgctcaatttctgctggaaacgacgattatgtaccgtaactctgattgcatgaagcatattgacgactagtgtgtcagatgggcagatatctaatgagtcttaaccatcattggaatcctgtgatgtaattgctgtagggatgaatgtatacataacgctttgaggacag

SEQ ID NO: 36248 - DNA, 405 bp, Glycine max
ttcactcgtacgatggtagagccgaacttttatagccttccaaaaaaatgaagaagtcgtcctttttggctctctctctactatggggcctaacttaacgtataagcttcagcgccggttatattggattctacacctaaggcgatcctattcgaaacctcggcacatactatgtgttgccagttataatatgaaagggcagcagaatctaatttgccaaaaccgaatcagatacatgcactataactgttgagcaatctaccttagaggtctcacagggtctaccactgataataccatccccatttaaaatccttgacatcaccgaatgacttatattgagcctcaggttcacttatgtacccacctgagcctcaactccttctcggtggaccgttattctca

SEQ ID NO: 36249 - DNA, 314 bp, Glycine max
caagttcttaaaagggttcaatgccgtttccaagaaattggattaaggaaccaggcgaggggccaatgaatcctgtgggaggtttaaaacaggtggttctttctgggcttaaaagaaagggattggattattcccaggaaaatgttgaaggcccatttagaccggccaaaagccagggattattagtggaattaggtttggagtattaatccttgggctggattcaagttatgccaccaagttttaatcttgaacctgaatggtccagggttggaaaggcacctttaccggaggttttccggtcctttttggtt

SEQ ID NO: 36250 - DNA, 414 bp, Glycine max
gctgagtcattcatctaggtcatctagtgggagtgcacgcctctcctctggactaagtgctgtatctcagcccttcaagttgcggctttgtcgagcccagggtgaaaagtcacttaaggattattcatccaacgttggactggttgatccattagcaagtttagcagcgattgaggaatttgtttggcctcgtatccaacgtagtgaatctggtcagaagtccactgtagccactgggaattctgaatctgggacaactcctgcaggagctggtgtatcctctcctactacccgtcgccattctaactagatccagatcatctgctaatataggtggatccatctagaaaggaaataactcaagataaaagtacaagttctttcaagggtaagggaaaagttgcattaaagcct

SEQ ID NO: 36251 - DNA, 332 bp, Glycine max
gccacgcgtccgctggtccctacaacttcacttaacttctccctctatatgtgtctgttaatacacaccaaaacattcattcattggtattattcatacaacaaatcaaaaaatgttacccaacaatacttgcactattgttcccgacgcgggggcccggcaccacacccacgtggtgtccccgcagcaatgctgatccgccgtggtccaagagatcgccagcccggtcttcaacggatggtccgaagtgcggggctttgacaacccgcaaggctacaagcactttgctaaaaagctgtcacgtgattctcggcgactgcgacatcaggacc

SEQ ID NO: 36252 - DNA, 323 bp, Glycine max
aacacactataaaaaactaaagagaatatgaaaaaaagataataaaaaacaacatgataggaaagaatataaatatgtaggggactaaaccctaagaacagacaaggatggtttacaccatctagggaattcgatttccggatcttccttcgctgcacaacttccgcttacgtggcgatcgcagaactgcgtgtcttcccggggatctcagaaacaactccttctctagtaaaacccttgctctacaattttcccatgattctgattgcttgtcttctgcgattgccaaatctgatagagtacttattcctcaagatcaagat

SEQ ID NO: 36253 - DNA, 290 bp, Glycine max
attatgcgtgcgcccatgcgtccgtgctttgaatactcacacagtgagacacttgaacgtgagacctctgctgtgtaccgtccacggatgcttcagatcctgcactgatcgtcctttggctggtgtgctgtgcatgattgtggagttagaactgacgatattcactagtctcacagatgcattcttagagattcacaaggctcttgattacatgctgaaaggtgtgtctatcatatgcatcattcgcatggctgtgataatctctatgagaccagtgctgacatgacatg

SEQ ID NO: 36254 - DNA, 258 bp, Glycine max
cacccgtgggcccacgccttcggatctttcttttttcatctgttgtgcaattctagccatattcgaccgggttaacccctttctatattgcaccataggatttgtcaagaagagaatatgatgggaaagtcctggatgtttgttcttgttgggtgaccttatatgtaaagtcctttggagcatattcttttgaagacccagaagatccacgatacttcataactacacttcatctaattcttaatggacacatattca

SEQ ID NO: 36255 - DNA, 391 bp, Glycine max
acgaccacattataattaatattacatacattatgctgcttggctgagcaaggtactacttgtacatgttgatgggtatgtggcaaccattgtaacaatggtaatcataatggtgcctaaaaacgtgtgtgctcaaaccatcggatcttacatctgaacacaagactatttaaacagcataatctggcaggctgactatggttgtgcatgtaagaaattctactcacgagatgcttgacttaatgcatagaataactacaatgagttagattggctaggtaatcaagatgacttcaagcgtgatgaagcagctgatttcgaccattttagccatgaaacaagacatgtctgctacatagcagagattcacggtgcatcaggcgactactgt

SEQ ID NO: 36256 - DNA, 436 bp, Glycine max
cggacgcgtgggcggacgcgtgggccgacgcgtgggttccattccgatctacatataatcattcataatgggtgttttcacattcgaggatgaaatcaactcccctgtggctcctgctactctttacaaggccctagttacagatgccgacaacgtcatcccaaaggctcttgattccttcaagagtgttgaaaacgttgagggaaatggtggcccaggaaccatcaagaagatcactttccttgaagatggagaaaccaagtttgcgcttgacaaaatcgaaagcattgatgatgcgaacttcggatacagctacagcgtggtttggggtgctgcattgccagacacggcggagaagatcacattcgacttcaaatatggtgcctggtccaaatgaaggttctgttgggaagctaactgtcaaatacgaaacaaa

SEQ ID NO: 36257 - DNA, 346 bp, Glycine max
acggttagcagtcactgctctgattaaccgattctggacgtatagatcacaaccaagtattggactctatcattggcacacatggcagctcaaatgagcaagatcagaaagtttgtcgcggtcagattgttcactgccgagctgtactaggatctgacacatgaattgtcagcagacgtacactgcggcgtctatattagggttaccacgatgcgcaccaaaatcatgataagagccaacatatcacaaaccggtctaggtgagaagggaaggtgaattagggaacttaccttactggttcataagaggttcataatccacctaaacaacatactgctatatgctc

SEQ ID NO: 36258 - DNA, 380 bp, Glycine max
aatttcaccttttatactctaccttagttatcttttattatatatctataacattttattccacctaaactcttacacatctatttagcatacaacttattacactaaattcacatataaagatattcctaatgcgcttgatattttttctaatatattccataattctaaattttattaataaacgattatcctctatctttacattattcttatataaatttaataaatttatttgcaaatttattaattaattttttaccatttacattcaactgcttttcaatacactccactttttataacaattatttttccttctcataatattattacaatcactataaatcatctacaaaactacattcatacacactata

SEQ ID NO: 36259 - DNA, 382 bp, Glycine max
gaagaaatggcgagtagcagcagcaacactccgaaggaaagcgttgttgtcgactgcggaaggcgtcgaacctcttgcggctattgcagatcctctcgtcacaatagcatctctcatggcatgtgggcacatagccttactgtggatgactaccaagatcttcttgatcgtggctggagaaggtctggatgttttctttataaaccagagatggaaaggacatgctgcccttcttatacaattcgcttgaaagcaagtgactttgttccttctaaggagcaacttcgtgtatctagacgaatgcaaaggtaaaaaggcaaaagcttgagatccgtttaaacagatccagttttgatccagaagaatttgctttgtacagaag

SEQ ID NO: 36260 - DNA, 283 bp, Glycine max
acgtatacttgtaccttttgaaggctaaaagtgcttcaatacaaacactggctaactgctcaggatgatgtgaatctcttgagtattgcagtaagcccctatgtatgcaatgtccaaatggcccatatgttgaagggacgtgaatccagatatgtggaagaaaatgtgagcaagcagagtgatttgcttctcaaatacaacgctgttcacaagactgtttcagagtttgaacacaatgagcatgacataacatagtctgttgtaattgctgaatacatatatg

SEQ ID NO: 36261 - DNA, 417 bp, Glycine max
tatacgcgactccactggcagcacaagctgcatactacgctcaaacatcaacacctcggggatatctcatcactgaaggcaccgtgatatatccaacttcttccaggtttcatcatgttcctagaatatactcagatgaacacgtataggcatggagaaatgtagcggacaccgtgcatgccaactgcagatctatcttctgtcaactatggcatcattgccgggcatcacatacaatgtatcagcctggtctagctctaccctcttattccatcatcaaacacatatgatacaagtggtaaaacctcatgctccatagctaacatcgcatgtatccagcacctccagcacttaccacttttgagatatctgaaatagtgcatcattatcgccaagcaactattaatgcaattctag

SEQ ID NO: 36262 - DNA, 377 bp, Glycine max
acgggccagtaaaggcgtaaacatataggctgagatcagagagtacagatatggttgcaaaggtggagctctcacagaaggcgtgaagcacagctctgtgaatccgtgtgactatgtggacatctttgatgcagatttacaacctgaccctaacttactttggcgcaccataccataccttgcttacaacccataagtgagcactagtccaagctcgatggaaattgactaatgctgatacaatgcttaatgaccagaatgcaagagatgtcattggattatcatttccttgtggagcatgacgtttgttcctcaagctatgccttctttagtttcaatggcacatctggtgagtggagaatatgagcattatatga

SEQ ID NO: 36263 - DNA, 365 bp, Glycine max
cgtttcgaattaccggcccgacccactcgttcggtacgtacgtatatctatccatttagcttagctagctgacgaccatggcgtcggtctggtctgtctccatcaccgccagttccttcactgccgcgcccgctcgcgcagtggtcagcaggaggtccttcaccgtgcgtgcctctctccgcaaggccactgccaccgccgccgtggccgttgccgccagcgtcctgcttgccggcggcggcgccatggcccaggaggtgctgctgggcgcaggcgacggcgggctcgtcttcgagccctaccagttcaccgtcaaggccggcaacaccatcaccttcaagaacaacgcctgcttcccgcacaac

SEQ ID NO: 36264 - DNA, 325 bp, Glycine max
gggccgacccactcgtccgcgctggttccctttctaaagccctcgcattcacgtccgtcgtcccgagcaggacgcgcgagctgcctagaaggcgacgccaaacgggcttgcgcggatcgagacgaccgggaagaagaagcaggacaacggcgtgtggtacgacgacagctcggcgccggtgcgcgcgcagaccatcgacgagctgcactcgctgcagcggaagcggtcggcgcccagcacgcccaagcggtcggcgcccaccacgcccatcaagggcggtgcccactcgcccttcgtcgacgcgatcagcgaggaggagcgccac

SEQ ID NO: 36265 - DNA, 345 bp, Glycine max
  unsure (1)..(345): unsure at all n locations
ctaaacccaaaccgaaacanaaactgacagacccaaaacccacacccaaacaagaccaggacccaacactcccaaaccaagcggcgaccatggccgacgaatcacaacctcaactaatcgaggagagaagagaggagcaagaacttaagtacctggaatttgtgcaattcgcgaccatccaggccctgatgcgctgcgccatcctctactcctacgccaaggagcgcgcgggtcctctgaagcccggcgtcaacaccgtcgaggaggccgtgaagaccgtcgtggcttcggtctacgacaggttccaccttatccccggcgaggtcctcaaatacgccgatcgca

SEQ ID NO: 36266 - DNA, 415 bp, Glycine max
  unsure (1)..(415): unsure at all n locations
cacgcgtacgtaagcgcggaattcggctcgagttgaganatactaagccatcctcataaatacgctctaaggaagtttcaagataagtgtctaaccttagtaacattgccacatattgtgttcattttggaattgtgccactaaaattctattcaattcatctatggctgcctcttcttatgctatgcaatcaatcctggcaaaccctttgatccgcatttccagcgggtctagggtgaaccaatttggcgttcctgctttgcacatgagaaggaatgttggcctgagagttaggtccatggctaaggaagaacaaccaagtgagcctgcaaccccagttacaccgccaccatcagtagaacccaagccacagccagtctctgctccttcaccaaaggtgagcactaagttttct

SEQ ID NO: 36267 - DNA, 220 bp, Glycine max
cgcacgcgaccgcttcaacagcagcggtgaccacccaaccaactagctgcatagaagtcggcttcaagaaagcaacggcaaccacaaccaggcggccagctacctgtagcctacccccagcaatatctaccatacaaccaactggcagcattgaacgctcctgcataaatacagcggcaagcaactactaccattcagccagctagctggcgcgagccct

SEQ ID NO: 36268 - DNA, 237 bp, Glycine max
  unsure (1)..(237): unsure at all n locations
cgcacgcgtccgattcttcaacccttttattgccaacacgcaatcgcagcangcgggtagcttttataaaacttgagcctgccacaaccgtgggccctattacagcagtaacccttggtgcatatgtaggcacaaaacatcaatgcacaacaactacaacaacaagtgctaggaaacctagctgcctactctcagcagacagcggtatatgcaatacaaccaacatgctgcatagaa

SEQ ID NO: 36269 - DNA, 126 bp, Glycine max
tacaagcggcggctgtggctgccagacaccacctgttcatctaccgcctccgatctatatgccgactccgatctatctgccgcctcagcaacaaaccacagccatggcaataccccactcaaccac

SEQ ID NO: 36270 - DNA, 365 bp, Glycine max
agaaggtcctagaacaattgaacgagttttctgatgaagatattgattctgctgcggaggcattgaatgatatgcctatcagaaagctatacatgttgattgagatggcagcgcaaggggagcaaggtggatctgcagaagccatcttttctggcaaagagaagattaatatcgctcatttctatgattgcctccaggatgttgttagataataagttgtcgtgttaagcgctttctcagttagagtgcatataatccttattgagttgaaatctcattttttttttacaacaattcattcctacattgcttgatactgttcagttgcagagtttgtgtgttggttggttgagctgatagttatt

SEQ ID NO: 36271 - DNA, 176 bp, Glycine max
  unsure (1)..(176): unsure at all n locations
tgatgtgctcatcttcgcctgaccctgagaattcgatcatccaaggcacattagcgtggcgttcnaatcctgagtgaaccggcgtttgaaagcaaacttatcctcaggaggatagatggggcgattcatgtgagatccagtgtacatcctactttgctcttcactcgggggatccg

SEQ ID NO: 36272 - DNA, 390 bp, Glycine max
  unsure (1)..(390): unsure at all n locations
cgacccactcgtccgtggaggttcacgacttcacctctcactttaattaccccaccagcgaccaaatngacaggacgggtttcaaagaagnncaaacagccgattccaaaaccgccacaaccagctgcaaatcgcccccaggaccaaggacactaccgctcataggaaacatgcaccagttagttggctcactgccggttcatcactgcttaaaaaatttggcagataattatgggccgctaatgcatctaaaactaggagaggtatctatcatcataggcacgtcacacgaaatggcacaggagattctgaagacgcgcgatctcaacctctctgataagccaaaccttggatcatcttaaatatgttacttacaacggcagctcacat

SEQ ID NO: 36273 - DNA, 151 bp, Glycine max
gagattttcttcatccttctctgatcactgataactcgattacttgaacattcccgatggcttattaggtggttcttctggacctctttccaagtccatttgtgatgagggtcacgattgcacttgctgaaaagggttttgtatattgatt

SEQ ID NO: 36274 - DNA, 242 bp, Glycine max
ggaacaaccacaccacaataaccgcaggagctagagggccacagcagcaggaggaacatcaaccagtggagaagcatgcaaatatagatagggaacgtatcccagaacgcgtagaccatgccaagggcgccagagcaaagggaatacaagaggtcacccatgacatatcacacctgacaagtgcagaaaaacaacgagccccagaagagcagacaccagaaaaagaacaaaccccaacagac

SEQ ID NO: 36275 - DNA, 175 bp, Glycine max
  unsure (1)..(175): unsure at all n locations
attcgaccactggttgttttgattcaataatatccaaggatggacagactcggggacgtgttctattaaaatncacccaagctttcaaacagatgataagctgctgaaacaaaatggatgctactacacccaagaataccaaggccaggaatgatgaaaaagagaatgaagacac

SEQ ID NO: 36276 - DNA, 206 bp, Glycine max
ctcgctctgtctctctctctccatagattcatggatccttacaagctccagccggccgtttcctttaaaactcccttctggactacaaattctggtgctcctgtttggaacaacaactcctctttaaccgttggagctagaggtccaattctgctagaggattatcatcttgatgtagaatcatgcaaacttattcttggaacgta

SEQ ID NO: 36277 - DNA, 451 bp, Glycine max
ctcgtactcggtacctgaatgtctcggactcgacgcgacgcggtctgctcactccgtgaatatgatgagcgtactaagatctaccgtatgaaaatctgtgccaccatacgtaggtcacgtgccaaatccaagttctggtattttttgagaaaattgaagaaggttaagaaaagcaatggacaagtgctagccatcaatgagatttttgagaagaatcctaccaagattaagaattatggaatttggctgcgttatcagagccgtactggttatcacaatatgtacaaggaataccgagatacaactctgaatggtgcagttgagcatatgtacactgaaatggcatctcgtcatagggtgaggcatccatgcatacagataattaaaactgccaacatcccagctaagctgtgcaaaagggagagcaccaagcaatttcacaattcttaaa

SEQ ID NO: 36278 - DNA, 298 bp, Glycine max
cctgaattgcagaatcatctacaacatcaactgcttaaggtaagtgtcaatcttgcttgaatccctgcgcaggcagtggagcaggttataaaaagcaagattgacacttaccttaagctcctgaattgcagaatcatctacaacaacaactgctaagcccacattcatcctatccatttctgagatggttcttaatgatccattccctggcaaacttctctgagctttatagctttgtaatgcatgcttggctctaatgggtttcatcttaaataaaaacagactctgtagcgatgtc

SEQ ID NO: 36279 - DNA, 371 bp, Glycine max
tgatattcctgccaagcgcctgtactgcttcttctcttctctttactctgtgctggttcgtggaggccgagctgtcctgcagttgtaccctgagaattcagagcagttggagctgatcaccacccaggccaccagggccggcttcactggtggtgtggtggtggactaccccaacagtgccaaagccaagaagttctacctgtgtttgttttctggaccttcaacctctctaccagagggcctgagcgaagataccgaggaggagaagcctgccgagtccacgttcacggctgataggatcccgtacaggatagcaagacggggtgtggtgaggaagagccgagaatgggtcctggagaagaaggcacgcc

SEQ ID NO: 36280 - DNA, 373 bp, Glycine max
ggcgggcctctcgcggctggacacctccgtcatctttgaagccttggccacaggctgcaccagcaccacggcctacatgagcatccacaacatgtgtgtctggattatcgaccgcttcgggagcgaggagcagcggcaccggctgtgcccgcccctctgcaccatggagaagttcgcctcctactgcctcacagagccagggagtgggagcgacgctgcctccctcatgacctctgccgtgcgacaacacgatcattacatcctcaatggctccaaggccttcatcagtggtggcggcgaagctgacatctatgtagtcatgtgccgcacaggagggccaggccccagaggcatctcctgcgtagtggtggag

SEQ ID NO: 36281 - DNA, 314 bp, Glycine max
ggcggatgaccgcagccctcgctgctgcccgtgccgctgcgaccatggcctctggcagcagcggcctcgccgccgcccgcctcctgtcccgcgccttcctcttgcaacagaatggaattcggcattgctcttatacaacttccaggaagcatctctatgttgatagaaatacgaagattatttgccagggtttcactggtaagcagggcacctttcatagccagcaagcactggaatatggcaccaaactagttggaagaaccactccagggaaaggaggaaagacgcacctgggcttaccagtctttaacact

SEQ ID NO: 36282 - DNA, 379 bp, Glycine max
gtgtctactctggcctgggtttagcagtcgtgcgaggaggttgtggcgtctgctgcttccaggcgatttgaggtgagggagccaggtggaggaatccggagtcggggaaagggaacccctgaagtctcgattcagttgcctcccagtcctcgctttgtgttgctccagccaggatgatcgaggttgtttgcaacgaccgtctgggaaagaaggtgcgcgttaagtgcaatacggatgacaccatcggggaccttaagaagctgatcgcagcccaaactggcacccgttggaacaagatcgtattgaagaagtggtacacgatttttaaggaccatgtgtctctgggggactatgaaatccacgatgggatgaacctgga

SEQ ID NO: 36283 - DNA, 331 bp, Glycine max
cccacgcgtccgaggaggagcgggacttcctgcggtgccagctggacaagttcatgtcctctgcccgcctggacgcagacgaccactgccgggggaagcccgggcctcggcgggccgagggggacggccgaggggggaccgtgggcgaggcctcagaccccgagtcagctgcctcctacctcagcggagcatctgaagaaggcagcaccgtggagaggaagaggcagaagcagaaaggaggcccaggccggcagcgcttcgggaagcccaaggcccgttagaggcagcggttgaaggacgcatatggggtcctctgccgatacaagaagat

SEQ ID NO: 36284 - DNA, 390 bp, Glycine max
cggacgcgtggggagatggtggaggacagagagcctagcttgctgcggtccatggggttacaaagagtgggacacaagttagaaactgaacaacaagaagtagatataacttatcttcgaacataacaccaactggtaaaaaaaaatacttgaataaagcaactagtaagatcccctggagaagggcatggcagcccgctccactattcttgcctggagaatcccacggacagaggagcctggcgggctacagtccactgtgtcacagggagtcagacactactgacatgacttagcatgcacacatgtacaaactaggaatagtcaatctagagtcatttgtataatgttctatctagttgtacatgtcaactcatacagaagcttttt

SEQ ID NO: 36285 - DNA, 389 bp, Glycine max
tgcaaccttacaatgactcaaatctgtggtctgttggaaagggatgagtaaagatgtttgagcttttgttcagaaatgcagtgtatgtcaaaagtgtaaatatgagaccaaggcttctcctggattgctgcaaccattgcctattccggatctgatttggcagcatattaccatggattttatagaaggcatgcctagttcctttggtaagtaggtgatttttgtagtagttgataggttgagcaaggcagcccactttatggctctttctcatccttattctgctgctgatgttgctcaatccttccttgatcatgtattcaagttgcatggattttcagattctatcaccagtgacagagattcaatatttctcaatcagttttggc

SEQ ID NO: 36286 - DNA, 375 bp, Glycine max
tgccgaagtgctggaatcaaggtcatcatggtcaccggagaccatcccatcactgccaaagccattgccaaaggtgtggggatcatctcagaaggtaatgagactgtagaagacattgctgcccgcctcaacatcccagtgagccaggtgaaccccagggatgcccgggcctgcgtggtacatggaagtgatctgaaggacatgactcccgagcagctggatgacatcttgaagtaccacacagagattgtgttcgccaggacctctccgcagcagaagctcatcattgtggaaggctgccagagacagggtgccatcgtggctgtaactggagacggtgtcaatgactccccggctttgaagaaggcagacatt

SEQ ID NO: 36287 - DNA, 415 bp, Glycine max
gtggaaatctgtattgcaacacctggaagactgatagactttttagaatgtgggagaaccaatctaagaagaaccacctaccttgtccttgatgaagcagatagaatgcttgatatggggtttgaaccccaaataaggaagattgtggaccagatcagacctgacaggcaaaccctaatgtggagtgctacttggccaaaagaagtaagacagcttgctgaagatttcctgaaagactatattcatataaacattggtgcactagaactgagtgcaaatcacaacattcttcagattgtggatgtgtgtcatgacgtagaaaaggatgaaaagcttattcgtctaatggaagagatcatgagtgaaaaggagaacaaaaccatttgtttttgtgaaaccaaaagaagatgtgatg

SEQ ID NO: 36288 - DNA, 320 bp, Glycine max
gccagtgtcattctctttggaaccaacaatagcagctccatttctggggtctgggtctttcgaggccaggagcttgcttttccgctgagtccagattggcaggtggactacgagtcatacacatggcggaaactggatcccggcagcgaggagacccagacgttggttcgagaatacttctgctgggaaggggccttccagcatgtgggcaaagccttcaatcagggcaagatcttcaagtgaatacctcttgccatcgcccagctgcctgcacctgcccttcggggagaatgggggtcattaaaggaaactgaacattg

SEQ ID NO: 36289 - DNA, 402 bp, Glycine max
  unsure (1)..(402): unsure at all n locations
cggacgcgtgggctcgtgcacggaaaatccagcgtttcttgtctcagccattccaggtggctgaggtctttactggtcatttggggaagctggtacccctcaaggagaccatcaaaggattccagcagattttggcaggtgaatatgaccatctcccagaacaggccttctatatggtgggacccattgaagaagctgtggcaaaagctgataagttggctgaagagcactcatgagggggtccttttggcaaattaagcactcatcctccatggtgtccctctcctcgcccctaatccggaaatcgcagttttctctgtaggccacgtgagggccttgattgaagacattgtgttctgtctgaagaatatttaaggtttccaatannatgtatatccctca

SEQ ID NO: 36290 - DNA, 376 bp, Glycine max
gcttatcgcatgccgcaggaaaaacgttcctggcctgatgggcctgcggtcgagcgagtttttgctgggaacgcgtctgctgggacgatggcctcttctcacccaacctggatcgcgacatcctctggtgctcagttgcccaggaagaagactaactacaaggaaatacttctgaaaaataaatgtgaacaacaagcttgagtgaatattcttctgagctggcttattgcagaatggcagtgcttttgcagaatagacctttactagcgactgatggtagagggacagagttgtgcctgtccaatagtcatactgacacagcacattctctcttcaaattataagtggttgctaccaggaaatagctacttgaacc

SEQ ID NO: 36291 - DNA, 371 bp, Glycine max
  unsure (1)..(371): unsure at all n locations
gggcagctcaattacttaatttgttcgacaacaaaagctgacttaagtcagaatgaacttgtacacttgacagaaagaaaggagtttatctactaatttttaaaatgtaaacaaattttatatagggatgtaactatctgaatacatacattgccatttctctgctatatagtaacatttcttgacaccaatggtaacctgtttattcctccctcagtaccaaatgtgtccatatctatttaaacagtaggagcttcatttctaaagtgatctatgctaggacatatataagccagttattattaaggttaactaaagttttagaactttagaaaattctcagttntaaaataattttgactcattcatcg

SEQ ID NO: 36292 - DNA, 183 bp, Glycine max
cggacgcgtggggcttggctctaatgggtttcatcttaaataaaaacagactctggagcgatgtcaaaatctaagactgcaattttgtcaatgtttcttatcttcatttaatagacaatcaaatgaaaatccttccttatgattgagagaaagaacttctgattaaaatttgtcacaaatagc

SEQ ID NO: 36293 - DNA, 404 bp, Glycine max
gccgggttgagaggagcgtggccttctcctctccccgccatggcgtgtgctcgtccactgatatcagtgtactccgaaaagggggagtcctctggcaaaaatgtcactttgcctgctgtgttcaaggctcccattcgacccgatattgttaactttgttcacaccaacttgcgcaaaaacaacagacagccctatgctgtcagtgaattagcaggtcatcaaaccagtgctgagtcttggggtaccggcagagctgtggctcgaattcccagggttcgaggtggcgggactcaccgttccggtcagggcgcttttggaaacatgtgtcgtgggggccgcatgtttgcgccaactaagacctggcgacgttggcaccgcagagtgaatacgacgcagaagcgata

SEQ ID NO: 36294 - DNA, 388 bp, Glycine max
gtcgcgcagggactggagcaggggaagccggtgctgcccgtgcggagacagcgagagctcgtatcgcggaggcggtgtgcgcccgactgttaccatgagcgatcaggctctgatcttgctgaaagacttcttgtccggcggcatggccgctgctcatctccaagactgctgtcgcgcccatcgagagggtcaaactgctgctgcaggtccagcatgccatcaaacaaatcattgctgataagcaatacacagggatcattgattgcgtggtgagaatccccaaggagcaagtctctgtctccttctggacgcgtaacctgaccaacgtgatccgttacttacgcacgcaagctctcaaattcgccttcaatgacaagtacaagcagat

SEQ ID NO: 36295 - DNA, 401 bp, Glycine max
gctggagaaggagaaaagtgccccggatcctttcaggactcttggtctttggggagcgacccaaatcgactgagggaagagggaggaaaattccctggatccctgcagggttaatttattcaaaaaggaaatcgaaaaatactcaacatgcaaaaatcttgtggagaaaatgaaagaaaaccacagaacatgccaaaggctgaggaagaccgccctttggaagctgtaccacaggaggcagaaggaaatcctcaaccttctgaagaaggtgtaagccaggaagcagaaggaaaccttagaggagggctgactcagcctggtcagggatataaagaggactctcctgttaggcatttggaccctgaagaaatgataagaggagcagatgagttggaaaggct

SEQ ID NO: 36296 - DNA, 373 bp, Glycine max
gtccttggtgtttgagtgtgttaggactgtgctcactagcttgagtgattatgagtctgctggtaagggcgccgttgagaaggttagggaattgttggtcgatcaggatcccaatcttagatatcttggcctgcaggcgctttcggttgccacacccgagcacttgtgggcggtgattgagaataaggaagcggtggttaagtcgttgagtgatgatgattcgaatatcaagatcgagtcactgcgattggtgatggccatggtgtctgagagccatgtggcggatatctccagggtgttgctcaattatgcgtttgaagtctgaacccggatttttctaatcagaatttggggttcattttggacaacgtgt

SEQ ID NO: 36297 - DNA, 447 bp, Glycine max
gacacgcgtgcggatgcctcaggcaccatgggttgagcatgcggatatgggaacttgtagagccagtgctatggtgcgaacactgctgctttgagcacagctgtgttcaacaatggtgtaagctgtggggcatgttgtgagataaagcgtgttaacgaccaaaggtggtgccttacacgctcagttattgacactggaaccaatttctgtgcactaaacaatgcactacctaataatgcaagtggatggtgtaaccattcccttcaccacttagaccttttccaacctattgttcaacacattgctcaatacaaagctggaatagtacccgtggcttaccgaagggtgccttgccgaatgagagagggcatcagattcaccatctacggtcactcatacttcaacctagacctaatttgcaacgttggaggtgcaggtgatgttcac

SEQ ID NO: 36298 - DNA, 168 bp, Glycine max
gttttatcctctgcatgacctggaatacgtgttgcctttcgattgttcgattgcttaatgtcatacaagaaattaggcatgaccctattgatgagtatgctctgcctatttgaaaatatccacacctcttttaattgtcgcaatgatgtgtgaagagtgtgttacttt

SEQ ID NO: 36299 - DNA, 357 bp, Glycine max
gccacgcgtccgacttgaccagctatacttgatgcttaagtaggttagaagagcttcgcggcgaacaatggcagctgctcatgaagatgtgaagctcttgggcatcgtgggaagcccatttgtgagcagggatcagatcgcccttaagtagacgggagttgaatacatatttactggagaaaatctgtgcagcaagagtgatctgcttctcaaatacaaccctgatcacaagatggttacagtgcatgatcacaatgagcaagccatagcagagtctcttgagattgatgaatacattgctgagacatggaagaacaaccccatcttgacctatgatccttaccaaatagccttggc

SEQ ID NO: 36300 - DNA, 354 bp, Glycine max
gccacacatccttcttgaccagctatacttgatgcttaagaaggttataagagattcgcgtcaaacaatggcagctactcaggaagatgtgaagctcttgggtattgtgggaagcccatttatgagcagggatcagatcgcccttaaggagcagggagttgaatacataatttactggaacaaaatctgtgcagcatgagtgatctgcttcttaaatacaaccttgatcacaagaaggttacagtgcatgatcacaatgagcaagccatagcagcagtctcttgagattcgaagagtacattgcatgagacatggaagaacaaccccatatggacctaagatccttaccaaata

SEQ ID NO: 36301 - DNA, 397 bp, Glycine max
gcacacacatacgttcaagatcacaactggtccttcaccttttgcttcctaatcttaattgcatcatccatcatacagccattattcatcatggcgtctcctaataaaatcactctgaatagctcaaactcacatgctttctacttctatcattcaatagcactctaatcccagacaatctagcacattatccagcactactacaccaacagcaacatccctctgcccaacactacgagcaataccctttccaacgttatcacttactacaagaatcacatttagaccaataatccccattactaaccctactaggaccatctcatatcctctgactcttaattcatcataatctaccataccacactctctcatctcatccatactcctaactact

SEQ ID NO: 36302 - DNA, 430 bp, Glycine max
cacacacaaacgttcaggatcacaccttttcctgcaactatgggttgcaaatcttaattggatcatgcatcctacatccattattcatcatgtacgctcttcaataataaaactgctgaatagctcagacggacaggcttgctactggtatgaggcagtggagctctaacacaagacaatctagcacattatccaggactactgcaccaacagcaacatgcttctgtcgtacactacgagcaatacactgtggaaggttattacttactgcacgaatcacatttaggccgatgctcccgatgacagaccctacgcggacgatctctatgcctgggactctgaattcatcaaggtcgaccatgctcacgctcttggatctcatcctggctgctaactacttgaacactaagatcctagctgaccttacatg

SEQ ID NO: 36303 - DNA, 377 bp, Glycine max
gttaataccatgcgcatgcacagaatggtttgatgctataccatatgatcttgatccaggggtcttaactgttcgaggggcacactacatatggatgattatggccatggttggatcgctactagctacattgacctactactggatgattaacatgcccgaaaccgcttatgataccgctctagggaccaataacacgaggcttgcagctgtagactatgtctcatagtttgcctgtttgaaatcaagctgaaccacaagactcggagcatatggctaactcatatggctagacctccaaggactttctcagtcgtcatgtactgcatctactctgtacatctcagcacatggtacttgctcgatattgcgttcta

SEQ ID NO: 36304 - DNA, 306 bp, Glycine max
atttccttaacaaaaaaacaaaaagtctagtatttattaaaaaactacaacaataacaaataagagctacatacaaaattctgggcaccaaaactcaacttcaacaactactaccgctacaccaccaaagcgcccaccgtttaggctcacaagatcgtctacctcttcatcaagaatcctgcccagaatcccaagccctctgctgtgtcgtcctcttctccagacatcaaccaccaactctccaaatactacggtcctgacaaaaggatctacctgccagataatctcttttaccgctctgaggta

SEQ ID NO: 36305 - DNA, 348 bp, Glycine max
tcgaaatacaacaatctttcttttgtttgggtggcaagtggaaaacccgagttaaaatagtgtgaaggttatgtttagattgagaaataaataatcttgggggcggcctgtttaaaggatccaagtttacgaaccctttcttgggactgtttaatttttctatccggtcacctaaattaaattcactggccgtctttttacaaacgagtgactggaaaaaccctcgcgctacccaatttaatcgctttgcaaaaaatcccctttttaccagttggcgtaataagaaaaaggcccgaaccgatcgcctttccaaacagttgcccaacctaaatggcaaatggaaccccc

SEQ ID NO: 36306 - DNA, 409 bp, Glycine max
  unsure (1)..(409): unsure at all n locations
gcggacgagcgcgacaagaagcggcggggttacccaaaccttgggcttcaagccgtaccgtgcacctgaaagtgtaaccgaccatgaaaacgcngtgtcntgcgtgaagttctcgaacgatggaaccctcctagcctcggcctccctggacaaaaccctaatcatatggtcctncgccaccctcaccctctgccaccgcctcgtgggccactccgagggcatctccgacctagcctggtcctccgactcccactacatctgctccgcctccgacgaccgcaccctccgcatctgggacgccaccgtcggcggcggctgcatcaagatcctccgcggccacgacgacgccgttttctgcgtcaacttcaacccccaatcgagctacatcgtgtccggttccttcgacgag

SEQ ID NO: 36307 - DNA, 307 bp, Glycine max
ttactcttgcttggtatttcgacgtctagatcttcaggatatagcgtctcttatggaggaccggtcaaactccaaggaagctctatcaattgcgtcgcgctctcgccttacccttgactgggtgccctaattgacagcatacgatatcgtaccttttctcgaccttgttctcactccaggctatgaaacacacgccacattggctgcgtatcttgccaacgaggatgaacatgagatggaagtagacactctaacatctgctattcaaaccccagtcaaacactttatgcctgagcaagaaatatac

SEQ ID NO: 36308 - DNA, 385 bp, Glycine max
cacacacacagctagcagatattacatacacgtgaatcactaattaagccatggaggagaaatcaatagctgggttgcgcttcctcttccttgttctctttgttgctcgtaagctactacttttaataagaagttgtggtgcaaactgaggcaaagacttgcgagaacctggctgatacatacaggggtccatgcttcaccactggcagctgcgatgatcactgcaagaacaaagagcacttgctcagaggcagatgcaaggacgattttcgctgttggtgcaccaaaaactgttaaatggatccattcactccaacgtgaagaagatgcatgcagcgctattttataaaaaataaaactactatatactatatataataagact

SEQ ID NO: 36309 - DNA, 408 bp, Glycine max
accaaacgtccaaggcgtaaatagggacaaagttggcagacgatatcacgatatatggggcacatgatacaggtaccagcggatgtacacatgtctagagctgcactaaaaggatgggcgagcccatgctcaaatggaaaacaagcgctgaaacttactaaaagctgttggtacacacgtatgtatagccattaatggcaaaagaagtggtagctccattagcaagatgctctgcataatgctcaacgttatgacagaatgccacaggaagctgaacctcaggctattgaagtgtctaaacgctacgcacaagtaacagaaatgccacccagtgcacagaatactatgagattataagcacctggagctaagctacaagatctgtatagccacatgaccatactgggg

SEQ ID NO: 36310 - DNA, 215 bp, Glycine max
catggcgcggaaaagaagagattgtgaagaaggctcaggaagcccttttggtaagagccaaggctaactcagaggcaactctgggaacctacaagggtaactcacagcttgctgatggtgcctcagagagcctccatgtttcgaactacagctactgatcaatcgaagttggtgttgtttgaagagactagtgcgagtaggaatcggtattatgg

SEQ ID NO: 36311 - DNA, 397 bp, Glycine max
attctagcgatgttgtaaccgctggaaaacatggaaaacgtactctagttaaaattgtggctgcgtcttctgctgccctggctcttctgctagttgttgtgacagttgttttctttacaaggaagaatgtggtgacaaggagaagagaaagaagacagtttggcgctcttctagccacagtgaataagtccaagctaaatatgccttacgaggttcttgaaaaagcaacaaattacttcaatgaggccaacagccttgaccaaggggaaccaggttctgtttataagggagttatcccatatggaaacactgtggccataaaagggcttatctatcacacaacacagtgcacagaatatttttactgtggggtcaattagctcaggggtttatatca

SEQ ID NO: 36312 - DNA, 434 bp, Glycine max
cacggctgagggatggtgaaacccctaatgctgtaccatcacatgcaaaattacatggactgcttcttgaggagcgtattgagaatggttatagtaatcctgcacgcctagtgaagttgaagaaaagacaattgaatggaccagcagttgaaacaagagctgggaagagttacatggagaaatttctggaaactccttcacctgatcataaaatggtttgtgaaacttcaatctttccattgcctgtgaaacagacatcagatgatgctagcgaggctgggattaaaattcttgaaatcagcagcattagtcctgtgaaaaagtcattgggaaataaaaacacctattcatcccctgatgagaaggaattagaactaaaaccattttcacaaatggatggtgggacaaatggagatcttgtgaaggtgaaagaa

SEQ ID NO: 36313 - DNA, 347 bp, Glycine max
aaaaaaaaacataaacaaaaaaggataaaaaaaaaaaaacaaataaaagcatatgggggatatgaatacaatggatataaaaaatggacaacttaatgttgctcgatgcacttggtgactgacacatgagaacgaatgaaaagcagagacggtggaccactgactgcagatccagaacttatgactacaaaactgactgccgatgacgaatttctcatcattgattgcgatgggatttggtatgtatttcggagccaaaatgcactggattttgctcggctcatgcttcacgagcataacgatccatccatgtgtagccaggatctggttgacgaggctttaaagag

SEQ ID NO: 36314 - DNA, 338 bp, Glycine max
gcacccctgtagcaatgttatctctgaattggttgatttgccaaactacaatgctttgggattttatgaggtgttgtttgttttgtttattttttagaatatatggtttactattatttctatgtaatttgttgatcttattaaattatttaattaagggcgttcgctctagatgatttaagcttacttacgcgtgcatgcgatgttatatctcttttatagtgtcatttaaattcaattcactgttctgtgttttactattttttttactgttataactttttttttattcaacttattgggtttttatttcattttttttttatcaagtggcttat

SEQ ID NO: 36315 - DNA, 407 bp, Glycine max
cccacgcgtccgtttctctcttctctctccacccaaaccctaactcccgacgctgttgccctctcgtatccgtcatgaaaggaggaaagtccaagaccgaatctaagagagccgatcccaaacttgctgtgaataagaagggagccgccaccaaggctaggaaacccgccggcaaggggaaggcagcgaaagaccctaacaagccaaagaggcctccaagtgctttcttcgttttcatggaggagttcaggaaggtattcaacaaagaacatcctgaaaacaaagcagtgtctgctgtgggcaaagctgctggagcaaaatggaagaccatgtctgatgctgaaaaagcaccttatgtggcaaagtctgagaaaaggaaagtggagtacgagaagaacatgagagcc

SEQ ID NO: 36316 - DNA, 396 bp, Glycine max
cccactcgtacggtctttgctgttgtcttgtcttcttgctccaaaacatgggaacaagcaacactctaacattgaccacaacacacacaaagacaacatccttgctggtctgcaatcaaaacctatcaagctggcgttcgagaaccaagacacctgtgttcgagaaatgaagcccaagaaccggacaatcatgggcgctggaggccctgatgactaggacaataggtggacaccatggctgaaacctgttatgaaagagagcttctttgttcaatgcaagcttgacgctgattagcacaagagcgagtgcaacatgtattgcttagattgtatgaacggtgctctctgatctctctgcctcgattaccacatagatcaccgagctattcagattag

SEQ ID NO: 36317 - DNA, 325 bp, Glycine max
tgtttgatggtatctactagttttataactttagtaattctagatctaatactgtcaacgtgaccccgtcttctggaaagtattcattcattacataaaaggtcaacacattctctaactctttctttcattattcatgataactcttcatatcacactgccttaattcctgctactcattattcaaatatctgccctatctactttcgattttttgatagtctcctaccattttaattacttattactcataattaggtttcctttccatatatgtagccttataaactgttaccactttcatactatatcatcattctctcat

SEQ ID NO: 36318 - DNA, 429 bp, Glycine max
ttcacgcgttcgagtacattaagtgtagtcatgctacattatagaaatagatctgttagggtatgagtgactgtgagctatattatctgttgtagcacaaaacatttagtatcatgagtaacccatattacaatttaatatttgtgcgggattcgctacttttgcagttcatccagaaagttggaatcccatgtggtctggatcaagcatattaacagggcttgtatcattcatgatggacaacaattcaaccactggcagtgtaaacaccaccactgctgagaagcatcgtttagcaaaatcttccctttctttcaactgtaagaatgctacattcaggaagatgttacctgagtatgttgagaagtacaacctgcaacagctttctgagcaggctggttcagagagggtctcatcggatacgtcttc

SEQ ID NO: 36319 - DNA, 439 bp, Glycine max
ctctccgacgtacatttccatctttttagggtttcatttcatggactccgattcctggatgtccacgcgcctctcttcctcttcacgccgccaccattatcgatctgatctgtacgcggaggagagtgaagggaacgatgatttcagggcggagtttctatgccctttctgcgccgaggattacgacgtcgtttccctctgttgccacattgacgaccaccaccctatccaagccaaaaacggggtgtgtcccatttgtgggaagaaggtgggagtggatctcgttggacattttactacacaacatgggaacttcttgaggatatcctttttgcaagttgaacttacgtgcagcgcaaaaggagggtcaggaaaggaggctctgcttcaacaatttctatattgagaaaagagttacaagaaggagccttgcagtccc

SEQ ID NO: 36320 - DNA, 428 bp, Glycine max
ggaattggaagttgacgagaacgacttgaaagccgccggcgctgaactcttcgccgaaggtggccggcggggcattcgtatcaatggctggttgatcgagactcggaggcactccatactgaactcttccacattccaagagtgggaacagaaactcgatacgtctcatttaccagaaatggtttttggggaaaacactttgattctaaaacacttgagcagtggaaccaacattcattttaatgcatttgatgctctacgtggctggaaacaggaagccttgccgccagttgaagttcctgcggcggctaaatggaaatttagaagaaaaaaagtaattgctggccccaagtggaaaacgatgattaaaaagataaatggatatggaaaggaagtgaagtaccaaagaaacaaaaaacgggcggccg

SEQ ID NO: 36321 - DNA, 290 bp, Glycine max
ctcacgcgttcgcagaattacccaaattgtgctctttggtgtcttttttaactgacatgcgaaactgaatggttcttaactctcattaacctgctattggaaccaaaatcctcaaaacggaattgcctgcataatctcctcctaaatcatttgggcattaaccattccgaacctgccttgaattggccaatcctaccctggtttaattgggaaactttaaacttggaattcacattgttgaatgacttgaccttaaggcattacctgatccaggtttctttcacctgttg

SEQ ID NO: 36322 - DNA, 292 bp, Glycine max
gatagattaaaattgctgcgaaagagaaatacatttcacagtcattttgtcatataaatgggtatacaagctcaattctaaagacctggtgacacattaagcaccaatggcaggagtttaacctgatgagcactacaaacaagatcaagatcacgtttctgaagaaattgagagatcttatcatcaccacatgtgcatgaaactcctctgtcattcattccgcatccttgaatatctttgctcggcttaaaccacataacaacacacagcagatacgcttctgaaacatctg

SEQ ID NO: 36323 - DNA, 274 bp, Glycine max
ttgtaactataccaattttacatatttttacctttctcttgaatcctgtaataatatgcactttttcaccaactggactcacaactgaaatcaaatctgtggaaatccaccatgaatcttttacccagccacatcctgatgacaattttgaatacaatgttaaaaatgtttctgtcaaagatttaaaccctggtaatttttcctaaaactcaaaggataaccctccaaaagaggctcttaactttacaccccaagtaatcatcataaaccaccc

SEQ ID NO: 36324 - DNA, 422 bp, Glycine max
acgcgtacgcacacgcgtgcgcacacgcgcgcaactcactcatccgtctactcatcagcccacgcttccgggtacacggggatcatcagcatcaatttatgagatatcaattgctaccgacgctcgtattattgagggtgatccttagaatgttgatcattctgctcttactggagaatcactccctgtaacaaagaattcctatgatgaacagtattccggatcaacggtcaagaaggattatatagaagcaattgagattgcttctggggatcacacctactatggcaaagcagatcatttggtggacagtaccaaccaaattggacacttccagaaagtgcttacagcaattggtaacttctgcatttagctaattgccgatggaatcgtcatccagctcatagtcatgtacccgattc

SEQ ID NO: 36325 - DNA, 381 bp, Glycine max
gcgcgcacgcgttcgcccacacgtgcgcccacgcgtccgtccacgcgtgcgaatttaccagcggtactcgtgggttttgaaggctagaagtgctgcaatacaaacaatggcagctactcaagaagaagtgaagcttttgggtattgacggaagccgctttgtgtgcaaggtccagattgaccttaagatcaacggagttgaacacaaatttttggaataaaatttggacaataagactgatatgcttgttacatacaaccctgttcacaagaaagttccagacgatgatcactatgagcagcccatagcagacgctcttgttaatgttgaatacattgatgatacatggaagatcaaccacatcttaccttctgatcccta

SEQ ID NO: 36326 - DNA, 407 bp, Glycine max
acttgttctcgagcgatttctgaattacggacatcatgtaccggtttgggacctttatgggggtaaagctaatactgccaagagctgcactacagattgaagaaggtcacttgtaacacgaattatacggccaacgacattcagattggtgatgagactccaactctgatgcttaagggtgtcgaagagcttgctgatgccgttaaagtaacaacgggctcctaaagcgcgtaatgtgggtattgaacaaagttttggatcacctaaagtgacgaaagatggagtaaccgatgctaatagcattgaattcaaggacaaagtcaagaatatcagagccagacttgtaaagcatgttgctaatgctactaatgacgtggctggagatggaaccacttgtgctacaattc

SEQ ID NO: 36327 - DNA, 436 bp, Glycine max
cccacgcgtccgctttaattttttttttatttcattcgataatattaattatattcctgttgagtgaatactgtcttattccttggtttttgttctccatttgaaaattgctacctaaaccagcctatcgaaatctgaatattttcctaaactgaatttctctgtccttttttgttaacctatgaattaggccgtatttttgttaaaaaagaaaaccaattccccggggtttattataattttgtgccaagtttgtttcgaagagggtgtgttcttgttggagaatgcatattgagggtggtgggggagaacaatggcgaatctggtaccgggggtgcttctgaagcttctgcagcacatgaacacggatgtgaaggttggtggtgagcacaggtcttcgcttttgcaagttgtgagcattgttccggcacttgca

SEQ ID NO: 36328 - DNA, 455 bp, Glycine max
cccacgcgtccgcccacgcgtccgcccacgcgtccgcccacgcgtccgggacaatcactagcagctactatcgtggggctcatggcattattgttgtttatgatgtcactgaccaagagagcttcaacaatgttaagcagtggctgaatgaaattgaccgttatgcaagtgaaaatgttaacaagcttctagttggaaacaagtgtgatcttacggcaaataaagttgtgtcctctgagacagcaaaggcatttgctgatgaaattggaattcctttcatggaaactagtgctaaaaatgccaccaatgttgaacaggctttcatggccatggctgctgaaattaaaaacagaatggcaagccaaccagtgaacaatgccaggccttcaacagttcaaattcgaggacagccagtgaaccagaaggctggttgctgctcgacttagaaagagacg

SEQ ID NO: 36329 - DNA, 443 bp, Glycine max
  unsure (1)..(443): unsure at all n locations
cggacgcgtgggcaaatttgcaaccttctgaataaacctgacatagtgaaccaagcagggcaggaccgcaaacctttacaatcgaaattggggttgcagaaaagccatgacgggggaagagactaccgggaagaagagggtggtgacagaatccctgggatggctaacggaatcgtcgataatgccaaagaagcaccgagccatagcgggcgttggcgcatcctcaattctcgaattgaaggccgaactgtacaagtctcaggaagattccaaaaagtctcgcgaattggcaggccccgatgccgagtaccaacgcgccaagaacaaaatcgcccncaaagacaaattcttcgtcaaaaaccgcggcgtcgatgcccgcgctcacaaggacaagcttgagttgaaagcggtgagtgatggaacggcgagctatgtggcgctcg

SEQ ID NO: 36330 - DNA, 311 bp, Glycine max
atgtctgattcatacattatatatattctgaaatactctacccgttaggggaaagagattgcgtgtaagtgagtgagtgttgctggtaaaggcgacggtcctgctatcctaatcgatttgggaacaacgaaatcttgactaggtgtgtgaccacactatcgatgctaaattataccctaggatcaggctagcagaactaagccatactacctgcgtatcatggactcaaaacaactgatcgatgatctgccgagaaatcacgaccatatcaaccgttgactcccagatgatgatgctaagcacttgatgga

SEQ ID NO: 36331 - DNA, 386 bp, Glycine max
gcgtacgctttcgaaagaaacgggtggtggctgcttcgaaagcttaataatatgtttatatccagatcgtgatggtttcctcagcagcaaactaacaaattactcatatcatataataagatcgaccgttctctctcataagccaaacgtctagatgaacttgtttctcaatctatctccctaatttccgatcatcgactaggttactcaacgacatccgatgtatctgtaatacttgcattggctaatacaatgctaaagaatccaatcctatgaagtgtataagataagccatatacaacaaatggttaaaaagcctacataacttatttggacctaaacctcttgacaaggtactatttgcccatttaccacaccccaaaaat

SEQ ID NO: 36332 - DNA, 344 bp, Glycine max
aacagatcttagcattccattctgagacacgcttctctacagagctcttactgctatatctggggcgtgttcccttcattatcggaatgttaatcgttgccatctaattcgatatgctggagtgatcgccattgcaaggtggtaccctaaactatgatatttgactctgagtctcttgcacaacttctgtgatatagctcatggctgaattggcagaacactgctcattgttgacagaaatagtactttcacactgtcgaccaactacacatgctgtactaacacatcttgtaaaacgctgctgcacagaacttgagtcatgccacatggtatattgctctgga

SEQ ID NO: 36333 - DNA, 428 bp, Glycine max
aatgataatactctcttttttaaagatcacgttgttgataatcaaatgattattgaagatagggtaacattttagagaaaatattactttatgcgttttatttgcatgcatatagtctttgattttgttttaattttcaatatctcttatatatcattcaattattgcattaatgtgtagaagaagttgtggtgcaaactgaggcaaagacttgcgagaacctggctgatacatacaggggtccatgcttcaccactggcagctgcgatgatcactgcaagaacaaagagcacttgctcagaggcagatgcatggacgattttcgctgttggtgcaccaaaaactgttaaatggatccattcactccaacgtgaagaagatgcatgcagcgctatattataaataatgaaactactatatactatata

SEQ ID NO: 36334 - DNA, 379 bp, Glycine max
cccacgcgtccgcgctctgataacatcaggactagtatttccgctcagatgaccaaacagtaggctgggtgattctaccaagagaggcagacatacttataatgatcatgccaatgacattgctcagaataccaaagactactccagtgacacatcttcatagaaccaacgaaaaacttcaatacattacatctgaagctgatcaatacagtacagataaagctcgagaaataaaggatgcaccatcacataatgcaagtcacatacctaatgctatacatcaaaaatcacattacttgataaagacattattaaaacatcaccttaattccgatctttgaaaatctatatgtttgaatcacttactaccttttaatta

SEQ ID NO: 36335 - DNA, 342 bp, Glycine max
cccacgcgtcctaaaaaaaaaacaaaaataatataataaaactaaaaaacaaaaaacaataaagataagaaataaaaaaaaaggttgtaaatataataaaacaaatacatttaaaataaaaaatcaaagattgcacttactaaaaaaagatatcgaatataaatacacataacattacttgatgaacaagattcctcttctgttacaaatgaaccctgttcacaagaagattccccttctcatccacaatttcaaacccatttccaaatccctcattgctgatcactacattgtaccacgtttggaatgacagaaatcccttgctgccttcaaacccttacc

SEQ ID NO: 36336 - DNA, 382 bp, Glycine max
cggacgcgtgggcggacgcgtgggcggactcgtgggaaaatggccaaatcaatcaaatgggttgagttgaacacaggggccaagattccttctcttgggttagggacttggcaagctgaacctggtgttgtagctgaagctctcaccacagccattcaggttggatacaggcatattgactgtgctagtgcgtataagaatcaagcagagattggttctgctcttaagaagctttttgatgatggtgtggtgaagcgtgaggacttatggatcacttccaaactctggtgttcagatcatgcaccagaagatgtgccaaaagcattggataaaacattacaggaattgcaacttgactatcttgacctctatctgatccact

SEQ ID NO: 36337 - DNA, 320 bp, Glycine max
aatgtctataaaaaaaataacttctcggttcttctaaaactcaatactaatgttaaaatagcgatcctcatgaaaaacaactgatgataacaaatctctttctaactgtaagcccttcttcttcacctgcaacaactgatcataccaaccaacctaatattcatgtctatcctaattgctctgccatgcactattatctaccaagaattatcattataccatactgcaactcaactgaaactacatgtcattctccacacccatacatgttattaccaccacatcctattatactaccttattggccaccttatgcaaca

SEQ ID NO: 36338 - DNA, 408 bp, Glycine max
cccacgcgtccgcccacgcgtccgcccacgcgtccgcccacgcgtccgaaccaacttaagagacgttgttcggaatccagctagaacttcaaataatgcaaatttaagtattccaggaaatgttggttcttcatcgcggacaggctcaaatccagctgtcaatccaccacctgcttcggcgtgggtttctcgccctaatcctcagcagtatccgcgcagattatctgaatatgttcgtcggtccttggtttctcctggtttggaagctgctggaagttcaagcaatagttatactcccttccgtggtcctcctacttcatctgaatcaaggggactgtcatctggggtaaacccgttcgagaagcaaagtgatagtgaatttggaattccatattcggtacaatcttt

SEQ ID NO: 36339 - DNA, 290 bp, Glycine max
ctctctgtgtatttccctacctctcccttcaagatgcatatcttcatcaataccctgaccggcaataccatcagccttgatgtggaaagctatgacaccatctacaacgtctaagccaagatccatgacaaggaaggaatcctccctgaccagcaacgtctcattttctcctgaaagcaacttgatgactgacatacccttgctgactacaacattcagaacgagagtactcttcacctcgtcctacgtctacgtcgtggcatgcagatctctcctaaaacactcaccgt

SEQ ID NO: 36340 - DNA, 425 bp, Glycine max
acttaacctcaatttccaggtaggcgtacgcatgcaaattaataatatcgaccaaaatgatgatttctttactaacatatggattaagaatgtcgagtttctcaaaacttcgtactgtcaatcctttttatactatgctgagacctgtaatatattttcattctaaggtatccattgcaacttctttactgcgagcaatagctaccaaatgcattcccaaagccatgttttaacatatcactgacaaagcaatcaatacaattatactcacccaacatgaagcaagacgtcttgctcacaattctattggaacaaaccataatctatattgtattatctgccaatgaactcctattgctgctaaagtacttaagtcaatgcggatcaaccttcaagattcaccaatcgaactataaaaaataatt

SEQ ID NO: 36341 - DNA, 384 bp, Glycine max
acgtttagtttcaacatcccatttatcgttgattctagtcaatcagactagaattacgatcaggtatgcaaatcacattctagtgtaacagagtgtggacatcataggtatcactgctttattcaggcacaagtacacaacggtgaacttagtattttccccaagactttcgtgtatctttctcattgtttgcatatgatgccaaagtacaagtctgactgcgctacagttaatgcacatctgaagaaaaattcatggttaccaagaagtaccattaatcctaacacatatattttgaaagatcatgcaactaggtatcggttacgccatctagattagatgcttaatccacatgatcaaaaaatatttaagacccggtctaaa

SEQ ID NO: 36342 - DNA, 413 bp, Glycine max
agcagcttgaggatggacgtacacttgcttattacaacattcaaaaggagtccactctgcacttgttactccgtctgcgtgcgtcgaatacaaatctttgttaagaccttgaacctacagacaatcaccctttatgtccagagctctctacaccatcgacaatattcatgctaaaattcaccacatacatggtatcccaccacaccaacaactgcttatatttgcatcaaaacacctagatcatatccttacattacatgattacaatatacacatcgaatctaccctccacttggagctccgtcttaatcatgagctgcaaatatctatcaacaccttgcctcatcagacatttactcttgacatcgccatttctaaccccacttacattgagacatctaatattcaacaca

SEQ ID NO: 36343 - DNA, 401 bp, Glycine max
cggatattgcctatgtttcatttcttgaaaggttccaaattgtcttctctgaaatttttgagcacgacatcacagcaggaagacccaaactagccacatggattcaggaggggaataagatcgatggttataagcagacaaaagttgacagggaggaatatctggaagctttcaagaaaaagtttttggcttgggcctgatgagtggcagtgggctggcttgttgctgtgggctggcttgctgttgtgggctacttttctgatagaatgctttttcagtttaaaaatgatgtgttctatttgcttgttactttgacttctcattaatgcttttgtatgggaacatccaaatgtatagtcccgcaatctataataaataagttgaagacaagtttgacttgg

SEQ ID NO: 36344 - DNA, 406 bp, Glycine max
cccacgcgtacgtgttgttgtaactcgttcttcttcttctgttgctctgtgtctgagtttggggtctctctcacctgaaaatgtcttgctgcggtggtaactgtggttgctgaagctcctgcaagtgcggcaacggctgctgaggctgcaagatgtacccagacttgagctacactgagtcaaccaccaccgagacctcggacatggtagtggcacctgttaaggctcaatttgagggtactgaaatggatttgccagttaaaaccgatgcctgcaaatgtggaccaaactgctcctgcaacccttgcacttgcaagtgaggtagttggaagagcaagcttcaagcagagatagcccttaattaggaataatgataaactattaatgtgtaccttatatcttatgt

SEQ ID NO: 36345 - DNA, 321 bp, Glycine max
actcttgcgtatgtacctcacattgtgttcatatctttacgtcgactcctaaccacccagaacaggatccattcgttctgcaccatattcaaaaagttattaagccaaatcgatatataccgttacgagactatccaactgcagaccttcctcatgaaaggttctataacaactaacaaacgatcagtcataacttttatcacagaagttatggaactcttgcttactatacatcaactgagacctcgacatatatattcaaacaacttacttactatgttcacacacatcatgtatactgcaaacaagttgataaccctt

SEQ ID NO: 36346 - DNA, 430 bp, Glycine max
ctcacgcgttcgatcctgtgccatcgaaggctgaataagtgacctgcgtcgcaggcactgttcatggccatgtctcgggttgataacagaaattcctcagccaccaagcgtgctaggactgatggtagtcgtagggaagatgattggacatgccccagctgtggcaatgtcaatttctctttcaggacaacttgtaacatgcgtaattgcactcaaccaaggccggctgatcataattcggtatgatattatatgtaatgtcattttttttttaaaatgtgattttcatttcgttaatgatttatggttaacatttatttgatgatttctttttatcaatttctctctttttgcttgtgattcttattgggctttcttttattttcctattttacggtcactcgagttccatgaagttttttacccaatt

SEQ ID NO: 36347 - DNA, 339 bp, Glycine max
tactaacaaaggctcaaaacgttttctggtctatggcattacatggttcctgggattcggaacaatgttcgtgatgaagacggtctctgttacgaggcgttaactcagtgcacattttcaacatgtgttccgactgaccatgggattgatattcctcacttttgtcttgaatcttgtcattttgattgctcttccgtatatgacattgcaggtcattgctgtatgcattcttgctttcatgccaactggttgctgaatgctgcatattgcttaagcattaaaacctgtttttcacctggctgggatttggtgatcatttgaaacttttgctctatgtta

SEQ ID NO: 36348 - DNA, 428 bp, Glycine max
gtcacaacttcattatgtttcatgtaataatctggaaatgcaagaagcttatcttgtcaatggcgtagatgtgttacgagaatggtatttgcacagtccagaggaagctcgccaattgagaaggaaagctctctctcgtattgaatggctgcaaaaagctgatgtgcctaccatatcacagatcgaagagttccattcgatgcatacgatgatgaatgctcctgattcaaatgataatatccatctactgttgagcattgatttgttgggcttacaatgaacaggtaaagcttttccaaacaagattgtttttgatgataaactttgtgttggctaactcacaagaattctttgatgggaatttttcactggaatcttgggttccaatttttgtgaattgtcttttttctgtaaataattacctttaa

SEQ ID NO: 36349 - DNA, 403 bp, Glycine max
tccacgcgtccggctggagaaaacctaaccttataattacaaacatagaagagaggagtggaaagaattgatcgttgaaaatgcaaggaggaaagaaagcgggagagtccattaaggaaacagctacaaacattggtgcttctgccaaagctggcatggagaagaccaaggccactgtccaagagaaggcagaaagaatgacagcacgtgatccggtgcaaaaagagttggcaacccaaaagaaagatgcaaagattaaccacgcggagcttgacaagcatgctgcacgtcagcataacacggcggacaaacagtacgccaccaccgctgggcacattggacatggtcaccacaccacctgtaccgggactggaaccgtcacctattccaccaccgtggaata

SEQ ID NO: 36350 - DNA, 377 bp, Glycine max
gaaattctgggactttgaaactgcaagcaggctagatagctggatagtgcattccggcaacggctgctaacatagccacttgtgcacctgctaaaagggggaacgccaaaggcactgctcaagtgatcgctcaatgactgacggactgtgatccggtcctcacatagtacacaactctgaagaacgaggcggatatgcaccacacacagcttgacttgcagacaacacatctgcataacacactggaaaatcatgctgcgacgccttggtacataggacatcccttttatacccatcagacatatgctatgcccagtcatctaaccttacaaggcacggaccatgtcaccgaaggagacattggctcacatactatt

SEQ ID NO: 36351 - DNA, 340 bp, Glycine max
ttctgatctggacgtaacctttctctttccttgggcaatatctctcaacaagactgatctgtgtggattttggcctatgatggcctcattatcgattgtgacgatcggattcatctatgaacggaacaggcatgctttgtattgagagtaatcactaccgatcggcgcccaactgtgacgaaggaccctgaaagagcgatgcctacattgcatcaatggattcgccatggatgaccacatacacagctcacagaccgtactctagctctgcatcaatgtcctcagaagcatggagtactcctgcatcttataacgagcacaccgtataagcctaattcat

SEQ ID NO: 36352 - DNA, 466 bp, Glycine max
gtgcatcaccccaaaagggatgtgggacattatagtgaagcataagagtacgagttgggtcaactaaatgaagatttttcctttcagcaacacgattttgttgtggtgtttgggcacataaggtctcatgaagaattccttgcgaggttagaaaagaacgaaattgggaggacaaatattcatgggcattattagtgcgcaaagtcttaatggaaacaacaaattgattttgaaattcatgtgcaaaatcttgaaaaatgaaaaacacaccagaacgtcttttcattaagaaaacccaatacatttgaaaaaatcatcaataaaggtaacaaaatagaaataacccaaggttgaatagacacgactaggaccccaaatataggagtgaactaaagcaaaaggtgacacaacacatttattgacatgatgactatcagtatgacggacatgtttgcctaattgacac

SEQ ID NO: 36353 - DNA, 448 bp, Glycine max
gccacacctccgggtaggcgcacgatacgccttggtttgcgtgcgtggcacagaataattaggagcgtctataacaagcatggcacacacactatacgaccttatgtctgcctataggttggagaaacttgatgagtacattatctcacgcatgtacatcaacgggtaccaagctgcaaaggatgatcttactgcatatgcaaccttgccaactgctacatcagatgaatatggaaatgtgtgcacgtggtacaagcacatcgatgctctgctgagacatctctagtgatcatggctagggatctggtggtatagttgagggatccctgggtgcagaacctgacacaactccgacagctgctgacactaaggctggtatagctgaagatgacgatgatgacgatgtcgatttgattagtgaatagacttatgaagacatgaacgcaac

SEQ ID NO: 36354 - DNA, 326 bp, Glycine max
ctagcaccatttccaaacaatacccatcaatgtctttatccctcatcgatcatatattcattgatctgtatacaaaatcctcagaaactactactctctgccatgaccatggaatacataaccttataactcatcatcatatacgcaaaggacatcaacaatggtaatcttttatccaaaatggacgtatactccgacgttttgctctgcatgaaccctcttcacactcatgactccaccactcacatccacaaagactccagctgcaaccctacgtagcactaccccgtgaaactatccttcaacgaatcgctatctatggaaaa

SEQ ID NO: 36355 - DNA, 351 bp, Glycine max
cccacgcgtccgcccacgcgtccgatgcaagcaaggttggtgctactgtgaccaagttggggggctcaaatgtcacccatgtaattgcagcaactgatgcacatggagcatgctccaagacgttgaaagttctgatggcaattctaaatggacgatgggttctaaaaatggattggataaaaacatgcatgccagagataaatcctgtagaagaagaaccctatgaaattaatcttgacaatcaaaggtgtcaaagtggcccaaaagcttgcagacttaaggcattggccaatgagcccaaactattcagtggcttaaaggtttatttttctggagaatacgtgtcaactt

SEQ ID NO: 36356 - DNA, 310 bp, Glycine max
ggatcatgctagttaatatatgaaactgctttgaaagtatacagagcgaagcttttgggctggactaccctacatgtgttcaggtgcgtctgatatgctagagactatgctcatctgttatccatacaggcgacttacacattgtgacgcgttgagccaatcatacatggcacctgtccatgacaccaatgtgtaacctgtctgcaccagacctttgattaattactttcagcatccataattcactgattaagacattacggtactcatctcgagagaatatgaccagcccaatcctgtaccaccagtc

SEQ ID NO: 36357 - DNA, 216 bp, Glycine max
actcccacgcttgctcagtgaccaacgaggctgttcacaatgctgctgctgcatttaaagattcgaatcgtctccattcaacaaatgtcagtgccatactggattctcaacaaaagaaactcaaccttccaatactgtcaaccaccactattgtatccttccctcagactctataactcatgaaggtactccccgaattcaaagctaacaagatct

SEQ ID NO: 36358 - DNA, 353 bp, Glycine max
agcgatcgccagacactatagatatctattcgattcggcttcttgagctgcagcgaaatcctgtgctgaccagatatcgtgccttttcttttgcgcctgagaagccactcctatactcgcgctgagtgagggacaggatgtacggtggcccacataagagtgtgagctcaggacttggagcccttgacgacaccacagcagtctgcttggctaaggtcgacagtgattacaaggaatcggacattgctatagctagagccacatatcatgctgaacgtgcggctaccgaacaacatataagagctatatttctagctatctcagctacgagacccagcgctgatgaatcctat

SEQ ID NO: 36359 - DNA, 348 bp, Glycine max
cagaaacggcactgctgaagaattggatggagctacttcagctgatgcgagatcctgggggggccgtagatcgggcctggtcttttgtgcctgagaagccacttatctacttgcgttgagtgagggagaggatgtctggtggcacacagaagagtctgagaaaagcacttggagcccttaaggacaccacaacagtctcgttggctaaggtcaacagtgattacaaggaattggacattgctatagttagagccacaaatcatgttgaacgtccggctaaggaaaaacatataagagctatattttcagctatctcagctacaagacccaaggctgatgttgcctatt

SEQ ID NO: 36360 - DNA, 308 bp, Glycine max
ttgactcttcctctgttccgcttctctttcaatccagccctcattcctaatccttcaatccaaccacctcatccttacactcacatatacacatatcttaacccctatcgtccctcctattgcttcaaaactcatcctcaaagaactcaaagactttcataaagacccaccaacttttttcaacgcttgtccattttctgaagacattttccattttccatcaacaattaattatccttcttatattccttattcttgaagtttattcctaatcactatttactttccttccgattatccttttaaac

SEQ ID NO: 36361 - DNA, 221 bp, Glycine max
caagggctgcgtatatgaattgcctttgctttgatgcatggaccatcaccctgatccctcggtgagctcgattgttcttggagagtgcgtacatctcatgcagaaaagcctattgcactacgacattacacactgggaaaccaaggtcattgctgctaagtatgggttacatgatcagctcaatgaagcattgcaccttaagaacagaccaactgactatg

SEQ ID NO: 36362 - DNA, 221 bp, Glycine max
cccacgcgtccgcccacgcgtccgcccacgcgttcgccagttacaatttaacattaacatcggcctaaacgccaaaccccccatgcccttttgatcccatcccacaattcaatgccctaacctaaccttccaaactacaaacccgttcggcagtttcccgtgctggacctcatcttgggggcgttctttggcctggggttcctctttttcatgctcgtctt

SEQ ID NO: 36363 - DNA, 400 bp, Glycine max
ttcccggtcgagcacgcgtacgtcacgcgttcgcccacgcgtccgcccacgcttccgcttttatgtggttggcttcctttcaagctcttctctgcaaatgcttgattccaagatggttaggactctgtaagctgataaagacaacactcataccgttggaaagaaagatgctgctggccatgttgcttaatttagatcttgcttcctttgacttcttgagttttatcagagacgggagtgcagggatcactaactctttcattcggtcagagtggccagcagatgacatcccccttgatcatgaagcatttacaattccaaagggttataatgcaccttaacaagggcacatcacgcaaggtgactattattgaaaagcagtaatcatctcatgggtgac

SEQ ID NO: 36364 - DNA, 355 bp, Glycine max
tctctttcaatccatgcctgattcctaatcctccaatccaaccacctcatcctcacactcacatatacacatatcttaactcatatcatccctcctatggcttcaaatctcatcctcaatgatctcaatgactttcacaaatacccaccaacttctttcatctcttgtccagtatcttattacatgttccattttcaatcaacaataattattcctgcttataatccttattctttatctgtattcctaatcactattcacttcccttcccattatcctttcaaaccttctaatgttacctttattactaatgtgtttcaccctaacatcaatatcaattgtaacatttttcttt

SEQ ID NO: 36365 - DNA, 150 bp, Glycine max
gccttggtcagcgttgagccaagctctacgaatctggcgcacgtattgccaaatggcgtgcagggctgaagaatgggcccaacgagccatttgaactgtctatccatgaaaacggctattgcttgggttgatacgctgtcatatgccatg

SEQ ID NO: 36366 - DNA, 427 bp, Glycine max
cccacgcgtccgcccacgcgtccgcagtttctgcagcctggatcaacaaatcggtacacacatgcaatgatgtggaaaggagggaaggattggatcttggaatttccggataggagtcagtgggctcttttcaaggagatgcatgaggaatgctacaaccgtaacatccgttctgcttcagttagaaacatacctattcctggtgttcatttgatagaagaaaatgatgataatggatctgaggaaacttttattcggagctgtatgtactttcaacaagttgaagcagatgctgagatggctttggatccatgccgtgttctgtatgacatggatagtgaggatgagcagtggatttcaaatgctcaaaattctcgtaaagacaacagtgaattttcttggatctctgaggagatgtttgagaaga

SEQ ID NO: 36367 - DNA, 307 bp, Glycine max
ataaatatgtttaattgaaattcaattttatatactgcactgcaatgtcttccacatcgctaggagttgcaatgacatcggccatgacatctgcactatccataccaatatactatgcattactcgatcataatctaccatcaatgcactaacttgtggactacaatctaacaaattccatatcttcaatgcgtatatactatccagattaacaaacactttacgcccttatagattcactcttccattatattctcaacgtttctaacgaaacccattcatcaatgacagacccctttgctgctac

SEQ ID NO: 36368 - DNA, 243 bp, Glycine max
gattgagctagtgtccagggttagtttcaaacattaattatttcgatgttgactaggctagtgggcatattgtaatcaagagtgttgatgctgaattagctgatgaggccgggaaatcagtgccacttcatgaatattatcttgacaattgggctatagtaagaaaccatcaatcccaaaatgtgtcacagattaatgaaacagatcatattgttatagtgagaagcagtggcttttgccaag

SEQ ID NO: 36369 - DNA, 286 bp, Glycine max
cccacgcgtccgcccacgcgtccgcccacgcgtccgattgaaagttattgatgaagttgccagcgtgtaatttgaagttgaagcactagcatatttggcgttttgaaaaggataaaaatgtgccccttgattaatatatgcagttcaatagtgtctgagtgagcgaaatgcaggacgttggaaatggttctatgtactatttggcttgtatgcttgtattacaacgctaataagaatattaaatgagcttgctggagaaaaataaaataagaacatattatctatt

SEQ ID NO: 36370 - DNA, 446 bp, Glycine max
  unsure (1)..(446): unsure at all n locations
cccacgcgtccgcccacgcgtccgcccacgcgtccgaagaccaaggatcttagcactctgaaggagaagcttgaaaaaattaacggaaaaatacaaccactccttgaaaagaaggctgatatagaaaggcagattaaagaagttgaagctgaaggtcatgtggtcaatgaggagaacaagaatgaggtacagtagctgttcaggatgttcaggacacacttatactatattgcataatatacaaactatgtttgttctttttatgttgttttgacttttgtgtaataaagatgtctttntatttgagtaagaagtgatacatttgtacacattcttatgcttcatatgggagtgatttcattccctttgtcaatgaaaggctgtgctacttttaaaggctgctaacatgtcaactnccaatcaatggaggcattacttaacgtggc

SEQ ID NO: 36371 - DNA, 302 bp, Glycine max
agccttcgggcggaacccattttggatttaacccttttggcattaataatttttttgaccactcttttcttgggccatggcggccattccacatttggcttgacccctcttggattatctaatagcttaaacttggaaattccaaagccttaccaccttgcaatcaacgagcggttcaactttttaaatggagtgcaccaaatttggggattcttcacggacaagccttatattccagggagcaattccaagccaccaactgagaatcgtatcgctggataccattattcattcggggtgtg

SEQ ID NO: 36372 - DNA, 415 bp, Glycine max
cccacgcgtccgcccacgcgtccgcccacgcgtccggttttatctgagctgggattggacttggggaagcggctgctaacttatgaccctgaaaagaggataacagccgaagatgctccccttcatgattggttccatgaagcccctcttcccaaatctgatttcaagccaatttttccttcttggcagtgatgggacagattagaagcggcagattgatgtatagacctgagaaggacaatttagtaatagatgatggatatttgctctggaaatgctcttaaaaaatttgggtgcattgatgcacaagcattggtagctgttggatatgtagaaaaataaaccgattgcaaggaatattcattttgaacatgatcaacaggaaatggctctgaaaatttgggtgcattgatgc

SEQ ID NO: 36373 - DNA, 391 bp, Glycine max
attgtatactgttatttccatcatcaatcacatctgcttgcccaattctgtgtagttcgttgagggaatctcacctttggtacttgccgtgcatcatataccctcaagtactgaactgctgataagttacatatagactgctcaaagcactattactcgtcagatggctctcaaagatcattacctatacacttgtacatgtcctacctgttctaaagtgggtcactataatgatatccaacaaagtgcaattctaaatggatacaaatgcaaaactgaaaaatgctttggtttcttgcttagtaaaactgatgggaaaggattccaatgcacaggttgtggactaattacgcacacggaggatataactacaattacacctgaacttaaa

SEQ ID NO: 36374 - DNA, 466 bp, Glycine max
aagcaaattacctttctaactaatctttaatcaatcctctaataatctccgattcaacagcaagctcaatctcaaacagcaggcgaaagctgaatcaatccttccaagttccaccaccaccgtcccaaccctcttcttattattcttcttcttcttcttaatataaacaacctcatccatactaaggaaacaaacgacatatactgcaaccatatacgttgatcacacgtcttcgatatctgactaagatgtcattatgggaaccttgtacaccgtcaacatcaaacctcccatcacggacatcgccctcgccgttacccttctctttgctacatactcagcatcgtcataagctccctcatggtctacaaccatgtcatcggcgacactgttcacagcatcttctatgcaattctgggacttatcttgttcataccggtactctactacacgcaaattgcgtatt

SEQ ID NO: 36375 - DNA, 435 bp, Glycine max
ggaaatgttttttagatcctaaattatcttactttcttctcctgaatttcaggctctgtatgagtggttgcgcacatacttgctggaacgacgtgatgttgccaataaatctgaacttggtagaatagcaatggctcaacaaagaactcaacaaagtgtttctggtactactagtgttggttctcttggtgggttgtctgatggaaattcaagagtacaaggtccaggtggcagtaacttgccatctgatattcaagttcaccaaggctcccagccaggtggaattggatctcatgatggtggaaactcacatgggcaagaacccgaaaggtctacaattgcagaaagcagcatacacaatggaaatgaccaacctttgcagcaagtttctggaaatgaaggtggtcaaaatactttaagacgtcctggtgcttt

SEQ ID NO: 36376 - DNA, 285 bp, Glycine max
tctccgcccactcgtacggtttttacttaaatcttctatatccttctactattctacgtgacgggtatattcactatggaagatgacgtggctctgctagatttctggcctaatacatttgggatgaacgtcaggaatgctcttgctgaaaatggtatcaaatataagtccaaataagacgacttgcataacaagatccctttgctcctcaaaatataaccctgttcacaagataatccctgttctcatacacaatggcaaacccattagtgaatctctcgttgc

SEQ ID NO: 36377 - DNA, 307 bp, Glycine max
tggactgaaccgaagacgaatagatgtttctcgccgtcggaatcgtcggtcttcatcgagaatggcttctacatgcaccgtgcattggactctaacaatgtcatgtacgctactaagtatttggcttatatgctctacgagctcaggacttgcaagcatttgcctcacaatcactactatctatacatgcgcccctgtgaacagttaaggaatccttagacgctcttagagtaacagactcgtatctgaaggtccattattgacctttatgaactcctacagaacaccggcaacattttgccccgat

SEQ ID NO: 36378 - DNA, 189 bp, Glycine max
aattccggtcgacgacgcgttcgtttgctattctgcttgctaagcactttgtatcattttaccagaaggttactggtgctgggcgaaatattgtcgaaaaaccatgggagcgtgtcactggggatggtcaacctcatgaacatggtttcaaacttgggtctgagaagcatacaacagaggcgatagttc

SEQ ID NO: 36379 - DNA, 434 bp, Glycine max
cccacgcgtccggccctcgctccgattcctaggaacagggttttcagttttcactgtggcattaagtttccgagctcaattcagcttccgattcgccgcgcgcaaaacgacttcgtttttggattttggcgtcgcgtcctattcagaagctatatactataagatgagacgaatgaagaaagatattgaagatgaggtgcttcccaatgatatgagtggggcacagttgaatgatgagagttatgaaggaagtgctggcattgttctgaagaaggggccatggacatcaactgaagatgatattttggtggattatgtcaagaagcatggggaggggaactggaatgctgttcagaagcacaccgggcttgttcggtgcggaaaaaggtgtcggctgcggtgggccaatcacctaaagccaaatttaaagaaag

SEQ ID NO: 36380 - DNA, 327 bp, Glycine max
gctggggatgtttattggttaatatttgggtatgatatacttttgtcattttgtaagttcataactttagaagccttcaactgaaatcctatatgaagtttacttgcttgatttgaaatatagtggaaactcctactttttgtgttcatgtatccagtttgatgctgcaaagataaggaagcttagaccaagctttaaagaagttgggggttctgtgactgctggcaatgcttctagcataagtgatggtgctgctgcattagtgctagtgagtgaagagaaggcacgtgagcttggattgcatgtaattgcaaagattaaaggata

SEQ ID NO: 36381 - DNA, 317 bp, Glycine max
caagattcaacaaggacgtagagaaagctcatacctatatactactaaacaaccggaaggaagcaaactagtctactgggaactggaagaaaaacctccagcaagcaacttgcaaccaacactacacttaactatacaccatcaactgtgtgtgagaacaaccctcatcggtatcaccatggaactgatgctactacgaaaattaggaaataccagatcagcactcatctactaatcaagaatcttacttcacagacgtcaattctaaaaatatcccaacataccatgactgctctgcgagcacatatacttactaa

SEQ ID NO: 36382 - DNA, 359 bp, Glycine max
tgattcccagcgaaggaagaagcgttaccaccgtcacacagctaaccagattcagaggcgggaatcgatgttcaaggagtgtccgcacccagatgagaagcagagattgcagttgagtacggagttaggcttggcgcctagacagatcaaattttggttccagaacaggaggacccagatgaaggctcagcatgagagagctgataattgtgcactccgggcagagaatgataagatacgtcgtgagaacatagccataatggaagccttgaaaaatgttatctgcccctcttgtggtggtcctcctatgaatgatgattgctattatgatgaacagaagttgagattggagaatgccc

SEQ ID NO: 36383 - DNA, 409 bp, Glycine max
tgtagttagaattttaaaacttagtagttatttactgtgtttcttttttgtacttttggtgagtgtcaggtacttgatagcctcacacacaacagactatcagaatccaatgttcttattcaacactgttgcagtgattgtgctggttgttgcaaagttcccccacatgcacaaggtcaggatatttggaatcaatgctgataagtgaaatgttgctgtggccatgacacttggttaccactccttacctgctcaagagcctcttgtacttttgttctggaaaaaaaggtcacacctttgtatagaaggcagaactggaaggatactcaagtaatgttttgttgccaactgctttttaagctgcttctaaaagtattattaaacaaagtaatatgttgagttaattctg

SEQ ID NO: 36384 - DNA, 318 bp, Glycine max
  unsure (1)..(318): unsure at all n locations
aaaaaaacagtagtttttcagaagttggggcatgccccaaagaagcggcatggatataacttcttatctctgatgttgatttaaatagtcatccgaagattcccccatttatagattactatattacagttgactccttcgtgattacatgcccacctaacatttgaaaagttaattttatgcaacattagttagctaactattggtntgaatattgctacagaaatatctgcaatctacaactgtaagagtggatgagatgagagtgaagagacaggacgcagaacagtggatgttccaccgtatgctacctgagaa

SEQ ID NO: 36385 - DNA, 417 bp, Glycine max
cccactcgtccgcccactcgtccgcgcactcgtccgcgagcttctgcgcacggagaaggagttcaaggttttcatggagaattacgggaggagctactccacagaggaggagtatttgcgccgtttggggattttcgcccagaacatggtcagagcggcggagcatcaggcgctggaccccaccgccgtccacggcgtcacgcagttctccgatctcaccgaggacgagtttgagaagctctacactggcgtcaatggcggcttcccgtcatcgaataatgccgccggcggtattgcgccgccgttggaggtggacgggctgccggagaattttgattggagagagaaaggagctgtcaccgaagttaagttacagggtaaatgtggatcatgctgggctttcagcaccacaggatc

SEQ ID NO: 36386 - DNA, 280 bp, Glycine max
tcccactcgtcctcccactcgttcgtgcactccttctctagcttctgcgcacggataatagctcgagtgctttcatggagaattacgggacgagctactccacacatgaagagtatttgcgccgtttggggattttcgcccataacatggtcagagcggcgtatcatcaggcgctggaccccaccgccttccacggcgtcacgcagttctccgatctcacctaggactagtttgagaagctctacactggcgtcaatggcggcttcccgtcatcgaataa

SEQ ID NO: 36387 - DNA, 126 bp, Glycine max
cccacgcgtccggtatggtcatatatgactgctataattctctaccataaccgggcgtgccgagagcattgaaagcacctgatgcaggtcacccaaatggaacaactggccacatgcaccacaact

SEQ ID NO: 36388 - DNA, 371 bp, Glycine max
ttcaaacattattttgtaaaaaaaaaaaaaattttaaaaaaattaaaaaaaaaaataaaaaaagaaaatatggaaaaaaataaaaggaaaaaaaaaaaaaaaaaaaaaataaaaaaaaaagggctcccattttaaaggttccaaacttacgtacccttacattccactacaaaactcttttataaagccaccaaaattcatattactggcccaaattttaaaacatcttaactggaaaaaccctgacattccccaacttaaaccccttataaaaaatacccctttttccagttggcgtaatatcgaaaaagccccaacatatggccctttaaaaaatatacacatcctcaatggcaaaaggaaccccccct

SEQ ID NO: 36389 - DNA, 455 bp, Glycine max
cctcaccttagttgatcgtgttctcaggatgaagtccaactatgctgccagtggaatacgaacgctgcgtggaagctgtcttactgatactgatgggttgaagcgtaagctggcaaggaagctctctgtgaatgaagatggggacgggtcagaatgggaggtgggtgaatgccttggaatgtggtggaggcctgattttgaaacattaatgtatcccttcattccacctaatgtaaaaaagccaaaggagtgtaccaaagtcttccttgtgaagctgccagagagtagaaagttcattgtgcctaaaaacatgagggtgcttgcagttccgttgtgccaagttcatgaaaatcacaagacatatgggcaaattatatcaggggtcccacagctgctgtcaaaattctctttcaacatgatagaatcttgatacctgattgcaacctattttatca

SEQ ID NO: 36390 - DNA, 430 bp, Glycine max
aacttaactaataaggattggccaaatggcctgggtaattatggagtccctgggaaaaggatgaaacctttttctacctaactcaaccgaggcactaggagtggaaattttgaaatcccgtggattcttcactcagtcatactggtactggataggtgttggggctttgattggatatacattacttttcaactttggctacatccttgctctcacatacttaaatccacttgggaaacatcaagctgttatatcagaggaacctcaaatcaatgaccagagtggtgatagtaaaaagggaactaatgtgttgaagaacatacaacgtagcttctctcagcactcaaatagagtgagaaatggcaaaagtttaagtgggagcacctctcccgagacaaaccataacaggacaagaggaatgattcttcct

SEQ ID NO: 36391 - DNA, 448 bp, Glycine max
atcctgcttcccataccatccatatttcttctgttgcatacaactcactattccttggagaattcatgcaacctgactgggacatgtttcatgtaagtggaagtgtgaatttctctcctccatttataatttattaaagtgcctgatcttttctcaagagttataaatttgcttcatgttaacaaaagatctttgtaatttcagagtttacacccagcagcagattatcatgctgcagctcgtgcaattggtggatgtcctatttatgttaagtacagtgatgttttatgtcacatctttttcttagatgaaattggcacaaattgtaatgtgtgattctgtatttatgatggtttttaacagttgacagccaagcaatcacaattttgatcttcttaagaagcttgttctcccggatggttccggtcttcgtgctcagttacctggc

SEQ ID NO: 36392 - DNA, 451 bp, Glycine max
gtcacgcttccgccaacgcttacgcttccagagccaaccgaaagctaccatcatgggctaagttcaaatacaatattggaagtcacttaccgtacgggtcggctggatgatactgcatcagtttgaagggatcaatgccattgttttttatgcaaactctatatgtatctcttctgggttttcagaaagcatcggaacaatagcaatcgttgccgttaagattccaatgacatactataggagtacttctaatggatcaatctggaagacgaccacttttgctggtacaaaagtatgaactattgttcctactctactattttgcagtgttttacaagttgagtctaaaaaattttgattctcatacaggtgtctgcagtgggaacatgcgtatgatgcttgctggcagcctagacattcattgtgcaggacttacataagtggataggag

SEQ ID NO: 36393 - DNA, 411 bp, Glycine max
tcgcccacgcgttcgggatgacgaggacgaagacgatgaagaggaggatgacactaagactaaagggaagaagagtggtaaggcacaggctggtgatggtgatggtgagcgacctccagagtgcaagcagcagtaattgtttgtttcttcggagtatcatgtggctgatgggtgtttttgaggtcctatggtgcctgacgggaaagtgggtttcaatttcatgcaatttttcatagtccttgattcattttcctccctagatccgatagtctgaatttattgagtcaatttctcctttttcccatattttgggagaatgtggttatatatttgtagtcagggatgctgtgaaaaaaaaatatcactggaaagcaataagagtaggactaaagggatacagatgatgctatg

SEQ ID NO: 36394 - DNA, 426 bp, Glycine max
cccacgcgtccgcccacgcgtccgcccacgcgtccgcccacgcgtccgggttggtggggccacgagtatgttaggaatctagctggagaaattgctcaggaatacacaaaacgacagagtgaagaggcccccatagatgatctcatggaacttgtgcaacaaattgttgcttttcacatgaagcataatgcagaacctgaagctgttgatcttttgatggaggttgaagatctggatatgttgagtggacatgttgacaaaacaaattttaaaaggacttgcctatatctcaccagttctgcaagatacctcccaggaccagatgatatgctagttttggacattgcatattcaatttacaaacaatttgaagaatatccaaatgcactccaaattgcattgttcatggataattcgcagcatgtg

SEQ ID NO: 36395 - DNA, 237 bp, Glycine max
attttatataaaaaaaaaaaattaaaatataaaaaaaaacatataaaaaaaagagaaaggatatattaaacgataaaaaataaaatcaactaaaacaatttatccttcttctattttacaaatccctagttacatataccgactacttcatcccaaaagctcttgattccttcaatattgtttaaatcatttaagcaaatggtctcccatgaaccatcattaagatcactttccttc

SEQ ID NO: 36396 - DNA, 455 bp, Glycine max
ggatttgggcacaattaaatctaagctggagaaaaatatttattctggcactgaggagtgtgcagctgatgtcagactgaccttctcaaatgctatgaaatataatcctcccagtaatgatgttcatttgatggcaaaggaactcagcaaaatatttgacagaaaatggaaagacttaggtcggaaatggaagtgtgaagatgagcatgataaaagcgaatctgaaacaattaaggaaactgggagaaaaagtcttgacatgctgtcccggcatagagattccttgcccaaaaagacacaagtatctgaacacaaaagaatgcccaagattagatcaattgcaacaaaattgcaagcgtgtaattacctaatttccagaacaagaggtaattaaaggcagatatagtcaaaagactagaatccaaacaatatgtgcatttacaataattggctgt

SEQ ID NO: 36397 - DNA, 417 bp, Glycine max
gccgacgcttttattcctcttcaaaatttcgacatctatccaagcgatagacactctggtctatggaactagtagcggagtgcgaacgaactctgtacccatacattactggatcctctgtacttcctatcaaatacaaagatggtattctaatgaccgctgacatgagatgttcctatggatctaccctgcggtataagactgtctagcgtatcaagcctattataaagcattctcttctaggtgctacctgtgaaataagttactatcatgaaatattccgctaccttgacgagcttatcctttatgacaacatgtacaacgatcgtaattcattagggccgaatgacgtgcataattatgtaacccgtgtcatgtataatacacataacaagttcaatccattgtccaattcac

SEQ ID NO: 36398 - DNA, 395 bp, Glycine max
gaatcgacggaccggtccactcgtccgcatggtatactgtactcatgctctcatccaatttaaatctaatctcattggcaccagaaatgatcatgtatacacggggcgtatactcttactgccaatatcaggagctcgtcaagcacaactattgaaatggcgacattaataccgctatagaattactctgaagtggcagctgccatatcgaaaattgacaacagtaaacatatacctgaaatcccagagcatctttcgaacgatgcacaaaatttgatgacgctatgctgacaaagagacccataagctcgaccgacagcccataagctactagaccacctattgattcgacatcaatcggcatcaaaagctgcaaatgtgagcataaccagaga

SEQ ID NO: 36399 - DNA, 302 bp, Glycine max
gaccaaatgctttgtataccattgattggagttgtgcattccataccattcgagggatatacggtctatgccagatgctgtacagtcctaattttttgagccaccattatgactaggaatgagttgacgagattatggaccgttaggtcgctggccaccatttctctcttccaatcattgccgaaattgacttgtacaagttcgacccatgggttcttccaagtggagcgattttctgtgaaaacgagtgttactttttcagcctcagagacaggaaataccctaacgggtctcgaaccatc

SEQ ID NO: 36400 - DNA, 338 bp, Glycine max
gtctgcttatgaagtctctcgaagcatctttctttctctttctgcagaagctattcgtgttacttgtggcgaagtattcaacatgcaaagtgcatggttgatttggaaatccacgtccgcatcgcattcgacccgtttgccgatggcaagagaatcagatgcccactgagcaaaggagtatgtgcacatactaattcagcaaaggaatgtaaagaagagtcttataacagtgcaagggatgaagaaggagcatagcgtcatgaagatcctcgaggacctgatgaaggacttctactgcaactggactgtggtgcacgacaaggagcttgtcaagatta

SEQ ID NO: 36401 - DNA, 313 bp, Glycine max
tcgacccacgcgtgcgcccaccttccagttgatcatgcatacccacttgcaatagagtttgactatcctacgcgcgatgcacggtcgcgggccactttcatgggcgtagagcaatgcacatagtctcatgcccacgagctttcgattaactcatgacgtgaacatttccaactgcatgaccattctggaagaacttatgcctatctcaatcgagatggctaagcgaaacttgaggtgcatctggaacttcacgaatgctgcggcccagagccacaatgagattcttgagatgtacacggattacatcgatcca

SEQ ID NO: 36402 - DNA, 361 bp, Glycine max
gcgtgcgtataaaaggaaaataaagaaattagcgtcaaaatgccgggtgtgctcagcagctccatagtgtcgccgggggacgagctcgtggccgccggcagccgtacttcgtctgcgaatatgaccgcagctgaactgccgaagcaggtcgaggagaagaacccctacgacgagtcactggaagttcgagagcatgtccagctcgcttatacccagcacaacgagtctgcgattcagcccacatcctttgctgtcaacgatgactgcgcctgctcgtttgaggtagcccttgacagtttgggaacactgatacaacaatatggactgcacaagtcagtcaatgaagtattggtcgtcattg

SEQ ID NO: 36403 - DNA, 350 bp, Glycine max
acggtgtgacgatggtagatcttcaagccaccgaactttcaggcatgcatgccttatcgggaacaggtagctggcactgccccgtacacatttaaccatcggctctgcatatgcttactgtggtgaacttggcgagaggatcgtgactgctggtcgatacaacgaagatcacgcaagatattgcttgcagcagctaatatctggagtcagctactgacattcaatggtaattggtcataaagatcgaaaagcggcaaacactgtgctggatggaaattcgattcctagcttaaaatttgtgactttggttatcacaagtctgcgctactgcactctgaacctaaatcaac

SEQ ID NO: 36404 - DNA, 295 bp, Glycine max
cccacgcgttcgaccacgcgtccgcttgcggttcgggttttagcgcatcttcttgtagattggaggtagatgggtaaggaaaaggctcacatcagtattgtagttattgtccatgttgactctgggaagtccactaccactggccacctgatctacaagcttggacgcattgacaagcgtgttatagagagatttgagaaggaagctgctgagatgaacatgaagtcttacatgtatgactgtgtgcttgataagcttaaggcttatcgtgaatgaggaatcacatttgatattg

SEQ ID NO: 36405 - DNA, 448 bp, Glycine max
cccacgcgtccgcatactcttctcatactccttctgatcttgattccttcaaaacctttcacagccatccgggcatttgcatacctgaaacactcaataatattactttcattgtagaaggacataccaaatttaacatcacaatactgaatcaatatctgaagcaaacttcttatatatctacaacttactagatattgcttcgtttccagacacatctgaaaacatcacatttcacttctaatcggctgctgatcccaatggaagctctgctgacaagctcactgtctaataccataccaaaagatatgctcaccccaacctagaccaacttaaatctgtaaaagccaaagctgatgctctctttaaagccattcaagcttaccttttggccaatcccgattacaactaatccaattcgatcaacttcatgattatcatcactatc

SEQ ID NO: 36406 - DNA, 295 bp, Glycine max
atcaggatatattacattaagaaagctccccatatagacgcatatggcttgcgatcgcaaagtgaacagctgacgccctgtgccggattcagtgcactgcctgtgactaaacacatgtctctctggcagacaacaatcataagaccatattgataagaccatatcccaagtggatattgcctaccttcaagtcatttagctcatgactatcccttcaatccaccaaaagttgcttctcggactctagtgttccacccaaacattcaccgtgattgcactctatgtcttgacattc

SEQ ID NO: 36407 - DNA, 204 bp, Glycine max
cccacgcgttcgctaacggcttctgcaattgtctgcgtctatctctgaatatactctctcgaatggctgcccatactatcgcgcatgctacccttaaaggtccgaatgtcgttaatgagatcacacttggcataacacttggctcatctgctgatagtcagtccaagatgcaccactggaatgaccagacgaaaaccaggacct

SEQ ID NO: 36408 - DNA, 446 bp, Glycine max
ggcgttttgggcgcaagggggctgtatttaacctgatatgtggtgaattggatgaaagggtcatgtcgataatgaaagatatagaaaaagagaattctaagtgtcaggttcttttgttttctgctacatttaatgacaccgtcaagaatttcgtttcaaggacagtcaggatggatcataataaactctttgtaaagaaagaagaactatctttagatgcagtgaagcaatataaagtgtattgtcctgatgaacttgctaagattgatgtggtaaaagattacatatttgaaataggagagaatgtggggcaaacaattatatttgtgcgctcaaaaattactgcaagattaacacatgaagcacttgttaagttgggctatgaggttacatctatacaaggttctcttagtaatgaagagagagacaaaattgtcaaagagttc

SEQ ID NO: 36409 - DNA, 175 bp, Glycine max
cccagacgtccgctgaagatgcttcatttccacagttactacatccagcttcactttcaggaatggttaaatgcatgtgtaggtattttagacactgctatagttccaagcctgtacttgaacttacaatctgagcaatacctgctgacacttgggagcacaaaattgtggaatc

SEQ ID NO: 36410 - DNA, 394 bp, Glycine max
gccacgcatccgttcatactgggtgtatgcacattcggggatcaaatcaactgccgagaggcatgggctactatatacaaggacctagttacagatgccgacagcgtgataccaaaggctcttgattccttcaagagtgtcgaaaacgtcaagggaaatggacgaccaagagccatcaagaagatcactttccttgaagatggataaaccaagtgtgtgctgcgcaagatttacagcatatatgaggctaactggggatacagctactacgcacttggtgatactgcattgccagacacagtggaaacaatcacattatactactaaacgcttgctggacccaatggatagtctgctgagaagctcactgtcacatacgaaacaagaaggagat

SEQ ID NO: 36411 - DNA, 455 bp, Glycine max
  unsure (1)..(455): unsure at all n locations
cccacgcgtccggttctttcttgtgcttttcctagtggccagaaccatagctgcttctcgaagataaagaacatctgatgctattgaattgatctcccaaatcctaatttgcaggccacataatacagaaaatagttcacatcaagatgaacatcctacgctctttttggaacagtcccactggcctcaaaacaactcatttttggggtcctgccttcaactggagcccttgctttgccgcagcaatggacacaaagaaaccaccgganacaatatctgtcaatatgaccggagtgatgtgtgtttattcggcactgtgcatgatgtttgcttggatggtacgtccaagaaacccacatcttcttgtatgccatgtcttcaatgagacagtgcaatngtatcaactctcaggatggttcagagctcaaaggggccttgagcatgacaaaaaggat

SEQ ID NO: 36412 - DNA, 225 bp, Glycine max
cccacgcgtccgctagattcagccacagattcggaggataagaacatagtcctaggagagggcccgtactaagcagactgatcctaagtccacatgaggaaaggctcctatgaagcatctcgctgccaatgctgcacgtaagtctgcactcaactactgactgtgttaagtagccacattgttcccgtcctgttaccgatgctctacttgagattagtaaatacc

SEQ ID NO: 36413 - DNA, 427 bp, Glycine max
  unsure (1)..(427): unsure at all n locations
cccacgcgtccggacaataagagaattgtttgaatttattgtcgatgcatccattactgatgatgccgtggatagttacctagaagaggtgcaccaaaaaattttggcgagagatgtgtctgctgaggatgagattgcagactctgtatttgtgcagtcctatattccgaagacactagaggatgtgaagaatgctgaggaggatgtacaacggataacaagtgggaaggacaccaaagatttatactatcagaccattactggacttaaacatgctctgtcattaacacagacttcacagcanaaaacccatcagcagaaatcaagtcctacaaaggattcaccggttatttctgatgataaatctaaccttttagaggatgatgccgagggtcaatctgggcaggatgaagacgatgaaagtgat

SEQ ID NO: 36414 - DNA, 445 bp, Glycine max
  unsure (1)..(445): unsure at all n locations
ctacaacattcactccctctctcttgtcttttcctctacgttcctgcattgctcgtctcgaacgctaaccatggccggcggaggtttcaccagcggcggcggcgccggagatttcgaggccaaaatcactcccatcgtcatcatttcatgtatcatggctgccaccggaggtctcatgttcggctacgacgtcggcgtttcagaaagacagtggaagagaaaggactggacagtaattactgcaaatacgacaaccaaggattacagcttttcacgtcgtctctgtatctggctggtttgacttcgacgttctttgcttcatacacgactcgtaggttgggaagaaggctgaccatgttgattgctggggtattcttcatctgtggagttgtccttaatgctgctgctcaagaccttgccatgctcatcgntggcagaatcttac

SEQ ID NO: 36415 - DNA, 439 bp, Glycine max
cccacgcgtccgatcatttcaactattgtgttcttcttggccaaataaagccaacccctggtgctgttttggtttgtctgagagagaaatgatggcattggagtgtagtagtttccacttcctaaatggggtttacatggtgctgtttttttgccttggcattgtccttgtaaattcggttaatgaagagggtttgagtcttttgaggttcaaagcttcccttcttgacccaaacaacaatctctataactgggattcttctgatttgactccttgcaattggactggtgtgtattgcacaggttcagtggtaacttctgtgaaactttaccaactcaatctgtctggtactttggctcctgccatctgtaatcttccaaagcttcttgagttgaatttgtcaaaaaatttcatctctggccccattcctgatggtttt

SEQ ID NO: 36416 - DNA, 254 bp, Glycine max
cccacgcgttcgtagaagtattattatacttccattaccatttaaaagaaaatggcatagacgggtattgacacattcgaggacgatatcacctctgctgcggctcatgctactctttacaaagatgtcgttacagatgccgacaacattattccaaacgctcttaattcctttaacagtgaaggaaaccgtgagggaaaaagcagccccgggaccaactaggaaaaaaatttcggaaacaaatgatgaaccca

SEQ ID NO: 36417 - DNA, 435 bp, Glycine max
cccacgcgtccgcccacgcgtccgcccacgcgtccgcgcggagatcaatatttgatctaggtccatcgtcgatagaagatacgagaaaccaaaggcaatgtttttgtgggattggttttatgggattctagcgtcgctcgggctgtggcagaaggaggccaagatcttattcttgggcctcgataacgctggcaaaactaccttgcttcacatgctcaaagatgaggttttgttttccttttttttttttgtttccccaatcgtttacctttttttttattattattataagagttggttttgcagagattagtccagcatcagcctacccagtatcctacatcggaggagttgagtattgggaagatcaagtttaaagcttttgatctagggggtcatcagattgctcgaagagtttggaaagattactatgcc

SEQ ID NO: 36418 - DNA, 325 bp, Glycine max
acggtttgcttttcccctcctgagttctctcgctcccaccaacggcagggtcaggccacggggcgggccccacccctgcgcatacattgccatctgtttctcctgtttttgtttgtttgtttgttttccgatttccctttttacttttttttcccctttcttcctacacttagtttcttgggctgggtgggatttgcacagctgcagtcctggccccaggcagtcccccacactctccttctggcatcagtccctgccctctttttcacatagagcctggcttgggagaggggcttaactcttggtgtgcctggctgtctggtgt

SEQ ID NO: 36419 - DNA, 392 bp, Glycine max
agccgcccgcttgcccgtcggtcgctagctcgctcggtgcgcgtcgtcccgctccatggggctcttcgtgcggctgctggctctcgccctggctctggccctgggccccgccgcgaccctggcgggtcccgccaagtcgccctaccagctggtgctgcagcacagcaggctccggggccgccagcacggccccaacgtgtgtgctgtgcagaaggttattggcactaataggaagtacttcaccaactgcaagcagtggtaccaaaggaaaatctgtggcaaatcaacagtcatcagctacgagtgctgccctggatatgaaaaggtccctggagagaagggctgtccagcagccttaccactctcaaaccttcacgagaccctgggagtct

SEQ ID NO: 36420 - DNA, 414 bp, Glycine max
acggctggcaccaggagccgtgggcaagggaagaggccacaccctgccctgctctgctgcagcgagaatgggtgtgaaggcgtctcaaacaggctttgtggtcctggtgctgctccagtgctgctctgcatacaaactggtctgctactacaccagctggtcccagtaccgggaaggcgatgggagctgcttcccagatgcccttgaccgcttcctctgtacccacatcatctacagctttgccaatataagcaacgatcacatcgacacctgggagtggaatgatgtgacgctctacggcatgctcaacacactcaagaacaggaaaccccaacctgaagactctcttgtctgtcggaagatggaactttgggtctcaaagattttccaagatagccttcaacacccagagtc

SEQ ID NO: 36421 - DNA, 428 bp, Glycine max
atagaagagccttccatatatagcctctcaaaaaaatgaaaagtactacctatttggctctctgtggactttgtgccctgtcttgatcatatcagccttcagccaccgctgatattggattcggcaccgagagcaatcctagtcgaaacggcgtcacatactacgagacgacaggcataagaagaaagggccgtggaatagaatgtggcgaaacctatacagaaacatgccctctcactgttgtgcaatctacctttgatgtcgcaaagggtgtaccactgatcatatcatgcccagttatgatgcttgacatgatcgaaagacttatatcgagcctcagttgcacttatgtacccatgtgtgccctaactacgtctcggtggaccgggaatctaaagggtatgccagattaacaccatgtgagacta

SEQ ID NO: 36422 - DNA, 389 bp, Glycine max
acgacaaatggttaaatcttcataaatatgtgtacttctattgcttaaagcaaaaagcatcatcttcggtccagttgccatatgttagaggaggcgcagcattcaaaaggatctgtttgttttaatggaacccaactacaataccatttcgacaacttattaaaataaggaattaaaaactccattgttcacattaatgaatgacgatggtgcaacaatgtatatagtcacctttaccataaggataatacgcttaggctcatctaacctaatgaacgatcttcacttttctacgctttttagcacccaccatgaatctaatccatatttctacaatttgaatagattccacgctaagtactctgatcacttatcatttacttatgatc

SEQ ID NO: 36423 - DNA, 462 bp, Glycine max
cggacgcgtgggcggacgcgtgggcttccacaaaggatggtcttgattatcgacatgaacatgcaaataggaccgagttccatgaccagtaccatgtcgataatcaagaccatccttccacaaaggaattcgagcaagaatatcaagagaatgcccatttgtcatggaattgggtcctattcgaatgttcatgaaggacctcacttaatcagtttcagaccacaggctcgaaatgtaccattgcaatcttccatgactgttacagatgaacctggttactatgaggatggagagtttgggataagattggagaatgtgcttattgtcaaagaggctggtacaaatttcaattttggtgatagaggttacttatcttttgaacacattacctgtgcaccatatcagaccaagttgattgacctgaaccttctatgtcctgaggagatagattggctgaactcg

SEQ ID NO: 36424 - DNA, 315 bp, Glycine max
acgctggagtttcagcttggacactgagccaatcagacaagcaaagcaagccaggacagaccgtcctgccccaagcccagcttgtctcctgccttccaacgccatggggagcaatctcagcccccaactctgcctgatgccctttatcttgggcctcttgtctggaggtgtgaccaccactccatggtctttggcccggccccagggatcctgctctctggagggggtagagatcaaaggcggctccttccgacttctccaagagggccatgcactggagtacgtgtgtccttctggcttctaccccgtccctgt

SEQ ID NO: 36425 - DNA, 351 bp, Glycine max
aaatccctcatgagcctaacccaaatccagctcaacaatctttccatgagccaacaattctggcaagagctacattcttctgactgatctgtcctcagacaaattcccgacttggtccattctgcttattgggtccctacaaagccttatcagctatgagcatccattggcttcgcgacagccatagaattcaacctctgcgatactggcatatgatcgtactcctcatcattgatggcaacatcactacctggatgaacaccgtcgttctactcacatgcatacgcatctttcgccgcaacagaggccccgttttcgacattctcaaaagctttgtcggttttagcaccc

SEQ ID NO: 36426 - DNA, 343 bp, Glycine max
  unsure (1)..(343): unsure at all n locations
tcgttccacgcgtccggcgtcgccttcttcgctgcaactatctaccttacctctttttgcgaatctgaatcgaaatggggtcngatactgagagcggcgcttttcaggccgttatcaatcatgtcctcagtctaataatcaacaccttctacatgcaacaagtgagatctaacttcatgagctcatcagcaatgcactctgacactttggacatgaaccgatctgagagtcttacagacaacagctagcttgatgctcagtcaatagatgacattcaaattattcttgaacagaccaacatcacattgattatcatccacagaagtatcggcatctctaaagc

SEQ ID NO: 36427 - DNA, 323 bp, Glycine max
cgcccacgcgtccgcccacgcatccgcacaaaaggggtccactagagagaaaagggggcgcaaggggaaacaatcacacaatggcgtacaacaaacacgaggagcgagctgaggcagctgcgaaagttgctgccaaagaactcgaacaagtcaacagagaaagaagagaccgcgatttcggtgtcgctgctgaacaacaacaacaacatcaccaggacgatcaacaagaacctggcgtaaacgggaccatgtctaaggcggggcatgacaactccgagaacgccaccgaagctgaccttggcaagaaacaagctacaaataac

SEQ ID NO: 36428 - DNA, 338 bp, Glycine max
cttagtcgaacaaggtgcgatgctgagcaccatggttggctcctatgaaaaatgctgctaggacccgggcaagttacgaagtgagaagtggatattgtctgtgtccatgtctatgacacggtgattgacacgattatagggaaatttacatggaatgaaacaggctatgaacagttgcaaacaatgggaattggactgtgtattgcagtcctgatcatatcagcatccactatagtggctaatgtacgtgtgcttgttccgaatcagcatggcattgatgatgaacctgttgatgaaccacttaatatactatggaatatatctcagcatttcttata

SEQ ID NO: 36429 - DNA, 418 bp, Glycine max
gcaaagtgttgctttcagcacaaaagcacttgtttcatccatgcttaattacattcgctgcatgttttcaagcaagcgttttcattggaggcctttcatatggagttgatgatcagtctcttaaggatgtattttctgactttggagatatggttgatagtaaatttggctcactttcattgctgttacatggtgtcctatttcaaccacccgccagcctcactttaccatatgttcttcagtttcctttgttgtcattataatttttccatggcattataatcacagcaagcgtagcattttatgtcattcctaaataactataattgtttttgtgctgatgtattcaatggaaaatttcttgggttttcttaaaaaacaatatattttatattttttatgttattttttttatttt

SEQ ID NO: 36430 - DNA, 431 bp, Glycine max
cccacgcgtccgctcgctcagagatcattgaagcatgttcctgttccttcccacaacttgattttggagtacactttcctcagtcagcgggggtactaccctgattcacctgataaagaaaaccaagatagtttctgcatcactacacaactccaaggtaaccccaatgtccatttctttggtgtctatgatgggcatggccaatttggtagccagtgttcgaattttgttaagcataggctggttgagaagttgtcaaatgaccctgcattgttggaggaccctgttcaggcttacaattctgcattcttggcaacaaatcaagaattgcgtagtactagtgagattgatgattctatgagtgggcaccaccccgcgattacggtgcttgttattggtgacactctttatgttgctaatgttggtgattc

SEQ ID NO: 36431 - DNA, 347 bp, Glycine max
gaactacatcgcttccgcttcctcttaactgtcgtacactcatatccttttatctccagtgcaacaataagctcacatcataaaaattcacctatgcaatcctaatctcatttctacacttgatcccattaaatctatatcaaatcaagcagggcatgacccgtctcgcctaatactacattcctctctacgacttctagaagcacaaggtccaataccatgttcatccgctcgattataacacataccctaaatacacaaattacgtctagtctcgtacccacaagataatttacaagcgaaaatctgatgtatttctctaactctttgatgatatcactgctaat

SEQ ID NO: 36432 - DNA, 428 bp, Glycine max
aaaagcatataagagatggggttagaagggaaggaaacgccgtcgtttatgagggattgtgtcgataagtgtggtggctgcgccgttattgacggtggttttgccactgaacttgaaaggcatggggcggacctcaatgacgaactctggagtgccaaatgccttattagctccccacatcttgtccgaaggatctgcagtttcacacgagtgatcaaaggaatgggaaaaaaatgttcacctagattacctcgatgcaggagcaaacataatattaacagcatcttatcaggccactattcaaggttttgaggccaaagggttctctagagaagaaggtgaaactatgcttagaagaagtgtggagggattgcacgtgaggcacgagaaatttattatgataggtgcaccaaagattcttctgactt

SEQ ID NO: 36433 - DNA, 213 bp, Glycine max
accacgcgtgcggccacgcgtacgctcacacctaactatgtattacggagcctcagggcagaatggtgtgaagccaatggcatatagccaccaaaacgacctaacgattcacaacctaataaaataacatcaagctactcttctggttagcaaaataagattgaaaggcttctacaaaagctcacatgagtgagtactgaagaccagagatca

SEQ ID NO: 36434 - DNA, 427 bp, Glycine max
aaaaataaagttgaaaatcagggtgctggtaatattccaagatacttgaatcttgaaccggcacttgcaatggattggcttgagataccatgggatgatttgcgaatcaaagagcgtgttggtgccggatcatttgggactgtgtatcgtgctgaatggcatggatcagatgttgctgtcaaagttttaacagttcaggatttccaagatgatcaattgaaagagtttctaagagaggttgcaataatgaaacgagagaatacaccaaaacccaacatgaaaacccttaacaaagcctcacttattatattccctctcttgttcctttccctattcaagcattcccatgctgcaggaatcgctatcttaactggggccaaaacggtggagaaggcaccttagcagaagcttgcaacactagaaacta

SEQ ID NO: 36435 - DNA, 435 bp, Glycine max
cccacgcgtactttcactcgaccaactccgaacagacactatatgattacttcgtacaccggatcaatggattatagagcgggcagtactcctcggcatgtgcaacgcctctcctcgacatctttgcactcgtacacgacgctttcttgcaaaaatacgggctcaagttgaacgatgcgaatcgtcctgaggataaacacaaacctatgtatgaagaatgggctaacaattctaatgtgaagtacattgctggacgtgctactcacaattgaatcaggcttgatcactggatgcttcaagcaccaggtgccacaagctacataggttgcataggaaaggacaactatggagaggagatgaagaagaaatgtacaaccttgatggtgtaaaggctaactattgtgaaatcgcacaatacaactactggaacttgtg

SEQ ID NO: 36436 - DNA, 459 bp, Glycine max
atctgaactgagtaatgacactcttaaccctttatcttcttggaaccataattcatccccgggcaactggactggtgtcctctgtgacaagcatggccaaagagtgacaggccttgatctttcaggcttgggactctcaggtcacttaagcccttatattggtaacctctcctctcttcagtccctccaattgcagaataaccaactcacaggagtgattcctgaccaaattggcaacctattcaatctgagacttctaaatatgagcactaacatgttagaaagaaagcttccttcaaacaccacccacctgaaacagctccagattcttgatttatcctcaaacaagattgccagcaagattcctgaggacatcagcagcttgcaaaagcttcaggctttgaaactgggaaggaatagcctctatggtgcaataccagcatccatagggaacatttc

SEQ ID NO: 36437 - DNA, 293 bp, Glycine max
ccacgccgacccacgcgtgcggtacactcggagtagacttttggtgttcccacatacagggatatagcactcctgggggaaaaggtcttgaggaatctaatgcaaacttggatgaagtggatgcccttgctcaagagctccagactagagctaaaaaaagagggttatgagtaacagctcattagttcatgcattctccatacatgcatggcgctgctactagctctgaattgaaggcacacgcatatgctgctgatcagatgaagatagccatgaaggtgacacattatatg

SEQ ID NO: 36438 - DNA, 417 bp, Glycine max
cccacgcgtccggatccaaatccaagtactgttgggttggagagaaaatgcgtccctgcggaaaacacgcaaaccctaaaacgcgaaaagggttctaagaatttgcgaaggaaagagctagcggagatggagattcactacagtaacagctatttcgagaggcgccccatcctcaagtccaaggctgccgctgtcaaatgggtcaaagaatgaggataccttgaagaccttgaaagaaaaggtaaaagagccttcagtgccagagccagaacctgagccaactactgaagtactttttctttgcagctatgatggctgtggaaagacattcatagatgctggtgcattgaggaaacattctcacatccattgagagaggcagtatgtttgtcactacgatggattgtgaaagaaatt

SEQ ID NO: 36439 - DNA, 347 bp, Glycine max
tgcacctcataccatgatcgtcttttctttttcaattgcctctttccttctacctaccctgcatgttcaccgaaagttcactaccattcaagtggcctaatgctaaatccaaatttatataattgtggaaaagtctgccttagtctctttagcacttatcatcttagtaatagttaaaattgtataccacaaaaatcaaccatgctacaaatgttggtttcgatacaagctctaattctaaatgaaaagcctttttttaatgagcctgagtatacttcaacatattctggatcttattgtctaactatatcctatgaattcaaccagagttcatttattttattctt

SEQ ID NO: 36440 - DNA, 279 bp, Glycine max
ccattcacacttgcacatgcattttatctcaatccataaaatcacgtaacatcgtgcacttgtaaactcttgcatccatcatcctaagcaaactacatctcagttctctctgaagataactccaatatggaactgggtcactacagaagacctctctataagtactatgctcctacttgtaaacactaccaaaagcttgctccataatataaaaaccctggaagcaacttccataaagccaattctatattcatctccattgctgactgtcatcagcac

SEQ ID NO: 36441 - DNA, 426 bp, Glycine max
atactctgctgcatatcacacaccacctttgcatataagagagaacagagaggatactctgtcttacatgctgcatcgcaggttatcatgcaggactccatctcaatgaagatctaccatccggatctgatgtccgctatcttcaagggcaagctcgacatctccaacgtctcctcctctaccaacgccggcgcctccgacttactcatagagaaccgttacttgctgatgctgctgaccatctgcgttgtcatactgatccgctgcgtcatcgactgcatacagcgcagatcatcatactgcaatggcaagccttttgagccatctaaactgcgttgcaacaagcttcccgaaatcaaaatctacgactgcaccaaaaatgtcaccatgctcttccgcactcaaactcggaccgtcgaatgcttc

SEQ ID NO: 36442 - DNA, 372 bp, Glycine max
catggctgccctggacgcagcagaccgcgccaagaagaagtgacgctggagccccgggtgctggctggccacctgccctgggagtcttgctgtgccacacagctccccaccccctgctaggaggtcccagtctcacgccttcctcatgtgttgttctacctgctgggatgggggtcagcctctctttggtgacgtcacgttctctgggatcctgaggacccgggcctcaaatcagggaggatacgcgggaggccccctccatccaggcggtgctcctggggtgccgggaccgggcagtgtcacaccctgcctgctcagtcctggggtccgagatgctagggacgcttgaatgaaggatgtggtgttaaggcc

SEQ ID NO: 36443 - DNA, 383 bp, Glycine max
gggacaaatttagtgtttgaagatgaaatcactgcattacaacctgaagtagataagttgaaaactctaaatgtgaacaaaattattgcactgggacattcgggttttgaaatggataaactcatcgctcagaaagtgaggggtgtggacgtcgtggtgggaggacactccaacacatttctttacacaggcaatccaccttccaaagaaggtgcctgctgggaagtacccattcatagtcacttctgatgatgggcggaaggttcctgtagtccaggcctatgcttttggcaaatacctatgctatctgaagatcgagtttgatgaaagaggaaaacgtcatctcttcccaatggaaatcccattcttctaaacagcaccat

SEQ ID NO: 36444 - DNA, 402 bp, Glycine max
cccacgcgtccgcccacgcgtccgccaaagctctccacctcctccagcatctcctcttcggttttcataaacaaattatgcggctcgcggatgaacgcaagctcctcatggtccacatgccagccacgagacagccagttgtgtggcggcacaaggcgaaaaaggaaaaaagcaaaatcacttcgcaatcgattacggttttaacgccatcgttgccgccgcgaacgggtcgaagctcacgattctgaagtccccgacgggccgcgagatcgaggcccactatgagttgggccgcgaactggaccacagcgagttcgggataacctacctctgtacgaacaaggagttggggatttcatatggttgccgctgaaagattgaagcttttttggtgtagaggaa

SEQ ID NO: 36445 - DNA, 397 bp, Glycine max
attagttcattctctttgcgcagatccctacctctcctttcaagatgcagatcttcgtgaagaccctcaccggaaggaccatcacccttgaggtggaaagctctgacaccatcgacaacgtcaaggccaagatccaggacaaggaaggaattcccccggatcagcaacgtctcatcttcgccggaaagcagctcgaggacggccgtaccctcaccgactacaacatccataaggagtcaacccttcaccttgtccttcgtctccgtggtggcatgcagatcttcgtcaagactctcactggcaaaaccataaccctagaggtttaaagctctgacaccattgacaacgtcaaggtcaagatccacgacaaggagggaatcctcccagaccagcaacg

SEQ ID NO: 36446 - DNA, 357 bp, Glycine max
gccacgcgtacgtccacgcgtccgaccactcgtccggttcgaaacccctgtgatctcagagcaattccaatgcctctggatctcgtctcgatcgatcgatctcgaacatgatcactgaggagcttctcaacatcgaagcctttcgaactcaagttgccctctgagctgaataagcagatctcatgttctctccaattgtccaataagaccgatagctatgtggccttcaaggtgaaaacaaccaatccgtataagtattgtgttcgtccgaacactggtattgtcacgccacgatctacgtgcgatgttatcgttaccatgcaagcgcaaaatgaggcttctggtgatatgcaatgc

SEQ ID NO: 36447 - DNA, 257 bp, Glycine max
cggacgcgtgagcggacgcgtgggcggacgcgtgggaggacgcgtgggcggacgcgtgggctgacgcgtgggaaaaaaaaaaaaaaaaaaaaatggaaaaaaaaaaaaaaaaaaaaaaaaaaataaaaaaaaaaaaaaaaaaaaaaatatataaaaaggtggtgctatgtataaaattttgggtatttatcgcctgattaaaagctgtattatcatgtattgggattaataactaggataaattgtattacatttta

SEQ ID NO: 36448 - DNA, 354 bp, Glycine max
gaagtacttagttagaatacggaattatcaaaccattccatcaccacctgtctatgttggtccactagacgttacgtcccaagtacactaacaagctgggagcagaatttcaggagtatcgaacgatatatgcgtgaaaataaattgttaggacagctgtatattaggcataaccagagtaatgcagatactgatcgtatcctgtctagagccaacaagagttgcttgtctttaccagacaccaattgcttttatgccaatgctcagaagccatcacgacattgtgcttatggctcaaggaccgctagatctatgctggctagaatggagaagctgtcgcatagatcttggccc

SEQ ID NO: 36449 - DNA, 417 bp, Glycine max
gtttcaaatttggagcatcttcagaatttggtggtcattgactgcaaagggttggaatctttgagtgttgactccacctctgagcttcacatgttaaccatcttggattgcttagagttgaagactctccatctcaaaacttctaggctcaagtcttttcggtatcgtgggcctcttcctttgcttaggccagaatatcatttcaacctgcgtgatgccatgcttgatttcagattaggactaagctgcagtggtttaaagaccaaggattttgatgcaacccttttaacaataaagaactgtgaagttcttactctgtgtaaatggacttttgaggaattaatatggccatcgatttctcctctatctgggagcttcatattctataaattaagagagttatggtggattgacaac

SEQ ID NO: 36450 - DNA, 412 bp, Glycine max
aatttttcatcaaagaccaaactagctttattcgactcaaccactatcctccatgccgttatcctgaccttgctcttggcgtcggtcgacacaaggaccctggtgccttaaccattcttgcacaggatgaggttggaggacttgaagtgagacgtaaagcagatcaagagtggataagagtgaaacccaccccagatgcttatatcatcaacattggtgacactgttcaggtgccagtgtagtaccatattgaaaactgaaaattttgaaatttcggtgtctggttctaacacactctatgattggttgaaatttattagaaactacaaaatcatgaaaggaccgttaagtaagacgtcagaagcacaattttcttgtaattttcaataaatttaaaccaatggtaagtgtg

SEQ ID NO: 36451 - DNA, 305 bp, Glycine max
atttatacctacctctccctcaagaatccaatcttcgacagaccctcactgctagactatcaaccttgacgtgggaagctatgacaccatcgacaacgtcaaggccatgattcacgacaaggaaggaatccaccctgaccagcaacgtctcatattcaccagaaagcaactcgaggacggtcgtacccttgctgactacaacattcataaagagagtactcttcaccttgtactccgtctccgtagtggcatgcagatcttctttaagacactcaccggcaagaccataaccctagatgttgaaa

SEQ ID NO: 36452 - DNA, 304 bp, Glycine max
aaaaaaagatcatacatagttactgtcggtgggtcgcaaagatgcttgggggccttcgagggaggggtcataagataaaggggacactctgtgttgatgctcaagaatgagtacgacgtgaatagcgtatccagcgaccctggaaggatcgctcaaggtgcttacttaatcaggacaacactccatactattactgcctactagggccgatccacgtttgttcagcttattactgctacccaagctgatggcgactgcaacaggaatcttagaaaggctacactttgtcgaatgtatcattact

SEQ ID NO: 36453 - DNA, 240 bp, Glycine max
catatcaatccccccactaatttcaaacacaaattcacaaacaatcttcaaacctcgctcaaacaaatcactttttctccttctacactatacactaattatacctaccaccttcatgtttattttcctataaattacccaattgaatcttctctatttatattctttcattcccctactcttcattcccatatttacaataaccatcacatttgtttaaatatattttattatttatta

SEQ ID NO: 36454 - DNA, 429 bp, Glycine max
gttgatttagtggagcaatgtcgaacatacaagcagagagtggtaaaccttgttaattcagcttcggacgagtcactgctatgccaaggcctaactctgaatgatgatctgcagcgtgtcctggccaaacatgaatccattgcttcaggaacttctgctcaaaatcctgctgagaaaccgaaacctgcacctactggagcacttgtagatgttgatgatcctttggttgatattggagatactagtaaacaaacagatgtgagatcgtcttctagtgctggagctgggtctcaaacattgaatcagttaatgcttcctgcacccccaacatcaaatggatcagtcccccctgcaatggttgatccccaagtggacctactcagtggtgaagactataactcaccaaaagcagaaacttcacttgctctt

SEQ ID NO: 36455 - DNA, 382 bp, Glycine max
caaaactttccgattttggcttggccaaagatggtcctgaaggagatgacacacacgttggaactagagtcatgggcacacaaggctatgcggccccagaatacatcatgacaggtaaataatttcacatcaagaagtaaaaaacaatgacaggttgacttggagtttaatttttaactcattgctagctcaaatctcacacgtgtacatttttttcttcttccgtataggacacttgacagcaatgagtgatgtgtacagttttggagtcgtgctcttggagcttctaacaggacgaaggtcagtggacaaagggcgcccacaaagagaacagaacctcgtggaatgggccaggtctgctttgaatgattcccggaaactt

SEQ ID NO: 36456 - DNA, 358 bp, Glycine max
cccacgcgtccgccttaagctccttagtgcttctccttgcagctctaattctatcccctgaggtgcttgcaaacgatgagagtcccccaatgtacaaacctaccactgagaaaccaccagtttataagcccccagttgagaagcctcctgtttacaaacctccaattgaaaaccccccaatttataagcctccagtatagaagccaccagtgtacaagcccccagttgagaaacccccactgtacaagcccccagttgaaaaaccaccaatgtacaagcccccagttgagaaaccaccagtgtacaagcccccagttgaaaaacccccaatttacaagcccccagttgaaaaaccccc

SEQ ID NO: 36457 - DNA, 416 bp, Glycine max
  unsure (1)..(416): unsure at all n locations
acgcccacgcgtncgaaacatggctttcttaaagctcccttagtgctgctcccttgcagctctaatgggtgtcctctcaaagtgcttggcaaactatcgagaatccccccagtgtacaaagccttccacttgagaaaaccaccagtnttataaagcccctcagttgagaaagccttcctgtgtacaaacccttcagtttgaaaacccctccaatttataatgcctccagtagagaagccaccagtgtacaagcccccagttgagaaacccccagtgtacaagcccccagttgaaaaaccaccagtgtacaagcccccagttgagaaaccaccagtgtacaagcccccagttgaaaaacctccaggttacaagcccccagttgataaacccccagtgtacaagcccccagttgaaaa

SEQ ID NO: 36458 - DNA, 444 bp, Glycine max
tgcctgctgttagctggtcaaatgaaaagtattacttggagcagattctgccactttttggcgagcataaggtggtacatttcaacaaaacagatgcacgtctagcaaacaatggtctcccacttgatctacagaaacttaggtgtcgtgtaaatttccaggcattgaaatttactcctcaacttgagaatttgggccaaaaattgattcggatacttcgtgaaaatggaccctttctggcattgcatctgagatatgagatggatatgctggctttctcaggttgtacgcatggttgctctattgaagaagctgaggagctcaagcagatgaggtatgcattcccttcctggagagagaaggagatagtttctgaagaaaggagatcacagggtctctgtcctttgactccagaggagtctgccttaattctgcaagccttgg

SEQ ID NO: 36459 - DNA, 413 bp, Glycine max
cccacgcgtccgcccacgcgtccgattctcgttctctctcttcttaccgacatacatgctggtcgccacacttctgtgggggaactcgattccattattctaataatcatatctgatagagacagtgtttgagattgagggaagatgctgaccaagttcgtgaccatacgtaatagagtgaatggactgagtctccacacgtagagaccctgtatcctctcgagtcttcacagagacgtgagacacctatgggattaccgcatgggtactgttagtgacagagtcgatgagcatgatggtgctgtcagaggtgttcatgctcataatgaccagcccctgtaggtctttggaggggatgattaccagattaatgcttggaactatgtgacgcctaggtgcttggtcactattct

SEQ ID NO: 36460 - DNA, 446 bp, Glycine max
cgacacacgcgtgcgcacactttagctaactcttgaacaagtgtttaacgtacatgaaacacatgttggatgagggtgcgtctgtctaacacctagtgctagcattgcattctgataacatatttgcacaacattatcaccaagattcttcttcttagggtgaaaacttttaaggatgctgtacaacctgttcatgtacgataatgactgaccaatcataatccataggatatatatgtatcattgtacaagtatcatgatgacctgactgcacttgctaggcgtgtcaagctacatatcgtcatatgtcgagatgaataaattccgcgctgtatccagatattatacacgagagcaacaaacactgcttctattacagatggacctgatgtgatgaaaactgcattagctgaaagattatctcaacgtatagtgcctgcagatgt

SEQ ID NO: 36461 - DNA, 434 bp, Glycine max
  unsure (1)..(434): unsure at all n locations
nncgccacgcgtncggccacgcgtccgaatctcggtctctctcttcttacctacatacatgctgaggggcacacttctgtcggggaactcgatttcattattctaataatcagatctgagagagacagtgtttgggattgaaggaagaagctgaccaagttcgagacccaaagtaatagagtgaaaggactgagtttccacaagcagagaccctggatcctcgcgagtctttacagtggcgtgatccaactatgggattaccgaatgggtactctcattgacagattcgatgagcatgatggtcctgtcagaggtgtccatttccataattcccagcccctgtttgtctctggaggggatgattacaagattaaggtttggaactataagatgcataggtgcttggtcactcttctaggacaccttgattatat

SEQ ID NO: 36462 - DNA, 432 bp, Glycine max
cacacattaactcacctcttcaacaactctttaactctctacatacctacatacatactgagtagtctctctaatgtcgggtgagactttacatcattatcttaatatacacatctacaacagacactctttattattgagctaagatacttaccaatttctggacctcaactaatatatcgaagaaactcaattttcacagctctaaaccctgaatcctcactagaattctcagacacgtgttccaactatctgacttccctatctatactctcattgacacattccatgatcattatagatctttcaaatgtgtgcattttcctcatttcctcaccctgtacatctctctatgccatgattactcgactaacgtttgtaactatatcatccatagctgctcgttcactcttttatgacacccttatttta

SEQ ID NO: 36463 - DNA, 429 bp, Glycine max
cgcagttcaagaattgaattcgttaatattttttcttctcttttatctgaatggcgaagcgcaggcttgaagacgggaagaagggcgtggtcgatctcatgcctcttttcgccaaggaactcctcgccggtggcgtctccggcggctttgccaagaccgtcgtcgctcctctcgaacgtgtcaagattctctttcagacgcgaaggaccgagtttcagagcacagggttgattggatcagctgttagaattgcgaaaacggaaggccttttgggtttctacagaggaaatggagcaagtgttgcaaggattattccttacgcagctattcattatatgtcctatgaggaataccgcagatggattatacaaacttttcctcatgtttggaaaggccctacccttgaccttgtggcaggctcactctctg

SEQ ID NO: 36464 - DNA, 425 bp, Glycine max
cccacgcgtccgctgacgcgtgggcaagatacgacgccggggccggaaatcttgttgtagcagaagtttgcaaagcgggggtggtggagcttacaatggggcggggggccgaattggaggaggttggaagagaggttgagggattggaggttgcaggcgactggctctctggactgtttgtaacttaaatgccgtcatcctcatacgcgttttcatgagcaatgtcaacaagcccttgttatccctctctagattgattcgttacaccaatggaaaggaggataagatagctgtggtagtctgtgccgtgaccgattacattagggtgtatgaagtccctgttctgaagtaactgtcctgaagtttactgatactgctataattagaattgataaggctgttgttgaattctttacctttgatca

SEQ ID NO: 36465 - DNA, 357 bp, Glycine max
  unsure (1)..(357): unsure at all n locations
acgcgtccgcccttgcgtccgcccattcgnccgcggacttgtgggtccgagagagcatcaaaagacatggacactttcttgcttcacaacttggactgaagccagggcagaaggttttggatgttggatgtggaattgggggaccattaagagaaatttctcgattcaggtaaacaagattgatttcatataggtttcctcttcctttgtctttcactgtttaactttactagctaataaaaatcaaggggtatctgtgcagcataacttcaattaccgggttgaataacaatgaggtccagattacaagatgaaaggaacctaatcgcattgcttgagtggacaagacttgcaatt

SEQ ID NO: 36466 - DNA, 212 bp, Glycine max
acgcacgcgtccgcccatacgaccgctggtaccgcgatgactttggcgcccactcaggcctacaacgcgttcgtcgacactaccaagaggaagactacgaacctgcgtgccgcggaaggggtagcgctcttcgacacgtgctacgaccagacggctctgcaaagcgtgcgggagccaacagagacatttcacagcaactgcgacaggacgtg

SEQ ID NO: 36467 - DNA, 123 bp, Glycine max
tgggatgagggtcatgattgcacttgctgaaaagggatcgaatatgagtacaaataaatacttgatgaacaagagtcctcttctttaaaatgaaccctgtcacaagaagattccgttctatca

SEQ ID NO: 36468 - DNA, 441 bp, Glycine max
gcgtccggggctacatggagggtctcttcaaaggcctttcccccactggagacaaaattgaagtctatgggatggccattttcacgttggatgagaattcaaaaatcgtgaaggtggagttcttttatgatcctgccgaattgcttggaggtctcctgaaaggtcccaagtttgatggcagtgctgaagatgctgttgcaagctgtcctgtactcaggaacaccggctagagcagcacaagttcaaaaagtttaacctttgaagtaaaggtttaattgcagttgttgcatcaatggcttgtttaacttttagtttttacagttatatctgtaggtaatatttactgcagactctccaaatccaagcaaattaatgttgtaatcaataacacccccaccctccttttccccatgtaataataagcttggtcaattattaaat

SEQ ID NO: 36469 - DNA, 231 bp, Glycine max
cttttaagcaggggtttaaaatccgagctctctcgtggtgatgtcgaaagggttacattttacacaacaatcatacaaagcaagtgactcattcccattcaaatggataaacaagaagtggagagaaagttttcatgttacttcaatggctactgcatgaaatcatatatatgttgatatgttacgaaatgcttaatttattgatcaagtttttgaacttgattatctcta

SEQ ID NO: 36470 - DNA, 274 bp, Glycine max
accacaaggcctgacatggttctttttcttcttttggactcattctttcttgcataatatcaactgatgcttctggtctgtctaatggctattgttctgttcaatatgacaatgaatatgctgcacacaatgctatatacaagctaaatggcatgcttatcaatgattatcaagtctatgtatgccattctctgctaaagtaatacatttagaattcttttatcatgactaaaatttaataatgtttattttaaaaacttattatattcaacca

SEQ ID NO: 36471 - DNA, 234 bp, Glycine max
ctctctacaaggtctatacattatgcacaggttattaatgatctactcatcaaattagacaagttcccgtcaaatctttcaccaatgttcatgattaaacccattcaatttgagaaagattatttcacatactaccatatggatgtgattgttcggctttccaacatgagggcccgcaatttcagcattacctaagtttacaagcttaaaaccaattttattgcttgactgatc

SEQ ID NO: 36472 - DNA, 378 bp, Glycine max
cactcgtcctgcttcctcagcatacacttaactactaagtcttttgattcagtctaccaaaatcccttaaaagcgtcctaatactctacattgtccattgttattaccttcactgtgttcttgctcttgcattgtctacttaaaacttacaagcaaaaatcgagtcacaagtttccccctataccatggaagctacccatcactggtaacctccatcacctttcattatcatattcacttccctgatcaaactctacaaaaactcgttctcaaatatttacctctcattcacatccaactatgtgaaattttaacactctttgtgtccttcccccaagaatattataccacatatgaaaacccattaagttcattttt

SEQ ID NO: 36473 - DNA, 277 bp, Glycine max
tttacatctgcatcttcaatattgcttctggtttattagcttcgcgaactagaacaaataaccctatacagatccattccatagccatgtcacgtgttgtccctctatctcacgattgagaacccgtcgttcttcttaagaaggctcccaccgtcgacgccaagaatgacgagaaagccgtcaactcctgccggcgctccgacgcgcaaattgaaaccctaaaaaagtataatgctggtacaaataaagcatcatctagcatcacttcattgaacac

SEQ ID NO: 36474 - DNA, 243 bp, Glycine max
  unsure (1)..(243): unsure at all n locations
gaaataatgtgcgggatcatccacaagattgaagagagcctccgtgtnngaaggcacaagaaagaggagcacaaaggagaacaccatggtgagcacaaaggtgaacacaaaggagaacaccatggtgagcacaaaggtgaacacaaaggagaacaacaccatggggagcacaaagagggacttgtggantagatcaaggacangatccatggtgatggccatgacaagggtgagaaaaagaag

SEQ ID NO: 36475 - DNA, 395 bp, Glycine max
  unsure (1)..(395): unsure at all n locations
tcgcccacgcgtcctttttttttgtttttggtttctgtttttggtttttcgctgaagcgantgcaatacatcatttggaaacataataaacagcagcacttaaaccagagatgcaaagcacaagttcaagggagacactgaacaaacagataagacatatgagaacacttcataaaagggattccccttagcaaccaccacgaaggcgaaggacaagatgcaaagtggattccttctgaatattngaatctgccaaggtacgaccatcttccaattgcttcccagcaaaaatgagcctctgctgatctggagggataccttccttgtcctgaatcttagctttcacattgtcaatagtatcagagctttccacctccaaggtaatggtcttccct

SEQ ID NO: 36476 - DNA, 380 bp, Glycine max
taccttttcaactttcaagggcagatctttttgagacgccactggtaagacaatcacccttgaggtggagagttcagataccatatataatgtaaagtccaagattcaagacaaggaagggatcccaccagaccagcaacgtctcatttttgctggcaagcagcttgaggatggacgtacacttgctgattacaacatccaaaaggagtccactccttacttggtgctgcagctccgtggtggaatgcaaatctttgttcatacattgaccgtaaagacaatcactcttgatgtccagagctcttacaccattgacaatgttaaagctaagattcatgacaaagagggtatcccaccagaccaacaaaggcttatctttg

SEQ ID NO: 36477 - DNA, 442 bp, Glycine max
atttttgtatgcatttatccaacttaattcatacggtatgcattagtgatattttgctgggcttaggcgagttgtgttgtcttgaaaaccctctcccgccaacacacttcttcttcttcttttttgtgttttgtgaatactgagatgagtgctgtgaacatcaccaacgtcaccgtcctggacaaccctgcttcctttctgaccccctttcagttcgagatttcctacgagtgtctcaccgctctcaaagatgatttggaatggaagctcatttatgttggatctgctgaggatgagacctatgatcaattattagagagtgtccttgttggtcctgtcaacgttggaaactatcgttttgttttacaggcagatccaccagatccatccaagattcgtgaagaagatataattggtgtcactgtgcttctgttgacctgct

SEQ ID NO: 36478 - DNA, 316 bp, Glycine max
ttgtctttgtctacgtcgacgacaacttcaacaccgtcacgctttattcgcaagtcggggtgttgaacatcaactggtttcagaaacagcccaactgcaatgaccaggtcagcatgacacttaatatatctgcagatttgcttttcctttttacattgaacacacaataactttttgactttctaactgctgactttgaaactcccaacaattccttgcatcatatatccctgcggtatggaatcactcccttttaagagcattccaaattttcgattcatacatctaattaataccacttcatttaccaaaccag

SEQ ID NO: 36479 - DNA, 432 bp, Glycine max
accacgcgtccggtaagggctgctgatgtgcatgctgattctgatgacctcgaaaaaagtggtcatgagcggagcaaaactactggaaatgctgctggcacagtagctcgtggtatcattgatctgcaaggataaactaatcacatgaggatggaaccgtgctttataattgtggaataaagcatcacccatttaaacccgtttggttaggtccggtctgtgtacggctgaattctgtgttttgcttgtatcgcatatgacggttatatgtcgacacttgatgcttaatcaaattgttactttgcctgaagtatgtgttagtggttatccttaataaaacaagcagttcaaggtcttctacttgaagatgaagggcgattaccaccgctatctcgccgagtttaatgttggggacgatagaaaaaccgctac

SEQ ID NO: 36480 - DNA, 419 bp, Glycine max
gatacgcgctcctataggcttccttagattcttttcacaagcgaacgtaagccttaagcgagacttacatcctttaatgacaaggcttgtacgctacctgaatgatcctgacataactgtgcacgatgcaatgatacatatatggaagtcacttatgaatgattcacagaaaaccatccatcaaaatttacatcatatcattgaatgatttactaatgcattaggtatccaacctattgagctcactttgaggtaccatgtcttgctcttacatacatattccaatgacgaacttttcatgacgttagaaatcatttaattatattatggactagaacattaagtctcatggatcacataaaggaaactgttagaataactgttcaaatattctaccgaactataacttcctttacttc

SEQ ID NO: 36481 - DNA, 358 bp, Glycine max
cccacgcgtccgcccacgcgtccgcccacgcgtccgcccacgcgtccgctcaagtggccagccatgctcagaaatatttcatcaggcaaagcaatgtgtccaggcgaaaaagacggtccagcttgtttgatattgttgcagatgaagcagctgacactgcaatggtacagcaagacttcttgtctgctaatgagttaccaactgaaacagaaggcaataaccccttgcctgctcctccttccctcgatgaagagtggtgaatcaatgggattcacaaactcaaatgatggagagcctgccccatcaaagccagaaaacacacatccatcttatcctatgttatatcctgcgtattatt

SEQ ID NO: 36482 - DNA, 431 bp, Glycine max
gaattgcagttcgcaaccaatcatttaggccattttctcttgacaaaccttttattaggaactatgaaaaaaacagtaggggtatgcaaccaggaaggaagaatagttattctatcatcagaggcacacagatttgcttatcgtgaagggattcaatttgataagatcaatgatgaatcagggtaatggtctggttggaatgataaatcaatgataaaccttttccctatttggctattttctactaagctcttgctataaaaattcataataaatgtatattattcatgtccaatgttttgagtccccaaaattgcataatttccttctctatctgagttttatacaggtatagcaggtaatttgcttatggacaatcaaagcttgctaatatcttacatgcaaatgaacttgcaaggcgcttgaaggaa

SEQ ID NO: 36483 - DNA, 346 bp, Glycine max
tggactcctgtgcgggcacgtgcctacctcttgatgcaggatgcgacaccggggatagaccctcaccgcattgaccgtatccctagagggggtacgatctgacaccatcgacaacgtctaggcctacagccaaggcatggaatgaattgcgaaggaccaccaacgtgtaagaaagcacgctaagcaactgggagactgaccgacactagctgactgcagcatcaataaagagacgcctcctcaactaggactacgtcaacatgatggcatgcaaatctacaataagacactcaccggcaagaccataaccctagaagctgcatgctccggcaccatcaatgactgg

SEQ ID NO: 36484 - DNA, 236 bp, Glycine max
aaagactttactcgaagcgatttcgatcgcggaagtacgattcacgggcgtcttgcattgattcaacaatggcacgggcttcagcttcatcaagcccgacaacggcaattagaatctcttccatcaccagtactccatcagatccgacggataccgcacacttctcgagggctaccgcttcgagttcgccatcgtcaccgacaacaacgacaagaacaatgccgtctacttcaccg

SEQ ID NO: 36485 - DNA, 309 bp, Glycine max
gcattttatacccggtctcgttagcataaggatgactgcactgctaacaggtggataggtgctgcaaaagccatgcataccaatcaagagggctacagacttgttagggcacacacgcttagagccgtacgatatacaattgctggatgctgccatacagagactctaatcgactatagaggaagagtagctatccaattgaaaggatgcatgttcacgactgcctcagtgtatgatattgccattccttatgatcactggactaatcacgatctccggatgagagcttctgctaattattccttgacc

SEQ ID NO: 36486 - DNA, 356 bp, Glycine max
tcgcggacgcgtgggtttcttcattatttcagcttttgcattggtgtcatagctccttgctgcggggggatacaaaggcatgaaggcagatgattgttgggtccaacttaaattataccatcatggaaaaattggttccaaggctttaacatttgctacatgaattaaagctctggctcattatgttcatgggaaaggtttgaagactttgatatattcacatgcatgaaattcaactctgatgaaacgcatgcctggatcacttggacacgaagaacaagatgccaaaacatttgctttttggggagtttactacttggagtaatgataattgtgaaaatattggtttatttgcc

SEQ ID NO: 36487 - DNA, 433 bp, Glycine max
cgcaggcgttgggactccagctgcagctgcagctgcagcaacagacgctaaggcaggcaagtatggagctgctgcaggcttagtgcctgttgggccatgctttgtcccggtagtagttggtgtcccaggagctggcgttccaggtgttggtgtaccaggagctgtgattccagttgtcccaggtgctgggatcccaagtgctgcggttccaggggttgtgtcaccagaagcagctgctaaggcagctgcaaaggcagccaaatacggggccaggcccggagtctgagttggaggcattcctacttacggggttggagctgggggctttcccggctttggtgtcggagtcggaagtatccctggagtcgcaggtgtccctggtgtcggaggtgttcccggagtcggaggtgtcccgggagttggcatttccccc

SEQ ID NO: 36488 - DNA, 365 bp, Glycine max
ctctctctctctctctctctctgcttcactttctgacttttgcattgtcttgtcaggcagggaatcctcagaaccaggatcggtgcccttctggctctgatctctcaaagctgcaaattctgcttgattggcttgcttgccagtttggagtatgatatcacctccgactgtagttacgcgagatgatgggctcaacaacctgtcgtctaccgggtcgtgcgactctaagcagtccttgaaccatttctctcagaatggcgctgcattgacagaacgaaattacttagggttatctgatcgatcatcagttgatagcactggcctctactgccccatagcttgtgtgatgacaaaaaggagaacat

SEQ ID NO: 36489 - DNA, 163 bp, Glycine max
ttcataatgggtgttttcacattcaaggattaaatcaactcccctgtgactcctgttacgctttactttgatctagtgacagatcctgacaacttcataccaaacgctcttaattccttcaaaaatatttaaaaccataacttaaatggtaccctaagaacca

SEQ ID NO: 36490 - DNA, 442 bp, Glycine max
ataaggctttgcatttcatttgagagagagagcgtcttacctttccattatcaaaatgggtgggtcggctatcacaggagcgaggctaaccctagggatagggttggcgatacctctttcctctcccacgcgctctcgaaccgtcgcaatggccgtatccgtcgaccccaagaccgacaacaaactcactcttaccaagtccgaggaagctttcgctgctgccaaggtacgcatgacctccctcttccttccttccttcctcctttcaattttgatttttgatttttgatttcaggagctgatgcctggaggtgtcaactccccagttcgtgccttcaaatccgtgggtggtcaaccaattgtgattgattcagtcaaagggtctcgtatgtgggacatcgacggcaatgagtacattgactacgtcggttcttggggtccc

SEQ ID NO: 36491 - DNA, 435 bp, Glycine max
ctgcctcgatcatggagaggaaaacatttgggtttttgttcttgctcctccttgtcttaggttctgatgtgacggtgaagagagcagaggcgaaagattgcttgacaaggaggcacgggttccagggtagatgcttattcgacaggcaatgtgcacatgtgtgcaggagcgatggtttcatcggtggtcagtgccgaggccctcttcgcaaatgcttttgcagcaggccatgttgatcgaaattactactgccaaagaggccatgaaataaacaaacaaacaaataaataaatagctctaaccgacacatatgtacgtagtgtcggggttctagctagctaggtaggtacgtgtgtcttttgtatggccactatacttttgatctcctctgaagttgcacccgatgatgcataccagaattttgacaaaacagat

SEQ ID NO: 36492 - DNA, 455 bp, Glycine max
cccacgcgtccgcccacgcgtccgctcagatctttctctcactctccaacaatcgggaggcaaaaccctaccaacaccacactcaatcgaaattcttcattctcttctcatcgatggggcagaagtctctgatctacacgttcgtgtcgcggggaacagtgattctcgcggagtacaccgaattcagcggaaacttcaactccaacgccttccagtgccttcagaagctccctgccaccaacaacaagttcacctacaattgcgcacacaccttcaattacctcgtcgacaatggctacagttgggagtgtgataaagagtccagaaatatctggtcttgtccctactctacttaaggaactttgtcatcctaatgagcatacaaaatattcctttaatattcttcatcaagcttttaataatgttttcagttgtggtatcacttgctaaacaat

SEQ ID NO: 36493 - DNA, 474 bp, Glycine max
  unsure (1)..(474): unsure at all n locations
tcgtcacgcaccacgccgtcacgacagaaaccgtattgaatttatcgtctcgtttcccgcggtcctaagatcgtgagcgagtttgcgaaacccctaactggctctcacacaacgacatcacgcactctctctcgatcaactactctctttncgtcgctcctaagtcatggacacgaattgcaccccgagggatcacagntttgatgcatcgtcaatatgcataccacagatgacatgagctgcttactgtccgatggtcaggatttcgttcacatcactagatgatggtttatgactaggttatgatgcatatgggcttgcaagtataatcgttctgagaggctattgatgcatataggttgtcgacaagccatcagcttattcagcagaggggaatagttccattctgcaagggacttgacgttatacaacaggcccagtctggaactgggaaaacagcaactttctgctctg

SEQ ID NO: 36494 - DNA, 439 bp, Glycine max
ctcacgcgtacggttaagacatggcctagtacattgattgggtcattaaaaacaacactgctgtgtctgccatatatgagcttgcaggtatgctatcgcacattacagcagcgcagtacataggaatgtgctatggaatgatgggtgataatctaccatcaaggcatggaagctgcatacttatataaaacacaaggcattgttggaatgcgtatatactacacagttgaggaatcactagaagtgcttagaggttaaagcattgtactgattatggacatgtataatgtaacacttcagtcatagacagacttgaatgcttgtacagactgcgtcattcaatatgggacaccttactcgcgagacgccaatttcaagttcatcgatgttggtaatgaaattcatacgagtaccactgtggcacaatatattctatgtg

SEQ ID NO: 36495 - DNA, 415 bp, Glycine max
atagaatcccattccactagaacactgctttggtgacccaaccagctagccacatcgacgcatccacacgcatttcctctaccaccgacaccgctccctgtcactgaaggaggaggatcgtcgcgactacctcgcctgcgcacactccactggatcttgatggcaaccacatcgtgcccctcaccatatgcatgatcgacaccggcggcttcataggctcccacctatctcagaagctaatggccgatacgcaccacacacgtctcgctgttgacgactactgctacaagatccgtcaccttgtcgaccccgagccgccgtacctttccaggcgcatctcattccaccgccttaacataaaaaacgactccaggctaaaggtgctcattaatattgccgatctgaccataaacct

SEQ ID NO: 36496 - DNA, 348 bp, Glycine max
tctaatctataaattcacccacatattttaaaaattcattccaaggatttactagaggcactgtttatcataacaggtatactactaatctatactaaaactccatccaatgcacacaaatattctcacaaaacaacaccatagcatgctcaaaatttaacacttttatataacaacaccattacgatcacaactatatacttttgtataacatcaaggacaagatccattatgatatccatgacaagtgttacaaaaataacaacaaggacaagaataacatggatcatttacatcaccatcatcgtcatagcatcatcattgacattgattatatcttatatgtta

SEQ ID NO: 36497 - DNA, 412 bp, Glycine max
atttaaccctgttttaataataatcctcgccactctaccgtatagatgcacctgatcgacatttctcacacccctctacatcatcagaacctcaaacttgcaaacacaaacaccttactaacctgcaatcaacgagcgctactgcttttcaaatggagagcacacattttcgatatactccactgacaaacctcatatgcatagcactcatactaatcctcgaactgatattcacatctctggatacgattatacattccgtgtatgacactttcaaagctttttatacgtgcctactagcacaaacaaactctgcatccaacaagtgttccatacataaacttcttacacaatctcatatacatccatctcttgtgctactactaatcattacctatctcatactctttaa

SEQ ID NO: 36498 - DNA, 439 bp, Glycine max
ccactcgtacgggggatgtgacggaagagtagaaggaagttgaagtgactgaagagaagagggaagctgaagtgatagtagaagagaagaaggaagttgaagtgacggaagagaagaaggaagtggaagtgaccgaaggaaagaaagaagtggaagtgatcgaagagaataaggaaacagaagtgacagaagaaaagaaagaagtggaagtagaagtgagggaagagaagaaggaaagtgaagtgaaagaagaagaaaaaggtcgggaggttgttccagaggagagtagcaagagtagtaaggtgactctgtctgggttgttgaattttatagatgggatttggtctgcttgtggaggtgaaaggatcattgttttcacgacgaattatgtggagaaacttgaccctgctttgattaagagagggaggatggataagca

SEQ ID NO: 36499 - DNA, 217 bp, Glycine max
gcggacaagatgacaacacgctacaagaagaaccggaggacgaggggcctcgacatcactgagggcagcggaatccaattgcacaggaagcaccctatacgacacactaacaccggaagcatgcaccaccacaggatcctcttagacaaataccaccctgagttcttctgtcttgtacgaatgcactatattcacaagcttcttatcatatcactac

SEQ ID NO: 36500 - DNA, 413 bp, Glycine max
cccacgcgtccgaacagacgagctccaattccagacagagtcaagttcacccagagatagcggacgtctatgatagcttacctgtctgctgtgttacttagatatagccggatgctccctgcaatcctaaatgcagctattgatctcaatttgtctgatatcataacgtaggcacatagttcatgtgactcaggtttctgaaactttgagatagcttctttgctatcaaatcaacacccacaattggctaactgtgctgaacgcatatcacctttggcggccatttatactcttgtaacatgctccattcgcacaaatgacgatggttagagagaaagagtttatgctatgtcacacgtatgtgcatactctgcatgagattacgatgaaggaaagcctttggatcctgtatg

SEQ ID NO: 36501 - DNA, 448 bp, Glycine max
gaccgacgcggccgcagacgcttaggcagaagtccttttgaaggaagctattcaagaacagatagaactctattgactggtgtatctcgtagggagaaattgattaatcatttaataactatataatttcactttcaaattcttataattagtatcttttaatatcttcatatttcatttgaatataatattaatatataaataaaatgaattctaatgaaaatagaaaataacacaaaaaactatacaataaataaaatagaacgacaaggtataaattgcatatatttgcatatatatgcaaatatatgcaaacaatttgcgtccaataggatttgaacctatacctaaggtttaaaatacctctgtcctatccattagacaatggacgcttctatttttctgtattacttttattccttaaccttattaactaaaaaaggttaaa

SEQ ID NO: 36502 - DNA, 326 bp, Glycine max
aaaacctaagcttacaatctgaaactaagactagaagaagggtaagaatagatcgctgtggatgcaggtaggagagaaagctgtagagtccattatggaaacagctacgaacattggtgcttctgtacaaggctggcatggagaagaccaaagccactgtacaagataaggcacaatgaatgacatcacgtgatccagtgcagaatgaattggcaacccaactgaaagaggcatagatgaaccacgctgatctggacaagcaggctgcacgtcagcataacacggcggtcaaacagtccgacaccacggatgggcacatgtgacat

SEQ ID NO: 36503 - DNA, 235 bp, Glycine max
cccacgcgtccgtggagttcctgctgatatggccaagaagaaaacaagtgtaatttcgagtaactggtttcctgtttgggatgaagagtttgattttccttctgactcttatcattctctcgaacttctgtgcgtatgcttaagatcactggttctgacctcgatcattcaaaaagaacctcacagctcggacgcgtactttatatgtctactcatctccagctatatatgatga

SEQ ID NO: 36504 - DNA, 432 bp, Glycine max
cacttctataaccatcatcaccacaataatttacattatatgtcatctatctaaatgaatgtctatctcaatggggaactcagcttaaacactatctcaaataatttcacaccattactacatatactaattcttacaatattcatcattacactcgactattattaactattatgaccttcttatcctacctactaacataaacacctatcttattcttaaataccttgataagaacaacaatctgattctgacaatattatacaatcaatatcttgcaaaacttgcacaatttgcccactaccaagctcactttcaaaaaaatttgatgtatttagcttcaattgcttatgaccaaccttaaacaccaaccatgcctccacatatggcactacacccttacatgcaaccaagattatatatgcaacattc

SEQ ID NO: 36505 - DNA, 439 bp, Glycine max
ggctttacaacgtaccatggggcatgtacaaatcattgatgtacataaaggaacgttatggaaagccaactgtgttcttatccgaaaatggtaacattatatatcaatttcttgctttttcctttttttggcttggtgattctgttgtttcaatgtcatgtgacatattttatgacatgtaggcatggatgatccgggtaacgtgactcttcccaagggtttgcatgacaccacaaggataaactattacaaaggctatttgactcaactaaagaaggcagttgatgatggagctaatgtggttggatactttgcatggtcattgctggataactttgaatggaggttgggttacacatcaaggtttggcattgtctatgttgatttcaaaaccctcaagagataccctaagatgtcagcatactggttcaagcaactc

SEQ ID NO: 36506 - DNA, 398 bp, Glycine max
atcttcgtcaaaaagcttctcattcatggcgacaacgctcatttcggcttactcattcatgggcacacctatcgggtaactccctcaccaccaactatcactgcggaccaggctcgacatcaccaaagtcctcgtacgacttcacgaatataccccaatccactccatatgtcccaacattgtcttccccggaatcgcgactagagccgtacgtcttctctacacgctcgccgatgctactgttgctgctgaccctgcggctgctgcagactctgcggctttcaccaccgatgctgaccgacagaaaagcggatgctgattctgcttcatctcacataccatggaattcgttctcaacgaggccaatgatggcctttctgtcgagcatgtaccttatg

SEQ ID NO: 36507 - DNA, 428 bp, Glycine max
  unsure (1)..(428): unsure at all n locations
cctttgctcactcttcttctcttgcggctagggttttagcgcagcttcttctacatttaaggaagatgggtaaggaaaaggttcacatcagtattgtggtcattggccatgtcgactctgggaaatccactaccactggtcacctgatttacaagcttggaggcattgacaagcgtgttattgagaggtttgagaaggaagctgctgagatgaacaagaggtctttcaagtatgcctgggtgctggacaaacttaaggctgagcgtgaaagaggaatcaccattgatattgctttgtggaagtttgaaacaacaaagtattattgcacagttattgatgcgcctggacatagggatttcattaagaatatgattactgggacatcccaagctgactgtgctgntcttatcattgattcgaccactggt

SEQ ID NO: 36508 - DNA, 335 bp, Glycine max
  unsure (1)..(335): unsure at all n locations
ccttaccctctttgcaactacccttccgcaccacagatatctctcccgccgctccttccgtttgcgccgcttacgactactatctccgtcttcctcaactcagaaagctttggaactccactgattttcctaattggaacaacgaaccgattctaaaaccaattttgcaagctctcgaaatcacgttccgctttctttccattgttctctccgatcccagaaccttcctgaaagcagcagaggactgctacgccgtggagaggatctggaagcttctcgcggaggtggaggacctncacctgatgatggatccggacgatttcttgaggctaaag

SEQ ID NO: 36509 - DNA, 306 bp, Glycine max
tccacacatactcctttcattatttaccttccacttaaatgaatagtattagcgtcagggctattactgtactttgttccctaactttataaaatcatccttgattctcctctaataatgttatctacacctatttcaattctattctcaacatagtcacatactattagtttccaattattagactaaatggcttctcaatataatttgaccaaaccaaaacacaaacataccctctcactgttgagcaatctacctttacagtctcaaacagtctaccactgataatattatccccatttaaaa

SEQ ID NO: 36510 - DNA, 302 bp, Glycine max
acgcatgcacatactcaatctccatcggaagatacgctcgttgagaccaatatagcgcaaatgattgcgttctaaaaggcccatgcaagctcaaattggctcttgcacgacactgaaaatcaacgcattgaagagctagacgtctatgactttactggcgctggatgcatagctttgtccatgcataatactgatgagttcatactagcttttgctgaatcatcgatgaactctgcttaccagagaaaacgacctatatatcttagcactaaaaataccattttaaagaactattattgaag

SEQ ID NO: 36511 - DNA, 348 bp, Glycine max
cccacgcgtccgcccacgcgtccgcccacgcgtccgcagaggagctctcgttgagttctatgctccttggtgtggacactgcaaaaagcttgctccagaatatgaaaagcttggtagcagcttcaagaaagccaaatctgttttaatcggcaaggttgactgtgatgagcacaagaattttgtgcagcaaatatggagtctctgggtacccaacaattcagtggtttccaaaaggatctcttgaacccaaaaagtatgaagggccacgcactgctgattcacttgctgagtttgtaaatacggaaggaggtactgcttgagcttttgaaacctttgtgcttaatttct

SEQ ID NO: 36512 - DNA, 453 bp, Glycine max
gaaacatggcttccttaaactccttagtgctgctccttgcagctctaattctatgccgggatgttcttgcagactatgataatcccccagcgtacaagcctcccactgagaaaccaccagctgataagcccccagttgagaagcctcctgttaacaaaccttcagttgaaaaccctccaattaataagcctccagtacagaagccaccagtgtacaatgcccccagttgagaaacccccagtttataagccaccagttcatgaaaccaccagagtacaagcccccagctgaaaaaccaccagtgtacaagccctcagctgataaacccccagtgtacaagcccctagttgacaaaccaccagtgtacaagcccccagttgagaagcccccagtttacaagcccccagctgagaagccaccatgttacaagcccccacatgagaagccaccagt

SEQ ID NO: 36513 - DNA, 331 bp, Glycine max
gcggccacgcgtacggtctccacgaatcatcgatggtaactgccacgttgatgattgaactctggaggatgggcctgagtctgattctgctggaccaacttcgggaagcactgtctgtgctgtcgctattagaaacaaccaacttgttgttgcaaatgctgctgattcgcgatgtgtgatatctcggatgggccatgcatacaatccgcctatagaccacaaacctgatcttgagattgatatggacagaatcttaaaagcttgagcttacattcatgcacgactagttaatgtaagtttaaatcttgctagagctattggtgacatggaa

SEQ ID NO: 36514 - DNA, 443 bp, Glycine max
cccacgcgtccggtgacattggtgtcaatcttccaacattattgaatgccttagtagcagaactaccagctgatgcaagcacaatgttgcgtattggaatgactaatccaccatatatacttgaacacttgaaggagattgctgagattttgcgccatccatgtgtttactcttttctgcatgtaccggttcaatctggaagtgataccattttgagtgcaatgaatcgagaatatactgtgagcgagttcaggactgttgtagatactctaactgagcttgtgccagagatgcagattgccactgatataatatgtggatttcctggtgaaactgatgaagattttttgcaaactatcaaccttattaaagagtacaagttacctcaagttcatatttcacaattttatcctcgaccagggacacctgctgcaaggatgaaa

SEQ ID NO: 36515 - DNA, 300 bp, Glycine max
ctcacgcgtacgctgatgctgtgggaaagttggctgccatcatgaaaatatgccgctcatgagagcatatatttaaagaccatcttgatggcttgccgactgaacgtgataaaatgtataatgtctttgacaatcacatcgccgctgcttaaaaatggttccaatgacattagcacctttcaatggaatatataaagtaacttattactgaatctgatgggtatcaaccacatcttatagctccagaacaaggatatcgatcgctaatcgaatcttacctaataactattatgggccctg

SEQ ID NO: 36516 - DNA, 418 bp, Glycine max
cgcaagggggaaccgattaaaaaaaggcaaatcaaattcgaaagaaggagagaatttacagaggtgaatgcaagtttgatccagagaaaatagcagttaagatcacacatttcaccaatatccctgctgatgagaaccaaattgccgcatatttagtaaaaaatggtccacttgctatgggcgtgaatgcaattttcatgcaaacatacattggtggtgtctcatgccctctcatatgtagcaagaaaaggctgaaccatggtgtgttacttgcgggatatggtgcaaaaggcttctcaattcttaggcttggcaacaaaccatactggatcatcaagaattcgtggggggagaaatggggagaagatggctattacaagctctgcatagggcatggcatgtgtggaataaacactat

SEQ ID NO: 36517 - DNA, 278 bp, Glycine max
tgatggcgttcctggccttcatcgtgggttcaacatctcatgtgttgcaattatagtcgcgtcgtggctctttactactggaatgcatgactccctgaaaccagatagttgctggcttgagcgagttgcatagatgactttctgacgctagaaaacctttcgggatggggaatcacaattggtgctcgtttgcctacatataccattgacactgtgcgtagaataatgatcatcacttgtggagaatctgtcaactacaagatctctttccttgcatt

SEQ ID NO: 36518 - DNA, 426 bp, Glycine max
attctctttgcgcagttccctacctctcctttcaagatgcagatcttcgtcaagaccgtgaccggaaagaccatcacccttgaggtggaaagctctgacaccatcgacaacgtcaaggccaagatccaagacaaggaaggaattcccccggatcagcaacgtcttattttcgccggaaagcaacttgaggaccggcgtacccttggcgactaccacattcagaaggaatcaacccttcaccttggccttcggcttcgtggtggcattcaaatcttcgtcaagaattttaatggcgaaaccattacccttgaaggctaaaggtctgacaccattggacaacgtcaaggccaagatccaggacaaggaaggaatccccccagaccagcaacgtctaatcttcgccggaaagcaacttgaggacgggcg

SEQ ID NO: 36519 - DNA, 258 bp, Glycine max
ttgaaaataatgcacaggatgctactgattgttcgtctcactaaggagcacactttcctggtcggttcactgctattgcagagaatactaagttccaaacgatattaccgtccactgagcagatgacaggtctcaatcatctattacatggagccaagcagcatcacaatgtgacaaatgtatatgtatggcatgcactagctaggtattgatgtggagtgataaccagcatcatccagcatggaacattatgacact

SEQ ID NO: 36520 - DNA, 372 bp, Glycine max
cagatgatgatagccgaaaggcatggcgaagcgaaactgcttgcacctgattatgcgtgggtgaatggacacccagttttttatcatgaatcgttaactctcctgaatcgccccaaccctcccaagaaacttaatccactgacctattcgcatgaataagtatacgcgttttcatggacagacagacacaagcctttacacattataactcctcatctcgatgttgtacgccccatccaacaagatgccagcaatggaaacactcaagtgttcattaatgggacgaacataacccaactcgagctcataatgttccagatctcaggacttcactgctgcgccgacccacatttctcgatcaatgatgatggt

SEQ ID NO: 36521 - DNA, 457 bp, Glycine max
tcgcccacgcgtccgtgaaactagcgtttgatggtttgaaaggtttggggtataaaacagcgagacactgctataagagatgttggtgggtttgatagtgttgagttatcagtacttctttgcaatgatgagtttatacaaaaacttaataaggaatggagaaatgaagatcatgccacggatgttctgtcaatgtcgcaacatgtacctgggctcaagattcctattcttatgttgggtgatattataatttcggttgagacagcggcaagacaagccgaggaaagaagacatactcttcttgatgagatccgaatcctcatggttcatggcttgttacatcttttgggatttgatcatgaaataagtgaagaggctgaagtagaaatggaaagagaggaggacatccttttaaagagtcttgattggaaaggaaaaggggctaataaagagtgca

SEQ ID NO: 36522 - DNA, 388 bp, Glycine max
cgtcttttgcgagctctttttgagattgtcttgaaacgtggctgggcgcagttggctgagaaggctttgaacttatgcaaaatggggaccaagaggatgtggagtgtccagacacctcttcgtcagttcaatggaattccaagtgatttattaacgaagttggagaagaaagatttggcttgggaaaggtattatgacctatcatcacaagagataggtgaactcattcgtgcaccgaagatgggaaagactcttcataagtttatccaccagtttcctaaattgaaccttgctgcacatgtgcagccaattactcgcacagttttgaaggtggagctgacgataacttcagactatgcatgggatgacagaattcatggatatgttg

SEQ ID NO: 36523 - DNA, 446 bp, Glycine max
atgaagggaaaagaatccggtgaagcaaaaggttatgcttttgtgaccttcatgacaaaggaattggcatctaaggctattgaggagctgaacaactctgaatttaagggaaaaagaataaagtgctccacatctcaagttaagcacaagttgttcattggtaatgttcctaaatattggactgaaggagatatgaaaaaagttgttgctgaaattggccctggagtaatttgtgtggaactgttgaaggacccacagaattctagccgtaaccggggatatgcttttatagagtattacaatcatgcttgtgcagagtattcaaggcagaagatgtcaaactcaaactttaaacttggcagcaatgctccaacggtgagctgggctgatccaaggaattctgaatcatctgcaatctctctggtaaatcagtgtatgtaaagacc

SEQ ID NO: 36524 - DNA, 439 bp, Glycine max
  unsure (1)..(439): unsure at all n locations
caagagtggctttttggtgaattgattggtgatcccgagttggttgagttcactgcgcatagacatgttccttaatttccccaaatattaaaacaagattcaaagcacgtcacttacgttcccgctttctgtttaacaagtgaaaaacttgaaccttttgagacctcagttctctgccatggcaaattctcatttatcaacaccttctgagctattttcaagacaacataagccccctagggttccaaatcttattgggggcagttttctggactcaaaatcgttaactttcattgatgttatcaaccctgcaacacaagaggttgtttcacaagttccttgcaccacagatgaagagtttaaagctgcggtatctgcagcaaagaaggcatttccatcatggcgaanaactccaatcacaaaacgccaacgtgttatg

SEQ ID NO: 36525 - DNA, 440 bp, Glycine max
tgaaaattttggttgagcaagagccttctctttgttccgttccgcgaccatgtctcatgggacatgcccttccgtaaagaacttccttcttttggattctgatgggaaacgtgtcgcagtcaaatacttctctgaagactgggcaacgaatagtgccaaggaaaattttgagaaagttgtcttcaacaagactcagaagaccaatgcccgcacagaagcggaaatagcaatgtttgagaataacattgttgtttacaagtttgtccaagatcttcacttctttgttaccggtggtgattatgaaaatgagcttatcttagccacagttctgcaggcattttttgattctgtgggccttctgctcaggttgtggtcttacataaacaatttatatatgttccatgttcaagggtgtttttaatctatcactattaacacag

SEQ ID NO: 36526 - DNA, 402 bp, Glycine max
ggcaatattctgagtccagccgttacttttctctgaccctgacggaatggttcaaagaggtcttgcactgacccatcaggatgagatactgacacctgctgctcacaccatcgactcatccttcagaaatgatcatgtcgactcctatgctctgcctgattccaatctctatgccaatgcctacaagaacataatcatgacccgaggcactactaagctactgctcgacatggcacccatatcgaaatttgctgaaatgctatacctcaacgctagatctgctaattacaccatgggaaggaagatctttaccggtgctcactcatatcgacattgacactatcatgacgaagccgctatacttgatagctaccgctgcatgcatagtgcactaagcaatgc

SEQ ID NO: 36527 - DNA, 335 bp, Glycine max
tcgcccactcgtccgaaaaaacaaacaaaaagatctaataacctaagatatagaaaaatgtaagtgcgattaatcaagtcaagtcttgcaaaacgttagggtgcatgaataggaaatcgagatgttaaatgatgacgagatccatgcttgcgcatgcaacttgtgacatgcatccttcgtattagacaccttagccttcgaggattacgtgctgactattggttactgtgttgtctacctaccaaacattattcaagtggctagtaatgacacattccatccaggcctcttcttctctgacgctggaagatttcaaagtaccacacttaaaccac

SEQ ID NO: 36528 - DNA, 401 bp, Glycine max
ctgatgcatgaaactgcaatttaaaatcccatattcatcgaaattaattctggggatgttagaaatgaaggtggagagtttgcatcaaaccaaggagaatgtagcattgttgttctctccatataagcaccacttatgaggaaagagtcaagaactgtccactccttattcttgcactgctaacaagctcaaatccggcgctgttacaatagattctgatcttggacgtaatgagaaaaatgggttgtagaagaaactctgtatacacgacaggattgatttcggccggatgtttcacggtgctaggagttcccatgactggcaacttgctgaaaatttgatttttggtgctgatccgcacacactcaatgaagccttgtgtatcacactgcattccatct

SEQ ID NO: 36529 - DNA, 308 bp, Glycine max
cccacgcgtccgggaaataattgatctttgaaaatgcagggaggaaagaaagctggagagtccatcaaggaaacagctgcaaacattggtgcttctgccaaggcttgcatggagaaaaccaatgccactgttcatgagaaagcagaaagaatgactgcacgtgatccgatgcaaaaggagttggcaacccagaacaaagaggcaaatatgaaccaggcagagctggacaagcatgctgcgcgtcaacataacacggcggcgaagcatgctgtcactgcaaggcacatgggacaacccatggggaccca

SEQ ID NO: 36530 - DNA, 231 bp, Glycine max
cttcactggtgttttcccccaattcccagtcccacatagcttaaaacttaccatctacgattggacaaatacaaatacccttctgcctcgctcaaaacacaaacaagctcgcttctttcttctctcattaacaacatgcagatcttcgtcaagactttgaccggcaagaccatcaccctcgaggtcgagagcagcgacaccatcgacaacgtcaaggccaagatccaagac

SEQ ID NO: 36531 - DNA, 381 bp, Glycine max
tcgcccactcgttctggacaattgaagggatattcgatagaggatatattgcgacagcaaatagaaaagggctgaagtgggggaaagcctgcaggaggactaggtaacggtggatgaatcatcgacacctgatgttgtcatataaatgaaaccactgaaagtgcaatactggattcttactgaaatgcctgatcttataaactgattttctgatttctcttgatgatcggtttctgtattttgtcaactggcttcatggggatataattgcagtataacatcgatgacttttaaaatcctaaactgactggtacaagtttggttggttgacttattcataaaggaagccctgtattatctattactgatgatggttaaaca

SEQ ID NO: 36532 - DNA, 347 bp, Glycine max
accacgcgtacgcccacgcatccatctggataaccgtttactgtcctatatcttcagccagacacctatctgtctacagcgaacatggtctgcacacctattatgtcaccttgactacttatattgctctctgatgaatagacatattcaaccctacgattgtgtatcatcatttaggagaaatttatacagctctcatattaggcagatctctcttatgaatattctcgtacatcaaggatcatactacaccgccatctacaaattctcgctcatctggacatctaatcattaatttatactgcgagattgaactttatccacaccattgcaaaacattttgacat

SEQ ID NO: 36533 - DNA, 443 bp, Glycine max
cccacgcgttcgcatacccacaaaccacagctcttctagatgactctctaaaaagcaatggaccagctgggtgaagtcttaatgtttctctaacaatgccttgcaagtaaggaaggttggcaatatctgattcttctactattctactctttccaaccactgcatccatttcttgtcttgccttctccaacacacctggattgttgattaactctgccatagcccattccatcgttacagctgaggtgtcagtcccagcaattaatatgtcctaaatattgtcattagaaacaacacatgttgatgttagtcatgtttgcataactcttttcataaactagaaaaactcagctataaatttttggttagataatattctcaaaccatataataatttatgctcacaaacacctaaagaaacaaaaaagattaaacaaaagaat

SEQ ID NO: 36534 - DNA, 280 bp, Glycine max
aagagtcgattgtagatcatgactgaggagccatcataggatgttatcgatgcatgtaacgcactgtcttagtacaaggctatgtctgcctaatagcacctcatataccgcagagacccaaacatcttaacgttcgaacgcatgcgagctttggatcgaaaccactactatgtatgcagatttcagatacccatggaaatggaggctcaaatagctgaagtatgcactgaggatggtctcgaaaacatccctacaactcgtaatcctagcactacaattc

SEQ ID NO: 36535 - DNA, 367 bp, Glycine max
atttgcagctggtttagctgcggaagggctcaagccattttgtgccatttattcatcatgcttgcaacgcggatatgatcaggtatgtaggtagtccatgatgttgatcttcaaaagctacctgtccgatttgctttggatagggctggtttagttggagcagatggaccaacccattgtggagcatttgatatcaacttacatggcatgcctacccaacatggtggttatggctccttctgatgaagctgaactgatgcacatggttgcgaccgcagcagctatagatgatagaccaagctgctttagatttccaaggggaaacggaatcggagccactctgccactaaataacaaaagaacccca

SEQ ID NO: 36536 - DNA, 356 bp, Glycine max
tgtttacctgtcatgtttgtttctgttgaatgatgaacttgttaatcctcgttgatcccattacttggtaaacaggattgccattccccatacgctccattcatcaccctttctttcattctgttgcgaattggaactcacactttcagcgtgctagtccattatctcgccttctgttcccctcgcagctttatttgcggcgaaagccggaactaagagttcgcaatgctgtttattagctggcgcacacaaagcgaggtttcctaggctcgtcggtcaagttagccacgttcgctaacagcgccgtacgcgtcactgcggtgctctccacgcgacttgcatcggtgacaagatcc

SEQ ID NO: 36537 - DNA, 441 bp, Glycine max
gccacgcgttcgcattgatctatctaggtgctctctctaaatctaacgatttcgtcatccgacagcgatctctgcgtctacatgatcgacatgaacgctcccattttctaaacctcagagagggatccagctaacagttgcttacggctgaaaagttgcttgcccacagatctgatgcgcatacgtgcgaaagccattataacgcatttaatggcagttcacggtgacgatgaccctgcggagatggatgcatccaacctatggacgatcaacacctacgaagctgtcggcaacggtggcaccttggaccgaatgcacaatggccaccgcctattgctcactggttcagcggagctagctaagtgccggattgtgataggagactgcgacggacctatgctggctatggaaacagtaacgagcatggagattaaactctat

SEQ ID NO: 36538 - DNA, 318 bp, Glycine max
cccacgcgtccgaaaaaaaaaaaaaattaaaaattaaaaaaaaaaaaaaaaaaaaaaagaaaaaagaaaggccggccgttttaaaggtcccagctttccttccccttccttccaacgtattactttttttttagggtaccctaatttaattcaattggccgcctttttaaaacgtctgaactggaaaaaccttggcgttcccaactttaatccctttgcagaaaatccccttttccccagttggcttattaccaaaaaggcccgacccaatggcctttccaaaaaatgtcccaccctaaatggcaaatggaacccccc

SEQ ID NO: 36539 - DNA, 421 bp, Glycine max
  unsure (1)..(421): unsure at all n locations
cacctatcctgattactacttcagaatcaccaacagtgaccacatgaccgagctcaaagagaagtttcagcgcatgtgtgacaagtctatgatcaagatctcttcgtttaggtacatatatctcgtcttgatcttgaaagagaatccaaacatgtgtgcttacatggcaccttctttggatgctaggcaagacatggtggtggtagaggtaccaaagctagggaaagaggctgcagtaaaggccataaaggagtggggccagccaaagtcaaagattacccacttgatcttctgcaccactagcggtgtggacatgcctggtgctgattaccaactcaccaaacaattgggccttcgcccttatgtgaaaaagtacatgatgtaccaacaaggttgctttgcangtggcacgggtcttcgt

SEQ ID NO: 36540 - DNA, 354 bp, Glycine max
aattccacccagccgtccggccacgcgtcctggttatttgattggtttgcattcatgttaagctagtggcgatcgggtccagggtcagtctacaacctacagttttggtttggtttgcttgattgaagatcaaggaatgaagatgtcgggtgttataaggcacaagagtattcaccccgccttctccgcaatcagacacttctcttctgcagctaaagagattactgtcacggatgctatcaactcctcactcgatgaggaaatgtcacctgatcctaaagtcttcttgatgggtgaagaggtttgagaatatcatggtgcatacaagatatccaatgtgctgctcgacaagta

SEQ ID NO: 36541 - DNA, 356 bp, Glycine max
tcgcctttacagcctagtcgataatcgtaccaggatcttatgcataatcatattcaatctgagtctctggagaggctacaccgccatgactgtcatattgctgcttcttggactattatcttacactggagtactctctaccgtggcactatctgccgatgcgtcttatggacgaaatggaaacaatgtaccagcatatcaggcattgactgatctttccaaatccgtcagaataggcgacattcgtcatactatgcagacgaatgagccctctatgccctcagaggatcaatcctatctgagagcctcggtgaacctaatgaccaactactatctatcaccaacgctggagctga

SEQ ID NO: 36542 - DNA, 219 bp, Glycine max
accattcaccaaactcactcatcaattgttatcactcttctcactaactattaagtgatcgtgctgatcacaactggccaagtcatcaaattccaacctgctgattcatcggaagcacctaagccactcgtgattgaagaaaccgatgctgctccaccacaagctgatgaaatgccctatactatcctttacaccttcatttgccacactgatgattac

SEQ ID NO: 36543 - DNA, 176 bp, Glycine max
gtcgtcattggacatgtcgactctgggaagtcaactaccactggtcatttgatctacaagctcggaggtatcgacaagcgtgtgactgagaggttccagaaggatgctgcttagatgaacacgaggtcattcaaggatgcctgtgcacttggcaagctcaaagctaaccgcgaaaa

SEQ ID NO: 36544 - DNA, 297 bp, Glycine max
cacaaaccctagaagccaacgtttttcagggtgagtctctccttcgcgtgctaatccatagagtcgcttgttaatttctcaggttgttagagcacgatggttcagtataattttaagaagatcactgtggtgccaaatgggaaggatgtcgtcgacatcatcctctctcgcacccagcgtcagacaccaaccgttgtgcacaaaagatatgctatttcacggcttcgccaattctacatgcgcaaagtgaagtatactcagcagaattttcatgacaagctcttcacaattatcgac

SEQ ID NO: 36545 - DNA, 337 bp, Glycine max
aaaaaaagatgcgtattaatatgcattggtggcaacagcactaccgtggcagctaccgcggctaggccatgcatgcgcagcttccgccgcatcagaggccccgattgcggcattctgacaggctacgtcgcgttgagcaccgacatattgaccgagctatgcttcgctctcttcgacgacaaccctgcttactttatcctcatgctcgccctcatgcctttagccgttagcctctgcagaatgtgtttactccgcgagattcctgccgtcgacaccaacgaccacgaacagtctacttatgtctcggttgttaacgcggttgccgtagtcgtcagcg

SEQ ID NO: 36546 - DNA, 441 bp, Glycine max
  unsure (1)..(441): unsure at all n locations
ccgaggtaaccgcccccactttttttctaatgcagaatatttctctctctctctttccctgtttatcgtcctctttcagattcaccctcgttttccctctttcgcataaataaataaataaatataaacaccatgagcgttcctccgccgtctacggcggcgatgtggacgccgttcacggcagcgcagtggcacgagctggagcaccaggccctcatcttcaagtacctcaaggcgggtctctcggttccccctgacctccttctccccattcgcaagagcctccaattgatatcgtctcacccatcgatggggtattatgggaagaagatagaccctgaaccgtgtcggtgcatgagaaccgatgggaaaaagtggaggtgttcgagggatgcacaccctgacttcaagtactgcgaccgncatatgatacgacgtcgt

SEQ ID NO: 36547 - DNA, 341 bp, Glycine max
gccagatcctagatggctagacgtacatcttattcattgatcgccagatcatgataggggtaaagagcttcgggaaaacttggaccggtgagaccatcaccctcgatgtggagatctccgacaccatagataacgtgaacgctagaatgctagacccggaaaggataccaccttgccggcacagagtcatctttgcaggtaaacatctcgaggatctgttaacggttgccgactacaacagataagaggagaccagtctgcaactggagcttcgccgcacgagttggatgcaaatgtttgtcaagactttaactggcaagaccatcagcctcgaggacgaa

SEQ ID NO: 36548 - DNA, 303 bp, Glycine max
gcgataaaccctttagagcctgagggttaagaaaagttcatatcctacatgggctaaaggggtccctgtggctgttcaacattagtgcgacgcacgtatggcctcaaaggctttgcttctggacctgaaattgctaggggtatgctgctgagtccataccatgccgggctactacaaatgcttgacattactccatcagctgagacgtataatggggataaaatggaattggctgatgctgcattgcctcttcttaaaggagttgatgctacaacacgatgtggctgaagcatgcactggggt

SEQ ID NO: 36549 - DNA, 221 bp, Glycine max
acgcaaaattcaaggcgtaattgaagctggagtttgtagccggcgaggtgaccttgggatgcgcccttccaattcagtgcttattcctgctcttcagactgatggaaatattgatactggagatgaatatcatacacaggtcatgattgaccatcaagctctcacacgtacatagaatatgttgactaatgcttatcttatgagcatattctatcgaacca

SEQ ID NO: 36550 - DNA, 394 bp, Glycine max
  unsure (1)..(394): unsure at all n locations
acgctccggatatgaaagcttacgtttttggtgaatgtctggcaaggatgtaaacctgagatttgtacatntaattctttaaataatggactttgcaagaatcataagaatggagaagccttgagtttatatcatgacatgttcttggaaggggttattgctaacactgtaacatacaacacgttggttcatgcatttcttatgagagattctatccaacaagcatttaagcttgttgatgaaatgctatttaaagggtgcccttttgacaatattacatataacggccttatcaaagctctgtgtaaaactggggcagttgaaaaaggattgggatnngttgaagaaaatgcttggaagggatttttnctactattatctcttgaatatactg

SEQ ID NO: 36551 - DNA, 289 bp, Glycine max
gcttcaggtaaatatcatatgcgggaaatgtacgaatggacactgtaaaggtcgggctggatgcatatgtaatgtcacaaatgaatcaaactgctgagttttaatagatcttgcaattccatgtgataaaccgttccctgcactatttcaaggcttcactggtggcattcattcaagatcatgggatctagtatataatggcatgacccaaattggttttgagaaaccccaccatgagtctagctttcatacagggcaaactcaagtagttctgggtatcactgaattt

SEQ ID NO: 36552 - DNA, 391 bp, Glycine max
  unsure (1)..(391): unsure at all n locations
tcggcggttttgcgttcttcatattctacctttcgccaggtcaagaacccccaaaaccctaggagaaacgctggcggcaccggttctcgattctcggtggtgggaaaccgcccgtctctggtcccgaaatcgaatatctgctattttttttcttctctcgctctgatttcgattggcagttctaggggttctgtggttctgatttgggggtttcggaaatgggaagcagaaaggaagaagagaggaacgaganaattattagaggtctcatgaagcttncgncgaatcgaagatgtataaactgcaacagcctgggaccacaatatgtatgtacgagtttttggactttcatttgtatgacatgcagtggaatacatcgtgagtttactca

SEQ ID NO: 36553 - DNA, 391 bp, Glycine max
tcgtccacgcgtctcgcccacgctgtccgccttcgcgtctcgaccacgccgtccgctggatgtgcggcgcctgtgtccctacattcctatctgagtgcgactactagttaaggtgtttaccagcaatgactcgcatgttaaacttactggctatgaaaataaagtgcctgattggtttaaaattgatagagtttcccttgaattcaatgactataagcttgtgttctgtgcaactgatgatagcacgtttgatgatattggcgctcatattgatggtgaatgaaacaggcgtctggaggagactgagaataatgatccagtattggttcactttaagaaacttgaagttgaatcatcagctactgcttgaggtggccttaaaaaatcatgt

SEQ ID NO: 36554 - DNA, 424 bp, Glycine max
cggacgcgtggcgtggatgtctctgttgtttacctcacagtgaggctggagaaagaagcgtcctacgatgaaattaaaaatgctatcaaggaggaatcagagggcaagttgaagggaattcttggttacactgaagatgatgtggtctccactgactttatcggcgatagcagatcaagtatttttgatgcaaaggctggaattgcattgaataagaactttgtgaagcttgtttcttggtacgacaacgagtggggatacagctcacgtgtcattgatcttcttgtattcgttgccaagaagtctctttaaggtgttacttcaaagtagcttgtcttcacattattaccgtatgtttatgtttagctgcgatttagtgtcttgctcgagcaaaaaatgagaggtctgaataaatcggcttctg

SEQ ID NO: 36555 - DNA, 430 bp, Glycine max
ctgaactcttggttcactctgtcttgatgtcttccattttatgcttttctgatatggctcttcaaccactacattcactttattggcctagacccaaccaccaaagcaccaagagaccttaggtgaaccttttctctctagctctgtttgcagaaattcaagcgcaggaatggaggttgcaacaaacacaaccgcgaccacgtcaaattcattcgatgctctaactgtggaaaatgctgccctaaggacaaggctattaagaggtttctggtgaggaacattgttgaacaggctgcagtcagagatgtgttggaagcctgtgtctatgagcataattttcttctttaccttctctcttttttttgaggaaaatttcacatgtgtttatgttatttatttagtttttaattgctatttacagaatatactc

SEQ ID NO: 36556 - DNA, 421 bp, Glycine max
gccaccatctgttggtcctcgtgtgccaatgtatcccccaggtggtccaggtattggtgaacaattattttatagccaaggccctcctgctatcattccttcccaggtaatctcttctactctgtctatacttagacttcaatcagtgcaatcttgaatggtgcttgatgttattcctctgattttgctccatggagtaatttcctaatcattctcctttctgtccatgaaatttttttctcagcctggatttggctatcaacaacaacttatgcctggtatgaggccaggtgcagctcctgtgccgaattttttcgtgccaatggttcagcagggacaacagggacagcgtccctgtggaaggcgtccaggtgcagttcagcagtcccagcagccagttcctatgatgccacagcagatg

SEQ ID NO: 36557 - DNA, 389 bp, Glycine max
gccactcgtccgatgttacgggtgcgacgttagtgacaattctaacggcgcttgagggctccataattgcggaagcgtttaatggtcgaacgtgcacgataatgcgctgagcattctatacatacagggctaggctgagccagcaaccatatcggtgctaaattatggtaagcagcatgcgccccacgatgtaacgattacgctgatgggtaccagaagcacaacgagtataaacttgatccaaacgacctgtattgcactgattcgagtctaggatggcctgtgcatactgcagcgctcgtggaactagaggaacggaccatggacatgctaaaaactggtccatacggttagatatatcgaatttgcaacattatattcggtcagag

SEQ ID NO: 36558 - DNA, 287 bp, Glycine max
aaaaaacatacgaaaactcataaaaaaaaagcaaaaaaacaatataacctatacggaagggcaaagaagggccggccgatctacagaagccatgctcacgtacaacttgcatgtctacgtcatatcgtctgatatagcgtaacctaaatgcaatgcactgaccaaagtttgacaacgataatactgggaataccctgacgtaacccaacttaatgctcttgcagctcatgcacctttcgcctgctacagtaataactacaaggcccgctccgacatcccttgctaac

SEQ ID NO: 36559 - DNA, 445 bp, Glycine max
aagacacatacgaccacgcgattcgaattaatggaactagaaatggtgcccttgggctggtgcatgctgagcttcaagttctttctcccttggttcctgttcgtgaggtcaattttctacgcttttgcaagcagcacgcataggggttatgggcagtggtagatgtgtccatatataccatccgagaaacttctggagcacccacttttgcgaactgtacgaggcttccttctggttgcgtggtgcaagatatgccaaatggttactctaaggtgacatgggtggaacatgcagaatactacgaacgccaaattcaccagctctttagacccttgttgagctcatgcatggggtttggtgcacaacgtttggttaccactcttcaacgccaatgcgagtgcctacccattctaatgtactgagcatctccctctagagaacattc

SEQ ID NO: 36560 - DNA, 436 bp, Glycine max
  unsure (1)..(436): unsure at all n locations
gatttttctgatgaaaaccatgctggcgagggccctggaggagcagttgcaatggactgtgaaatggttggtggtggaagtgatggttctctggaactttgtgctagagtgtgtttggttgatgaagatgagagattaatcttccatacttatgtacagcctgaaatacctgttactaattacagatatgatataactggattgacagaagagcatcttagaaatgccatgccacttaaggaagttcgagaaaagctactgcaaattctacacaatggagaatccattggcaaagttagactggatggtggaaaagcaaggcttcttgtggngcatgacttagcacacgatttggattgtttaaaaatgaattatcctgatcatatgctgagagacactgcaaagtaccgtccgttgatgaaaaccaacttggtca

SEQ ID NO: 36561 - DNA, 391 bp, Glycine max
gcgacgcgtgaccgtccacgactgttcgtataatacgactcattcaaagttaggagcttcagtccttatgccggatcacggcatggggcgacgagacctcaaccttcgacgtaatccgaagcctgtacgctttacgatcagcgtctgtgcagcgcgggtgcaacaaccaccactgttatacaggatagtccgacggctgaaacacagcagcaaagtcatactgcttctaaaaccatcggctgatgcaaatgctgatgacttgcgagctggagctcaggagactgcgcatataagaagtcagcagtcgactgcaaggaaaagcctgacaaccgaccacggcttgcgccccgagcacaactacaacaggatactcttagacgccatcaatgag

SEQ ID NO: 36562 - DNA, 301 bp, Glycine max
gtgaactcttgagggtcgtggtagtttggcaaccacacttatcttcatcaatagtcgcggaaacagtttccggtgcatctcatgcgcttcctaaatgaacgacgcatatgtctcgaagcatatccagcatattgtgcgtgtcatccgccacgaatcttatgagaaagccatcgagatctctgtatctgtcgaagaggatttcaatatcgagaagctgcatttggtcgaagccgaagagcagaagatcaggcgagaatacgaacgcaaagagcgccaagtcaaaattcgcaagaagattgag

SEQ ID NO: 36563 - DNA, 434 bp, Glycine max
  unsure (1)..(434): unsure at all n locations
aatgtattaaaaaatatattattaaccatattacactcataaatcaaatataacctttatctatctttctttgttgattgatctctacctttaattgatttagaggatttgtttcaatgctaaattattgttacacaacgtatgcagggtgccaacatcaatttgagggtacaaatgttaaatcacctattcatgtactccacaattgctatcaaacttggaggttttgtcaaagctaaacagtacctcaacaaagtgttgtactacgttaatataggaagcaatgattacataaacaattactttcttncnncagtttacctaacaagccgcatctatccccctgatcaatatgccaacattcttattgcccagctatctcagtatatgcaggtatnttataattttctatattggtttcactttgtgtcaca

SEQ ID NO: 36564 - DNA, 348 bp, Glycine max
aaaaaaatgaaaaatatgatcaataactgataactctcacagctgctccctatggttgaaaaaaaaagaagatgttatactaataaaaacggaagaaaaaactttgtcaattggttgctcatggggatccctggattgagcaatcagaataatgggcagcaaagattatgcataactgagcccatttcattggctggaccaactgaggatgatgtgatcaagacgcgtgaacttgagaagtacttgcaaggtgttggattgtacgagagtcacgaggaggctctgggaagggaggaagtgcttggcaggctggaccaggttgaatttgattgtgtttaatgcaatttc

SEQ ID NO: 36565 - DNA, 296 bp, Glycine max
acgtccacgcgttcgtccactcgttctttttcgtttcgtttcaatggggagcgaatagcataagggcgaattctacctgcgggactacgtccgtcacaaaggcaagtttggtcactagttcctggagttcgagttccttccatacagtaagctccgctactccatcaacttcaactacaaaaactacaccatcattcgcaaggaggtttacctaatccccgccgttcttctcgagtgccgtcgcatcattacctacagcgagattattaatgaagatgataacaactgttccgaac

SEQ ID NO: 36566 - DNA, 354 bp, Glycine max
cccacgcgttcgctcactctttctgctgcattacgctttaatggggcatcattggggtaagggctaatagcaccagtgggacgacgcttgaacactacgttttgcatgctgacatcaaccagctgttcaagctcatgataaacagcttgttcagctacaccgagattttcttgtgtgaaactatcaccaacgtttctgaggctttgaataaattcgatttgagagtttaaccgccaagagcatgttcgatgctaagacatagctattgattcgtattgtgccttacaaggacaacaagactctttgcggtattgacatcggcattgtaatgaccaaagcagattttgtgaacaa

SEQ ID NO: 36567 - DNA, 389 bp, Glycine max
cccacacgtccgctcacgcgtacagtcattatctactcctgcacagtctttgaagaggttgccacagcagaatcacttcgttgccctctccttgtccaatctcatgatgtcaatgtcattcatcccgtcttatctgaggtggctgttatgtgcggatggcttggcgttaattgcatatgtgtactactatctcatatgatggtacaggcctactattttgcacttcactccagatatgattagctgttagggtccagacgaactatgggtgctagacttactggtatgcaggttggagatcttgtatcttatgcaggtcatcctttggactcatatgctgaagagctgatacttactcctactaaaggattccctgttccttagtcaat

SEQ ID NO: 36568 - DNA, 428 bp, Glycine max
cggttctcggaatttcccggcgtcgactccacgtcgtctcgctagatactatgctacattagaatagtagtaatcggtgcataaggcggactatctgtgacgatgagcatctccctagccgctatgtgtctcctaagaaagtgttctatgggcgtggaccaatgtaactatgattgtactttaactacagaccagcagggccgatcatggaatttgatggattgaacgcttcatagacagcggtcaatgaccctgttgtgtccttaaagacaggcttgtcgtactggatggcacatgtgcggcctgctatcaatccaggttctggttcaaccattatagctatcaatgggacacttgaatgtgattgtgcttacactactactgttcaagctcgacgaaattactacacgcagtgttgctcacaactt

SEQ ID NO: 36569 - DNA, 421 bp, Glycine max
cccacgcgtccgcccacgcgtccgctcactcactaactcaccctctgcttgtgctcgtctagcgctgtcgtcgactcactcaccattttcgtgctcacttataacagtgcccatgccctctcgaggaaaatatatttgagtggcaatttgcgattagagggcctcgtgataccgaatttgagggtggtatttatcatggacggattcagttgcctttagagtatttattcaaacccccttcattcaaggtgcagaatggtatcccttgatctgaaatggagttcaggccaatgcatggttatggggaaggtagagtcaagtactaaagctaaaggggaagatatgccttccttgtgcgctagttcgacctatgagggcaaagagtaaatattggtgctatgggaccagccatagatcatgc

SEQ ID NO: 36570 - DNA, 266 bp, Glycine max
cggacgcgtgggtgataagaggagataccaacaagagaggagaaaaaaaagagttgagattccctttgaagaaaagatggcatcccataggcaaagctatgaagctggtcaaactaagggccgaactgaggaaaagacgaaccagacgatgggcaatattggagagaaggctcaagctgcaaaggagaagacccaggaaatggcccaagctgcaaaggagaagacccaacaaacagcccaagctgccaaggacaagacttgcgaca

SEQ ID NO: 36571 - DNA, 371 bp, Glycine max
tccacgcgtccggagcattcagcattgagcatagtatggatatatcaaatcctgcagcctgagtcaatgcggaactgttgcacttctatgttggaagaatggtaaggatcgtggtgcaagttgtgcgatctgatggtggagttgtcatttgaaaatcaacagatgagaaacaactagtttgtaaaagatcacgctcacctgctgctcctcttacaacttatgatgaagtttatggtcttgttaacagtgataagtcaattggtgctgagatatggaccaattttggtgatgccatccatatggatagctacaataagctttgtcagctcgcacatggagaatttaaacacttgatcctgtgaggtctaaca

SEQ ID NO: 36572 - DNA, 235 bp, Glycine max
gtcaggcggggctacccgctgagtttaagcatatcaataagcggaggaaccatgattagcacctcaactcctcacatggttctccagcaatccgtgtaccaggctttcactcaggtgtttgctcagcagctaccaaagcaagcacaggtgaaatctgtggcaccatttgggttatgcttcaactccaacaagatcaatgcatatcctaacgtggaccttgtgatggacaaaccca

SEQ ID NO: 36573 - DNA, 324 bp, Glycine max
actttccttagttcaatatggggaagcccttcttcactctctctctttcttccctttgcttgctactcttgtcgagtgcatgctttgctattacctccagcaagttcaacgagtgccaactcaacaacctcaacgcgttggaacccgaccaccgcgttgagtccgaaggtggtcttattgaaacatggaactctcaacaccctgagctgcaatgcgccggtgtcactgtttccaaacgcaccctcaaccgcaacggcctccacttgccatcttactcaccttatccccaaatgatcattgtcgttcaagggaaaggagcaattg

SEQ ID NO: 36574 - DNA, 327 bp, Glycine max
aaaagaaagggggaatcggtgggtggaggcttctttggatcatcggagagaggcttctttccattttcaccacagcaatggagaagatctacctcggtggaaaggagcatcatattcgaactggctgtggtattgtgtctgtcatagtctatggcgatcccgacaaaccagctctgatcacttatccagatttggctctaaattatatgtcatgttttcaaggactatttttctgtccagaagcagcttctttactgcttcacaacttttgcatatatcatatcagtcctcctggacatgaggtttttgggagcagctgcaatttgt

SEQ ID NO: 36575 - DNA, 343 bp, Glycine max
ctacactcatctgcgattcttgttggaatgaggtgagcgttgtgtttgagttagcttgactatggaagcaaaagataagtggtgcgtggtgaccggaggtcgcggcttcgctgctcggtctttggtggaaatgctaattcgtcacaaggagtactgcgttcgcatcgccgatttggaagtcagcattgttctcaagcccgccgagcatttaggccttctcggcaaggccctgcactctggccgagcccaatatgtctccctcgatcttcgcaacaaggcccaagttctaaaagcgttggagggagttgaggtggtgttccacatgggtgctccaaactcttcc

SEQ ID NO: 36576 - DNA, 315 bp, Glycine max
ctgttcaaagtggatctacaagcatgtattttgctgaagctacggcaccacacaaacatgggggtggacttctcacttcaagtaaccatggggtcaagacagaacgatttgtgcaaagaggccactcttggtatgtggctactgatattccaagtgacttccttgttcaaattggagaagctaacttccacttgcacaagtatcccttggtaactagaagtggaaagctgactacagtcatatatgaatcccacgacccagatttgaataagatagttatcgatgatatccctggtgggggaaaaggctttgaac

SEQ ID NO: 36577 - DNA, 318 bp, Glycine max
gaacactcatcaccatggccaagcttgttctttccctttgtttccttcttttcagtggctgcttcgctctgagagagcaggcacagcaaaatgagtgccagatccaaaagctgaatgccctcaaaccggataaccgtatagagtcggaaggtgggttcattgagacctggaaccctaacaacaagccattccagtgtgccggtgttgccctctctcgctgcacccttaaccgcaatgcccttcgtagaccttcctacaccaacggtccccaggaaatctacatacaacaaggtaatggtatttttggcatgataatcc

SEQ ID NO: 36578 - DNA, 385 bp, Glycine max
gttagaaatataactaaagagaccatggagatagtagctaacaaggaagttattgcagttaaccaagatccacttggtgtacaaggtaaaaaggttaggatggaaggtgatgaagagatttgggcaggtcctctttcagggtacagggtagctgttgtcttgcttaatcgtggcccttggaaaatatcaattacagccaactgggatgacattggtattccaccaaaaagtgctgttgaagctagagacctttgggagcacaagacattgatgagacccttcgtggataaattgactgccacagttgatccacatgggtgtaaaatgtacgttctgaaaccaatggcttgaattttccggaaccaaatttttggattgcaccttt

SEQ ID NO: 36579 - DNA, 411 bp, Glycine max
ctacgttaactacggaatccggtccaaccttccggtcaattcccccggtttttcctccaaaccaatggttccggggaaaccccgaaatttaacaaggcttctccgaacggcggcttcggcggcttcggcttcgtccctctccctcttaagcccaacctcggaacctctccgttcggttcccgctcgtggattggtggttcgcgccccgaaaggatccacgaaccaccgcgccctaaccggcgtgatctttgaaccgttcgaagaggtgaagaaggagctcgatctcgttcccaccgttccacaagcttctctcgcccgccaaaaatacgttgacgaatccgaagccgccgttaacgaacaaatcaatgtggagtataacgtttcctacgtttatcatgctatgtttgcgta

SEQ ID NO: 36580 - DNA, 265 bp, Glycine max
gttaactccggattccgctccaggagaaccccaaacacaacaagtgtctccaaaattgcaataaccagagagactcgtacaggaaccaagcatgccacgctcgttgcaacctccttaaggtggagaaagaagaatgttaagaaggggaaattccacgaacacgaacacgaacacaacaaccggagaaggaacctcaacaaccccgtgagaaagaggaagacgaagattagcaaccacgttcaatcccatttccacgcccaaaacc

SEQ ID NO: 36581 - DNA, 390 bp, Glycine max
aaatcatttcgttgcagtcagtcattcgaagaatacggtttcagatatgaatcgcaatcgtatgggagatcgacatctggctgcattgtaagtgcaattctcgtattcttcatgatcttctcatcctgactctaggtgaatcctctaggtacgcaccgttatgccactggcaagcacccttctggctactgcacgcgcccatctgactctgcgggactccttcggtgtcaacagtctactccagtgagcttccgctggttggtatcaccgcaccgggatttcgacgcataggctgtgtttgacgaggagtttaacaacgtgaaactatctgattacattgggaagaaatatgttgtgctcttcttctatccgttggacttcacctttgtc

SEQ ID NO: 36582 - DNA, 421 bp, Glycine max
ttacttaactacggaatccggtccaaaaccggaaactccaaaaacaatggctccaaaggtggccccaacttaaacaatggttcccccaacttggttcccccaagaaattttaacaacgtgaaggccccaaaggttcctgttggcggattccctgctttgcttaaagttggaattattggtgggcttgttgtatatggggctgcaaacagcttgtacaatgttgagggaggtcatcgagccattgtcttcaatcgtgttgtcggtgtcaaagataaggtctatcctgaagggacacatattatgattccttggttcgagaggcctgtgatctatgatgtacgtgcacgtcctcatttagtagagagtacatcagggagccgtgatctccaaatggtgaaaattggacttagagtccttaccc

SEQ ID NO: 36583 - DNA, 279 bp, Glycine max
  unsure (1)..(279): unsure at all n locations
cccagttcanaggtaaggtangttaacaaccctcctcaacctcctcccaatgggaccttttattcgttcccaaccttagggaacaaggtccgtcctcaagtcccaaaacgcaacaacgcaaagggcctgcacacttctcgagcccctacttttcggaaagcaaaggggatctcaaaggggtttgcacccaaattttatctaaacccttgcccggggcgcccctctcccaagtcgccttccgccaccctttcagatacaagaagcacaacgagctcttca

SEQ ID NO: 36584 - DNA, 438 bp, Glycine max
cttcggacgcacccttacttaaccccggaatccggtccaaccaaaattgtccaacttgattgaaaattattgtgttaaaaacaaaacaatttttcaatggcttcaaaaaaacaagaggagcgacctgaggcagctgcgaaagttgctgccaaagaactcgaacaagtcaacagagaaagaagagaccgtgatttcggtgttgttgctgaacaacaacaacaacatcatcaggaagatcaacaaaaacgtggtgtaatcgggtccatgtttaaggcggtgcaagacacctacgagaacgccaaggaagctgtcgttggcaagaaagaagctactaataacgcgtacagtaatacagaggttattcacgatgttaacattcagcccgatgacgtgtcggcaacgggggaagtaagggacatatcagccacaaagactcat

SEQ ID NO: 36585 - DNA, 395 bp, Glycine max
atcagtcatcaccatggccaagctagttttttccctttgttttctgcttttcagtggctgctgcttcgctttcagttccagagagcagcctcagcaaaacgagtgccagatccaaaaactcaatgccctcaaaccggataaccgtatagagtcagaaggagggctcattgagacatggaaccctaacaacaagccattccagtgtgccggtgttgccctctctcgctgcaccctcaaccgcaacgcccttcgtagaccttcctacaccaacggtccccaggaaatctacatccaacaaggtaacggtatttttggcatgatatacccgggttgtcctagcacatttgaagagcctcaacaacctcaacaaagaggacaaagcagcagaccacaag

SEQ ID NO: 36586 - DNA, 293 bp, Glycine max
accaactattgacctcttcaacccggaaattaatcccggaccgtaccctgcatgcttaccaactttccctatagtgattcattttaaaccttggcttaatcttggtcatacctgtttccattataaaattgttatccattcacaatttcacacaactatacaaaccttaaccttaatatttaaatctcttgttgcttaattttttatcttataacttataattgattataccttatagctataatttattactataatactatattttttattattttaaattaatttatatt

SEQ ID NO: 36587 - DNA, 186 bp, Glycine max
aaactggttactctattctagtacaacgaccatcttgacaggatagggtcatggcaatggaaacatgtgatgaccttctgtttcgatggggacagggttttagagcaaccttaacgtaacgagtgccatatgcaaaaactcaaagccgtcaaactggattaccgtatagagtctgaaggaaggctt

SEQ ID NO: 36588 - DNA, 146 bp, Glycine max
caacaatgaatacactcctgttgttgccgtttcggttatgggcaccaacagcttggataaccagctcgaccagatgcctatgagattctatcttgctgggaaccaagatctatattatctaaaatatcattcatcagcatcaagga

SEQ ID NO: 36589 - DNA, 207 bp, Glycine max
gaaaatctatgcttagaattagaaactccgattagaagatatgaaataactgatcgttgaaaattcatggaggatagagagcgggagagtccattaaagacacagctacacataatggtgcgtctgccgatgctggcatggagaatacaattgcacagtccaagacaatgcataacgattgatatcatgtcatactgttccaaacga

SEQ ID NO: 36590 - DNA, 393 bp, Glycine max
gaaagtcttccatagccccccataaatgaagagcaacatcttctttgctctctttctcttttgtgccttcaccatctcatatctaccttcagccatcgctgatttcgtgctcgatcatgaaggtgaccctcttgaaaatggtggcacatattatatcttgtcagacataacagcatttggtggaataagagcagccccaacgggaaatgaaagatgccctctcactgtggtgcaatctcgcaatgagctcgacatagggattggaataatcatctcgtccccatatcgaatccgttttatcgccgaaggccatcctttgagccttaagttcgattcatttgcagttataatgctgtgtgttggaattcctaccgagtggtctgttgtggagga

SEQ ID NO: 36591 - DNA, 338 bp, Glycine max
ggaagccgtatctatgcttaccctggcaatcttgatctcacttgtctctgccgattaccacgtcatagctgaggcgaaaccggtacagttgaggagtcacgatctaacgtcgccgatactgcaagagtctagagctgcagagatgaatgaaaatcctgatgcagtgataggacgctgctacaaatcgtcagttcgctaattatacacttgagcaattgaagcgccttcttggagtcagaccaacgcctaagaacgaactgagaagtacacctgctatatctcagccaaagtcattgacattgccacagaattttgatgcacggacagcttggtctcag

SEQ ID NO: 36592 - DNA, 360 bp, Glycine max
gtagtgttaaataagtatacgtctgaccattgagatagagacttttatactgcaaaaatatgtaagcttcatactgatgctcttacacaagggatcgcatgaattatgactgattccatggaggttaagatgaaatttgtggagaccattgaactccaaattgggctgaaaaaatatgatacccataatgacaagcgttttactaggtctgttaagttgcctcacattcctcggtacaagatgaagatttgtatgtttggcaatcttaagcacattaaagaggctgataagatgtgattggcctagatggatgttaaggacctaaacaagcttaacattaataagaaagttgcagaaaat

SEQ ID NO: 36593 - DNA, 318 bp, Glycine max
ctcgagccgattcggcacgagagatcatacatagtagtgttggtgggttccacagatacctgggggtctcacagagatgcgccaacagaagcgatggcaagaattatgactgcttccaagggggtgcgcaggacatttgtgtatactattcaactccaaattgtgctgcagaactatgatcgctagcacgacaacccttttattggctctgtaaagttccctcacattccactccccaagatgaggatctgtatgcttgtagatcccaaacactttgaagaggccgatacgataggattggcctacatggctgtaccg

SEQ ID NO: 36594 - DNA, 346 bp, Glycine max
gtttgaagaacaacatggtggtgctaaaggtgtgtttgttgcttcttttccttgtgggggttacagctgcacgcatggaactgagcttcttcaaaagtgatcagtcatcaagttatcatgatgacgagtattcaaaaccatgctgtgatctctgcatgtgcacacgctcaatgcctcctcaatgcagctgtgaatataataggctgaattcacgcaactcacattgtaagacctgtatgtgcaaacgcccacaaccagtacagtgtccttgtcttgacaacaacgacttctggaacgaaccttgcaagtccagagatgacgagcaattctaatagctcactcaaat

SEQ ID NO: 36595 - DNA, 238 bp, Glycine max
atggagagctgcaagagggacaggtgttaaatgtgccataaaactttgcggtggcagcaatatcacagatcgacatgttcgagtaattatcattcacgacgaaagagagaccctcgattggcactcttgccagtccagaatcatttcttaccgcatttccggatgaagtgattcaaccaccttgaaaccgagtgaggctgcaggccaccaaggtcatgattcgattcaccatcaacat

SEQ ID NO: 36596 - DNA, 352 bp, Glycine max
aattcggctccgaattggtttggacacatccatatttccacttttgggaataccttaaaacggaatctttcatccctttggattcaactcctgaccagaacatggttgggcaattgtctcaactagctcaaagaatgacatctcataagctcaacgcgttggtacccgaccaccgtgttgagtccgaaagtggtttgattcacacatggaactctcaacactctgagctgaaatgcgccggtgtcactgtttccaaactcaccctcaaccgcaatggcctccacttgccatcttactcaccttatccccggatgatcatcatcgctcaagggaaatgagcacttggagttgc

SEQ ID NO: 36597 - DNA, 310 bp, Glycine max
agatcatacatagtagtgttggtgggttgcaaatatgcgtgggggtcttctccacatgggtcataagagaccaaggacactgctgtagacacgcacaaagttgtaggacacagtgtccatgtgcacacttcaggaaaccgctacgaaacgtgcctcgtcacgctcgctcgttttcaagagccgcattacgaacccggcatcaatgcgtcttcttccatttaacaatccgagagaggtccgacgacctctcaggttctcacagttgtctcgcgcctttcggtcggtggaatcctcctgctcctggaaggac

SEQ ID NO: 36598 - DNA, 405 bp, Glycine max
gaattctcgagagagaagaagaaacgtaaccgatcatcacttcacttcactaatacatcatgggagacgagacccagaacacgtatgagagctctgaggttgaggtccaggatcgtggtgtttttgactttctcggtaagaaaaaggatgaataagacaagcctcatcctcaggaggaggtcatcgccactgagtttcaaaaagtcactgtctcagacgaacgagagaagaagcacagcctcgtagaaaagcttcaccgatctgacagcagctctagctcttcaagtgaggaggaaggagaagatggagagaacatgaagaagaagaagatggaatagaaagggctgaaagagaagatctacgagaaaatacaaggtgatcatcatcatcacaatgatgaggaca

SEQ ID NO: 36599 - DNA, 216 bp, Glycine max
ctatgacatcacctgcacgcgtacgtaaactcggaattcagctcgaggcgacttttttcataaaacatacgctcttcgatagccagggtaatatggttcacaggtatggcaacgctgataatcatacctactaatactgcaaccctgttcatgctactattgtcacctatttatccaccaaaactgcttctattttatacaattattacattaata

SEQ ID NO: 36600 - DNA, 288 bp, Glycine max
ggcgaccagtaccaagcttgctatagctatctctcttagcattcgggtagcctggatgtcgaacctagccttgggcaaacttaaagaaaccaatgtcgaacaatatccatacctctaaacatgcatactccagtgccaacagctgcggcaatacactgagagtgacaagcgatcatgcttgcaacactgtgacatgtatgaagcaagagcgatagatacacatctaataggaaactcgtcagaaggatgaagaacttcacgagcagcatgaggaggaggatgacctga

SEQ ID NO: 36601 - DNA, 110 bp, Glycine max
taattattatcacttccttagttcaatatggggaagcccgtcacgctctctctatcgtgcggttgctaactactattgtctaatgcatgctatactattaactacatcat

SEQ ID NO: 36602 - DNA, 216 bp, Glycine max
agaaagaaggtttttttagtatagttaacagcatggagatgtatgcaagatgttaatgttggggcggataaattctcgaataggcaatctctgggtacaggatcttataattacaaggactacaaggatgcaccaccaacacccttgtttgatccaagggagttttagtcatggtcattttacacatcttggattttcatcattttgttactattt

SEQ ID NO: 36603 - DNA, 312 bp, Glycine max
acgcgtacgtaagctcggaattcggctctagctcgagccgtattttctcgagggctgaagcacaactactagaccgtcatatcaaccctgtcgcacgcaccgatcaatacagtaatcctgttatcttaactgactatcgctgtaatcccatccaactcactgatgtcactaccacctctaccttcacatcatattctgtatttattatcttatttatactctttcataactttatttattttttttttaatactttatataatttatatacaattttttattttatatttaatttaaattaaatatttattt

SEQ ID NO: 36604 - DNA, 168 bp, Glycine max
acgcgtacgtaagctcggaattcagctcgagaggtaatggtatttttggcatgatattcccgggttgtcctagcagttatcaagagccgcaagaatggcaacaactatgactaatccaaatgccccaataccgtcaccaaaatgtacatctcttcagagaaggttatt

SEQ ID NO: 36605 - DNA, 209 bp, Glycine max
cttaattattgccacttccttaaaccattatattggagcggtcacttttcttatgttgttgggtttgctcgctactctattcaaatcgcatcctctactatgctcctggcactctcaactagcgccgactcaacaacctttacgcgttggaacccgaccaccgtgttgagtccaaatgtggaccgatacacacatggcactctcatcac

SEQ ID NO: 36606 - DNA, 247 bp, Glycine max
gaacatacgataaggtcaccaaatagaatgctgaaccagatgaaatgatgtacaagtcccctgtcttcaatctatttggtgaacatatgacaaggtcatagacttcacattatctgcagcattgacccctctaccagcttgggattatagaccttccagtccttctatattgggggaggagccaattcgcactcagtgctttctggattcgaacctgccatccttgacactgcttttaatgaatcat

SEQ ID NO: 36607 - DNA, 216 bp, Glycine max
acgtaagctcggaattcgtctcgtatcacaataccttctggttttccatcgttgatatacaacaatgaatagactccaattattgccggatggattattcacaccaacatctttaaaaaccatctcaaccatattcctattaaattctatctttcttttaaccaatatcaacaatttctaaaatatcatcaaaatcaattaattcattaaaaccat

SEQ ID NO: 36608 - DNA, 290 bp, Glycine max
  unsure (1)..(290): unsure at all n locations
aaagccttctgtggcatgatctttgtcctcgtctacgtacacgatcngcatttctggtgaccctacctcgtctactccaccacctcttttttttatttatttattacttactttttcgttttgcggcgtcaacaacataacttatgtggacacattaacactgccgtgacttttggcctgttcctggcatgcaaggtgtctctcattcgtgccatgttctacatggtagcacattgtttgggtgctatctgcggttttgggttggtgaatgccttcatgaagcactccta

SEQ ID NO: 36609 - DNA, 255 bp, Glycine max
ctcattaatttcaataatggcacctactctcattgaattagccaggtttattctactagatgatggataccttaattaaatctcaccaaaaccatacctcatgtgtaatcacaatagtcaaggggaacaattaatgcactagcagccaccaacactaactttaagttggcctctaggcttctgggattgtattcaaagcctgataaaagtatactgattccatacaaggatatcaaagttgaatgtaccatatct

SEQ ID NO: 36610 - DNA, 278 bp, Glycine max
atgacgtcgcatcgcacgcgtactaagctcggaattcgctcgagcacgtggacggaatcagatgcagccatacaggagcgggcacgcagcagcacgagtgttgaatgctgctctatttgagcacaatgagattggagaaatgctggttttgctcttcaaccgtataccctggacatggaatccagtttgttcgtaatgatgcaaagatttttcggtgctgtagatcaaaatgccacattaactattctatgatgagatatcctggtaaggtatagtgg

SEQ ID NO: 36611 - DNA, 277 bp, Glycine max
cggttaaaggtgagacacaatgaatggtaataattgaggttttaaaatgcagtgaggaaaggaagcttaatagtccatcaaggaaacagtttgcaacattgatgcttctgtcaaagctggcatggagaaaaccatagccactgttcatgaaaaggctcttagaatgacgggacgtgattccctgccaaacgagttggcttcccataacaaagatgccaaaaatgattagccaggcataactggacaagcaatctgctgcattagataacacggtggc

SEQ ID NO: 36612 - DNA, 335 bp, Glycine max
atcattccgagcgtccttgctaaacgtcgcactcactggatgaagccaagaactgccaggcccagatgggcaatgatctggccaaactcgaggcgagcgctactgacgtatactctaatcacggtgagcaccgatgatgtcgacatcttgagcaaggtctatgttcgtgaccactatctaacttgcatacccattagtgagatcgactacactgtcaaatgcgcatgcagctacatcgcatcaggggaaatttcacacccattatcgatgaacgcccaggacacggccatagcggatgtgcctgatgcggttgcatacagcatattgctcagctt

SEQ ID NO: 36613 - DNA, 370 bp, Glycine max
ctcgtaattgtcttacaagaattgtattggggcaatcgatatttagctcgccaatttacaatgaaagctctctttcgtattgaatggctgcaaaaagctgatgtgcctaccatagcacatattgaagagtaccattcaatgcacaggatgatgaatgctcctgattcaaatgataatattgatctactgttgagcattgatttagttgggtattcttacaagtatcatgtaaagcttttccaaacaagattgtttttcatgataagctagtgttggctaacacacactaattctttgatggaaattttccagtggattcttggttaccaatatatgcgaattgtctttatccagtaagtcaattaccttt

SEQ ID NO: 36614 - DNA, 330 bp, Glycine max
ccttagtatcacttcccttagtccaatatggggaaggggttcttaactctatctctatcatcactatgcttgctactcttgtacaatgcatgctttgctattacctcacacaagtctaacgagtgacaactaatacaacctcaacacgttgcaaccctaccaccattcttgagtccgaacgtggctcttatctaaacatggaactatcaccgcaataccagatctgcattgcacctggtcactgctaacaatcccacccttaaccgcaacggactacacttgccatctcactcaccttatccgtaactgatcattctcgctcaagggaaa

SEQ ID NO: 36615 - DNA, 387 bp, Glycine max
tagttcagtgtctacaataccaggtgattttgtcattggtgttaacttgacaaccataaacaatatgtgtgcatatgggctcaatcctggtatttcaggttctcgtcttttgggcaccattcctcagtccatttcacaggaaactgtttggaatcaaatggcaacagtgagaacaccattgaattttgattctagcaagcatagcttgtgtcaattctctattgatcttattggtggaggaattttagtggacaaaactggagattggatcacacttatacaaaattctgcaattagcaacttgttgagagttgctgcttggaagaaaagctgtttaatggttaagattgcgatgtctgggaatgcagcagtcaaaacgagtgattg

SEQ ID NO: 36616 - DNA, 392 bp, Glycine max
gaaagctctgtctcgtattgaatggcttcaaaaagctgatgggcctaccatagcacagattggagaggtccattcgatgcataggatgatgaatgctcctgattcaaatgataatattgatctactgatgagcattgatttgatgggtttacaaggagcaggtaaagcttttccaaacaagattgtttttgatgataaacttgtgctggctaacacacaagaattctttgctggaaattttccagtggattcttggttaccaatttttgtgaattgtctatatcctgtaagtcaattaccttcagaagctagtcgtgcaaatgatacatgtggtagtggacgtggtggtttacctaccactgcttggattaggtctgcaggtaacaatcgct

SEQ ID NO: 36617 - DNA, 288 bp, Glycine max
ccattcttgaacaacatgccaacatcaggtgtgtacggtcacgcatggcaatttgtaagaaagatgtttggagagttgaatgtggaatcccttctggatttccgctcacaggtatttgtaatagcatttttaatgagatgctcattagatatagctatgaaaaattactgcgccaggagagacttgttcaggtgccaagcatgccacgccgttttgatgcatccttcttacggtggagaacagacgactgtgcataatgtgaaattactcgaccaggattgcctccac

SEQ ID NO: 36618 - DNA, 334 bp, Glycine max
cagctgcacaaagcaggtgaccggatggtcaagctaccatgtgtctctgtctctcttagcgcctacgagcccgaagagtatatggcccacgagaccaatgtattaacatctgactcaaaccacgaggggcaccacgacaagctctgcgaccagatctacgatgctatgctcgacgcatgctagctacagaaccatgacagcaaggttgtctgtaacacctgcactatgaccaacatggtgacagcttacgagtagatcacgaccgatgccaacgtgaaatatgagaagaatgtgctaacacatgcatgaacattgggctgtatctgatgatggt

SEQ ID NO: 36619 - DNA, 402 bp, Glycine max
atgcaatggttcatggtaggtcagggtctacaataccaaggggccttggcattggcgtcaagttgacaaccattaacagtatgtgttcatataggctcaatactggtattataagatctagcctcttgggcaccattcctcagtccatttaacagcaaactgtttggaatcaaatggcaacagtgagaacaccattgaactttgactctatcacgcagagctattgtcagctttatattgaccttctcagtggaggaatcttagtggacaaaactggagattggatcacacttatacaaaattctacaattagtaacttgatgagagatgctgcttggaacaaaggctgtttaatggtcaagattgtgatgtctgtgcatgcaacaatcaatacgagtgatt

SEQ ID NO: 36620 - DNA, 349 bp, Glycine max
tgaagctgtaacgcttgaagctgcactgctaggcgctattgcacctgggactgcgtatcactatgagtatgcaccacatcagactatgctaaatactggtttcaatcatcggccctaatatcgaccgactagaccatcactggcagctctacgcttgataagggaacagcatgctgatgaatatgttgcctaggaacaaccagaccgagaaaacgaatagcacgccattgatgaagctcaagctgctcgtgcagtaggtaagactgagagcgcaaggctctcgcaggaaacttcaggaagaaccacaatgcggaactcagttatcagccaaagaagtctgactaccacc

SEQ ID NO: 36621 - DNA, 386 bp, Glycine max
ggcaaaccgaactttctttcttgcaagctaacacagaaatggaagcagggccaggccataccctgatgttcctggcacgtgtttcaatcttcatacgcgctctaaccctatgcgctgctcacggaagcaccacggatcatgacattgcgagaaagttgaaactcagcgacaactagcttctgctcactgagaagaagttcaaggttttcatggagaattacaggaggtgctactccacataggaggagtatctgcgccatgaccggattctcgcccataacatggtcagagctgcggagcatcatgcgctggaccccaccgtcgagcacggcgtcacgcagtactgccatctcactgaggacgagtttgagaagctgtacactggc

SEQ ID NO: 36622 - DNA, 327 bp, Glycine max
tgcagaccgagctagctagctggcaagcatgcacagaaatggaggcagggcgaggccatactctgatgtgcttggcacgtgttttactcttcctctgagctctaaccctatgcgctgatcacggaagcaccacggttcaagacatggcgagaaagtcgaaactcgtcggcaacgtgcttctgagcacggagaagaagttcaaggcattcatggagaattactggaggagctactccacaaaggatgtgtatctgcgccgattcaggattctctaccagatcatagtcacagcgtcggagcatcagactctggaccccatcgtcgatc

SEQ ID NO: 36623 - DNA, 349 bp, Glycine max
caatactttcaccatctcgtggcatgctgtgcattgcggtggcaggacatattgagactctcttctagttgcagcatatcatctcaacggatcatattggaccgcgacgcatcaaaggggacgacacagaaactggtgtactcagtgactcaactgtagtaaagatagcatgtacttgtctagcatagacactagacaatagtcatgacagactatgtgaaatttatatgaagaataacttgaactatgtaaagctcatgaatgcatacagaatatcactccattttaatagattaggattgaacaagtgtgctgacattacttctcaggagatcagcaaatagtactt

SEQ ID NO: 36624 - DNA, 262 bp, Glycine max
  unsure (1)..(262): unsure at all n locations
agcgactcactgaccaaggcatggtgatgagcaccaagctctatgtacctagccggtgcgggtgtctgaaagccttataggcagacctaggcttcggcaaatgtaaggaaaccgaggtggaagaagaagaccctgagctcgggacatgcagacaccaatgctctcagtcacagcaatacactgagggtgacaagctggtatgcttgcaaagatgtcgcnaacatgattcatggtctgacgcatgacctagagagacacatcc

SEQ ID NO: 36625 - DNA, 323 bp, Glycine max
gggctaaagagaggcttattgaatgccaaggcttgagacttgatcatgacttgaccgctaattacgtctataactatgccggggaaacggctcatatgtcagtggactatgccggtgacactgctcagaataccaaagactatgccggtgacactgctcataaaaccatggactatgccagtgacacatgcacatacgtcaagggactaatgttccccggtgatgctgttcagaagtcactggctcatgtccgtgatgctgcacataagaccagcgaatataatggtgatgctgctcataacaccattgattataccactgat

SEQ ID NO: 36626 - DNA, 400 bp, Glycine max
gggaggataagagctgctttgatggtgtgtaggcatatgccaaggatgaatgtggtggcatggaatgccatgctttgtgggttggccatgcatggtatgggtaatgttgaggtggacatgtttgctggcatgctggaagacgtgaatgctgatgctgtgactcacatagcttagtgaagttgtcgcagccattcgggtctagatgaacatgattagcagtcttaccatgaactttagcgttcttataggatcaggccatatattgagcactatgctttcaatactaatattcttggtcgagctagacgtctgaaagaagcttacgaattacattagaacatggcagattctccaaatgaaatttttatgaggtacatcaatggtgcttggtatacacact

SEQ ID NO: 36627 - DNA, 214 bp, Glycine max
ccgctcgagctctccattggtccttaaacactcatcagtcatcagcatggccaaactagttttttccctttggtttctgcttttcaatggctgctgcttcgctttcagttccagagagcagcctcagcaaaacgagtgccagatccaaaaactcaatgcccctaaaccggataaccgtatagagtcagaaagagggctcattgagacatggaac

SEQ ID NO: 36628 - DNA, 409 bp, Glycine max
ctcgagccgaatcggctcgaggacttgcctcctcacatgcctaccatagtcaaaccatcatcagaaaccgaggcttcggatatgcgattggctaaagtcaaggttgatgctgatttcaatgctccttgtgacccctccatcctttatcctgctgagggcaacatgcattggttcacggcagtgacagcttgcgcagttttagatgtgcagtgccttccatcaggatcagagtatggagggcactgcacatactaccagaatttccctttctccagctattcagatggactatccataccagaggaggaaagaacagcatatgaatggcttcaagagaaggagaaacctgagaatctaaaagtagttgtaaagatgtacagcggccccaaaaattgtggagaactaatgt

SEQ ID NO: 36629 - DNA, 242 bp, Glycine max
attgcatttcgttactgtcatttggtgtgcaatcttacaagttccaaacttgtctattctggcattattgggtctcacttgtcacacatacagatttgagccttttatattatcatggcttctaaggtggtttcggttttggtcatagcgatgatgttggttgccatgaactgcaactgcactagtgctggccacatgctcttggccaatgaggaaggtcacgattttcacgagtctaaagc

SEQ ID NO: 36630 - DNA, 289 bp, Glycine max
atttagcagttaaagtcaccttgttaatgtccttcgtggttggggctttaggatttattcttctcatggtcacaagaaacatttgggggcatatttttaccaatatacctgaagtaatccgttatgtggcatccatgacaccaattcttgcaagctctgtctttgtagattcaattcaaacagcattatcaggtattgtaagaagatgtggttggcagaagcttggtgcatttgtcaatcttggatcctattatcttgtggggctttcctttgcaattgggttggcttt

SEQ ID NO: 36631 - DNA, 396 bp, Glycine max
  unsure (1)..(396): unsure at all n locations
gggaaagaggcttctcaccaaagagtaagacatgggttccattgatgatgatacaccgcttctggaagagggtctccttcaggatgatgaagggagtgagcaattcacaggagatggctcagttaactttagaagagagcctgctcttaagaagggtaccggcaattggagggcttgtccttttatcctaggcaatgagtgttgtgaacgtttggccttcttcggaattacaacaaatcttgttacctatcttaccaccaaattccatgaaggaaacgtttctgctgcaagaaacatcagcatctggcaaggcacttgttatctcactcctatcattggagctgttctagcagatggttactggngtcgatactggacaattgctgntttctctgc

SEQ ID NO: 36632 - DNA, 278 bp, Glycine max
aactcatctcatgagctgcaagatcaggtcatgcccctgaacctgttgatgttggacgcatattgcaagtcgatgttatatcagaaagcgagcacgtcacactttcaaccgctggtccaatagatccagttaagagattgaaacgtgttctgcaatcatgtcgagcttaaatttctttcgtactctcatgcagctgctggtttgggaacctatgtacaggcactaatgcgcaaacatgacactgaattcaacgtggtagtaacacacatgaatggttc

SEQ ID NO: 36633 - DNA, 375 bp, Glycine max
ttctggccttaatggccgggccttgcgccttgcttgcaattgtgcctaaactgccaaatggccctgttgggttccacctgggttggccacgtaccattgctctggtggcattttctaacaggagggtgtaacggaattggcgcgtgggtcttcaattccgtgctcaacggtgctattttgttgctgtttcttaatttttacgtgaggatgtatttagcagggaggaggaagcgtaagggtgtcgtcattgatcatcggtgtgagaatgataataacattgctcgcttctctgtcttgggcgctggaaaagaaccacttagtaataaagtgaagtccaattaaagcacagatatatattttgaggttgagtcatgg

SEQ ID NO: 36634 - DNA, 296 bp, Glycine max
gaggaattttagtggacaaaactggagattggatgacacgtatacaaaattcttcaatgagtaacttgttgagagttgctgcttggaagaaaggctgtttaatggttaagattgtgatgtctgggaatgcatcagtcaaaaggagtgattgggccttattggtacaagtgtttttaacaaacagcaacagtacagatgatttagatgcatgtaagtggacaaaatctgaaccacattactgggaattgatcctcccaatagaatgatgcgggcctaataatggttttgaaatgtgg

SEQ ID NO: 36635 - DNA, 409 bp, Glycine max
ctccctatggagtttaatcttgtggtccgtcaaaagttttgaaattttgtgaggttcattatgaagaaaagggacaaacttagttgtcaagttggaatcaacccatactccatggaatggactggtttggccaatagattactgagtaagggcaatgatattctgtgttgcgattatgctagttttgatggtttgattaccaagcaagttatgagcaagatggcagaaatgataaacagtctttgtggtggtgatgaaaaattgatgcgtgaaaggacgcacctgctgttggcttgttgttcaaggatggcaatttgtaagaaagatgtttggagagttgaatgtggaatcccttctggatttccgctcacagttatttgcaatagcatttctaatgagatgctcatta

SEQ ID NO: 36636 - DNA, 254 bp, Glycine max
caacaatggaccatttgtttttctcggcttcagcagttcagcaaagaaaaaccaccctgagtttttggcgggaaagggatcagtgcttcatattctagacaaaaagatactggccaggtctttgggtgtgagtaacagaaccattgatgagcttctgcgttctcccgaggactccatcattttcagatgcagttcctgcgcagaggaagaggagaagataatgaaggaagaggaggaggaagaggagagcaaga

SEQ ID NO: 36637 - DNA, 367 bp, Glycine max
ctatgacatgcactcgtcacctaagctcggaattaattcccggttcaggtaattgaataatcattgaattcggcatatattgagagagttcactatcaatggtgtgaaggatagattcagacttagctatcatgttcgaatcaagcaattctccatagaatacactacactttccaatctatcactgactaaggtccatgatattatgagctaccattatgctatataccatagcaccattaccaatcaagttattagctagatcacctacatgatcctcagcctttgtggtgacgaccaacaatacatgcatgaatccacgcacctactgtaggattgaagaacacagatggcaatacttaacaac

SEQ ID NO: 36638 - DNA, 407 bp, Glycine max
  unsure (1)..(407): unsure at all n locations
tcctagtataccttaataaataatttaagatactatgatgagagcacggttcccattactgttgctgggacttgttttcctggcttcagtttctgtctcatttggcattgcttactgggaaaaagagaaccccaaacacaacaagtgtctccagagttgcaatagcgagagagactcgtacaggaaccaagcatgccacgctcgttgcaacctccttaaggtggagaaagaagaatgtgaagaaggtgaaattccacgaccacgaccacgaccacaacacccggagagggaacctcagcaacccggtgagaaggaggaagacgaagatgagcaaccacgtncaatcccattcccacgcccacaacctcgtcaagaagaagagcacgagcagagagaggaacaggaat

SEQ ID NO: 36639 - DNA, 248 bp, Glycine max
cctgaacatcctgcattggggtggcagtccatccagtgagacaaatgattggtttatttcctctcaggaatgtgttcccaggacttattgtgttttaaatccacaaaatccttttgtgttaaataggtggatggggaaactgactttcccccagggcacttaccgaaatgttaagagaatgcctctttctataaggggaggagctggtgcatagaatgctatcctcatgattatgccaaatgctgttc

SEQ ID NO: 36640 - DNA, 343 bp, Glycine max
tgtacctaacactgctgatggatataatagttccacatccgggtgttgctacgttaactctgtggataaacatttggtgaaaggaaagatcgttctgtgtgacggaaacgcgagtcctaaaaaagttggggatttgtctggggcagctgggatgcttcttggagccactgatgtaaaagatgctccattcacttatgcactgcccacagctttcattagtttaaggaactttaaactaatacattcttacatggtttcattgagaaattcaacggccacaatatttaggagtgacgaagacaacgatgattcacaaacccctttcatagtttcattttcatct

SEQ ID NO: 36641 - DNA, 396 bp, Glycine max
  unsure (1)..(396): unsure at all n locations
cacgtatactacaattgcatagtgctgcgatcgccgtttgttctctgaaacaaacacaccgacaccaatcactctctttgatccattccgtttagacgattagcttttacgatggccagccataactacaaagtcttcagctgcttcaacaggaagttcaccgtcaccgagccgggcccaccgccggacgtccaaaaagcgttttctgaatttgccgacggagcctcctccctgtccggcgatcacctcctccgatttctggcgaagcaccagggcgaagtggactgcaccgcagtggattcggagcggatcctncagcaatcgcggaaagaggatcggaaagtggactggatctncacgacttcttncgtttcctgctacatgacgatttcaata

SEQ ID NO: 36642 - DNA, 404 bp, Glycine max
ctcatgacatggtgccacagtcgccggggttgatttgcagcgaggattcgccgcagtggttgctgaagctggtggaggggtggtttccgtggtgttacttgcacgttggagaggagttgcagttggaccataagaaatccccgtttctcaaccctgacggggatgcttcctgcgcccataacttggaggctcacttgcacttgctagatgggtgagttatagtacattaatagttagaaaaaattatatttttggtctatccctttatctctaattttaaatttaattcccactaatttaattcataaatttcatctttctattttgtgaaattgtgcaatattaacacaattaaatattgattattaataagtgatgttgataatcacatgtcacctttttat

SEQ ID NO: 36643 - DNA, 407 bp, Glycine max
cggctcgagcggctcgagcggctcgaggtttcgtctggtgcgtctttactcttgtggggaccgaagcgaaaaagaaaaggcttgacttgagagaaatagagcttcgaatcgaaactcagaattagaaaaaaacacaaatcacaatcacaatggcaaggtacgaccgagcaatcaccgttttctcccccgacggccacctcttccaggtcgagtatgccctcgaagccgtccgcaagggcaacgccgccgtcggcgtccgcggcaccgacaacgtcgtcctcggcgtcgagaagaaatccaccgccaagctccaagactccaggtgtaaaccaaaaaaaaacgacgtcgtttcaaattaaacactgatttggtgtggtcggtttcgcaggtcggtgaggaagattgtg

SEQ ID NO: 36644 - DNA, 198 bp, Glycine max
atgacttctcatccgcgcgtacctaatctcggaattcggctctagtattacaccgttttaaataatagacgatattctatgatgaggtcgcggttcccatgactgttgcccggagtagttatcctggcattacattctgtctcatatgtcattgcgtatactgaaaatcatatacccgatcacatcaagagcctccta

SEQ ID NO: 36645 - DNA, 275 bp, Glycine max
attagagaacatgaatactataagccttactttagtggatctaaattgaaaagctatctagctggtcataatatcaccattactgatggtattgacaagactagtacaactttgcaatttagaaagttagcagatcgagattctcacaagagatactctaaacagatgtctaatgtgttgaatgtagactcttgaggacaaagcgaatgtacggtcacaatggcattatatttcttgtaacaatcaggctaagccagatgcttatcatggcaatg

SEQ ID NO: 36646 - DNA, 360 bp, Glycine max
atgaaaaagttttgcgttaaaggacacattcgctgctgactgtggagatcaaggatggcaatatgtgctaaagatgtttggagagtataatgtggaatcccttttctatttacactcacagttatttgcaatagcatttctaatgagatgctcattagatatagctatgaaaaattactgcgccaggctatagctacaagtatgtttttacaatactttaataattatggatctctgtgagtgtatggtgatgataacttaattagtgatcatgaatatgtcaagccttactttagtgggtctaaattgaaaagctttatacctggtcataatatcaccattactgatggtattgacaaa

SEQ ID NO: 36647 - DNA, 411 bp, Glycine max
  unsure (1)..(411): unsure at all n locations
ctgattttgaatcttagtggaaaaacttcaaaaaatagaaagaaaacatcataccgattcttcattagaaaaacccaagtacaacgagagaaatcttgtatagatgtgacaaaataaaaataatctaatttggaatagactcaattgggaccccaaatattggagtgaactaagacaaaaggtaacgcatcacccttattgacatgagagccataactgatacgagtatgtttacctagttgacacgactcgcatggaaaggacttaaaattagaatgattgggaactaatacatgcaaatgcagatgagacacaaacaacccgaggtgtaagttgatataatcctncagactcatatcctgctccaatcatccattcagtgcgtcgatcttgtacaagaacgaaattact

SEQ ID NO: 36648 - DNA, 406 bp, Glycine max
atacgttcatgacttgttgctctaaacccaaaaacacctcagaaatatttagttagaactattacattgatccatgcactcacaaaagatgtacctaaatgactaagttggtatatatatcaaatacattcatataattcatggctatggctattgtatattaagaagttgacatagaaatgaaataattgacccatctctagtcaggtcgattgttttaatacattacaaatagtttttactaacatatgctactatgttttggatttcttttcttgtttgcaggaaaactttgccggtggaagaaatcttgaccattgacattaaacccggttggaaaagggggacaaagatcacattccctgaaaaaggaaatgagcagccaaatgttattgctttcgatctt

SEQ ID NO: 36649 - DNA, 306 bp, Glycine max
tcggtgaattccaattccacattttcaagaattaaggaggcaaagaatgtgcatatatgaattggaattattggttttcttattaggcctatcctgaagccaaaggaaatgagatcggaattcctcggggaattccaattccacattttcaagaaataaggaggcaaaaatgtacatatatgaatgggaattattggtttcctaattaggcctatcctgaagccaatggaattgagatcggaattctctcggggaatcccaattacacattctcgagatatagggacgcaaatgtgcacatatgtg

SEQ ID NO: 36650 - DNA, 239 bp, Glycine max
ccccactagctattacttcactctcagcactgatgcatcatgatcttgattgcaggaccctaaacttcaccttcaaccatgaccacacaagtaccaccacacagtatccaactccacacaacaacacaccgctacgaaactggcaatctcccccccagagcccgcttctaaccgcctaattatgaagccagcgtcaaagcgccctacatttaccatacctagagaggtccaactacttc

SEQ ID NO: 36651 - DNA, 269 bp, Glycine max
ggtcaagttgcttcagactgcgctcttcaatggccacccttggtgttgataaccaggcttcttctgctcaagatgctgacgctctcctacacgctttacaaggacgtgcggctgatcacaccgccataatcgctctactgcgtcacagagatgatcatcagacgcaagaaatcattttagcttatgtcgcgatatatccagaggatctcatcatacgccttgagttcgacatctctagtgactattacagagctttgtaccgctggatg

SEQ ID NO: 36652 - DNA, 270 bp, Glycine max
tacctaagctcggaattcggctctagtatgacccgtttacagacaacagcccatatttgaggtaagtgtacacgtcattccaggagctagcaacatttatggctcacggtaacactgctcagctctcgaatgaaggcggtgatccagtgctggcgcgcctatgctggaccatcgcatcgtacgagatgccgcacgataacacgttcttaagaatcgtggaaaaacttctggaaatagaccccaccggtgcaattgtggccataaggaaca

SEQ ID NO: 36653 - DNA, 275 bp, Glycine max
cgtctcgaggtttttgaacactcatcaccatggccaagcttgttcttgtccttaggttacttctgctcagaggctgcttctctctgagagagcaagcacagcaaaatgagtgccagattcaaaagctgaatgccctcaaaccggataaccgtatacagtccgacggtgggttcattgagacctggaaccctaacaacaagccattacagtgtgccgacgttgccctctctctgtgcacccttaaccgaaatgcccttcgtacacattcctacacc

SEQ ID NO: 36654 - DNA, 406 bp, Glycine max
gtgctattgactaacagcaacagtacttaccattatgatgcgtgtcagttaacaggatcgtaaccacattcctgagaatcgatcttcccaatataagtatgctgtcctaataatggatctgaaatgcggatatctgagtggtcaaaataaacttcatggcatctagagtttccttattgacaatcccaaacagtatacagattacgacattctcttgcgaatttctcacgatttctaaattgctgacaatactcttatgccagctatttctgtttcacatgctactgccagatcttctgaaaatgctacaatcctctgtatgatctgcacttagtgacatctttcatttgtccgtttgtataattcaatcaccgaaattaggcatgaccctactgctgaatattct

SEQ ID NO: 36655 - DNA, 404 bp, Glycine max
tgtatactgtttctgaccaatgttatcctgagtgggctccagttaattgtcgaggtcatcgacttccaattcacatcacttaaggaaattatatcagaaagcaagatgtcagcattgaatatgatgcatgtacaattccaaatgatattggatcattggttgatgccaatgttgctaaatcacaaacatatagttgctttccatgttgctgtaagcatatgaagactgtgatatgcatcattgataccatatgtttagccagtagttcatgctctaagtgctgaagtttactttgacttcttcactgaggagcatgattgtcaagacatagttgctcacattggtgaattgaaatctagtgtctatgttccactgcctacaaaaactaatactattgaatctcc

SEQ ID NO: 36656 - DNA, 215 bp, Glycine max
cggctcgagctccattggtccttaaacactcatcagtcatgagcatggccaagctagttttttccctttggtttctggttttcaatggcttctggtttcctttcaagtccaaaaaaccaccctaggcaaaccaattgcaaaacccaaaacttaatggccttaaaccggattacccgattgagtccgaaagaaggctcattgggaaactggaaccc

SEQ ID NO: 36657 - DNA, 393 bp, Glycine max
ttcttaggacagagacagactaccaaggttttcattgtgcagtgcaaggctaaaatcatcatgcatttccatggacttgcattatggtatcctcactttgtgactcgtgagatcattccaaaagtgatgaagtgtattcgttgacatgctgtgatctcttcatattcacacgctcagtgcctcctcaatgcagctgtgaagatattacgctgaattcatgccactcagattgtaagagctgtatgtgcacacgctcacagtcaggacagtgtcgttgtcttgacaccaacgacttctgctacaaaccttgcaagtccagagatgactagataaactaatagctctctcaaatggacgaaacccctttaggctttggttgttatgttaggggag

SEQ ID NO: 36658 - DNA, 169 bp, Glycine max
ctctaaccgttcattattaacacttccttagttcaataagggcaagcgcttcactctctctctctcttacctcagcttgctactcttgacgagtgcatgctccgctattagctccagcatgctcatcgagtgccaactcaacatcctcaacgcgtcgaaaccctacctc

SEQ ID NO: 36659 - DNA, 410 bp, Glycine max
  unsure (1)..(410): unsure at all n locations
gcaaaattgatgcgtgaaaggacacacctgctgttggcttgttgttcaaggatggcaatttgtaagaaagatgtttggagagttgaatgtggaatcccttctggatttccgctcacagttatttgcaatagcatttttaatgagatgctcattagatatagctatgaaaaattactgcgccaggctagagctccaagcatgtttntacaatccttcaaaaattntgtttctttgtgtgtgtatggtgatgataacttaattagtgttcatgaatatgtcaagccttactttagtggttctaaattgaaaagctttctagctggtcataatatcaccattactgatggtattgacaaaactagtgcaactttgcaatttagaaagttagcagattgtgattntctcaagag

SEQ ID NO: 36660 - DNA, 392 bp, Glycine max
gaaattttgatagacccgggatcacagggctggcgacgcttagacctggaaacaacacgcactcgttacttgatggcatgagtctctcaatttgacactacttctatgtgtacgaattcttaagggatagaaaatcactctctgagctggccacagactccgtgaatcaatttcttttacactctcagtttatttgctgaacactctcctattagatataagactgcgtgttatacttaaactccttctgtctctgtcttaaccctctgatataatataagtgcaacctggtgacattcttgcattagatgctcccactctggtatatcgtataggactccgtgggatgactgtcctattgcgctccttaatttcactctcttattctgact

SEQ ID NO: 36661 - DNA, 395 bp, Glycine max
caatatcctagtacaccgtattaaagaatttaagatatactgtgatgagagcgcggttcccattactggtgctgggagttgttttcctggcatcagtttctgtctcatttggcattgcctattgggaaaagccgaaccccagtcaccacaagtgccttccaagttgcgattgccagaaagacttctaccggaaccaagcatgccacgcttgttgcaaccttcttaaggtggaggaagaagaagaatgcgaagaaagtgaaatttcacgagcacgaccacaacacccggagagggaacgttagcaacaccgtgagaaggaggaagaccaaggtgagcagacacgttcattcccatttcacgcccacgccaacctcatcaagaggaagagcacgagc

SEQ ID NO: 36662 - DNA, 282 bp, Glycine max
ctcgcatagaatcacggtcgatgcacaatctaacggacttcggtatatcgataactttttcaacacaccttacacacttatgtattggagcctctgatattagtatgatggataggacggtggtgtcggttttggtgatagcaatgacgttggttgacatgaactgtaactgcactagtgttggacacatgccgttaaccaaggcggacggtcacgatttgcacgaagctagctcacggagcacacaaactgggatcaaagccatctaaactgtataagatg

SEQ ID NO: 36663 - DNA, 388 bp, Glycine max
tttgaagaacaacatggtggtgctaaaggtgtgtttgttgggtcttttccttgtgggggttacagctgcacgcatggaactgagcttcttcaaaagtgatcagtcatcaagttatgatgatgatgagtattcaaaaccatgctgtgatctctgcatgtgcacacgctcaatgcctcctcaatgcagctgtgaagatattaggctgaattcatgccactcagattgtaagagctgtatgtgcacacgctcacagccaggacagtgtcgttgtcttgacaccaacgacttctgctacaaaccttgcaagtccagagatgactagaaaaactaatagctctctcaaatggacgaagcccctttaggctttgtttgttatgttaggggagac

SEQ ID NO: 36664 - DNA, 321 bp, Glycine max
tgaaagctccggcatcatctgttacgtcaacgccaatctgcacgacaatgacggtatccgcccggaccagcattgtctcatcttcgctggaaagtagctcaacgaaggtcgcacactcaccgactactccatctagtcggcatcaacacttcacctcgtcctccgtctccgtggtggcatgcagatcttcgttctcacgctcatcggcatgactattagtctagatctctaaagctcctacaccatcgataacatcgacagctaagattcaggattatgagggaatctccccataccaccagatgctgatcttcgccggga

SEQ ID NO: 36665 - DNA, 408 bp, Glycine max
agaagaacaagtagttgagaactaagaaggagaagcaaatggcttcctcaatgatctcttccccagctgttaccactgtcaaccgtgccggtgccggcatggttgctccattcactggcctcaagtccatggctggcttccccaccaggaagaccaacaatgacattacctccattgctagcaacggtggaagagtgcaatgcatgcaggtgtggccaccagttggcaagaagaagtttgagactctttcctacctgccagaccttgatgatgcacaattggcaaaggaagtagaataccttcttaggaagggatggattccttgcttggaattcgagttggagcacggtttcgtgtaccgtgagcacaacaggtcaccaggatactacgatggacgctttaacccct

SEQ ID NO: 36666 - DNA, 350 bp, Glycine max
  unsure (1)..(350): unsure at all n locations
attgtangggcgaagccggaggtcattggagctgatatcacaagggcatacctcagtaatgtatgtgttgctaaagaactgcacagaaatgggttggcttatgcacttcttgaaaagtcaaagttagttgcttatgattggggcataacagatttgtacgtccatgttgctgtcgacaatgaaccagcgaagaaattgtatataaagagtgggtttgtctatgaaagtgatgaacctgcgtggcaggccaggtttctagatcgaccccgaagacttctcttatggtcagggttttcaaggacctaatttaacagtgttgtcctatatcttctgttaatttgattttctgt

SEQ ID NO: 36667 - DNA, 270 bp, Glycine max
gctggatcttctagtggtgcaaagaaggcttttactggaatgtgagcttcgatttccagtttttattgaagaaatcagatctactaaataacaaggtaacatttttatttagtagatctgatttcttttctggaaggtgacatattaaaaccttatcaattttggattttctttgaggtttcgttctggctttatgtttaggattttgttatacattatgtttttcgaatactatttgccttttaatttttgaaactatgcagactcttc

SEQ ID NO: 36668 - DNA, 350 bp, Glycine max
ctggacagaaaaacgctatgggagatgcagaccccacaggttatcaagcctgagttgttgaggaaaggctttgagcttgtaaatagggaaggtcttgaagttactgatgatgtgtccattgttgaacacctaaaacatcctgtttatatcactcaaggatcttataccaacattaaggtgactacacctgatgacatgttactggcagagagaatattgaatataaatgatgaagacaatatagtcttgccagttcacctttgaagggaaatcatatcctgcaagataagatagaactggaaatcttctttttcaataaatagcgatcaaacaatgaacttaaaaatcct

SEQ ID NO: 36669 - DNA, 325 bp, Glycine max
tgacaacgcatgcacgcctacgtaagctcggaaattggctccaggcaaaagaacaagtaatttgagaactaagaaaggagaaacaaatggcttccccaatgatctcttccccagctgttaccactgtcaaccgtgccggtgccggcatggttgctccattcactggcctcaagtccatggctggcttccccaccagaaagaccaacaatgacattacctccattgctagcaacggtggaagagtgcaatgcatgcaggtgtggccaccagttggcaagaagaagtttgagactctttcctacctgccagaccttgatgatgcaca

SEQ ID NO: 36670 - DNA, 360 bp, Glycine max
gacgtctagaccacgcgtacgtaagctcggaatacggctcgagtagaatttgtgaaagaagctggacgtggaggcaaagggaatttgcccctgcaaggcactccaaccattgtaaagacagaaccatgggatggaaaagatggagaaataattgaggacgatgaattttctcttgaagaactaatgggggaagatgcttcaagcaaggatgagctatgatcaatttataaggaatttagagcagattaaggtttcaaccaccgatttttacgttacaggcaagttgttgctcatgattattgtgatcactattctgtttttccatgttccaagttaaaaaaccagtcgagtgatgagtga

SEQ ID NO: 36671 - DNA, 358 bp, Glycine max
ggtagagaaggtgttgtgaaaggttaagatcgagaaattagggtgaagtgaaggagaagctcttgagaagatgggagaagcaacagaaagatatgcagttgtgacgggtgcaaataaaggaattggattagagatagttagacagttagcttcagctggaatcaaagtgttgctcacagcaggaaatgagaagaagggtctccaagcactgggaacactcaaagactcaggtcgatcggaccttgtactgtttcagcaggtggatgtggctgatgcaacaaatgtagcttctttggcagattttgtcaaatccaagtttgggaaacttgagattctgagtaacaatgcagggattggt

SEQ ID NO: 36672 - DNA, 313 bp, Glycine max
tcgggaatcggctcgagaacaagatttagaaacagagacatgttggtgaacgtgtacggtccaacctatggagcccccaagagggtgctggtgtgtctgattgagaacgaaattgagtttgagacagtagatagtgatcgcttcaagggagagaataaggaacctgagttcctaaagctgcagccatttgggtcacgtcctgttaggcaagagggtgattatgctctctatgcccgtattgatgtgggtagttgaacttcggactttggatcaagaatgttatttgagttgtggagaatctcgtgcaataatc

SEQ ID NO: 36673 - DNA, 383 bp, Glycine max
gacgtctagaccacgcggacgtaaactcggaatatcggctcgaggtggacactaaagagtttgaatccatgcaggccttatcaagcaagaaagacaatcatgacatattcattaaactgggatctgagaaagataagcgaaaagaggcttttgagaaggaagaaaaatccaagaagtctgtgagcatcaccgagtttctgaagcctgctgagggggaagcatactataacccaggacgtggtaggggccgtggccgtggttcacgaggcggaggcggttaccatggaagtggcaccaagaatgcacctgctccatccattgaagatgccgggcatttcccaaccttgaggtgccaagtgaagccttcccagaacgcttttgac

SEQ ID NO: 36674 - DNA, 394 bp, Glycine max
gacgtcagacgcacgcgtacgtaaactcggaatacggctcgagcaaattagttcattctctttgcgcagttccctacctctcctttcaagatgcagatcttcgtcaagaccctcaccggaaagaccatcacccttgaggtggaaagctctgacaccatcgacaacgtcaaggccaagatccaggacaaggaaggaattcccccggatcagcaacgtctcatcttcgccggaaagcagctcgaggacggccgtagcctcgccgactagaacatccagaaggagtcaacccttcagcttgtccttcgtctccgtggtggcatgcagatcttcgtcaagactctcactggcaaaaccataaccctagaggtcgaaagctctgacaccattgacaacg

SEQ ID NO: 36675 - DNA, 267 bp, Glycine max
gggatatcgaagcgcaagcttcaccggtcgatcctcagacgcaccagctagagatttgtgactttgggagtgcagctctcgtggccggccgggaagcacgcatatcttacatctgctctaagtactatacagcacctgaacttacatctggtgcacctgattacaccagtgtcattgatatttggtcacctggttgtgtacatggtgcactaatgcgtggccaggctctattcccgggtgagattggagtacatcagcttgttgcaa

SEQ ID NO: 36676 - DNA, 393 bp, Glycine max
  unsure (1)..(393): unsure at all n locations
cccagtttacaagtacaagtctccaccaccaccatacaagtacccttcccctccaccaccacctaagaaaccatacaagtattcatctccacctcccccttaccactactaagtatagtgatttactatatatatatatcatcccatggatctgaagaatgtgtgcaaataaagaagattgatatggaaggaacaagcagtgaagcaccatacatatatatcagttaatttggcttgactttttttttctttttgtattttataaagttttaaggcactgttcagatctgattcatatgtactcgttgtcctgcatgtgttgtggtattgtaactgctgggcatgcatgcaggggtttgttatgccangttatattatatnataaataataaa

SEQ ID NO: 36677 - DNA, 358 bp, Glycine max
gatgggtctctggtccgggtagggcatctggcgcgggatgcaaacaagcttgggacctgtagataccaatccgatcccagtcaatgcattgtcctacaattccaactaagccgaaagtgatggtgatgtacacgcgatgggtgctacgaagcagaaatggactgcagaagaggaacaagcgcttaaagctggagatgtcaagcacggggttggtcaatggctcaccatactgactgatacaaagtccagaggtgtgttatacctgcggtctaatgcggctctcagggatgaatggacaaagctgaacgtgatgtcgactggatggagctctacggatacatgtacgttatgagtctga

SEQ ID NO: 36678 - DNA, 394 bp, Glycine max
actcactccgcagtacttttatctcggtcaatttgcgggaggaatctgttgccaaaggcaacgtcttctgaagagcgatccactggaggaagtcaatttttcaatgagaaacgcgatggtgtcattatcctctttaacattctccaggattataagaatgagttcgataaaacggtgattgaagacacaaaagaagaagagttgtctgatgatggacagggtctgtcatttgatttgatggataagctcaattttgatacagatgacactggttctattgtcttgtatgggggtggtgccttggtggctctgtggctaacatcagctgttattggtgcaattgattctatcccattgattccgaagttgttggaagttgttgggcttgcatata

SEQ ID NO: 36679 - DNA, 385 bp, Glycine max
  unsure (1)..(385): unsure at all n locations
agctgccttaaagggaccaactattttgggcttaatggctggtggtcccgtggatataacttttgcaaagaataaccctcgaattgtgggtattctgtgggctggttattccggccaagctggtggtgctggcattgcagatatcttggttggaacaacttacccaaggggaaagcttgcaagtacaatggtcccaaaaaaagtcctaacaaagttaccaatgacaaacatggcaatgcgagcgaccaaatcagcagggtatccaggaagaacgtatcggttctacaatggtccagtggtgtatccatttggacacgggttgacatacacacactntgttcatacactagcaagtgctcccacagtggtgtcagttcccttgaat

SEQ ID NO: 36680 - DNA, 308 bp, Glycine max
cggaaatccgctcgagaatccctgctctttacaaattttcctaaatatataccggaatccctcaggttcacactttcagattgagggaacattgttgcctgtagcccaactgatggttctcctgacaacacgaattcacatgctgccctttgaagcgggcaccatacgaaaaacctgagcttaggcttaggctaactaaaaaagccattaaacctcactgtttccagcgctctggtcttcgatcattctactatgctgcttatgacctcaccatacccttctacctctatcatgttgccacccattac

SEQ ID NO: 36681 - DNA, 422 bp, Glycine max
aaacgacacgaagcacctaacaacattcaagcacgttcgggcccgatactcatacccgaaacaccgacttcatcttcgcgttccggttagggttagggaattagggtttcgaacttcgacgcaatgtcgttcattaacccttcaccctcttccacctcacgtgcaatcgctccctccggcttcgccacgcgccggccatgggaggagttcttcgcgctccactcgttcacgcgcccctacaccctcggcgaggccacgctccgcgtgaagcgcaacctcggccacttccgcgtgaactacgccatggtcgtgctcctcgtcgtgttcctcagcctcctctggcaccctatctccctcatcgtgttcctcgccgtcttcaccgcgtggttcttcctctacttcttccgcgacggccccgtcgt

SEQ ID NO: 36682 - DNA, 432 bp, Glycine max
cccttccttaacctgggatttcggttcaggatggacctggatcttcctaatgggggccatttttttaagggttttaagactgttcccaaaaggatatctgaagtctgaatatttttggaaacatggccttatgaatggattgaaagtccaggttccatggactttgaccagatggaaaaatctgttccacttttaaggccaaaattaattgttgctggagctagcgcttatgcacgtctctatgattatgaacgtgtacgcaaggtttgcgataaacagaaagctatactattggcagatatggcacacatcagtggattggttgcagctggtgtcatcccatcaccttttgattatgctgatgtagttactaccacaactcacaagtcacttcgaggaccacgtggagctatgatattctacagaaaaagg

SEQ ID NO: 36683 - DNA, 354 bp, Glycine max
cacgcctacaatagctcatactttcgctcaattccaattcctctattatcaagaaataatgaagcaaaaatagtcatatattaatagtaaggataccctttcttattatgcctatcctgaaaccaaacgaaatgacatcgcaattcctcatagaattccaattccacattttcaacaaatatcgaggcaaaaatgttcatatatcaattggaattatttgttctcttattatgcctatcctgaagccaaatgaaatgacatcgtaattcctcgccgaattccaattccacattttcaatatataatgaatcaaacatgttcatatattaattctaattatcatgtatcttatta

SEQ ID NO: 36684 - DNA, 354 bp, Glycine max
gttgcattgacctggttacagaagacacggtaggaaaacatgaatactacccgagtgagatacttcgatttaactccctctgttgatggctgaaactcaattgaagtgattcactggactactttatcatcttggtctgaggttgaagctatttaatttctgaatttccgtgagtttcttaatccctgagtatggccgggagccaagatcagttagagatcaagtttcggttgagtgatggtacggatattggccccaaaagttattctgctgctactagtattgtaacactaaaagaaagtgttcttgctcaatggccaaagaataaggagtatggaccaagaactgtaaaag

SEQ ID NO: 36685 - DNA, 384 bp, Glycine max
tataacatctattaccacacatgcagacttacataatcgtccactacggctcgatttcaatctttcctaatatcagatctaaagggataatgaatcctatacgactgggaaacatattctcttaaaaatacacatacaaaatattaataatacacattataacacccaatgcaatatatcttattcattaatcaacaatatcactacaatatgattcatctaatgattacattacacatgttttccattcacatccaacaataatccatactattaaatataccacattctccactaattacaatcccattcacatttaaaaggagccggtatctacttctatatatcatttttaatcaataattttacaaataacttctaaat

SEQ ID NO: 36686 - DNA, 308 bp, Glycine max
ctactactatgcctgcacgtctacactagatgatcccctcgctgaatcccaattttatattttcaagaaataacgatgcaaaaattgtcatatttaaattttgggtatttgttttcttattactcctatcctgaatccaaatgaaattacatcttaattcctcggtaaattccaattccacattttcaataaataattgaatcaaaaatgttcatatattaattgtaattatttcttttcttattattcctatcctgaatccatatgaaattatatctgaattcctcttataattccaattacacatt

SEQ ID NO: 36687 - DNA, 435 bp, Glycine max
ctcatgcacgcgtgcgtgaagctcggaattcggcttcgagggcatagttcaccgttcatggtctaatagcagtagctaagtgcaattgaggatgacttaaggacttggtgaagatattggcatgaaaaggagacagtcaacgatatttgggagtgcacaattatggcacccaatgcaatgagagcttattcatgacagcagctaatatcactacatgtatgatgcatctaagtgaggacattgcacgtgtgttccatgcacatccaacaatgagcgatgctgtgaaagaagccgcaatggccacttatgacaagcccattcacatttaaaaggagccgtgtgctactttattgtttcattattgtccaagaattttacaatgacttgtacatgatacatcctgtggtaaatttataatcatgtttttaaatgcaa

SEQ ID NO: 36688 - DNA, 390 bp, Glycine max
  unsure (1)..(390): unsure at all n locations
gaagcagttaaatgaatcttaaaatttgataagctaggattcatgctcatgctttttttgcaaatgttgttatgtcagcatgtangtacttcctactcctagctatttccaatggcatatgggattttccttgttggcagcaaaaaagttatttgcagctccttatttattgtgggagagattggatgcaatgattatggctatcctttgtctgaaacaactgcatttggagatctcgtgacttacataccccaagtaatatctgtaatcacttcagcaatcagggaattgattcatttaggggctgtaatgtttatggttcctggaagtttaccacttggatgtaattcagcctatttaacaagttttgcgactatagacaaagaggag

SEQ ID NO: 36689 - DNA, 296 bp, Glycine max
cccaatagcatgctcacactatagttctaaacattgctcgtgatatattacatcgcactcatctttccacacattactcctatcctgaagccaaatgaaatgacatccgaattcctcggagaattccaattccacattttcaagaaataacgacgcaaaaatgttcatatatgaatcggaattatttgttttcttattacccctatcctgaacccaaaggaaatgaaatcggaatccctcgggaaatcccaattccacattttcaagaaataaggacgcaaaaatgtccatatata

SEQ ID NO: 36690 - DNA, 335 bp, Glycine max
tgcatgcacgcctactatagatgatcattttggtgaatctcaattctacattttcaagaaataccgaagcacagaggttcataggtgaattggaattattagatatattattaagcctatcctgaagccaatggatatgatatcggaatttctaggggaatttcaattccacattattaagaaataaggaggcaataatgttcatatatgaatagcaattatttgtgtacttattaagcctatcctgaaaccaatggaaatgagatcggaatatctatatgaattgcaatatcacattttcatgaaatactgaagcaaaaatgtgcatatatgaa

SEQ ID NO: 36691 - DNA, 327 bp, Glycine max
atcaaacctaaccagtaaaaatggtgaccgtgggggaggtccgcaacgctcagcgatcccatgtacccgacaccatacttggccttgtgcaccgccacactgtccaactgcgtcttccaagtcgattaccatgactactacttccatattaccaacagcgaacacatgactgatctcgaactaaagttcatgcgcatgagtctaaagtacatcatagagaaaccatacatgcacctgacagtggagtttctggtcgagaaccagatcatctgcgagtacaaggcgccatcgacttacgtgagacaagacgtagtgatgatggaggtg

SEQ ID NO: 36692 - DNA, 314 bp, Glycine max
atcaaacctatccacttaaaatattgacccttgggtagatccttatctcttatcgttcccatgtacccaacaccatcttgtccttctgcaccatcactccatccaactacatctactaagccgattaccctgactactactttctcattaccaacatcgaacacattactgatctcaaagaaaagttcaagcgcatgtgtcaaaaatccataataaacaatctatacatgcacctaatctacgactttcttaaagataaccctaacatgttcgattacatagcaccatctatgtacatcagacattacttaatc

SEQ ID NO: 36693 - DNA, 360 bp, Glycine max
gcctctactatactgcttcaccttctgctctaggaaagggagtgctgaaacatggcttcggctactctctctgtagccaaaccagcccttcaggcaaatgggaaaggcttctctgaattctctggcctacgaagctcatcaggcttccttcccttttctagaaaatcttcagaggatttccattctgtcattgccttacagacctatgcagttggaagcagtggaggatacaagaagggtgtgacagaagcaaaactgaaggttgccataaacgggttaggaaggattggaaggaacttcttgaggtgctgacacggtcgcaaagactcccctctagatgacattgccatcaacgacacc

SEQ ID NO: 36694 - DNA, 409 bp, Glycine max
ataacacaaggcagaaagcaagctcatcctagagtttgaaaaatggcagcagcctcctccatggctctctcttccccatccttggctggcaaggccgtgaagctgggcccatcagcccccgaagtcgggagggtcagcatgaggaagaccgtcaccaagcaggcctcctccggaagcccatggtacggcccagaccgcgtcaagtacttgggcccattctctggcgagcccccgtcctacctcactggcgagttcccaggtgactacggctgggacactgctgggctttcggccgacccagaaaccttcgccagaaaccgtgagctcgaagtgatccactccaggtgggccatgctcggggccttgggctgcgtcttccccgaactattgtcccgcaacggggtcaagt

SEQ ID NO: 36695 - DNA, 344 bp, Glycine max
accgcacgaatatcttgttgtttggagcgatccgagaaaaacgtctgtaaacatgttggtttaccaggacctccttacaggtgatgagcttctctctgactccttccgttacaaggaaattgagaatggaatgctgtgggaagttgaggggaagtgggttgttaaaggagcagttgatgtagacattggtgcaaacccttctgctgaaggtggaggagaagatgagggagttgatgatgcagctgttaaggttgttgacattgttgacacattcagacttcaggagcaacccgcattcgataagaagcagtttgttaccttcatgaagaggtttatcaagaatt

SEQ ID NO: 36696 - DNA, 271 bp, Glycine max
tcggggaattccaattccacattttcaagaaataaggaggcaagggtgttggtatatgaattggaattattcgtattcttattaggcctatcctgaagccaaaggaaatgagatcggaattcctcggggaattccaattccacattttcaagaaatacggaggcagaaatgttcatatatgaattggaatgatttgttttcttattaagcctatcctcaaaccaaaggaaatcggatcggaattcctaggggaatttcaattccacatttt

SEQ ID NO: 36697 - DNA, 417 bp, Glycine max
ttggtactatgggaacggcattaatgattatctggttccgagagatcaagatctattagccaggtatgctgcaccaacatatatgactatctgctcaagggctacttccaatggtgaaaaggtggcttcaacaggacctgtcattcacttttttcagctatgtgtgtacaatgacaggaatcttgaaccatcatcttgatgagaagagctcatagggctggattcgaagccattgggcatactgctgataccccaatactaggacgcacagaagctgctatcaagaccagattcacattgccgacatttttgacattgaagaactttgaaggattggaccttggaaagatggacaaagctgatgactctggacttgcttcatatgtttctgggtcaaatggatcgtactttaaactg

SEQ ID NO: 36698 - DNA, 374 bp, Glycine max
attccattctctctgagtatttccctacctctcccttcaagagcagggcttcgtcaagaccctcaccggcaagaccatcacccttgaggtggaaagctctgacaccatcgacaacgtcaaggccaagatccaggacaaggaaggaatccccccggaccagcaacgtctcattttcgccggaaagcaacttgaggacggccgtacccttgctgactacaacattcagaaggagagtactcttcacctcgtcctccgtctccgtggtggcatgcaaatcttcgctaagacactcaccggccagaccataaccctagaggttgaaagctccgacaccatcgattacgtcaaagccaaaatccaagacaaggaaggta

SEQ ID NO: 36699 - DNA, 427 bp, Glycine max
gtataaccgggagaaatccccccatgggcgggagaagtccgcatatatgaggaactgggatagaagtcgtcagcatgatcataaattgagaagtccaatgcgtgctgagcagtcgccaccagatcgaagttcgcatcatgatcgcagggattgtaccccaaatttggcagaagcatctccccttcaacgagcgaggaaagactgtcgacaggaatcaagtagtaaaaccttatcaagtgaaaaacatgattcccaaaatagttgcaaggatcgtgaagataagcagattcaaagggagtcaaattgttcaagtacagaatctcaaaatgaaaaaagtgtgcaagttaccattaagtctgttgagaaagacatctgcagtgaacctctaaaggaacagcatagttgcagcccaactgtcagccacaaa

SEQ ID NO: 36700 - DNA, 372 bp, Glycine max
  unsure (1)..(372): unsure at all n locations
ggaaatgcagaaaatgaagaaccttggtagcattggaagcagtgggaggctatcagcagaagagtatgaggatgaggagatttcaaaactggccatctccacatttcaatctaaggaagaggagattgagaggaaaaagacggaagtgagagagaaagttgaacttcaacttggtcgtgctgaagaagagactaggcgcttagcacacatttgggaagagcttgaagttctggatgatcccatgaggaaggaagttgcaatggtacgcaagaagattgacttggctaacaaagatttaaagccactgggacttaacttccagaaaaagggagaagagtataaggaaagccttggaagctntcaacgaaaaga

SEQ ID NO: 36701 - DNA, 282 bp, Glycine max
atgcacgcatgcacgcgttcgtaatcctgctttagcacacactctttatgtgtttctctctctcacatacaagtgcgtaaaaatgtctagttttgtttcaatggcatcatcaacaccccttttgaaagatatagttcttcatctttatccccactatcattaatctgtattacttggagatagtgtaggccattctttgagccttaccatctcatatttgtgcaagatggtgacccttcaaagaccatcaatgtcccttattgctttgactatgagctctac

SEQ ID NO: 36702 - DNA, 406 bp, Glycine max
tatgacctatgacgcacgcgcacgcgtacgtgagctcggaattcagatcgaggttttcatcatctgtgacttcgccaactgaaatgggggatgttttggagattctgtctaccactacagagcttgctcaactgccagtaccacctgtagaggaacaggttgagcgtaagttaattaatcacctgaggttgtcctttgaaaaccccagggttacagatccgaatgctaaagctaatgcttggcttacggcccatttctctaggctattgggtggcgtgaaccttgcatcggaccagattgacgtgctatatttctgcaactagactgcttcaggctatggtagatgctacatcgaacaccggttgtctgagcctgaccttacttgctatggatgacactcaaatgc

SEQ ID NO: 36703 - DNA, 403 bp, Glycine max
aactcggctcgagcttacagctcatgtgtttcttgtaaagaactgctttcaccgtagatgggttcaacatcatgaccttgactctatctattcgtacagcttctatctgttcttggcgattaacgatttcacttaatggatcgataggattgatcacacgcaaaacctccgccgccatcaaagacagggactagaagaaacccatttcatgtacacatagtgccgtccttcaattcacagcaggatgaattcaccgccttatgaagtcaatgacagccgctcatgatagattttgggccacatctgctgtctactatgctgctatcttggagtatctcactgctgaagtattgcatctggcccggaatgctagcaaggatctcatcgtaaaacgtattactac

SEQ ID NO: 36704 - DNA, 391 bp, Glycine max
gatcgctgacgcagatgctaccattgactatcgtgccggcgccttggtgcatacttcattcactggtctcaaggccatggctggcttccctaccatgaggaccaacaatgacattacctccattgctagcaaccgaggtagagtgcagtgcatgcaggactggccaccatttggcaagaagatgtctgtgactctttcctacctgccagaccttgatgatgcacaattggcaaaggaagtacagtaccttcttatgaacggatggatactctggctaggaattcggagctgagcacggatttaacgtaccgagagcgcaacaggtcaccaggcatctaccatggacgctactggaccatgtgtactctgactatgactggttgcactgatg

SEQ ID NO: 36705 - DNA, 395 bp, Glycine max
agcatctcttattaccaaccttttttctaaactttctcttgccaagtatcaacacataaaacaatggcttttcggttacctggtatcagaaaggcttcccttgctgcaatccaaggaaattcaaaagctgtggatgttccaaagggctaccttgcagtctatgttggagataaaatgaagcagttcatgatccctgtaacatacttgaaccaaccttcatttcaagatttgttgagtcaagctgaggaagaattcgggtaagaccatccaatgggtggtctcataattccctgcagagaagatgtgttcctagatatgacatctcgcttgaataagtgctaatcccatgaagatgaaactgacattggcctagactaaactagacacaattttgg

SEQ ID NO: 36706 - DNA, 240 bp, Glycine max
gtatggtagtgtggggcaactcggagtatgaaatgctatgctcatcattatccagcttttgttttcgggtataattgggaaaaggccaaaataaccttttcaaaaagggttttggctggggtcttgaattttccttttcattggaacctatatttgggaaaacctttttttggaaggctttaattccacccctttttacaagtgaacttgaacctaattttaaagggccggtaatggtcc

SEQ ID NO: 36707 - DNA, 419 bp, Glycine max
attctctctgtgtatgtccctaactgtcccttcaagatgcagatcgtcgtcaagaccctcagcggcaagaccatcacccttgaggtggaaagctatgacaccatcgacaacgtcaaggccaagatccaggacaaggaaggaatccctccggaccagcaacgtctcattttcgccggaaagcaacttgaggacggccgtacccttgctgactacaacattcagaaggagagtactcttcacctcgtcctccgtctccgtggtggcatgcagatcttcgttaagacactcaccggcaagaccataaccctagaggttgaaagctccgacaccatcgataacgtcaaggccaagatgcaggacaaggagggtatccccccggaccagcaacgtctcatcttcgacggaaagcagctcgagga

SEQ ID NO: 36708 - DNA, 397 bp, Glycine max
atctatgacttctcatgcacgcttacgtaatctgggagctcaggtccaggttgctaccaactattccatatgctccgcccacatgacgatggatgggaagatcgatagtcaagtcattcgtatcttaacttgacacgcactataaccataccaatctttgcctctagaagctcccacgtgcgctctactgatacgactctgccgcttaccgagctacctgtacaactttcttccttttcgaagccttgccctttctaataactcacgctgatggtatatcatatccttgtaagtcttactatcctagctgagctgtatgcactaacccgaagtttagaccgaccactgtactttattcattaactatcgtcttgactccaacccgctaatacacgac

SEQ ID NO: 36709 - DNA, 351 bp, Glycine max
ctccatttcacactcctccactcacaaacccatcaccggggctgtccaccatttccctttctttccttcttcttcccatggagatccaacaacaactggtgaagttcaagtaccacatcggagtggcactcctcgtgtccctctcggtcttctccgggctccacttcgctccgaggttcctcaacatcctcgcctatttctggccactggttctctccactgcgctttttctcgccctcgttctcttcttcgccaagacgcaaacttcgctcaactccgacgctttccttcccaaacccgccgaggagctcctcgacttcgtcgccggccaccaccacgacccttctctcg

SEQ ID NO: 36710 - DNA, 406 bp, Glycine max
ctaccatacctgcacgcctactgtagatgatcctctcgctcaataccatattccacattttcaagaaatactgatgcaggaatgttcatatatgaattggaattattccttttcttattaggcctatcctgaagccaaacgaaatgatatcgtaattcctctctgaattccaattccacattttcaagaaataaagaagcaaaaatgttcatatatgaattgtaattatttgttttcttattaagcctatcctgaatccaaaggaaatgagatcggaattcctcggggaattccaattccacattttcaagaaataatgatgcaaaaatgtacatatatgaatcggaattatttgacttcttattatgcctatcctgaaacccaatgaaatgacatccgaattcct

SEQ ID NO: 36711 - DNA, 358 bp, Glycine max
  unsure (1)..(358): unsure at all n locations
cacaaggcagaaagcaagctcatcctagagttttaaaaatggcagcagcctcctccatggctctctcttccccatccttggctggcaaggccgtgaagctgggcccatcagcccccgaagtcgggagggtcagcatgaggaagaccgtcaccaagcaggcctcctccggaagcccatggtacggcccagaccgcgtcaagtacttgggcccattctctggcgagcccccgtcctacctcactggcgagttcccaggtgaactaccggctgggaccactgctggnggctttcggccgacccagaaaccttcgccagaaaccgtgagctcgaagtgatccactccaggtgggccatgctc

SEQ ID NO: 36712 - DNA, 406 bp, Glycine max
aacaagtagttgagaactaagaaggagaagcaaatggcgtcctcaatgatctcttccccagctgttaccactgtcaaccgtgccggtgccggcatggttgctccattcactggcctcaagtccatggctggcttccccaccaggaagaccaacaatgacattacctccattgctagcaacggtggaagagtgcaatgcatgcaggtgtggccaccagttggcaagaagaagtttgagactctttcctacctgccagaccttgatgatgcacaattggcaaaggaagtagaataccttcttaggaagggatggattccttgcttggaattcgagttggagcacggtttcgtgtaccgtgagcacaacaggtcaccaggatactacgatggacgctactggaccatgt

SEQ ID NO: 36713 - DNA, 370 bp, Glycine max
ggaaattcagctttcctctaatttgcctatgatggaggcagctgccatgccatggtactgcttggataatgccttcttcttccttcacatgaagcaagaaatgcaaaacctgaatttagctgaaaggtggctttgtaacaccacttttgatcttgaagcttgagcattctccacatcacaaaagctcctaccaattggtccattgatggcaaatgagcacaacataatatcaatattgcaagaagacagaacctgcctagagtggttggatcagcaaccacctcaatctgtcatatatgcttcatttggcagcatggtgtcaacgaaaccaaaccaattcaatgagttagcccttggacttgatctcctc

SEQ ID NO: 36714 - DNA, 418 bp, Glycine max
  unsure (1)..(418): unsure at all n locations
tacaaacgcaagagacataacaatactctaattgacaaattgcagatctaagcactgtaacaagacagtgtctgattcaaaggtcaaccttcgctaatggctagggacagaaactcccgaattggaacgactgtggtgttgttgttatgcttcgtcgctcacttttatgtgctgccactggcagaggccgtgtggttaacactccccacttcggggactaagtgtttgtctgaagaaatccattcaaatgtggtcgttttagccgattactatgttgtcactcaagaaggtgggcttcaaacagtttctgtcaaggtaacgtctccttatggaaataaccttcaccacaatgaaaatgccacgccaggtcaatttgcatttacaacagccganagtgggaactatgtggcatgctttt

SEQ ID NO: 36715 - DNA, 283 bp, Glycine max
tgcatgcacgcgtacgtaagctcttaattcggctctagcgtctccgcatcctcgatcatcggatcataccccgaccgatcatttgatctatctatattctaaatgatatctaccctccaaacaatcctgcccgactctgactgtgctataaatgggcacctttcgtaggtggtactcacattccacctcttgaaagattttcccactatcatctctaataacatttagaagaatcttgatgaatctttttaacccatcgtgatcatctacttgaactctatct

SEQ ID NO: 36716 - DNA, 322 bp, Glycine max
tatcacgtaccatgcacgcgtgcgtaagctcgcaattctgctcgagctttcctaaagaaaattggaacctgcctctgttgttaaaggttgtatttttttttgagtgggtggattgagagaactgtgcaagctttggaacttcttcaaagtctggtacttcaatggctactgaagaggttaataaacttcaatcacttcctccttaccctgagatgatagtgaaagcacttgaagccctgaatgaggcttatggatcgagtaaatcagcgatatcaaagtacatagaaaccacctacggtgagttgccagatgaaactttttt

SEQ ID NO: 36717 - DNA, 405 bp, Glycine max
  unsure (1)..(405): unsure at all n locations
gaatggcatangtaccattcttccacccaacaataagggcacgccattggaggtcggtaaaggaagggtattaaaggagggaagtagggttgctcttgttggttatggaacaatggtccaaagttgtatggaagcagctaaggttcttgaagctcatggcatctcaacaactgtggttgatgcaagattttgtaagcctctagatggagatttgatgaggagactcgctagagagcatgagattcttatcacagttgaagagggatccattggaggatttggttctcatgtttctcattttctaggcttgaatggtcttctagatggtaatctcaagtggcgagccttgacattgcctgacagatatataaaccatgggtctcagacagatcaaattcaaatggc

SEQ ID NO: 36718 - DNA, 389 bp, Glycine max
gaaataagtgctaaaggtcagccagagccatctggatggttaattggtggtttacagaacctttggtttgaccattttcatcttggagttctgtgcttgatagggaactgcatttgcatggctgcatttctagccattcagggaggctgggatcactgggatcactgactctaaacgttcttgcttattaggaattatccttttcacttaaattcctatgatataaagcttgtgcatcataggaggatcttttatcattaccggtctatatatggtgacttgggcatcttctagagaaagacaagcaactgttggagttactcctcatagctcttgggtctctgaaccacttattcatgacagaagtgcacaccagagaggtctccgtt

SEQ ID NO: 36719 - DNA, 432 bp, Glycine max
ctctccattttggcattggagagattggaacacccccccaaaacaagccccaattatggctctgaatctttgtatctcacctaactgtaaatgggtttcatctcctgcttccttagatagtgcatcttctttgagatcttcacttggttcttgttttggtaacataaacattgctagtgtgagtttaagcactagtagaagtttgagtttgaggaggagtgggagtgttagtgtaagatctagtttggaaactgcggggcccacagttacagtgggacaggtcactgaggttaacaaggataccttctggccgatcgttaaggctgccggggataaaaccgttgtccttgacatgtacacacaatggtctgtgcctaagaggggaaggttctagatgaatctctgccaaggttacaccccgaacaaaacttc

SEQ ID NO: 36720 - DNA, 379 bp, Glycine max
acatgcacgcggacggaagctcgatgttcgactcgagtgtctctttacctctatatctctatctctctttctcatgggctgggctagttgaagtttgtaagacaaatacaccatggcagatatcctgagtggagaacagattgttgattttaaagaggcctttgacttgtttgtcaaagatgtagatggtgagcaagctttcttatgtagttgaattactctttagattgatgcaattctgtcatctctatcatatatatatatatatttatatgtatgtatgtagatgcatgtatagtggtgtttatgaatatgtagtgcatcttctaagataacattactgtgtaagaacttgccactgtcattcggtcattggatc

SEQ ID NO: 36721 - DNA, 388 bp, Glycine max
cttgagccgaatatgctagaggaagcttccctgtgaaagttgtgagcttaacgggctagactcctgcgatgagagctgtttcgaaccgcccgacgaggccaaggtcttggttgtgaacttgctttacgacgttgatcgcctgaaatcggccatgcttatagaacatgtcgtaactgttgtaatcgcttaagttatttataacacgtaaactgactagagtcgcggtttatgcgcatgtgacgatgagtactgatgaagaagctgaacgtgctctggagcaattcaaccgttatgatatctatggaagactgctcactgatgataaggcttctgcatgcggagctcgacatgaacgctgaccaggtactagttcctttgaatgttgctt

SEQ ID NO: 36722 - DNA, 415 bp, Glycine max
atttcctgaacacctaagtgcttttactcatttgactgcaggtgccatagggggcattgctgcttcattgattcgtgttccaacagaggttatcaagcaacgaatgcaaactgggcagtttgcttcagcttctggtgctgttcgctttattgcttctaaggaaggcttcaaaggattttatgctggatatggatcttttttgttgagggatttaccctttgatgctattcagttttgcatctatgagcagattcgaataggttatatgcttgcggcacaaagaaatctgaatgatccagaaaatgcaattattggtgcttttgcaagtgcactaactggagctataactaccccccttgatgtcatcaagacaaggttaatggttcaaggatctgcaaaccaatataagggaatc

SEQ ID NO: 36723 - DNA, 262 bp, Glycine max
gcacgcctgcggaatctgggaattgggctctaggttcataactatggatttcctgtttacatcgatagactcgggaaaggttatctttacaaacttattcacgttactaccatggatagatatgtaaaataccatgtacaggattttgataaagcttttaatataaattttcctgctttcactatttcctccaaaaggcacattcattcaagcaccactatactagatgttcaaagcattttccttaataactttacaaaat

SEQ ID NO: 36724 - DNA, 416 bp, Glycine max
tcctgattgccttcaaatcacacactctcttcaatttctagggttgtgctattgctctgtctccgttccccctttctcacaaaaacaacgccttttctcttctccttcatatctattctttgcctctcgctttcgctcaattgaacgcattcacagcgtaattcgttgctgcattttaatctatttatctaaccagcactgaatgacctaatggagtctaaaggtgggaaaaagaagtctattagtacttgtagtaaatcaattctttactaatctcccctgggatacagcattaaacacgttataccaaactgtgcaatcaagaaattcatatctgctgcttactctaactgttctcgcaaaccattctgattcacatccggaatgatagctcgatgcatgcaaccataatttta

SEQ ID NO: 36725 - DNA, 342 bp, Glycine max
  unsure (1)..(342): unsure at all n locations
agcttacaaggatggttctcttcgtgtcgttcgtaatggaatagggattaatgaacaggcatcggtagaacttcaaggtatcaaaggaatgtggtcactgagatcctcaacagatgatccttttgatacttttctggttgtgagttttataagtgaaacaagaatcttagcaatgaatcttgaggatgagctggaagaaactgagattgagggattctgttctcaagtgcagactttattttgccatgatgcagttcataatcaacttgttcaagttacttcaagctctgtcagactggtcagctncacaactagagatcttcggaataatggcatgcacca

SEQ ID NO: 36726 - DNA, 410 bp, Glycine max
ttggggttgattcaaaagacatagttacactcgagaagtagttgcgtgactacttcactaacatattaaagaaattgaaggatctcaaggcccagtcaaagcagacagatattatcttctgaaagatgttttgaaattaaaaacttgttaacggatgtagatatctagaaatctcattaagatgctcccacgatgtatattgttttcttttttatatatatatatatatatatatatatatatatatataatttattttcgggtatagttgatgtgcctaagaatgatgaggctgcaccaacacatttaaacatattatttatttacttgagtgggagaaaagtctccgatttgtgcatctgggacatatgagtattctatgatattttcaatttctaatgaatgttaag

SEQ ID NO: 36727 - DNA, 378 bp, Glycine max
tactaccttgcctgcacgcccagtctagatgatcccctcgctcaattccaatgccacatttttaagaaataaggatgcaaaaattgtcatatgtgaattggaattatttgctctcttattaggcctatcctgaagccaaaggaaatgagatcggaattcctcagggaattccaattccacattttcaagaaataaggaggcaaaaatgttcatatatgaattggaattatttgttttcttattaagcctatcctgaagccaaaggaaatgatatcggaattcctcggggaattccaattccacattttcaaagaaataatgaggcagaaatgttcatatatgaattgcaattatttgttttctttattaagcctatcc

SEQ ID NO: 36728 - DNA, 404 bp, Glycine max
  unsure (1)..(404): unsure at all n locations
ggaaactcacctccgttcacctcttctccggcaaggccatgaatggatttagacacttgcgtcaggaagaggtagctagattgacatgcaacttggcaagttcagacacaaaagcagtgaatttgggacaattattgaatgtatgcaccaccaacgcattagcgagggcaatgattggacgaagagtgtttaacgatggcaatggagggtgtgatcctagggctgatgagtttaaggctatggtgatggaggtgatggtgttggctggagttttcaacattggtgactttattccttccttggagtggctagaccttcaaggggtgcaagctaagatgaaaaaattacacanaagatttgatgcatttttaaccagcattattgaagagcacaataacagttct

SEQ ID NO: 36729 - DNA, 278 bp, Glycine max
cttttgagttattagaccattctctatatagtgatcctcgaacttaaagtttttttgttgatcattttgtcttgaagaaatggcatctagctcaatgtcatccactggttcatggagtgccaaggacaacaaggcctttgaaagggctctagctgtgtatgacaaggacacgccggaccgttggtacaatgttgctaaggctgttggtggtgggaagactccagaggaagtcaagaggcactatgaactccttcttagggatgttagtcacattgaat

SEQ ID NO: 36730 - DNA, 412 bp, Glycine max
ctccaatatgctatgcgcacttggctgctactcagttggggcagttcatgaaatttgaggacaaatctgaaacatcttcaagccatggtggattgagcggtgcaggtgctgttcccgtccctcagttgcctcccttgcaggagaatgtccgcaacacaatgttcttttgttgaggccttaatgctctgccctgtctcctcaagtggtgaaaatgctgtacataaaactatgtttctaatcttgcaagttatgcggacgaagtttatattgtggtagacttggtcttcttagccatatttagtctttctagcacaagccttttcaaatgttcggggaccttaccttactttttgtagcaagactctctttagcgcaacgtctttttgtagcaaggcttgatcttcagcacgtc

SEQ ID NO: 36731 - DNA, 315 bp, Glycine max
gccaaacacgaccttatcggcgatccaatttcgatctgtgcaaatcgtaaccctactcacttgcttctgcaattctggtggactggatccattttcatctcaattctcgtctctcttcagtaagttagggcacagcacacaataacaattcattctcttagacatggcttccgctgcgccaggtgcaaccaatgatgctttatacaaggaattgtggcatgcctgtgctggaccccttgtcactcttccgcgtgaaggggagagagtttattacttcccgcaaggtcatatggaacagcttgaggcatctatgaa

SEQ ID NO: 36732 - DNA, 323 bp, Glycine max
tttggtgactctggagtggtgatctatggaatgatccctcttacgcactcttggtatggaactcgatcacatccttcagggctaacagcagggttccataacagagttatcagggatggctagggaccagttgcacagatctttgctcggaactcgtgcacgattagagtacctgccatggacctttcggacgcggaacaagcagaggatgatgattctagccctgagttgctacttgcgggcattatgggaggcgtgcgaaagcatgaggttcaggtttcaggtcgaaatgcgtctgaatctggtgttccagggggggttga

SEQ ID NO: 36733 - DNA, 274 bp, Glycine max
gaagcaatgggaaaagttcttgcacgcgggcacagccgagttccagtctattctggaaatccaaggaatattaatgggcttctactggtcaaaagtcatcatactgtacgaccagaaatagagacagtctgtcagtgctgtatccatccggagaattccaagggttccatcagatatgcctctccatgatatactaaatgaattccaaaacggaactagtcatattgctgccgttgttaaagctatgggaaaaggcatagaaactccacaaatc

SEQ ID NO: 36734 - DNA, 302 bp, Glycine max
tgtggaagttgcatgcttagtttctgggatcttgtcctttggatctgagacactctctgagctttctttcttagaaaacgatgtcgtctcaacaagaagaccttcctcgtcatctcaacttcaaggtcaacctcatatggtggacctcactctcagtcaggaagctgattctaaaggagctgtctgtttggatggaacggtgcctggataccatttggatcgtggatatggatctggtgcagatagttggggtattcatttggatggacgaggatggtgtaatagcatcagaaactgtgtct

SEQ ID NO: 36735 - DNA, 306 bp, Glycine max
ctcgagcgggttcggctcggggcttatggtggagacggatgcatctatagacgaggaacggtgtggtaggcgacgacatgcttcggggagttgaaaatagacgtggatccggggattcccgaaataggtcaacctttcggactgcagctgaatccactggcaagcaagagacaatctgatgaactgagagatcttactatccagaagagagtatggcatgtgcacagtgtattcgttaggggcatatgatttgggtgcacgtcaatcgtggtctgtgcctttggccagaacgctaatttcaggtgt

SEQ ID NO: 36736 - DNA, 316 bp, Glycine max
tctgagctcactaagcttacactgttagggcgcttgattttatctctgaatttgatgtgccatcctttagagacaagaccatcatcatgtttaaagtgacgggacttcgcactggtgcacttgggttcacgtgttcggcattcctgtctatcccagttacaacgggattcgtacttctctgctatatagatatcccttgtgaacatgccacaagatatcatgtatggctgggacatcacataatggtgctttttactgtcgatggactcctctaagttattgcatgggcaatagaaggtcaccttgtacaagaatt

SEQ ID NO: 36737 - DNA, 261 bp, Glycine max
attgatagatgtagtaactcgatcctacagagcgtgtcgtaatatgtgcgcgtctgtgaattcccgcatgtcatatcgtctttcatcttggcgtacgcgtcgttgatgttgcatctgcatctctggaaatgatagactgcgttgcaatctatatcgagaagtccgggattcaggttggtaacgcctgctgagagctttagtgcattgagcactgtagtcagcctgattggcagatgtgaaatgactataccgttggcggag

SEQ ID NO: 36738 - DNA, 226 bp, Glycine max
atcgacacccacatcaacagtcactccagatgccatgcatgtgccaagagacacatgagttcccttagcgtacgaaatgggcgtcacacgttcagcgctggaaatcgagttaggtctccctcggggaacgtcgcatgcatgtttgcagggaatggaggagttaagagctcgcaatgcaaattcttagcaggagcgatcatagtaaggttacccaggccactaaggc

SEQ ID NO: 36739 - DNA, 303 bp, Glycine max
ggaaatcggtctggagatacagcacttggaggactccacacttcagcatgtttacccattaggattgatgtggggacatgcaagggcaagctgcagcttggagacttataaattgggctattgcacgcagcaccacctgggcatgactatgtcgaccttatgcacgaatttatgacagcatgcacgcaaacttacggggaaaaggtcctatgtcactttgatcatcttggcatccacactgcttttcatctgcttgagaaatatcaatctacacctctggtctgtacagatgattttcaggga

SEQ ID NO: 36740 - DNA, 332 bp, Glycine max
cacaggagttgtaaattaagagcatggctgcacaagctcttgtatcatcatcatctcttaccttctcagccgaggctacaagacaaagtcatggaccaagatcacgccaatctccatttggcttctcaagaaaagcctcggttcttgttaaggcagctgctactccccgtgtcaagcaaggatcatacagacctttgtggtttgcatcagagcaaagtctttcctagttggatggcagccttcggggtgactagggagttgaccctctgggactttcggaccctgaaggaagaggagggttcattgacgggaagtggctagcatatggggag

SEQ ID NO: 36741 - DNA, 305 bp, Glycine max
cagtgttcactgcaaagaacacctcacctgaccgcctcgcatcgaagactctgacgccgatcctcttcccaagcgcgtctccaccgtctggagagctcgcacaaacgacatcgccgtcaagcatacgataatcacggtgtgctaggtgcctgaggaggcaggtttctccgacagtgatgcgttgattttccccgacatgatcacatacatgggtgtggacgagtcacacgtggatgtgttttttaatgatgtgagactgactggtaaagagtggcgtggtggaaagcaacggaacggggtgttga

SEQ ID NO: 36742 - DNA, 276 bp, Glycine max
cgctcagcaatgctcccaagatctctcccagcgttacaacgtcaacgtcccgtgccggcattgttgctccattcacttggcccaagtccatggctggcttccccatcaggaagaccaacaatgacattacctccattgctagcaacggtggaagagtgcaatgcatgcatgtgtggccaccagttggcaagaagaagtttgagactctttcctacctgccagaccttgatgatgcacaattggcaaatgaagtagaataccttcttaggaagggat

SEQ ID NO: 36743 - DNA, 350 bp, Glycine max
  unsure (1)..(350): unsure at all n locations
gcaaggagtttggtgattgagaccttgggacaatttgangcaacaaccttggggaatgctagttttcgtaccgtgctggaatgccgacnatcaagttgagaaatatgaaagtcttgcatcanaagtggctctaggacttcgntttcacnctgagaatgttcaagaatgcattcgattgacagaagaatttcggttacttcccagaggccatatatccaaggaagataaattggagataaagaagatggcactatatgctgcggatgttgcaataaccgaagccactaaactgatgagaggaaatgatatgtcagatgaagccaaggaagtcccccagcaacacattttta

SEQ ID NO: 36744 - DNA, 325 bp, Glycine max
cttgtttctctcaaagatggcgttgcccaaaggtgaattccaaggttggaacgaagggggttccgtcaacaacaagttcaaaccaacccttaaaggcttgggcaatccaaattaccatggggttaaaaaaaaaatttgataaggcaccaaggaggaatgatgtaaaagctatagttttgactggcaaaggtggcagattttctggtggctttgatatcagtgttatgcagaaggttcaccagactggggattcctcgcatctccctgatgtctccgtggaactagtagtcaattcaattgaagattcgaagaaacctgttgttgc

SEQ ID NO: 36745 - DNA, 393 bp, Glycine max
  unsure (1)..(393): unsure at all n locations
ccctcttttgctgcatcagaggagttgtaaattaagagcatggctgcacaagctcttgtatcatcatcttctcttacctttccagccgaagctgcaagacaaagtcttggaccaagattactccaatctccatttggcttctccagaaaagcctcctttcttgttaaggcagctgctaacccccctggtaagcaaggatcagacaggcctttgtggtttgcatcaaagcaaagtctttcttacttggatggcagccttccgggtgactatggatttgaccctctgggactttcanaaccctgaaagaacaggagggttcaatgagccgaaatggctagcatatggtgagataatcaatggtcgttatgcaatgtttggtgcagttggtgcaat

SEQ ID NO: 36746 - DNA, 361 bp, Glycine max
  unsure (1)..(361): unsure at all n locations
aatacactcataacacaaagcacaaagcaaagctcatccttgagttaaaaaatggcagcagcttcttccatggctctctcatccccatcctttgctggcaaagccgtgaagctgggcccatcagccccagaagttggaaaggtgagcatgaagaagaccgtcaccaaacaggtctcctcangaagcccatggtacggcccagaccgagtcaagtacttgggcccattctctggcgagcccccgtcctacctaaacggtgagttcccaggcgactaccgctgggacactgctgggctttccgcagacccagaaaccttcgccaagaaccgttaaatcgaattgatccactccaggttggcca

SEQ ID NO: 36747 - DNA, 422 bp, Glycine max
  unsure (1)..(422): unsure at all n locations
cagagaacgaccaaagccaaagccaaagctactagtcataacgggccgaaccgcttccgggaagtcgaagctagccgatgatttggcctcccacttccccgtcgaactcatcaacgccgattccatgcaggtctaccgcggcctcgatgttctcaccaacaaactccctctctctcaccagaacggagttccgcatcatctcttgggtaccgtaagccccaacgtggaattcactgccaaagcgtttcgggattccgctattcccattattgatgatatattggctcgtaatcacttgcctgttatagttgggggcactaattactatatccaggctcttgtgagtccgtgtcttttagatgattctgcagaagatatggatgaaaagctgttgggtgatccaactgngtctggtaacaatt

SEQ ID NO: 36748 - DNA, 344 bp, Glycine max
caccaaggggagtggcttgattaacgctcgtatgttcaaaacgtgtattcatttagtaatggtgtaaccttccgttcggaccttcaacctcggaaactgagaaattgcatttcaatcaacatcggtcaggccggttttcaggtcggaaacgcctgctgggagctctactgcctcgaacacggcgttcaacctgatggccagatgccctgtgataagactgttggtggaggtgatgatgctttcaccaccttcttcagtgatactgcggctggtaagcacgtgcctggtgcgatttttgcagatctcgagcctactgtgattgatgaagttaggactgtgacata

SEQ ID NO: 36749 - DNA, 361 bp, Glycine max
atccaatcgcaacggtgtcgcttggctctcacacccataccctatctgccgaccgtggtccactatcgtatccgccctgacaggaggaaagtccacgaccgtatctaagagctccgatccctaacttgctgtgaatgacaagggagccgccacctaggcttggaaacctgccggcacagagaacgctatgattgaccgtgtcaagccataaaggccgacaagagctggcatcagaatcatggaacactgcaggaaggcattacacaatgaacatcctgaagacaaagcagagtttcctgctggcaaatctgctgaagcaacatgtaagaccatgtatgatgctgaagaagcaccttatgtg

SEQ ID NO: 36750 - DNA, 160 bp, Glycine max
ctcgagccgattcggctcgagaaaagaaatcagatataatagttaataaggtaaccttgtcaattttggattttctttgaggtttcgttctggctttatgtttaggatcttgctataatacattatggttttcgaatcttattagcctttcaatttttta

SEQ ID NO: 36751 - DNA, 414 bp, Glycine max
gtgatttcagtgagtgatcggtgttcacttgatctcatcataatcgtcagcgtcaattgaagaagatgccgatcagaaacatcgccgtcggaaggcctgaagaggcgactcaccccgacacgttgaaggcggctttggctgagttcatctcaaccttcatcttcgtgttcgccggctcaggctccggcatcgcctacaacaagctcaccgacaacggcgctgccacccctgccggcctcatctccgcctccatcgcccatgcattcgccctcttcgtcgccgtctccgtcggcgccaacatctccggcggccacgtcaaccccgccgtcaccttcggcgccttcgtcggcggcaacatcaccttcctccgcggcatcgtctacgtcatcgcccagctcctcggctccatcgtcg

SEQ ID NO: 36752 - DNA, 413 bp, Glycine max
agtttttcaactcttccatagcctttgtcttctgtcttcgggtaaaacagtttattttggacctgcttctgctgcaaaggagttttttgcttcaaatggttttccttgtcctcctctcatgaatccatctgatcatttactgaaaactataaacaaggattttgatcaggatattgaagcgggtttagcaggaactgaaaacatactcacagaagaagtaatccacatccttgtgaactcatacaaatcatctgaaaggaatcaagaagttcaaaatgaagtagctttactatctaagaaggacaccagttcattggatatgaagaaagggaatgcatgcttccttaatcaatgcttagttctaaccaaaggatcgttcattaacatgtatcgtgatctaggctattattggt

SEQ ID NO: 36753 - DNA, 402 bp, Glycine max
  unsure (1)..(402): unsure at all n locations
gaccatcttagaaattaacctacctattcaacccttatattgggaccgcgttaacctaccaccacttttttatttccccttggctggacatggtgaaaccagcctggctagtgttgatcttcttcctttcttctgtaaaatgattcattttcctctaactacagcattgatacttgcaagatgtacaaaggggtaaggaagagaaaatggggcaaatgggtgtccgaaattcggcttnccaacagccgtgagcgcatatggttggggtcctatgacacccaagtgaaggcggccagagcatttgatgtcgcactttattgcctacgtgggcaaagtgcgaagtttaactttctgacacacctcgacacttggaaattaatatggggttaccatgtgacatac

SEQ ID NO: 36754 - DNA, 402 bp, Glycine max
aatagcatcagtgatatgaggcacgacctaaagatgaaaacaccataataagaataagaataataattataatgataataataatattaggaccaacatgtaaaatgaaaaccttggtttataaattatcatcacaataaaaacatagtacaaattggtttaggccaaacctgaacagtttttcctaaatagtctccttttctttctttgtcaatgacagactgtcatgaaaaacaggaaaagaaaagtaaactttagtgaaaaattttgtaatgatcttcaaaatctgcgtcataactctaaagtctaaacataaacaacttgcctggtaaatcttcccagtagttatgttgttatcacgggtcaacttgatgtctataaaacgctcatagtttccaagat

SEQ ID NO: 36755 - DNA, 390 bp, Glycine max
ggaaaaatgagcaacttgctgagattacttctttctgcaaataatttcacagggataataccagatacatatggaaatctaaagaatctcactcagtttaggatagatgggagcagtttatctgggaaaatacccagttttattgggaactggaccaaacttgatagattggatttgcagggcacatccttggacggcccaattccttctgtcatatcttacttgacaaatttgacagaattgaggatatctgatttgaagggaccaactatgacatttcctaatctgaagaatttgaaaattttgctaagactggaattgaagaattgcttaataactggtcccattccaaactacattggagaaataaaaaggttgaaaaccatgttc

SEQ ID NO: 36756 - DNA, 407 bp, Glycine max
atcatcctccttttcatcttcttggccttctccttcctctggacatctcgcggcttcgtctgcatctcctcttcctacagccccgtctctggcgccggcttcttcggcttcgatggcctcgactccgatttcggatccctcggcgtgccctgctatcgaaacatggtaaaactgtggaatggacatcaaaagatttactcaaggggttagaagagtttgttcctatatatgaaacccggccaattaagaacaacatgtatgggatgggttttgaccacagctttgggctttggtttattgcctgctggctgaagccagatctgatgatcgagagtggtgctttcaaaggacattcaacttgggttttgcggcaggctatgccagacacaccaataatttctctttca

SEQ ID NO: 36757 - DNA, 422 bp, Glycine max
ttgcaatcaaattagttcattctctttgcgcagttccctacgtctcctttcaagatgcagatcttcgacaagaccctcaccggaaagaccatcacccttgaggtggaaagctctgacaccatcgacaacgtcaaggccaagatccaggacaaggaaggaattcccccggatcagcaacgtctcatcttcgccggaaagcagctcgaggacggccgtaccctcgccgactacaacatccagaaggagtcaacccttcaccttgtccttcgtctccgtggtggcatgcagatcttcgtcaagactctcactggcaaaaccataaccctagaggtcgaaagctctgacaccattgacaacgtcaaagccaagatccatgacaaggagggaatcccaccagaccagcaacgtctcatcttcgccgg

SEQ ID NO: 36758 - DNA, 434 bp, Glycine max
  unsure (1)..(434): unsure at all n locations
gaaaaatgggaatgtcaagctgtgacaggtgcttttccatgtcttcaatatctttctataaggtattgtcccaagctgaaaggtgacctcccagagcaacttcttcctttaaagaagctacaaattagtgagtgcaaacaacttgaggcttcagctcccagggctctagtactagacctgaaagacactggaaagctgcaactgcaacttgactgggctactttgaaaatgctcagcatgggcggacacagcatggaagcattgttgctggaaaagtctgatactttgaaaaacctgtatatttattgttgcccgatagatgaaatgtgttgcgattgtggaatgagtgatgatggccgtgactctctaaagacttttccgctatatttcttcccagcactcaagaccctntgtctcagtggctttcgtaatct

SEQ ID NO: 36759 - DNA, 405 bp, Glycine max
gcagaaagcatgctcatcctagagttttaaaaatggcagcagcctccgccatggctctctcttccccatccttggctggcaaggccgtgaagctgggcccatcagcccccgaagtcgggagggtcagcatgaggaagaccgtcaccaagcaggccttcttcggaagcccatggtacggcccagaccgcgtcaagtacttgggcccattctctggcgagcccccgtcctacctcactggcgagttcccaggtgactacggctgggacactgctgggctttcggccgacccagaaaccttcgccagaaaccgtgagctcgaaatgatccactccaggtgggccatgctcggggccctgggctgcgtcttcccccgactattgtcccgcaacggggtcaaagttggag

SEQ ID NO: 36760 - DNA, 179 bp, Glycine max
aagcatactacaacaggtatggaggtggtgccaactctggtgctgatggctacaacaacggtactggtttgggtgctgcgattataggcaccttcgatcgtgtatacactgagttctctgacattgactctaagaggaacgctaggtataccaatgacattggactgatgctataatct

SEQ ID NO: 36761 - DNA, 347 bp, Glycine max
cacgcacgcatacgtaggctcggaattcttctctaggctgtttaatttgcgccgaggatctgccctgacagagaaaagttctattgagatggaggctagcatcatggatggtccaaaacgacgatgcggcaccgattcgggtcttaccaccgttaagaacccgatctcgcttgctcgtttggttatggacaaatccctgcattcctacctcgcctacttcgtctcctaataatttgctaggcaacaagatgtggaattagttgacaacgagtactttatcacacctgataacattagcatgctcaatctttcaaatgaagcatacacaatcctatttgaataccaaa

SEQ ID NO: 36762 - DNA, 372 bp, Glycine max
aaactacgccttataaccatggccagaatagtctctgctacggtcaacctacaccatggccttagaatacagcttactgccaactctcacgctatgctcagaaccccctctccgaaccaacacctcacacctatcctacatcccatcatgcttaaactaagacatgaacctttactaccttaaacagctatacttctttgatagcgctgctgcacaagacctaaccatcatgaaaattaaagatggcatgttcactttgttcaaccattacttcatcacctgtggccggttccggcgatcggattcccgtcgacccttaatcaagtgccatgattgtggaacaaggttcattgaagccaattgcaacaaaac

SEQ ID NO: 36763 - DNA, 434 bp, Glycine max
  unsure (1)..(434): unsure at all n locations
gtttcgagatttgggattctgaacaagaatgctagagaccccaatgggatgaaatggatcgatgctcctgaatgtttctgcttccatctctggaacgcttgggaggaacccgaaaacgacgagattgttgtgatcggttcctgcatgacccccgcagactccattttcaacgaatgcgatgagagtttgaagagcgtcttgtctgagataaggctgaatttgaagaccggaaagtctacaagaaaacccattatctccgaatcccaacaagtcaacttggaagccggcatggtcaacagatacaagctcggacgaaagacccagtttgcgtacttagcacttgccgagccatggcctaaggtttcaggtttcgctaaagttgatttgttcagtggggaagtgaacaagtacatgtatggngaagagaggttcgg

SEQ ID NO: 36764 - DNA, 327 bp, Glycine max
gttctgtgttctatgcttttgttgtgctttttggtgctgtgtactacttaaaaggtcttgaattcaacttcaaagtcaaaaagcatgaggaaacatgggtggcagttaccttaccatcctcttcaggtggtggctgctgctgtgtttctggctctggggtttgccttctatgtgttctttgctccttttgttggagagaagatgtatcagtacattgttattggcctttactcaccactgattattagtgtctttggactgtacatatggtgtgctgcagcagatccaggagatccaggggtttttaagtcaaaaaagtatcttaaa

SEQ ID NO: 36765 - DNA, 430 bp, Glycine max
gaggtccaaagggctttgctccttaactccaaaggaagttgggatttttcttaccgctctcggatacccatcaacaactccaatatatattgctgctggagagatatatgggggcgagtcccacatggctgaactgcattcccgatatccattgttgatgagcaaggaaaagttggcatccatagaagagcttgaacctttttctaatcatgcatcccaaatggctgctcttgactatattgtatctattgaaagtgatgtatttataccttcttattccggaaatatggcaaaagctggtgaaggtcatcggcggtttcttcgacgtggaagaacagtatcttcagacaagaaagcccttgttcatctgttcgataaactggatcagggaataataactgaggggaagaaactattcaataggattatt

SEQ ID NO: 36766 - DNA, 436 bp, Glycine max
  unsure (1)..(436): unsure at all n locations
caacatgtctttattaggagatataagatggatccagtggttgaaatatattttcattatataatgagtttcatttatgaataacctatgttcaaaatatatcatagattttggatctgttacgatttgtgtgccactgatgatttcgttgtgtaacacagttcattgatgttggaaccatggtttctccaacgatttatgcacgtcgtagtctatgttatctgatgagcaatatgcccgatgaagcacttaatgatgcgatgcaagcacaagtaatatcccccgtttggtacattgcgttttatttacaagctgttgctcttttagcactgggcaaggagaatgatgcccaggtgccacttaaagagggttcttcgcttgaaaataanaagaacacaaattaattgagttcgttgaccaaaccttgctttctttt

SEQ ID NO: 36767 - DNA, 403 bp, Glycine max
ggaatgttctctcagatttctttgtgtcagttggattgtcagaaaacttgtcagttgcaatctttgcaatggactctctgcgacaacttgcaatgaaatttttggagcgtgaggagctggctaattataacttccagaatgaatttctgagaccatttgtgattgttatgcagaaaagcaacaccacagaaattagagaattaatagttcgttgtatttcacagatggtccttagccgtgtcagtaatgtgaaatctggctggaaaagtgtttttatggtttttacagctgctgcagccgatgagcggaagaatattgtattattagcatttgagaccatggagaaaatagtgcgtgaattttttccttatattactgagacagagacaatgaccttcaccga

SEQ ID NO: 36768 - DNA, 412 bp, Glycine max
gaaaaggctggtttatctgcatggtgctatatgtgaagcgttgcgtctctttcctcctataccctttgagcgcaagcaagcaataagctctgacatgcttcctagtggtcatcgtgttaattccggtacaatgatattattttctttgtatgcaatgggaagatttgaagaaacatggggaaaagattgttttgagttcaaaccagagaggtggatctcagagaaaggaggtattgtttatgtaccatcttataaattcatagcttttaacgcaggacctaggacttgcttgggcaaagactcatccttcattcaaatgaagatggtggcaactgctattttgcacaagtatcgtgtccaaatggtggaaggttttggtgctactccaagcctttcaattgttcttcttatg

SEQ ID NO: 36769 - DNA, 416 bp, Glycine max
ctcgagccgattcggctcgagctttcttcaccgttcgctctttctttctcccctacacaaaacatggctttgcccaatcagcaaaccgtcgattaccccagcttcaagcttgtcatcgtcggcgacggtggcacaggaaagacaaccttcgtgaagaggcatctcactggtgaattcgagaagaaatatgaaccgaccattggtgtggaggttcatccgttggattttttcacgaactgtggaaagattcgcttctattgttgggatactgctgggcaagagaagtttggtggcctcagagatggatattatatccatgggcaatgtgccaataatcaaggttgatgttactgcccgtctaacatacaaaaatgtccctacctggcaccgtgatctttgccgggtctgtgaaaaca

SEQ ID NO: 36770 - DNA, 411 bp, Glycine max
gcagcagagacggcagctgcatccgaacctgggtttgtagctgaagatatggacactccacgcaacgtgtataaagtatcagctacaaacccaggttcggatgtagcagcagagacggcagctgcattggctgcttcttcaatagtattcagagattcagatccaagctattcctccaaattgcttcaagcagccatcaaagtattcaattttgcagaccgttacaggggttcttatagtgattctcttaattcggttgtctgtccattctactgctcttactctggataccatgatgagcttctgtggggtgcatcatggatttataaagcatcaggaattaacacttatatacaatatatacaatccaatggccacatattaggggctgatgatgatggttacacattc

SEQ ID NO: 36771 - DNA, 326 bp, Glycine max
ctagaactggttgcattgggatctcatggcgaaggaagcggtactgctacgcatgcgggttcgataccgagggcacttagatggtggtcctcgagaaacggctttgtaactttcggctgactcacatattgcgctaaagcctacctcgcaaggctcaacaggtatgctcggtaagaacctttatctatcttgcgatccatacatgcgcggtcacatgcgtgaatagcacggatcttatatccctccatgtcttccagcccatgcacttgaaggatttgcagtatctatagctgtacagtctgcatagccagattacacgcctggtg

SEQ ID NO: 36772 - DNA, 296 bp, Glycine max
gttctctttcctttcaatctcatcatggattcttcttctgaccattctcccccatcatcacttcattctcctgacacttcctgcgggttatttagaaattggagagtcggctatggaaggtgctatcagggaaacacgggaggaagccaatgctgacgtggaagtgatttctccctttgctcaattggatattcctttaattggccaaacttatataatcttcttagcaaggttgaagaaacctcacttttcacctggtccagaatcatcagaatgcctgcttttctcactcaatg

SEQ ID NO: 36773 - DNA, 387 bp, Glycine max
  unsure (1)..(387): unsure at all n locations
gaagttctacttggcaccaaccagggaagaacggattggtggttggaccggaaattttccgaactgagggaattcctgaccaggacattgtcaacctggttgacaccttccttggccaatccatggattcctttggggcactgagggccaaagtatatgatgatgaagtgaggaagtgaatttctggtgttggtgttgacagtgttggaaagaagcttgtgaactcaaaagatggacctncaacctttgagcaagcccagatgactctggagaagctcttggctgatggtaacatgcttgtccaagaacaagagaatgtcaaaagagtccaattggctgacaagtacttgaacgaggctggtcttggaaatgctaacgaggatgcta

SEQ ID NO: 36774 - DNA, 411 bp, Glycine max
caagtagttgagaactaagaaggagaagcaaatggcttcctcaatgatctcttccccagctgttaccactgtcaaccgtgccggtgccggcatggttgctccattcactggcctcaagtccatggctggcttccccaccagaaagaccaacaatgacattacctccattgctagcaacggtggaagagtgcaatgcatgcaggtgtggccaccagttggcaagaagaagtttgagactctttcctacctgccagaccttgatgatgcacaattggcaaaggaagtagaataccttcttaggaagggatggattccttgcttggaattcgagttggagcacggtttcgtgtaccgtgagcacaacaggtcaccaggatactacgatggacgctactggaccatgtggaagct

SEQ ID NO: 36775 - DNA, 407 bp, Glycine max
caggtatgcctcaaggaaggcctatgcaaagactaaacccggtataaaaggtcgatttgccaagagaccagatgtagaagctgaagtggatcagatgttctccacaacactaattacagaagttggatatggcattgttccctctttctgaatatgctgtgttgaacaaatggccacaagatatcgaagatgctagaggatcatgatcaatagaaatggctaccacttgtgtactaataatgtattttttatgtaatctaattacttgcagttgtactaatcggatgctttattattttggttattgtcttttgaatgaaacttgtaacttgaaatacaagtcatgtattaaattattaaattacagtcaacataatcttgaaaaaaaaaaaaaaaagggcgggcga

SEQ ID NO: 36776 - DNA, 382 bp, Glycine max
ctcgagccgattcggctcgagcggctcgagcggctcgagcttcctggctccatcatagtcactgccacaaatttctgtccacctggtggttggtgtgaccctcccaatcaccactttgatctttctcaacctgttttccagcacattgctcaatatagggctgggattgtgcctgtagtttacagaagggtgaggtgcaggagaaaaggtggaatcaggttcaccatcaatggccactcttacttcaatttagtccttgtaaccaatgttggaggggctggtgatgtgcatgctgtgtccatcaaaggttcaagaactagatggcaagccatgtcaaggaactgggggcaaaactggcaaagcaactcctacttgaatggtc

SEQ ID NO: 36777 - DNA, 410 bp, Glycine max
aaaatattgcaggaacacttggctcctagtggatatcttaaattaccgaacgccatacctgattatttggagaactgtagatttcttccagtgcttaacaatgaaataccagataagagaaattccacttacaaggaaagatttagtagcttgcagaatttggtacttatcatgttagagcacgacactgttttaataccaagggaaacttcctggtttggatattacccagatggctacttcaagcccgttttaccaccacaatcgatatgatccccaattcgactcgggtagatcttttcctgtgataaaacttttcttactccggcttttcctttgcatttattaaatgatatcaatggagttgcctccttaagcttctattacctattaaggtcataaatatgaaa

SEQ ID NO: 36778 - DNA, 401 bp, Glycine max
gaacagggtctctaatctttgcttaatgtcttgttatcgtgcatatttcattggcttctgtacaatgagataatcaccaagcctttcaactaccatgttgcattgacctggtgattatctcattgaacagggtctctaatctttgcttaatgtcttgttatcgtgcatatttcattggcttctgtacaagtttttgcatcgacctggactggaatgctttgattgcagtgtaataatcttgtgagtatgaaaagtcacgggatctgcgtgttgcgaagaaagtgtttgatgcttgagaaatgatgactataatctctatctttgtacttttttagtggggtacctgtatacattacacttgttttaaatttttaattgccatggtataatggtggcatatt

SEQ ID NO: 36779 - DNA, 276 bp, Glycine max
tgcaaattcaaaccgggtcttggttttctgaaagatgggaaggggcaagggccaaccttattgataaatttaccaaaggaattttttaaaaccttgttaatggggaacctggtccacaccatgggggccatgggacccaacttggggctaaccaacaacaacttggggcttaccttcaaaaacagggttttcctccagctgggaatcctcaacaacaagggtttcctccagctgggtaccctcaaaatcaaggttatcctcctgctggttaccccc

SEQ ID NO: 36780 - DNA, 386 bp, Glycine max
cctttctcatgttttttctcagaaccttctgaggttaaagcaaaaaacaaagagagagagagagagaaaatgatgaagccatcgatgctcagatctctccactccgccgccacccgcggcgcctctcatctcttccgccgtgggtacgcctccgagccgttgccggagcgcacggtagccgttctcggcgccccctgcaatatctggcatgctatttcactattacgaagcatactgccactgatttgaacctttgctacttccaacttacgctgacctttagcgtagactaccctatcatgcctattaactgtaaatttccacaaggtttcttccaccctaatgtttatccttctaggacctgtttattgtctattcttaactat

SEQ ID NO: 36781 - DNA, 285 bp, Glycine max
agaaagcatgctcatcctagagttttaaaaatggcagcaggctcctccatggctctctcttccccatccttggctggcaaggccgtgaagctgggcccatcagcccccgaagtcgggagggtcagcatgaggaagaccgtcaccaagcaggcctactccggaagcccacggtacggcccagaccgcgtcaagtacttgggcccattctctggcgagccctcgacctacctcactgacgagctcctaggcgactactgctggtacacagctggtctttcggccgat

SEQ ID NO: 36782 - DNA, 235 bp, Glycine max
ctcagatccatgcttgggagacagagaaagagaaagagaagggacgccattgattctgtgttcgatccgctgagagaattcgcaaaggacagcgtgaggctcgtgaagcgctgccacaaacccgatcgcaaagaattctccaaggttgccgtccgtactgcaattggtttcgtcgtgatgggattcgtcggacattatgacacctcattatcatcctaatggatctcagtaattt

SEQ ID NO: 36783 - DNA, 354 bp, Glycine max
agttatgacgtagcacgcacgcgtacgtacgctcggaggtaatttcgatctagcgaggagatacaccttcaccagcagcagccatggttggcgggaccgtactatgcctattcagcggtgccaagatctacccagtgaaaggcatcaaatttgttcgtggtgattctcaggttttcctgtttgctaactcgaaatgtatgaggtatttccacaacatgttgaagccatcaaagcttacctggactgcaatgtacagaaagcaacacaagaaggacattgctcaagaagctgtgaagaaaagaatacttgctgcctaaaagccttacttcaggtccattgtcagagccacttttg

SEQ ID NO: 36784 - DNA, 412 bp, Glycine max
  unsure (1)..(412): unsure at all n locations
gaaactagtcactataccacagttcctaattatctggaacagaaaaagactcagaagcttcttcttcttggaattcaaggatctggcactagcactatatttaagcaggccaagtttttgtatgggaacagattttctgatgaagagcttcaggatgtcaaattgatgatccagagtaacatgtataaatatcttagtattttacttgatggaagagagcgctttgaagaggaggctgtttctagaatgaatggacaaggttctcccggtcaaactatggaaacaggtagcaatggtgaaaccaggtaatactagtgaatgcatctaatcccttaacccaagggctaaaacaattctctgactggctcctggacaatatacccactgnggatttagatgccttcttccctgc

SEQ ID NO: 36785 - DNA, 305 bp, Glycine max
cgatgctaactcttcaagcttcgtctcgtaaagaaaatgcgaaggctcaatagagagaactcaattgaatcatcaaatgaggacagtgatttcgcgcttgatccattccacgccttacattttcaggctcaatgccacggcagcatccatcacccatacttatatgtgacccttttctatcttactaaatacccaattccttctctaattcacagtctacaggtctgatctctatggctgttgcaattaatgtatctcggtttgaaagcatacctattgctcctcctgatccaatttttagagtt

SEQ ID NO: 36786 - DNA, 411 bp, Glycine max
ctcttactcatgtcgaatgttgcaagaggatagtaccagatggagctatatggccttacctgcatagagataaccctgatggttgtgattcatgcccgttttgccttgtccttccatgccttgtcaagctccaacagataagcaaccaccttgagctgattaagccaaatcccaaagatgatccagacaaacaaaataaagatgcagagtttgctgctgcagtctttggccctgatattgatttagtgggggggaatacacaaaatgaaagcttcatgggtctcagtgatgtgacacattgtggaaaaatgcgagcacttgaaaaactattgtactcatggttttcacagggtgacaaagttcctttggttagctattctgtaaggatgctggacatactggagaaattct

SEQ ID NO: 36787 - DNA, 387 bp, Glycine max
ccattggagaatctcccagtagggtttccattggacgcattgcccctgacttcatctctgaggcctttggcattaagcaatcagttcctgcatacttggatccagcttataacatatctgattttgcctctggggtgtgctttgcttctgctggaactggatttgacaatgctactgcaagggttgctgatgtgatacctctatggaaagaaattgagtactacaaggagtaccaaaagaaactgagggcacatcttggggatgagaaggccaatgaaataataagagaggctttatatttggtcagcatagggaccaatgacttccttgagaactactacacactccctgaaagaaggtgtgaattccctattgttcagcaatatg

SEQ ID NO: 36788 - DNA, 388 bp, Glycine max
tacttgtgtgccatggctccttaagcttatgatcagctgatcctctcagaccaatgaactttatcaattggcatcagtggcattctgcctacttgttgcttggtgtagcgataagctgggtttaagccttgaactaggttcctttgctgcgggagtgatgatatcaacaacagatcttggtcaacatacacttgaacaagtcgagccaattcgcaacttttttgctgctctgttcttggccagcattgggatgcttatacatgtccatttcctttggaatcatgttgacattttactggcagctgttatattggtgatcattataaaaacaattgtagctacatctgatgtcaaggggtttggatacaataacgagacttcagtactc

SEQ ID NO: 36789 - DNA, 382 bp, Glycine max
cgcccctcctgataaggagatggagaaggaggatctgcggcataatcactgctcatcgacatgtctcgatgctatagcagaaagatcttagacaccaagcgtgctatgactgactgtaggtgtagttatgaagatagctcatgtttgagctgatggaggcttttcttcatacatatgatcactagatcagatcgtggtgatagagacgaactgcgagttatcttattaggaaccattttgcgatgtcttgacgagctatagctgaatatctcagaccatggtcagtattacatcgtgaagctggtctgctattaggatccggtgtaacttctgagttcaatatcatacacaatgttgatctggtttgttagtcacatcaact

SEQ ID NO: 36790 - DNA, 360 bp, Glycine max
aaaaaagtgtagtgggaaatggcaggtgcgggtgcaggaggagggtatggggacgcgaaccagaggatagactacgtgttcaaggtggtgctgataggggactcggcggtggggaagtaccatattctacctacttttgcgagtgacgacctatttttaaagaagtcacgcactttacccattatcagagctactatactttcttctgaaagagatgcttttaaacatgcattgtcaagatcttccgatgatcttcacgctttacacatgtggcataaagaggaattcatcaatgagtttgatgatcaaataagggcatatcaagatagaacaattgacatgggaaaacctggagatggt

SEQ ID NO: 36791 - DNA, 368 bp, Glycine max
gctgattcatgttcattttctctgggaaccatgttgatattttggtagcatctgtaatattggtgattgttataaaaacaatcataattgcatctgttgtgaaaggatttggttacaataacaagacttctatacttgttggaatgtcgatggcacagataggagaatttgcttttgttcttctcagtcgtgcttcaaaccttcatctagttgagggtaaattatatctgctgcttcttgggaccacagctcttagtctggtgacaactcctttacttttcaagctaattcctgctgtagtgcatcttggtgtcctactgagatggttctctcctgatagttcagtggagattggatataagctagat

SEQ ID NO: 36792 - DNA, 323 bp, Glycine max
caccattcagtacatgtcgttgggtggtgcttgggaaccggaaaaccttcggtttttggtttccccatgatgatgcggcgcaaaacaacccgtttggaggtttcctcttcttacgacaacatttcagcttcaattttggaatctgggaacgttcatgctcctcttgatgaaaagctgattctaaagaatagatcacaagagacccaaccatatttaaatggacgctgtatttatcttggtggaatgatgggctctgggaaaacaacagtggggaagataatgtcgcaagtgcttggttattcattttgtgatagtgatgcatt

SEQ ID NO: 36793 - DNA, 354 bp, Glycine max
gttcttgcgcattcattttcagcttatgatactagaagaagggtgtgcgaaaatgcagttgtttcaggcatctaacgatagagaagatgagaatgcaaagattgacgaagctggcgtggatctgaaagtgatgattgaagaaatggaatccatggctgagccttcagatggcatatgaccaatctgccttgaaccaatgcaagaccctgtgacccttcgcactggtcaaacctacgacagatacaacatccttaaatggctctcacttggtcactgaacatgtcccacagcaatgctagagctgtgacacgatgttgtcactctcaacagcacactttggcacttgatgttgac

SEQ ID NO: 36794 - DNA, 385 bp, Glycine max
tttgcacatttggaaagtgttgtttttctttttttcatttgcattgcaaagcaaaaaccttgcaaattgcaatggcttccaacaaggttattgccaccatcttggttctttctctccttgcctactcaacatcattcaccaatgcatgtggcacatgccacccaaaacctactccttctccccctcctccatcagggaagtgccccaaggacacattgaagctaggggtgtgtgctgatgttctaggacttgttaatgttgttgttggttcccctgtctctagcaagtgttgtgcattgcttgaaggtttggctgattcggaggctgcactttgcctttgcactgctattaaggccaatgttcttggaatcaacttgaatgtgcc

SEQ ID NO: 36795 - DNA, 398 bp, Glycine max
ttttgcattttttgctaacaataatattgagaacttgcatgatgctgatcacatttaagatatgactatcatatatacgcaatgtagaacagataaacacacccgtattctcacatatagctgctgctatctacactccacccacacatttgatgaaacgtgtccctagctaggtctactactacatgcagcttcccaatttgattacctcaaaatgcactactaggctacccaattgagcaataaagcctataatttcacatgaaacagctaccgggaaggcttaaaatatgccagagcagcacaacttacaaagagctagctagctaataacacgacgcagacacacacataatctcaaacgctgacgcagagtgcatagccaacatcatcgtgca

SEQ ID NO: 36796 - DNA, 383 bp, Glycine max
  unsure (1)..(383): unsure at all n locations
aggacccatttaacccattcaaccattaccaacaacaacagcatgggcctcaaaaagtgccggcaccactcattccaacgccgcaacctgctccgnctcatcctcggcgccatcgcggccttcgtcgtcctcatcctcctcgtcatcttcctcatctgggtcatcctccgccccacaaagccccacttcaccctccaagacgccaccctctacgccttcaacctctccacccccacacccaacaccctcaccctcaccatgcaggtcaccctctcctcccacaaccccaacgcgcgcatcggcgtctactaccacgcgctccgcgtctacgcctnctaccggagccagcagatctccctcgccaccgcgctccccgacaccta

SEQ ID NO: 36797 - DNA, 360 bp, Glycine max
aatttgacggtgtcggtgattcaccaaattctatctctctagctctctcaaatctcaattcactcattcattcaccctttcgtctctatctcaatttcactatgtattgcctacaattcagctaaccgcaccaattccgatggccgcgtagcggcggctacaggacctgcaatcccaaccgtcgaacaatatctgcgtcgactgttcccagaagaacccgcaatgggcctcggactcctacggcgtcttcatgtgcctggagtgctacatcaagcaccgctgcctcagcgtcacatctccttcgtgcgatccgtgacgatggattcgtggtctgaaatccatatcaggaagactgaatcc

SEQ ID NO: 36798 - DNA, 381 bp, Glycine max
ctttaaaactttcataacacaaagcacatagcaaagctcatccttgagttaaaaaatggcagcagcttcttccatggctctctcatccccatccttggctggcaaggccgagaagctgggcccatcagccccagaagtggtaagggtgcgcatgtgcctgaccgtgccctatctcgtgtcttaaaggagcccatggttccgtcctgatcgagtcacgtactcgtgcctatgcaacagcgagcggaactcctacataccagctctgttcaaaggcgcttgccgatgaggcgtcaagttccttcagcgtgcatagaagcacctctagcgtttcccataaaagcaagaacatgtcatggagccggactaaacatcgttagatgt

SEQ ID NO: 36799 - DNA, 252 bp, Glycine max
ctagaagcagctatatgaagaactaaagaggacagagagagataagagagtgtgtgaaatggatgtcgagaaaatgccctacatacacgctatgctgtaagagcttgttataaagcacactgcaacacactgtgtgctaacacatgctgggactgaacccaccacttttggctgacttgacataccaacatatgcctgtggggtaagtggcacaccatgcattgctggtgacccgctcaattgttcaaaccc

SEQ ID NO: 36800 - DNA, 379 bp, Glycine max
  unsure (1)..(379): unsure at all n locations
attcttaacttatactccgaattatatggacataatgatggataactctcctagggctnttagatccttcttacgtggtgaatgctcacgtggtgatgagggcttgaatggactgggagccgggagacttggtgtgacttcactcgcaccattgtgttgcctacctgctgcatggtctatatagggatgccatgacaatggctgcgtctaacgaatcatcactgatgctcaaggatctaacaagatgctcaactcagctgcagcaagtattcaaaagcaacttcctggtgttaagattgcaatcctcgacatttacaagcctttctatgacctcgttcaagcccattgctaatctgaggatgtggaggccaaccaaagg

SEQ ID NO: 36801 - DNA, 387 bp, Glycine max
caagtggtcaggaatcactctacatgattggtggcgaaatgagcagttctggttgattggtggaacaagtgcacaccctgctgctgttttacaagggttgttgaaggtcatagcatgagtggacatatcattcactttgacctcaaagtcagccaccccagaagatggagatgatgagtttgctgatctttatgaggtgaagtggagctttctaatggtccctccaatcactattatgatggtgaattccattgctattgctgtgggggtagccaggactttgtacagtccatttccacaatggagcagactagtaagaggggtgtttttcagcttctgggttttgtgccatctttacccctttgcaaagggcctcatgggaaagag

SEQ ID NO: 36802 - DNA, 304 bp, Glycine max
tgcagctttctccgacagcttcattcaccatggctgatcagaccgagaaggcttttgtgaaacaaccaatagtgtttctcagctcgaagaaaactgcgacgggatagagacccgcaaagggagagaaccgattttggaaatccattgggcttggattgaacactcccagactagccatctaatgaacctacattgacatgacgtgccggttcactgccgctgaccacattcgcgtatggatagtggctgtaacacttgacatagctatgatcatcacgactaccagtgtgaggtggatttacgt

SEQ ID NO: 36803 - DNA, 358 bp, Glycine max
gtatattacaaggctctactctactgcttcaccttctgctctagagaatctactggcgatacatggcttccgctactgtctctgcagccaaacgagccattcatgctaatgggaaaggcttctctgaattctatggcattcgcagatcatcaggctacacttgccgtatgtagaaaatcttcagaggatttgcattctggcattgccttccagacctatgcagttacaagcagtacacgatacatgaaggctgtgacagaagcaaaactgaatgctgctcataaaccgatatgcaaagattggaacgaactacttgacgcgctgtcacagtccgatagacttccgtcttgacgtcatt

SEQ ID NO: 36804 - DNA, 302 bp, Glycine max
tctcggtgaattccaattccacattttcaagaaattaggaggcaaatatgctcatatatgaattggaattatttgttttcttattaggcctatcctgaagccaaaggaaatgagatcggaattcctcggggtattccaattccacattttcatgatataaggaggcatatatgttcatatatgaattgcaattattcgttgacttattaggcctatcctgaagccattggaaatgagatcggaattcctagtgtaattccaattccacatcttcaagatataatgaagcacttttgctcata

SEQ ID NO: 36805 - DNA, 381 bp, Glycine max
tccactatggctcgtcactcctagctcttaaccaggctactgttcaccgtcgtggccccattaaatacgtcggtgtcagcatgaagatgcactggttatgtgcacaaggaagacagcgcaagccttgaccttgtgcagctggtgacatttgaatgaccaagtgtcaatcccagtattcttcgttagtactgtgtaagtataccgaatgacgccgctgatggacagcttattgaaatctgtcatgacgttgtcccagtagtatcattcatactagctattgacggatgaactgtgaaacgcaaacgttatggattctgcgagtataaggatgaagagacggctttaagtgctcgacgaaatcttcagggttatgaaattaat

SEQ ID NO: 36806 - DNA, 243 bp, Glycine max
atcatgtttgcaactcagatacatagccgaatgtgtgaaggaacttttgggcaggtcgtaggatgctgggataaatcaaggaacgaaactgggtgccgtcgaaattgtccgtggcattaagaagtatccagaaacagccatgatacaaattgaggtgttgcaacagcttggttaacacgatgcacgacgcaatcgtcatgcaagacttgcacatgatctcatactgacctcgaaccctgacaa

SEQ ID NO: 36807 - DNA, 345 bp, Glycine max
ctcaatccgctcttgactcactgacgcaggcccttagttcatacatcaggagaactgggcatggcattgttatggatgaggagaaagatagcgatatggtctcatcgcttcctgaatttaacgcttctcttgacgcattatgggattatatctttttcgtcaacgaagctttcagcatttcaattaaagatgcctttgagtatcttatcactcttcgtcagaagtgacctgtagagttgattgccaagtttttggctgataagcttcatgcaggtaataaaggtacttctgacaaggaactggaagctacacctgacacaatcctggtgttattcacgttcagtc

SEQ ID NO: 36808 - DNA, 289 bp, Glycine max
cggctctagacggaagcgttttcgattacgcacgcaccttatattacctacgagaaaattattattgcgactattacagagagtagcatgcgcccaacggttatggtcagaaggattagctctcatttggattcttcatcttcctcacgatcctgtgatcgcatactcaagactctcgctagtggcttctcacgtcaatgtggcgtcagacctagatcatctccgacttttccaatcgtgcgcatctgaatccgtcaacaatcacctccttcgtgatccccatgatcgt

SEQ ID NO: 36809 - DNA, 374 bp, Glycine max
actccaaaaggatccctccgggaaatccaattccacaatttcaagaaataaaggaggcaaaatgttcaaaaaagaaattggaataattggtttcctaataaggccaacccgaaacccaagggaatgagattcggaattccccgggaaattcaaattcacaatttcaagaaataatggggcaaaaatgttcataaaataattgggattatttggtttcctattaggcctatcctgaaaccaaaggaaatgagatcggaattccccggggaattccaattccacattttcaagaaataaggaggcaaaaatgttcacatatgaattggcattatttgttttcctattacgcctatcctgaagccaaaggaaatgag

SEQ ID NO: 36810 - DNA, 338 bp, Glycine max
aacattgtacgtacgtacctggggcacttggttcatatgcagataaatggctgccaaataatggtcaccaccttgcttatgcacttatgttttcaaaagctgttgtggtgattgcatgtccatgtgcacttggtttggcaacaccaactgctgtcatggtggcaacatgggttagggccaacaatggtgtgttaattaaatgatgagactccttggcaagggctcatatggtgaactacgtcatatttgataggacaggcactctaactcacgctaaagccactgttactgttgccaaagtgtttggaggaaaggtccgtggtcaatttcgtacactg

SEQ ID NO: 36811 - DNA, 320 bp, Glycine max
gcacgattagcttgttgtttggagcgatccgaggacgactctgtaaacaggttgggttaccagcacatccttacacgtgatcaacttctcgctgacgccggccgttacaaggaaattgacaatggcatgcagtgtgaacttgacgggaactgcgttgttaaaggcgcacttgatgtagacattggtgccaacccttctgctgaaggtggaggagaatatgatggagttgatgatgcatctgttaacgttgttgacactgttgacacattcaaaattcaggagcaacccgcaatctgacaagaagcatgttgttaccgtca

SEQ ID NO: 36812 - DNA, 351 bp, Glycine max
gatgatctacagattcatcttttgtttggtgtcaatatagagccctcatcacccctaatgcacaacgggatcgtaagtcataggggaggcatcagcagcagtgacgcagccagcataccttttcactacatctagttacctgaacaccacagtgcctgattcggcattgaatcccggaatgacacagactattggtgactcaggcttcctgcatactccagtaaagggggggcattgaatcccaactatcataacgtttgcgatggtttacatgtcacggtcgtttggaagatccatggacatcactaaattcatcagctaggctgagctacgcagtgagcttgctcgtat

SEQ ID NO: 36813 - DNA, 364 bp, Glycine max
atcaagctcactcatcacttctcatctttcttcacaataactattagctcatcatctccagcacagctggacatgtcatcaaatgcaaagctgcggttgcatgggacgcacggaacccatttgttattgaagaagtaaaggttgcactaccacaagctggtgaagtgcgtttgtagatgctctagagatctccttgccacactgacgtctacttctgggaagctaatggcgacaatcgagatgatcttcgtggatttagtgatgaagctggtcggattgtggagagcgtaagataggatgtgactcatcgtaaagtagaggaccatgctctcactgtgttcaccgaggagtctatggactgcct

SEQ ID NO: 36814 - DNA, 381 bp, Glycine max
aattccaattccacattttcaagatataaggaggcaaatatgttcatatagtaattggaattagttgttttcttatgtaggcctatcctgaagccaaaggaaatgagatcgggattcctcggggaattccaattccacactttcaagaggtatggaggcaaaaatgttcatatatggattggcattatttgttttcttagtaggcctatcatgaagccaaaggacatgagatcggaattcgtcggggaattccaattccacattttcacgatatacggaggcaaatatgttcatatatgaattggcatcaggtgatttcttattaagcctagcctgaatccataggaaatgagatccgcattcctcagtggtaccgagctc

SEQ ID NO: 36815 - DNA, 269 bp, Glycine max
ctccaacaataccgagttccagatcgtgccgagcatcatcagggatggcttgaagaccgttctcaataagtaccagaagatgaaggacagaatcgtcggtgtctcagaagacacgaggacgagtgtcaataggctctagcagatgcaggtcaatggctcactcttgttcacggccatcaacgtcaatgactcgatcaacaagagcaagtttgataacttataaggatgccgtcactcgcttcacgatggacagatgcaagctactgatg

SEQ ID NO: 36816 - DNA, 359 bp, Glycine max
gttctgttctgacgtttaactcacttcttcttcttcttcttttgatctcttcgttcgcatcttgcggataaaagcagcgctgtaattttcgtttctctgctttgtgcttttttcatacgttgcgtttgggtgttaagttgttccgtttcagccatggtggagaacaatctcttcgaggatatatttatggtcgaaaaattaaaccccgatgacaaaaaattattcgataaagtcactcgcattgaagcaagaagtgaaaagtttgacatgtttatgcacctggacattaattccgagatatatccgttaaaggttggtcagaagtttgctcatgtgcttgtttcaacacttaatcctga

SEQ ID NO: 36817 - DNA, 259 bp, Glycine max
ttattaggcctatcctgaagccacaggaaatgcgatcggaattcctcggggagttccaattccacattttcaagaaataaggaggcacaaatgttcatatatgaattggaattatgtggcttcttattaggcctatcctgaagccaaaggaaatgagatcggaattcctcgaggaattccaattccacatttgcaagatatgaggatgcgcaaatgttcatatatggatgggaaattatgagtttcttattaggcctat

SEQ ID NO: 36818 - DNA, 303 bp, Glycine max
gcaacttgtatcaaatcaaaacgtccttcaagagctatggctgtctgaaagagtactaggatttctaagggaaataagggtggcacgtagaacgctgtttatccttttgtcaagaatgactggtacgatatcaaggtcccttgactattctaggtcacgaatattggcaaaaccctcgtatctcgtatccagtgaaccaatattgtatgctaaagactcaaacattggctttttgaagtctcattgactgatctgaaaggggatgaataccactccttcaagaagattcctatgagagctgag

SEQ ID NO: 36819 - DNA, 401 bp, Glycine max
gattgtcagatgagtgccccctgtaacaccacagttctttatccaagcaagggtggcaacattcattgtttcaaagccttaaccccttgcgctctctttgacgttctttcccctgcttactcatcagaagatggaagacactgctcatatttcaggaagtcaactaggaaagatcttccaggtgttgagcttgatcagctgagtggtgtaaagccatctgaaataacctggctagaagagatccaagcacctgaaaacctggtggttagaagaggtgtttacaaaggccctactataagacgatgaaagatacaactaatttgtatttacataacattagccaggcatgactagaaactaaatatgatggggatattaattaaaggggggatatcttggga

SEQ ID NO: 36820 - DNA, 390 bp, Glycine max
gttttcgtatgcttaaaatgctgtggtgtgcacagaagtcttggctctcagatatcaaaggttttatctgtgacattggatgaatggtcaagtgatgaaatagatgcaatgattgaagttggaggaaattcttctgctaattcaatttatgaggcttattttccagaaggatttacaaaacctggaccagatgccactcatgatcagcgtgtgaaattcatccggttaaagtatgagcatcaagaatttttgcaacctagtgtgcgcattgtgtcaggaaaaagcaaccccccaaaaagtatatccaaagggattatggatagttttcgaattacaagtgattcacagcatatggaaaggatggtagaatttattggaatgtaaaaggtg

SEQ ID NO: 36821 - DNA, 325 bp, Glycine max
gcatgcgtactctagatgatcctctcgatgtattccaattccttatcttcaagatataccgagcaaaggcgagcatatatgaattggaaggatgcgtaatcttattaggcctatcctgaagccaaaggaaatgagatcggaattcctcggcgaattccaattccacatattcaagaaataaggatgcaaaaatgtatcatatatgaataggaattataagatttcttattaggcctatcctgaagccaaaggatatgagatcggaattcctcgattaattacaattccacataatgaagacttattgacgtataccagaccatat

SEQ ID NO: 36822 - DNA, 369 bp, Glycine max
atttttgttgtttcgagtgagcgagggaagatgtacggtggatattcatggtgtgcagcagcaacaatggatgcaaccaacaaaaccatcagtacccatgatagcattaaaactatactccctcttctcatgaagagtggaaaattcaccctcggctacaagaccgttctcaaatcacttaggagctccaaagggaaattgatcattattgctaacaactgttccacctttgaggaaatcagagattgaatactatgctatgttggcacaaggttggacttcatcattacaatgggaacaatatggatctgggcactgcatgtggaaaatattacagagtgtgctggcttagcattattgatcctggtg

SEQ ID NO: 36823 - DNA, 402 bp, Glycine max
caaaactctctctcgctctctttctctcttccattcccacgttgaaactgccggaaaacacagcgtcgccggagcgaagatcggaaaacgcaaccggaccacataattagggtttctcgaagaatgccactctgcaggcaccacattcggagcgcgcacgctctggcggatccggagctgtgccgcaccgccgatagcgacgactccgaagtgctcctagaagccgtcgcaatgtccggactcgtcggctttctccgccagctcggcgacctcgctcagtttgctgctgagatgttccatgacttacatgaagaagtactggctactaccgcaagaggccacagtcttatgtctcgtgttcaacagcttgaggctgaaagtccaacactagagaaagttttt

SEQ ID NO: 36824 - DNA, 326 bp, Glycine max
aaacttgacgtcctgccgcgtcgtaactcgattcgctcgagcaaagtgccttggggaccctggaagtggtcttatcaagcgcctaaggaatcgatgacaatgattttctctccagcattgatccttatgtgattctcacatacagggcacaggagaaaaagagcactgtgcaagaagatgctggatccaagccacaatggaatgagagctttcttttcactgtctctgacagtgcatctgaacttaatctaaagataatggattaagacaactttagtcaagatgattgtcttggcgtggcaaccattcatctggatccagtgttt

SEQ ID NO: 36825 - DNA, 272 bp, Glycine max
attagaccagtgaatgcaaagtgatgttccgagaattaccatacaggaattgaaagaacgacgcttgaacggattcaggagcccctgtagcgtgccaggacaagccatgcgatcaatacaagctagcctcggcagttcttttcttacgacccaattccgcattactatgcatatcctgcgattccgacattcactgctcgaacaaactcatgtaccgccacgatcccgtgtcgatgtgtgagacgtgcgagcctgcacccattgatgtcacg

SEQ ID NO: 36826 - DNA, 390 bp, Glycine max
tgaagagagaaggcttaattaataagcaaatggaaaggctaaattttattaaaaatggagtgagtagattgcctccaggttttcgtttccagccaacagatgaagagcttgtgtttcagtacttgaaatgtaagatattctcgtgccagttgccagcttcaatcattcctgagattaatgtcagcaaaaatgatccttgggatttgccaggaaattgtgatgagcaagagaggtactttttcagctccaaggaagccaagtatcgaaacggcaatcgtatgaaccgaacaactaactctggctattggaaggcaacaggatcagacaaaaaaatttcatcatcaataagtaatattggttttgcggggcttagaaaaactctaatattta

SEQ ID NO: 36827 - DNA, 403 bp, Glycine max
gctttgagtcactaagcctagcttaaatttcagttcaatttggttggaaggcttcttggccctaggggtaattcactgaagcgagtggaggctaccacaggttgccgtgtatttatcagagggaaaggttcaataaaagaactagataaggtatcatctattctttagtggattgtcttgcaagttgcaaatcctaagaacctaatttaatgtcagttgcttctcctttcaatttgttgagtgtgtcttttttttttttctgactacatatattaactgtaaccattaacttcactctatcttttataatccaaaggaagagttgttaaggggaaggccaggctacgaacacttaaatgaaccactgcacgttttgattgaagctgagttacctgtcaatggt

SEQ ID NO: 36828 - DNA, 338 bp, Glycine max
gccgtttccgtggaagaaaaaccgcgtcccccgaatctggcaaatcgtcgccgatctccaatcgcccaaacgcggcggctccctcgtcgtcgagaccggcttccccacctacctcatcgaccttttcgtcaaaaaccgaagtcgcttcctaaaacaccgctccaaaaaaaccaccgtcgccgccgacgtcaaaatccctatccgccaccgatccgcctacctcgccgcctacctctgcggccacctctccgccgccacgcgtccccacctctccagccactccaatacaacgaaactacaccgtcgtttcggctccggatcgaatcgcccagtgctct

SEQ ID NO: 36829 - DNA, 376 bp, Glycine max
tgcctgcacgtctactctagagggtcccctcggggaattccaatagtttattatcaagaaataaggaggcaaaaatgggcatatatgaattggaattatgtggtttcttattaggcctatcctgaagccaaaggaaatgagatcggaattcctcggggaataccaatttcacattttcaagaaataaggaggcaaaaatgctcatatatgaattggaattatttgttttcttattaagcctatcctgaagccaaaggaaatgagatcggaattgctacaccaatttcaattgcacattggctagaaataatgatgcaaaaatgttcatacatgaattggaattatacgttcgcttattatgcctatactgaggcca

SEQ ID NO: 36830 - DNA, 401 bp, Glycine max
  unsure (1)..(401): unsure at all n locations
gttcttgagagaagttattaatgagaaggtggacatatgggctcttgggtgtctcctttttcgcatatgctacttcaaaagtgcttttgatggggagtcaaagctccaagtcttaaatggaaactaccgcattcctgaattaccaaaatacaattcacctgtgacggacttgataagagacatgctccaagctagaccagataacagaccagatatcacgcaggcaagcgctttgcttgattggccattcatctccatcagtttaggtctggtttcgtgttaatgagcaactacctattaatttacagaagtcattacctgacagaccacctgaattgccctcatccaacgatcatgaaagtgtgtcaatgccctcaaacagatcacctncaatgcctcgt

SEQ ID NO: 36831 - DNA, 211 bp, Glycine max
acacgcacgccttcgtgaacttggaattctgctcgagaaaattcgttgtgcctatcctcaagtgttgccgtgagggggcatagaaatatcctgagatagcttatgaggaagttgtcattgacaattgctgcatgatgcttgtgaagaatcctgcacttttcgatgtactagtgatgcctaacctttatggtgatcttatcagagacctttg

SEQ ID NO: 36832 - DNA, 361 bp, Glycine max
gaacgcacacgtacgcatgctggaacttgggatttagctttaggaattatccttatagatcgatgccagattgatacggataggtgatcctcaatacaatgagggtcaagctcagatgggaacaaatttgtttaaattgtctcttgatgatgttgaaactcctaaaggttccatgttggatcttaaaaattctcaatctaaaattgcactttccaaaaacacaagttggaggaactattctgcgtaatgatctattggcaaaatttttgacagaaggcaattttagaacaagtgttgatttgcagcgcactcattgtattaaaagaatgattaaaatggtggccacaagttggatttctga

SEQ ID NO: 36833 - DNA, 293 bp, Glycine max
atgaatgcacgcgtacgtaagcttggaattgggctcgaggcggaactctttccttttgtgccgtcacgagcttccttccgatttggaaactagagttccgagccagatcgacgaggaagcgataggattaacgatttggaggctttcaggaggcggattcgccgtatggcgattcttcggcggccggagaaccggggagagtcatttgccggtggtgtacactgaagatggacggtggacttaacacaaatggtggtgctcctaagagaatttctcgttctgttagaagcaat

SEQ ID NO: 36834 - DNA, 423 bp, Glycine max
cttaattccatactgctagtcatttcagatctactaggaatagagattcgcactgttgaaattactagaaatccatggctgctccacaggcaagagctcgagcggattacgattatctgataaaactttatttgatcgacgatagtgaggtcagaacaagtagccttcttgtacgagtctctgacggttctttcacaactagtagcatcacgactataggcattgattctaagatcagaaccattgagctggatggaaaacggatcaagctacaaatgtgggatactgcatgatcacgagcggttgacagctattacaaccgcttactatcgtgatgctatcggcatattgctagtcgatgacgtttcagacgaatcttgatttaacataatcaggaatcggattcggacattgtggcagctg

SEQ ID NO: 36835 - DNA, 240 bp, Glycine max
gctacttacttaacatacagagatatgcatgatgctatgcgccgtacatgtaccttggctctatggtgctcaccatactatagtgacagacagggcaggggaagacctaagttccagactcgtatcaaggatgctaacaatgggtcatggatttgctggtgccatggatgatacttattgctatataaggatgctgataacagggaacttactgcttatgagtttcgtgaatagctgaaa

SEQ ID NO: 36836 - DNA, 320 bp, Glycine max
ctcaccgcacgcactagcactgtctctcactgaaacttgttcgcacattttcacggatctaactaagttatcgccatgaatcgccaccacgatcccaatcccttcgaagaagaagaagtcaatcctttttcgaatggcactactgctcctgcatcaaagtcacgtattccaccattagcatctgagtcactgggctttggtcaaaggcatgatgctacagttgatattcctttggatactacaaatgactccaagaaaaaaggtcaagagctagcagcttgggaagcagatttaaaacggatagagaaaggaataaaaag

SEQ ID NO: 36837 - DNA, 252 bp, Glycine max
caacacacgggtagctgctgctgctaacaatgtgacatttgtgacaccaaacattgctttacttcaagcacattctttcaacaagtgcaaaggagtgtacaccacatatttcccttgcaaccctgctttcaagttcaactacactggcactccaccaagcaacatctttgtgagtagtggcactaagacagtggggttgccatacaacaccagtgtgcagctggtacttcaagacacaagcattattggagc

SEQ ID NO: 36838 - DNA, 256 bp, Glycine max
catgtccttatgtgagtggcattgctgctttgctcaaggctaggcaatcacattggagtcccgttgccatatggtactcttttatgaccactgcttctgttcatgacaataccatcaagcctttcagatgtgcactcaattccagagccttaactccttatgaacatggaacttgacccatgatgcctagaatagctcttgatcactgattagtctatgatatttagccactcgactacattgaattcctgtactg

SEQ ID NO: 36839 - DNA, 308 bp, Glycine max
gttctattctaacttcatatcttctcctctttatctattggcgacggcatggcttatgctttcgaagtgtctacctttgtcatcaatgagaatggttccctaactggcacatcatatctacaactattggaggccctaatcgggaacccaaaccgactattagctacatggcataacgggttgtaggaactggatcattttgcatcgcgttgcaagctaaatgcttggaaactggagaggcagtgtcaattgacaaggttttacaaggcagaagatactagaatcgtgaactgcaattaatgcgtgtg

SEQ ID NO: 36840 - DNA, 419 bp, Glycine max
  unsure (1)..(419): unsure at all n locations
cgaacgaaagacctcgacaattcttctgatccgtttcgtgcagatcaaaacttgcctgtttgcaacgctgcttctgacaaaaaaacgttgtaccatccgaaatgtcggacacagtggaacatacagatcaaagagctgaagctattccccaatccacagctacaccaaattggactattcatgtgtcagacataagaacagttaaggttagcaacatatcattggttacttccaagaaggacattgaagaattcttttcattctcaggtgatattcgatatatcgagatgcaaaggtcagagtcagagcacctggatagtggtcacactcaggttgcttatgttacatgtaaggatacacanggagcagacacagcagttctcttaacgggttccaagataggtgatctatatgtcacc

SEQ ID NO: 36841 - DNA, 272 bp, Glycine max
cttcccctataggctcgtcactcgttgctcttagcccacctgctattcgacgacgtggccaccggcaggatggcggaggccgcgtacgacgccagactacgagctgatccgtcaggtggtgccagaagagggcgaagccgaagaggatgacagcctgctgaacgccgagcaccagtctgcgagctataaggccaagttagccaagacctaagccaacaaggaggagcacgaccagagctagggcgacactaagtccaacagtggcagagcca

SEQ ID NO: 36842 - DNA, 408 bp, Glycine max
aatgaagcaagcaagcctacaatagtacaccaaaacatttcagtagaaaaagttattctagaccatgaatttaaccccttgatcacagatgccggcctccctaagcttcttgcagatgatgttgtcttctcagctcttaaagcaagtgctgccatgggatatctagctcccgaataccttaccactggacgctttactgagaagagtgacatatatgcatttggggttattgttcttcaagttctatccggaaaggtattgatggggggtacaatccgggtggcagttgaagctttcagatttgaagattttgttgacacaaatctgaagggagattattctaaatctgaagccgcaattctttcaaagcttgcaattcagtgcactcttgaagtgccagagcaaaga

SEQ ID NO: 36843 - DNA, 404 bp, Glycine max
agcgcctataaaagaaagccatttgctcactatttgtgtagatctgcatctcattctcattcgttcactgtcactttacccaatcctaacactttcttctctctgttttccttcttcctcgcatcaatggagttggacggcgttctcctcggcatgtgcaaccctctcctcgacatctctgccgtcgtcgacgacgctttcttgcaaaaatacggtatcaagttgaacgatgcgattctcgccgaggataaacacaaacctatgtatgaagaattggctaacaatcctaatgtggagtacattgctggaggtgctactcagaattcaatcagggttgctcagtggatgcttcaagcaccaggtgccacaagttatataggttgcataggaaaggacaaatttgg

SEQ ID NO: 36844 - DNA, 346 bp, Glycine max
ccaaatcatcttcaaaggttgcaggatggtgcatttacctgaatgggaaggattggaatgggccatcagatggaaaatggaacctgggaacgtcagctaggatgaaggtagaaggagtgaaaatatggaatgcttgctcattatctaacttcatagcaaggaatccctggagcatatgtcttggggcatcgcccattatatcgagctttaaggactgacagagctccgaactttggatggtgaagcttgttttacctgctttacctaggatactggatcttaactgcagtagctacttccatagctttaaaaggaaaatccttgacaggcatgctgccagtcatac

SEQ ID NO: 36845 - DNA, 402 bp, Glycine max
ctatgacatcgcgcatgcacgcgtacgtaggcattgcactcgagccaagacatctgcatagattgcacaatacagaatcaacttggttgggatgatacgcattgtgcatcacatggaatattgcatctggtcaattcaactaggattcagggagaaggcgtgaatatatggatgcttgctattatctacgttatagcaagaaattcctggagcatatgtctcgaggcatcgcccattatatcagacttttaggactgacagtagctccaatcttggatggatgatcctgttctacctgctttacctacgattctgtatcttaactgcaagagctactctcatatctttcaaaggaaaatccttgacaggcatgctgctagtcatacatgtggtgggtgacca

SEQ ID NO: 36846 - DNA, 338 bp, Glycine max
gttctagccaatgcaccaacattggtccaatagattctggcgagacaaaccttctaagagtgatcaatgcagcactgaaccaacccttggtctttacaggggccaaccaccagcttacagggggtggtgcccattccttctaacttaaaacctttaacaaccaactcattattgctggacccagcccaaacaacggttgtcctattccaaggggacaaacttccaaaaggctattacttggccgaacttgcttaccattcggccaaaaacgaaccgttggccaccacaacaacaacggcatttttcgattttaaatccgaaccgtgcccaaccaaggg

SEQ ID NO: 36847 - DNA, 452 bp, Glycine max
agacttgcgagcatgcatgcacgcgtactttagatgatactttggctcaagcacaataacttagttctaatacttatatgtgcacggatggtgagatattagcatcactgatcctctgcagttactatgtgccatcctgaacacagccagagaatgtacagtaatgcctaaactacttgcacacatggacctttgatcacatcagatatttcaatggtgatatagacattgagattaatcgtgacatgatcactgctactgtgattcaatccgaaaggtcatacttgtttgttcactaaagcatgtacatcatgatggttactggagattctgctggcgcagatactgatttgtatatatcttgccaaaacacagagcatgatgagatagactttgagttcttacggaacatatcaggacaaccttacattctgcaaactaatgtgtgtcac

SEQ ID NO: 36848 - DNA, 400 bp, Glycine max
caagagattgttctctgccaaagttcaaaccgaagcttttgattcagaagattagagggaagaggcttatgtttgttggagattcactgaataggaaccagtgggaatcaatggtttgtatggtcaattctgcggttccttcacataacaagacctggtacaagactggttcacttgctatcttcaaaatccaggagccggagcacgttaccacagtggaattctattgggcaccattccttgtagagtcaaattcagatgatccaaacatgcacagcatattaaaccgtataatcatgcctgaatcaattgaaaaacatggcgtgaattggacggatgcggactacttgatctttaacacctacatatggcggatgaacactttctctatgaaagttct

SEQ ID NO: 36849 - DNA, 406 bp, Glycine max
ctcttgaattctatgatatctctaattattggtgataaatgattattacctaccctttactattggccaatggtatttaaatggcttggtgaaagtctggtaggattccattcagtgggttttgtaaggacctgcattggctgagcagaaaatttggctgtggatctgggtttagggttccaagtagggaagacaccccaatttcggcaaattagggggctacttttcattccaaaattttgaacttgagctgaatgttggtaatatttgcccttaaaatgattaatgaatcgtttgaccgtgtgctgcttgagagttttaacactgattttgatatatattcctttcttttcaattgcaggaatgacattagctgagtatttcagagatatgggttataatgtca

SEQ ID NO: 36850 - DNA, 345 bp, Glycine max
gcctcgtcctacacacactgaccctagccactgacccagccacagcctacaccttcggatgcattcaagaggccacagggagctcactgccaccacaagggctaatgtgcctgggccgacgcccattattactcttggcccaaacacaaaaactgtaccaatctaccttgtctaattgcttgcccacctttaaaacactcaactttagtgacgtcactgagacttgggcccgtggcccatgccacgaggatcaagtataccagtcttatcaaaaatcctagacgatcttcactttactatgtgacatacctggctatgagagcctaccatgagaattgacgatat

SEQ ID NO: 36851 - DNA, 336 bp, Glycine max
agctagaagtttgcattcgtaggacaacccagtgtgatattggcctgaccaatttcatttattggggattttggccagatgccatccctggatatgccattgttgaacggacaagctttgaaatttctactgagactcatgatgagcttttatatgacaaggtgaagctgctttgaaatggggtacggttgtagactgatatatcagaaaacctgagatctgaaagcctttatcgctgataatttacatgtgatccttggcctgatgcttttttcgtctaattgggcaatgatctatgaaatgaccagcgcatgaatttaaagaactgtatgcata

SEQ ID NO: 36852 - DNA, 386 bp, Glycine max
ctaacactaccccgtacgccaaagtgtacctctctctattcttcttcctcgatctattcaatccccttgacacgatatccaaataaaaccaagacccagaaagtgatcaagataaagaaggacaaagaaggaatatacatacacacatatacatacacaccatgaaactcgttcggtctcccgaatcatccttacaagcttacatagacacggataaatcatgtgagaaattcaaggaaaccggtgtaccagagttgctatcagccatggctgcagggtggaacacgaaattcatagtggaatcatggtcctacagtggtgccatagctgcaagcgtatgcctagcagatgcagctcgcaacactggtgcaagacacgtgtgcata

SEQ ID NO: 36853 - DNA, 413 bp, Glycine max
tatgacgtcgcatgcacccttccttaacctcgaaatccgcttcaacccctttcatcttctaatctcttctcttttccctgctaatcatggcaaccttgtcaactgtgaaggtttccccccattgcatgtttcaaacagcaagcaaaaatccatccactgttgccaccacaatgaagtgcccttcttcttttgggtctgtgaagagcatttccagatcttttggcttgaagtcatcctcttcatttagagtcactgccatggcttcttacaaggttaagctgattggcccagatggaacagagaacgagtttgaagccactgacgatacttacatcttagatgcagcagagagtgctggagttgaacttccttactcttgccgagccggagcatgctctacctgtgctgggaag

SEQ ID NO: 36854 - DNA, 390 bp, Glycine max
gcaaatttcatcaaacaaaaaatgtgggacataagagacacagttctataatgtctcgagaaaaaaaaatgaccttatgatcaaataaagaaacttaccattttctgaaacaacggtatctgtagtcaaagcctggatcttatccagatttaatatctcaggaacaggtagtggaaaggggaccttgtttagtaatatttctcttggtgttgccaatgcctgaaatcaaacataccatacacaacgttggcattttacaaaaccacagcttcacactataaactcgcaacattaaacgagaattcatcacccgtaacgtaagcagccaatacccagcttaaacaagaaaggaccaaatgatagctatctttcaactcacaaatgtgattc

SEQ ID NO: 36855 - DNA, 358 bp, Glycine max
  unsure (1)..(358): unsure at all n locations
catgagaggactttggccacggatgtgctatttggccttctgaaggaagtgcttaaaaatcgacctgacatgaagttggttgttatgagtgcgactcttgaagctgaaaagtttcagggttattttttcggtgcccctctcatgaaagttcctggaaggctacatcctgttgaaattttctatacgcaggaacctgaaagggattacttggaggccggcattaggacagtggtacagatacacatgtgtgagcctncaggagatatacttgtatttctgactggagaggaagagatagaagatgcttgccgcaaaataacaaaagaaaattctaatctgggaaaatcaaggtgggcct

SEQ ID NO: 36856 - DNA, 364 bp, Glycine max
gttgatagtagctctgctgtcggcttgggtttcgggaagaataaggttagggagatggttgtcggcagggatgatctttgggttgtccggatttccgggattggtggttccgggaaaaccactcttgctagagagctctgctgagatgaccaagttagatgttatttcatgcataggatcttgttcctgaccgtgtctcagtcacctaatgtggagcatctaaggactaatatgtgggagtatattatgggcaaccagaggtctgatgcaaattacctggttccccaatgcatgccacagtttgagtgcagactcgaatctcgaactctgattgttttcgatgatgtgtggacactctccgcgg

SEQ ID NO: 36857 - DNA, 390 bp, Glycine max
ttttggctttgtggtaaagtggcaacccttaaccattgggggtccttatggcctcaatcctggaatttcaggttctcgtctttggggcaccattcctcagtccatttaacagcatactgtttggaatcaaatggcaacagtgagaacaccattgaattttgattccagcaagcagagtttttgtcaattttctattgaccttctcggtggaggaattttagtggacaaaactggagattggatcacacttatacaaaattctccaattagtaacttgttgagagttgctgcttggaagaaaggctgtttaatggttaagattgtgatgtctgggaatgcagcagtcaaaaggagtgattgggcctcattggtacaagtatttttaaccaa

SEQ ID NO: 36858 - DNA, 410 bp, Glycine max
  unsure (1)..(410): unsure at all n locations
gccttttccttcagtggggtttggattttattgtttctgagctcggtttcagctttttctccaactgggtcgattcggcatcccgtcaagtttatcataggagaagaagaggagaatttgggttcatggaagagtgaattcacacaagtggctccagcaccagggcctaaaggtgacgatgttcttattctggcggcaaacaagaccaataggcctgacattctgcgaggattccgacgttatcgaggtggttgggatattgcagatcagcattattgggcttcagttggattcactggtgcagctggtttcattcttgcttgcctgtggtttatctcatttggcttggcgctcatgattcatctatgctntggatggggaattaacatcaagggcaaaggatcaaatca

SEQ ID NO: 36859 - DNA, 378 bp, Glycine max
atgccttgaaaaacttccccgaggatgcaatgaatccagatacattgttaccactggcttattctatcaagatatccaagcgtttagaagaattaaaacaagagtatgagaagaagaatggaaagataagacgatcaagagaactttctgaaaatccaatacttcctagtgtccagggcaactgaagcaggagcatatgcagacaacatttgctagacatgtaaaacttttggtaaagctgagaggacctccgagtaaaggtctatcttttctgctggaaagtaatccagtgtgaaaatcataccctcaaattctgttgttaccatatgttgcatactatgtacaattgtattagttgctcactcttggtcaaaattc

SEQ ID NO: 36860 - DNA, 187 bp, Glycine max
tacaagtatgtaggatgaagagctcatgaagaaggttgaggccaaaaacgctctggaaaactatgcatacatcatgaggaacaccgtgtaggatgacacgatcggtgataaactagtctcgactgtcatgactaagattgaggatgcacttgagcatgcgatcataatgatatacagcatccagctt

SEQ ID NO: 36861 - DNA, 446 bp, Glycine max
aagatctatgacggcacatgcaccgtaacctcggaattgggttcaaggcaatggccaaatggatctcattggctgctctttttgcaatactttaactactaatctctcctgagcttgcaagtgctgcccaacctaggcttattcttcaactcggccgaaaacttttccaatgcggcagcgccgccgtccctgttcgtggaaataccccatccaatggccgctcgtagaggatataccccaccaccaaaacacccactctatggctgaatatttgagatgttagcatgcttctttaattcagcgataaaaaaaatacttttaaagatgtatcactgcgggtcattactatccgatatgtgacgtatgcgcagttacactgaaccatgtagactgctgatagtaagcctacgctctgtatacattagcatgggataacaccacaggat

SEQ ID NO: 36862 - DNA, 393 bp, Glycine max
ccttccttttccttccttaccacctcttttcaacctaacccttttcccgagcggcccttttttttccttaaggcgcccttggacaactggcggtcccttggcggtcaaggcctcttcagggaggcttcggctggtgggaaccccggaccgggtttcggagccgaagctgtggttggccaggaggttattcacggtgaactatctgattacattgggaagaaatatgttgtgctcttcttctacccgttggacttcacttttggttgtgccacagaaatcactgctttcagtgaccggcatgcagagttcgaggcactaaatactgagatattgggtgtttcagttgacagtgtgttctcgcaccttgcatggatccaaacagatagaaagtca

SEQ ID NO: 36863 - DNA, 279 bp, Glycine max
ggcctcttttcatatccaaaaatcaatccctgggcctgggcctggttttgcggacaactttgttaaaccctcccatggcacacttttttcccaattttaatgataaagtttgccctaaggatttgccggtattaagtcactgggttcaacatgcattatacgtgagcgacgcatcggagcatctattctgcgcttgcatatccatgacagtgtcgtgaatgggtgtgatggatcaatatagctagatgacacccgtaacttcactggcgagaagactgc

SEQ ID NO: 36864 - DNA, 410 bp, Glycine max
  unsure (1)..(410): unsure at all n locations
aaaaaaccacagttttgaaacacacacagagaaacagagagattcttccattactacaaaatagaaaaataaaacttcaattgcaccttttggtgtctttttcaattctcatcccaattggtgttcatttccccaattttgaccctttgtgatccttttctcaaatctcacactttgtttggaatctgggaaaaatggggttgttttctgggatatttctggggatggtactgggcatagcattgatggctgcgtggcaacgcatgatgacgtaccgtagcgccaagagaattgcaaaggcagttgacattaaactccttgggtcccttaacagagatgatttaaagaaaatctgtggggataattntcctgaatggatatcttttgccatatatgagcaggtgaaatgg

SEQ ID NO: 36865 - DNA, 399 bp, Glycine max
aaaacctattcttcttactctcttacgtttattctttggtggctaggatggcattggatatgaatgatggtggtcccaagaccaggattggagaaggaaattttgccattccaggagcaactttcggttgggtaaagaaccttgagccttttaatcggcttccttcttcctccttctctttttaacaccaccgttattaatctcaatttcaacaacctcgactgttccgaaatcaccggcttcactgtctccaagttcaaacaagtcatcaaccttctcaaccgcaccggtcacgcccgcttccgccgctctccaccccaagcccaagcccaagcccaagcccaagcccaagcccaagcccaaactaatcctcaaccacaacctcagatccaacaacaa

SEQ ID NO: 36866 - DNA, 344 bp, Glycine max
  unsure (1)..(344): unsure at all n locations
gcatgcacgcctactttagatgataatttggctgaatgtcaatactttatcntttaacgaaatataggacgctataaatgtggtatatacgatattggaatcaacgagttaatactataaagggctattctgtaaccacaggaaatgagatcggaattcctaggcgaattccaagtccacattttcaagtaataaggaggccaacatgtacatatatgaaatggaattatgtgttctgttattaggcctatcctgtaactaatggaaatgatatctgtaatcctcagagaattccaattactcattttcaagacataaggaagccaaaatgttcatatattaat

SEQ ID NO: 36867 - DNA, 193 bp, Glycine max
ggtgaagatagctcttggtaccttggatgactcttttaacggtggctctcttaagggttatttcgcaaaggtccacgccactctgaatttcgtggtcgctggtgttggatcaaccatcggttaccacgagcctaccaaagatgccgccttggatccaacggggctggtggcaatagctgtggcacattccttt

SEQ ID NO: 36868 - DNA, 386 bp, Glycine max
  unsure (1)..(386): unsure at all n locations
ctcgcaagccaaaaggaaggatcccaagccaaggaaaagaaggaagggaaaggaccaggtttgtccgttggaaccgaccaattcccccagaggacagccatttggaacggcggtccaaagccaaaacaacggcaaggactaccagaacccggtcccggtcccgttggttgacccgacggagttaacttaatggtcgtttaacaaaacagggttagcaaagtttgtggccacttttctgtttctctacatcactgtcttaaccgttatgggagtcgccggtgctaagtctaagtgtagtaccgttgggattcaaggaatcgcttgngccttcggtggcatgatcttcgccctcgtttactgcaccgctggcatctcanggggacaca

SEQ ID NO: 36869 - DNA, 278 bp, Glycine max
cgtaaaggttatggaagtgcagctggattgctggacattcggaatttgcttgcatgagctattatatggtaaaaccccattcaaagggtcagggaaccgtgctacgcttttcaatgtacttggtcagcaactcacgtttcccgaatcaccggcaaccagttatgccagcagggatctgatccgtggcttgcttgtgaaggagccacagcatcgtcttggggttaaaaggggagcaaccgagatcaagcagcatccgttctttgaaggtgtgaactggg

SEQ ID NO: 36870 - DNA, 152 bp, Glycine max
tcggtgaattccaattgcacattttcaagaaattaggatgcaaaaatgtggatgtgtgaattggaattatttggtttcgtaatagggctatactggagcccaatgaaatgagatcgggattcctcggggaattccaatttcacattttcaag

SEQ ID NO: 36871 - DNA, 297 bp, Glycine max
  unsure (1)..(297): unsure at all n locations
cggctcgagctcgagccgtggcttttggagaatgacaggtatgtgctggctatagcgattntgtctagtttgtacactggagcccaagcgttccgtcaaattcaggaactctccactgcaaaacaattgcttcagccaagaatggcagctatgattgacttttttggagatcagatcattgcatatcttttgatatcatcagcatcttcagcaattccaatgacaaatagaatgagagaaggggcagacaatatattcacagactcttcagctgcagccattagcatgtcaattttt

SEQ ID NO: 36872 - DNA, 409 bp, Glycine max
ctccacctaatgagcatgtacacccttcctactactaccacgcaccaccaccaccatccccatctccaccacctccttattattataaatcccctccaccaccatccccttctcctactcccccctactactatcactctccaccaccaccatctccttctcctcctactccctactactaccactctccaccaccaccatccacatcaccgacgtctccatattattacaaatcccctacacctccatctccacctcctgctcccaagtacatttacaaatcacctccacctccggtttacatctatgcttccccacctccacctatctacaagtaagctcaaattatgaaagcaccattcatgatgaatcatgttctagttttcatcgaggaataaaggcaagctct

SEQ ID NO: 36873 - DNA, 379 bp, Glycine max
gcatgcacacgtacgtaagctggctctaggtttgaagcggcccctttggtttaagtgaaggactgaaagggtacagtggccaccaggaacttggaaaagatggcatccattgatgcacagcttaagcaattggctcctgccaaagtgagtgaagatgacaaactgattgagtatgatgctcttctgctggatcggttccttgatatccttcaagatttacatggggaggatctgaaggaaacagttcaagaagtgtatgaactttcagctgagtatgaaggaaagcatgaccctaagaaactggaagaacttggaaatttgataaccagtttggatgctggggactctattcttgttgccaagtccttttcccacatgc

SEQ ID NO: 36874 - DNA, 400 bp, Glycine max
  unsure (1)..(400): unsure at all n locations
caaggatgaagttttgctaagaattgactggagagaggcaggacctgaacctgacaacagggttgagtattaactttggaccaaccgccatgattaatgttgaacttggttccaataaccgaataatttcggggaaaaatttaaggggtaatctcaaaatcttgaaaggggcgggtataccttgttcaattcaaaactacataactngggtttggcccacaccctttcattctagcagtcagtgcaagtctcaatgtataaaccatgggagatattgtgctccagatccggagaaggattttggagagggatatgaagggaaggatgtggtgtatgaaaatttgaggcagctttgtgttcatagagttgccaatgagagcaaccgttcttgggtttggtg

SEQ ID NO: 36875 - DNA, 447 bp, Glycine max
  unsure (1)..(447): unsure at all n locations
gctgtctgctgttagatctgtacccgcctagccattgatttggaaaagtccaacttcaaggatgagtaagcttcagagtgatgctctaagagaagctatctcaggaatcatggctgattccaaggaaaagaacaggaaatttgtggagaccattgaactccaaattgggttgaaaaattatgatccccagaaggacaagcgtttcagtggctctgttaagaagcctcagtctcaacacagaagcagaaggaggagaagcagaaagaagagacgaagcaatggcgccgaagaagcccaaaaccacgtcgaggaaaccctgatttggtcaagggaattggcaanatattcgaggtcgcagatgtaccacangaggggcatctgggccatcaaggccaaaaccggcgggttttgcccctccacgatcccaagcccaaacccgaggccccg

SEQ ID NO: 36876 - DNA, 345 bp, Glycine max
ataagcacaagcacaagcacaagcacttctctaattcccttgcacactctattacagatttcacaagtgcttacacttcaaatggctttggaagctcttcaatcacccaccacagccactccatcgtttagtccctttgaagaaaccagtctcagttacttagagacaccgtggacgaaaggaaagcgttctaagcgtagccgcacggagcaccaactgcaacacctttaatgcaccgaggaagagcacctctctctgtgtcaataacgctctctcgggggggcccccactgtgtctacagcgacaaacgctgtgtctgagaacacatttgtgcccctatatgcc

SEQ ID NO: 36877 - DNA, 229 bp, Glycine max
ccaatatatttcattctctctgtggactgccagacctctaccttcaacatgcacttctacgtcaagacccttaccggcaagaccatcacccttgaggtgcaaagctctgacaccatcgacagcttcaaggccaagatccatgacaaggaaggaatcccctcggaccagcaacgtctcatttacgccggcatgcaacttgcggacagacgtacccttgctgactacaaca

SEQ ID NO: 36878 - DNA, 255 bp, Glycine max
ttgtatattagatcacttgcttggacttgtcatgttcttcactactagaattggggctatgaaggtttttttaacagtggaatcaaatagaagtaatggccagttaactgcctgtgaagtcttgctctttcatcatgaagaaatgggcattccatgggagattgcaaaacttggagtaaggaaaggaatgtggggaactgttcagaagattgaacccggtttgcgagcttatcaagaagcaagagcttctggtgc

SEQ ID NO: 36879 - DNA, 416 bp, Glycine max
gtggatccaccgggcggcaggaattcggcacgagggttgttcaagacacgataagaggaggagtaaccgacgtttttctaactcttgggggggtcctttttcttcatgctcttttcatagaaaaagggcgtctagagacaacttgcgctgtcttgaggaacttcgtatataatgacgagttaaagctcaaggatgatattcttccagttccaaccaatcatgtccctcatcacactgtggagctcacaaatgaagctatcgactttatacgtgcgatctacctattgcatgacaatgataatgatggatctttacaaccttctccgtttgatgatatctatgtaactgcaccaaaaagtgggccttgatgacaactctggatccttcatattgtttccctaacttgatttgcattg

SEQ ID NO: 36880 - DNA, 365 bp, Glycine max
ctcttgcgtgtttgggctttagcgcagcttctcctagactcaaggaagatcggttcggaaaaggttcacatcactattgtggttattggccatgtcgactctgtgaagtccactaccactgtccacctgatctacaagcttgtaggcattgactagcgtgtgatcgagagatatgagaaggatgctcctgagatgaacaagaggtcttccaagtatgcctgggtgctagatatgcttaaggctcatcgtgaaagatgaatcacacttgatatcgccttgcaggaagtttgaaaccaccatgtactattgcacagtcattgatgcccctggtcacaaggatctcatcaagtacatgatcactggga

SEQ ID NO: 36881 - DNA, 404 bp, Glycine max
gattgttgttatataccaaaactccaatattgagattcatacttttaaccagagccagtatcctcgattggttgctgaggactttttgccattgccttccaaagggcatactgacaaggatggatggtaccctcctggccatggagatgtctttccatcattattgaacagtggcaaacttgatgcactattgtcacagggtaaagagtatgtatttgttgccaattcagataacttgggagctatagttgacttgagtatccttatttaagtttcattggttctttctgtattgtttgtaatgagctttggccacattacttattattacataaaatcagtgtctttctttagtgccatcagtgtacttgactcattgatgtagaaatcttaaatcatttgat

SEQ ID NO: 36882 - DNA, 338 bp, Glycine max
gcaggcgtacgtaagctgtggattcggctcgagcttcagatcatactcacacaggttcgctcttcaaatcaatggcttctcagaaatgggtgtggctcataacattcccgatgcggaggagggaaccttggacattggaaaggaatacagaactgggtctggagacgccgggccatcggtcattcttgataaaggtaagggacctaagttgcaagagattggaaagagacgccagtgagcatgaactacgccgtgctcacaagtgacggaggctgatggcgaaaaggcatgcttgcatgactatgagggtacatagggcgaatgaccatggatttact

SEQ ID NO: 36883 - DNA, 345 bp, Glycine max
ggaaatttctgttgtatgctgctattaaacatgcagggactccaacaactgcgttcaacaggctagttcagtgacattagcatttacattgagggtcaaggtctcattgctcgggctcataaagtcattctcgggatatatagcgtcctattaacaaagatgttcacaaatggaatgtgtgagagcaactcacctgaggtttgtttaaaggatgtgtcttcagcagcattgaatgctatgcttgaattcatgtactgtatggatctcaagtattgagcataatgatgacttgggaccattgtactccaacttcctctgttatctgacatattcttaatctttttt

SEQ ID NO: 36884 - DNA, 415 bp, Glycine max
ggagataaaaaagtggaggaattgttgttgctggatgtgatgccacttagtcttggatttgagggtgctggtggtgttatgtcagtgttgatccccaagaacaccatgatccccaccaagaaggagaggatttgttctaccttctatgacaatcagaaatcttttaatgtcaaagtgttcgagggagaacgagttaagacaaaggataacttctttctcggcaagtttgtcctcaaagggttcgatccattaccaaagggagtgccacaaatcaacgttatctttgatgtggatgctgatggcattgtggaagtcaccgcagaagataaagccacaagaatagaaaagaagatcacaatcaacaacaagcacggaaggctgaacccggaagagataagaagaatggtgagagact

SEQ ID NO: 36885 - DNA, 363 bp, Glycine max
ggaatattttgcaatcttgattgaatatgagagtggtgatggtgacctagacaaagttgaactcagggaagcacatgcttgcgtccaatggtactgcatgcagcgatcatggggtgcagtttggaaacttgacaaagggtcagcacttgtggcaccattctccatcaagctaaccactctcaaatctggcaagaccattgtggctaacaatgtgatccctgctgggtggattattgatcagacttatagatcaattgtcaatttttaattccaataatcgaagttgtccatttgtttggatctatcatcagcttgtggttgtcctacttaatataatatatgaataagaagataattaatctt

SEQ ID NO: 36886 - DNA, 387 bp, Glycine max
atgattttggttatttgcatagttgttccctccctcagaatttgcgtagcaaatgattctataaacgtgctccagtctatgagtgatggggagagattggtgtcaaaaggtggaaattttgaacttgggtttttcagcccaggtagttcccagaaacgttatgtgggaatttggtacaagaatatcccaactcagacagtgggttgggttgctaatggggcaaaccccatcaatggttccctaagcatcttaacaactaacaccacaagcaatcttgttctcacacaaaatggttctattgggtggtacaccaacaactctcacaaacaagcacagaatccggtggtggagctcttggacagtggcaatcttgtcataagaaatgat

SEQ ID NO: 36887 - DNA, 394 bp, Glycine max
gccaaatattaatgcagctagctagcatagtaattcacgagcatgaagaaggtaagtaatttgttgcatacgttgaaaccagacatcttaatggtgtttgtgcagattgcatttgctgctgtgaatgtgatgtacaagctggccataaatgatggaatgagcatgagggtagcttctgcatatcgccttgcttttgcttcggctttcactgtccctgtggctctcgtctttgataggaagaagagaccaaagattacttggagggtgcttttattggcatttctgtgtggattggtttggggaagtttatttagtaacctttacctcgaagccatggcttttacgtcagcaacgtttatgttggccatggtcaaccttatccctggcattacct

SEQ ID NO: 36888 - DNA, 383 bp, Glycine max
ctcaagccgtttccatgctacttaagataggccaatggggttcaatggttggtagccacactgctgattgccctgttgggtggtgcacaagctggtgtggtatggtacatcgacttaaggcaacctaacttgggtcgtgcttcaagtacctggtcaaacccttcaacaaccgattgaaaaattgtgtgcaatttattcgccaagccaatttcccttgcctctgcagatacaggtctattcttcctttaattggaatataacccgaaaaggctttggccttgcctggtaaatgtggtctccaatcccctgctaaatgttgaggtaatcatctttagttgtaatacagcttcaacatacaggctctttttggatataagcttctc

SEQ ID NO: 36889 - DNA, 363 bp, Glycine max
gacttgctagcatgcatgcacgcctactctagatgatcctctcggtgaagatcaattacacattttcaagatgtaaagatgcttaaatgctgatatatgaattgggattatatgtatagttattaggcctatcctgaagcctaatgtaatgagatcggtatttctcatggaatttcaatagcacattttcaagagatactgaggcaaaaatgttcatatatgaactggaatgatgtgatgtcttattacgcctatgctgatgccaaaggaaatgagatcggaattcatcggagaatacgaattgcacatttttatgatatcaggaagctcatatgtacagatctgacttggaatgatgtgatt

SEQ ID NO: 36890 - DNA, 317 bp, Glycine max
gctatggataacgtggtgaggactcatccaaagttggactggttctgtagtgaaagcaccgctgacactataatgaagcatggttcaaattcgttcatggcaaatattgaggattcacgagcaatcatggaatccaaggacggcaatgactgcatggtggcaatcaacttgaccattgattggaagcatgatctgccaagggcagcaaatcgaatgacacagtgcatgggtagggcattcgcattacaagatgagccataagttcataaggtatggctgacttttgatgatgcaccatgactagcaatggctagagc

SEQ ID NO: 36891 - DNA, 304 bp, Glycine max
gtcgagccgattacgttagagagtggacggcattggattcacagagtacaggtcgatatacgagtgcctctggtggggaggtggttagaactgcatagaggatgcatactaggttgattctgaataaggaatctgctgctaggtcacagtcatgatgacaggcatacgcacatgaactggagattaaagtgtcacgattagaagatgcgaatgtaaggattaaaagactaaatgaaatggagagcgcattgacatctgtgccaacagctgaacctagaccgaagctacagcttatcagaactag

SEQ ID NO: 36892 - DNA, 322 bp, Glycine max
gcgcaaccctgcacctgcacccgtaccgcagtgacaacatcggcgtgcataaactctaaaccctactatgtccgaagacaagtacgacgtgctcctgtattacaagtacgttgaaattcccaacctaaacgacctcctcaccttctaccactccaactgctcctgcctgagacttctcggacgtgttcgcctttcttctcacgacgtcaatgtcaccgttggcggcaacttatcctctctcaagaatgacatcgaagccctcaaagcctacagaaccttgtttcaccacactgatttcaagctcgacactagtcatcatcca

SEQ ID NO: 36893 - DNA, 358 bp, Glycine max
ctcgagccgctcgagccgctcgagccgctcgagccgctcgagccgctcttcttcatattcttcttcttcttcttgttcttgttctatctgtgacgagcatcatggcctcgagagcagtgctattgttggctatgtgtgtgcttccggccatggttgtggccattcgcccagcaaagaaccctttttgcgtgaagggtcgcgtctactgtgacccttgccgtgctggttttgagacctcagcaaccacctacattgccggtgctgagattatgttgcaatgcaagagcagggttagcaacgaggttgtgtacaccaagaaagggtacactgactcaactggagcatacacaatgtacgt

SEQ ID NO: 36894 - DNA, 294 bp, Glycine max
cggatgaaaacatgcagccggattcgttcggtcgtatagtgtgggctttcaggtggtgaatggattccattggtacgagaacggacttgacacttgtgacatttggggtagcactttgcatgatgtgaaccatgcattgcttgctgggtcgtatggagtctaaaatggcgtgccatattgtgtgataacttgttcatggagagatagatgatgtgagaatggctactatagagtggacttgacgaagaacatgagtgatgtagcatcttgtgcgtcttatgcagttgtgagcat

SEQ ID NO: 36895 - DNA, 354 bp, Glycine max
aaactcaattataaaaacaatgcaaaaaagaacaaaaccgaatattatagaaaaccaaaaaaatggaggacgatgcctacaaccaacgacatcaattaataaaggtctaccaacaacaactgtcctcgtgtgccaccctatcaagttcggtcgggtccttgtagggacctattttaagcacatcatctgctccatcttaattcggcatctcaatacctacagatttcgacagatacatacagagcgatgggaatatgctaatgatgagtttctgccagatcctaaacatgttattccgaatatacatagcaggaaacctatccacagtcataggcattctgcaagttcacttgt

SEQ ID NO: 36896 - DNA, 258 bp, Glycine max
gtttgttaatgtttcaggttatgaagctgaaatgaattccatgttctctcagattgagtcccctaacagatcacttcatgatcatataattgaagctcttggcaagctcactgttgaacaaggaattcctcctacatcagattcttgggttttgagcaccattttggaaccggcactgctatctcaggctggttctgatttgaataagtccgtttttaaggagccattttggaaggaattaagattggtgccattgat

SEQ ID NO: 36897 - DNA, 338 bp, Glycine max
aggacgaagatttattttctaccaacctagaagcaaatatgggcatatatgaattggaatttttagatcacttattaagcctatactggaaaccaaaggaaatgagatcgggacttcctcgggaattccaaatgccacattttcaagaaatacgggaggcaaaaatgttcatctatgaataggaattatttgctctcttattaggcctatcctgaagccaaaggaaatgagatcggaattcctcggcgaattccaattccacattttcaagacataacgaggcataaatgttcatatatgaatcggaattatgtggtgtcttattaggcctatcctga

SEQ ID NO: 36898 - DNA, 270 bp, Glycine max
actaaagctgataagaaacatttatcaagtatgggtttggacctttcgcaagggaaaatcagaaacaacttgtaggccggagtcattgagcctgcaatgagcaaagtaaaaatcattcagtgcgcaactgaagctgctattaccatcattcgaattgataacatgatcaagctcgacacggatgtcagtgcacatgctcatagctgaacaacggtttataccgatgattactattatcggatccttcgaaactttcaagtttctatgatc

SEQ ID NO: 36899 - DNA, 370 bp, Glycine max
gcctgcatgtctactctggaggatccccttggggaattccattactttattctcaagaaataaggaggcaaaggtgggcttatatgaattggaagtatgtgttttcttattaggcctatcctgaagccaaaggaaatgagatcggaattcctcggggaattccaattccacattttcaagaaataaggaggcaaaaatgttcatatatgaattgcaattatttgttctcttattaggcctatcctgaagccaaaggaaatgagatcggaattcctcagggaattccaattccacattttcaagaaataatgaagcaaaaatggtcatatatgaattggaattaattgtattcttattaggcctatcctta

SEQ ID NO: 36900 - DNA, 371 bp, Glycine max
gcccgcatacctactctggaagatcccctcgagtaattccaatacctatattgtcacgacaataatgatgctaaagtgggcatatatgaatcggaagcatgtgttatcttattatgcctatcctgaaaccaaaggaaatgagatcggaattcctcgcagaattccaattccacattttcaagaaatcatgctgcaaacatgtccatatctcactcgcaattatttgtcatctcattaggcctatcctgaagccaaatgaaatcagatcagaattcctcagcgaattccacttacacattctcaagaaataatgacgcaaaaatgaccatatatgaattggaatcatacgttttcttattatggctatcctg

SEQ ID NO: 36901 - DNA, 402 bp, Glycine max
ggttatttaacacaaagatcctggtataatgttttctgatgctcttggaataattagtttttattacaatttggcttgcacttaattcctcctagatcttgttttattgaccagttgaaaatgtgttccacttcagtgtcctttaaatgcaattttattactgttataaaacatgtctgcaaacttcctgatcccaattgacattttggcagaattagatttgatattgtcatattgataatgagatggaagaggagcaaaattgttggacatgattcccaccttatggcactgattgtttttctcttcttttttctttctcagggtatttgaaaagtcactgcagtatgtgaagcgcttcagccgctataaaaatcccgatgctgttagacaagttcgaga

SEQ ID NO: 36902 - DNA, 328 bp, Glycine max
gaagagggctcgcgggttacttgagcggcaagaaagaggaaactaaagagatggctacggagaccgccgaggcgacagctaataaggcaggtgagatgaaagaggcaacaaagaacaagactgcggagaccgcagaggcagccaataataaggctggccagatcaaggacagagccgctgagacggccgacgccgcaagtgcaatgaccggagagaccgcggatgtggttcagactcatatgcatgatagcattatgattgccaaagataaagaagatgctcttgctactaagaatcttgttcctggtgaagctgcttacaacgagaa

SEQ ID NO: 36903 - DNA, 300 bp, Glycine max
acaaacatttatttcctacatagcctcccaaaaatgaagagcgccatcttgtttgctctcgtatctcttttgtgccttcaccatctcatacctaccttcagccatcgctgatttcgtgctcgattatgaatgtaaccctcttgaaaatggtggcacatattatatcttgtcagacataacatcatttggtggaataagagcagccccaacgggaaatgaaagatgccctcttactgtggtgcaatctcgcaatgagctcgacaaagggattggaacaatcatcttgtccacatatcgaat

SEQ ID NO: 36904 - DNA, 352 bp, Glycine max
gaaagctgttaacctatttcccaacaaaacattggctaagcagttgtttctagttgatgcatttaggaaaaatccagtttccgatttgcttgattgaggcatattcagtattctgcaagggttgtcaatactacatttttacatgctactgttattattatgtagatatatgagttatagttctttgaggtcttattgagtctatcctgaagccatgcgaaatgagatcggaattcctcgcggaattccaatatcacattttcaagaaataatgtggctaagatgttcatatatgaattggaattatttgttttcttattaggcctatcctgaagccaaaggatatgagatc

SEQ ID NO: 36905 - DNA, 338 bp, Glycine max
cttttactttgtttaaaagtaaaagagcatataataggtagggccatcagactacggcggtccactggctgatgcttcgctgtcaggtccagagagcacgctcagctaaacgagtgccacatccaggggctcaatgccctcacaccggatgaccgcatagagacagacggagggctccttctgacagggcaccctaagcccacgccattgcagcgtgccagcgtcgccctctctcgctgcaccctcaatcgggacgcccttcatagaccttactacaacaactggccccaggcaatctacatgctacacggtaagggaattagtggcgcgatataccc

SEQ ID NO: 36906 - DNA, 365 bp, Glycine max
  unsure (1)..(365): unsure at all n locations
aaaaaccgccacacctttccgccatggcgctgccatggccggtttttaacaacactgattattatcattggtacctccaatgttgtaatttagcaactcaccactaagctgcattccaatttttctcttaaacaattgggtaaacttgactattttcttggtattgaaatcaaattggtggctgatgggactattctactgactcaaagcaaatatatcagagatttgctttagaaaaccaaaattgtagaagcacaacctatttctttccctatgactgctaattacaagttgaccaaagttggctcgaatntattcagtgattcatctctctataggtctgttgttggtgctcttcaatacac

SEQ ID NO: 36907 - DNA, 298 bp, Glycine max
gcgagaacacttttgattttagatcctagcacgcagagcttgggtcggttttctattgaccttgttggtggatgaattttagtggacagaactggagattggatcacacttatacaaaattctccagttagtaacttgttgatgagttgctgcttggaagaaaggctgcttaatggctaagattgcgacgtctgagaatgcaacaagcacaaggagtgattgggcctcattggtacaagggactctaacaaacagcaacaatgcatagcattttgatgcatgtcagtggactaaatcg

SEQ ID NO: 36908 - DNA, 408 bp, Glycine max
tgcgatctgttgagtactatcttctttgctctctttctagggtgtgccttcaccatctcatacctgccttcagccaccgctcagttcgagctcgacactgatgatgatcctattcaaaacggtggctcatactatctgttgccagttctgagaggaaagggcggaggaatagaagtcgattcaactgggaacgaaatgtgccctatcactgctgagcaatcacccactgagctcgatcaggggattggactaggctctacatgtacattacatgccctttttatcgtcgtaggctatactctgagcattaagtccgagtcattagcagctataacgctgagtgcccgcatgcgctactgagtgtgctattgtggacagagagggtctacaagctgataaacttgctgg

SEQ ID NO: 36909 - DNA, 438 bp, Glycine max
ccgaacggctttatccttctgctcctggcaggactgacccgggctggaactctcaccgggcaggatgtggctacttattacgcctatactgaaacccaagggcatgagatcgtaattcctccggtaattcctatttcacattttcaagaaataaggaggcaaaaatgttcatatatgaattggaattatttgttttcttattaggcctatcctgaagccaaaggaaatgagatcggaattactcggggaattccaatttcacattttcaagaaataaggaggcaaaaatgttcatatatgaattggaattatttgttctcttattaggcctatcctgaagccaaaggaaatgaaaacggaattcctaggggaattccaattccacattttcaagaaataaagaagcttaaatgatcgtatatgaaatggcattatttt

SEQ ID NO: 36910 - DNA, 409 bp, Glycine max
tcgagacttgctagcatgcatgcacgcctactctagatgatcctctcggtgaagtccaattcctcattttcaagaaatactgaggcaaaaatgtgcatatatgaatcggaattatttggtgtcttattaggcctatcctgaagccaaaggaaatgagatcggaattcctcggtgaattccaattgcacattttcaagaaataaggatgcaaaaatgctcatatatgaattggaattatttgtggtactcattaggcctatactgaagccaaaggagatgagatcggaattcctcggagaattccaattccacattttcaagaaataaggaagcgaagatgttcatatatgaattgcaattatttgttttcttattaggcctatcctgaagccaaaggaaatgagatcgg

SEQ ID NO: 36911 - DNA, 242 bp, Glycine max
cactatcctagtataccttaataaataatttaagatactatgatgagagcacggttcccattactgttgctgggacttgttttcctggcttcagtttctgtctcatttggcatcgcttactgggaaaaagagaaccgctgacacagcaagtgtctccagagccgcaatagcgacagagactcatgcaggaaccaagcatgccacgctcgttgcaacctacctaacgtggagaaagaagaatg

SEQ ID NO: 36912 - DNA, 385 bp, Glycine max
tcggggaattccaattccatattttcaagaaataaggaggcaaaaatgtgcatataatgaattggaattatctgctttcttattaggcctatcctgaatccaaaggaaatgagatcggaattcctcggcgaatgccaactccacatgttcaagatacatagtctcaccattcgtcatatatgtgatgtctttattcgttcctgtagaagccctatgctccatcctgaacattttccacatgactttcaacattcttgtgagtgtcgcactgtacaatgtatgttactcaatctactacttcaatgcaatgcttgatctttaccaatgcagtagtattatcttatctctggttttgacttattgtgtaattctcttgatgcaagtt

SEQ ID NO: 36913 - DNA, 317 bp, Glycine max
cttgtactctttttatttactaaaacagcatatgatattcaggtggagttcttaccaagtccattttggatgatggtcatgatttctcttgctgaaaaaggtattaaaaatgagtccacacaagaagactctcttaacaagagccctttgttcctcaaaatgaaccccccttacaagaaaaaccccgatctcatacacaattacgcacacacttttgaataactcgatgctattcaaaacacttaggaaatctctaatgacccaaatccctagttgacttctgacacttatcacaaagctcatactaaatatttggc

SEQ ID NO: 36914 - DNA, 388 bp, Glycine max
caagaaataacgaagcacaaggctgcatatataaattggaatgatttgcacacttattaagcctatccttaagccaaaggaaatgagatcggaattcctctgggaattccaattccacattttcaagaaataaggaggccaaaatgttcatatatgaattggaactatttgttttcttattaagcctatcctgaaaccaaaggaaatgagatcggaattcctccgggaattccaattccacattttcaagaaataaggaggcaaaaatgttcatatatgaattggaattatttggtatcttattaagcctatccttaaaccacaagaaattagatccgaaatcctctggtgtacccagcttcaatttcctatttttgagtccatttaa

SEQ ID NO: 36915 - DNA, 264 bp, Glycine max
taggaggcaaaaatgtggataggtgaattggaataatgtgatttcttattaggcctatcctgaatccaaaggaaatgagaacggaattcctcggggaattccaattccacatgttcaagaaataatgaggcaaaaatggtcatatatgaattggaagtagttgttttcttattaggcctatacaggagccaaaggaaattggatcggaattcctcggggaattccaatttcacattgtcaagaaataaggaggcaaaaatgttc

SEQ ID NO: 36916 - DNA, 287 bp, Glycine max
ctgctgcactttggcttctgctgcgctttcaggtccagagggcagccgtagccatacgagtgccacatccacacactcaatgcactcgacccagatcaccgtatcgagtcagaaggagggctcatagatacatggaaccctaacagcaagccattccaatgtgccggggttgccctctgtcgctgagaccctcaacctgtacgaccttcggagaccttcctacgccaacagtgcccaggaaatctacatccaacaacgtgacggtatttttcgcatgatatacccgg

SEQ ID NO: 36917 - DNA, 352 bp, Glycine max
cgaacatttttgctaatgccaaggctggcatggacaagaccaaggccactgtccaagagactgcagaacgagtgacagcgcgtgatccgttgcaaaaggagttggcaacccaaaagacagaggctaagatgaaccaggcggaactggacaagcaggcggctcgtcagtataacacggcggccatacagagcgagaccacggatgtgcacatgggacatgcccaccacaccaccggaaccgggactggaaccgtcacgtattgcaccatcggagaatatggtcagcgcatagtggccgatcagacgtcggcaatgcctggccatggaatcgagcagaccatgggccatgtcac

SEQ ID NO: 36918 - DNA, 264 bp, Glycine max
aaaaaaaaattcaaaaaaaaaaaaaaaaaaaaaggggaacgggtaaaattaacatcaaagccaaaactaataaaaacagcatagaaactttaaagatccatattgaaccatagccctagccaagtttaccacaacagaaacaggtgtctacactgctccaactatggaagagtgagcatggacgagtctaccatagccaccaggaagacgcaaataggcattggatgatctagaataactcgaacgatatcagggacatgaatg

SEQ ID NO: 36919 - DNA, 344 bp, Glycine max
atgcatggttggcacgtactcatatatatgctaaagtaatttacacgctcaagctaaattatgtgaggagtgtattaaacgaaaaaaaaaaagacataaattagagacatcttcagcaaagtgttacggtctaccagaaaagaaattgactttgatttcaagtcttccagactaagaagatcttgagtctaaatacttctaagaggtatcacgttgttgttttattgatgtatcatgtagtttgtgttttctggcctgctgctttaattgattatcttatatcatggctgatgtggctggctgacgggaatattaggctactagatacatgcttaatggcagag

SEQ ID NO: 36920 - DNA, 378 bp, Glycine max
tcgagcccagatagtttactcaccatttccgtatgttacttcacggttagtgggtagtggttacatgatatcagcacactttcactcactgtgctttcccgtgacacgcatctatacttgtccagaagaagtaagatccatgaactaacattcccacacgctcgcttcaccatatttgccacccttttaacctcacttcttaaggttattatgctcccttttccttgcttgggaattgggtttggatcggattttcttggctgtaaaaggaaacatagaaagaactaagatgggaagaggtagggtacagctgaagaggatagagaacaagatcaatcgccaagtaactttctgcaaaaggagaggtgggttgctcaa

SEQ ID NO: 36921 - DNA, 361 bp, Glycine max
ctcatcagtattgtgggcaatgcccatgtcgactctgagagatgcactaccactggtcacctgcttcacaagcttgaatgcatcgacaatcgtgtcattgaaaggtttgagaaggtagttgatgagatgaacaagaggtctctcaagtttgcctgcgtgctggactaacttagcgctgagcgtgaaagaggaattaccattgatattgctgtgtggaagatcgtaaccacaaagtcttaatgcacattcattgatgcgtctgtacatatggatttgattaataatatgattactgggacataccaatctgactgcgctgatcttatcattggttcgaccactagtcgttttgaagctggta

SEQ ID NO: 36922 - DNA, 410 bp, Glycine max
tttttcaagatattgagaaagatgaatttggcaaagttgcgagttttaagttgcataatcttgttcatgatcttgcacgatctgttacagaagatgtttgttgtgtcacagaaggcaatgatggatctacttggactgaaagaattcaccatctctcagatcataggctgaggcccgattcaatccagttgcatcaagtgaaatctttgaggacctatttattgccacatcagcgtggtggtgcactttctcctgatgtattgaaatgttattctttgcggatgcttcacttaggagaaatggaagaattgccatcttcaattggtgatttaaaacatctaaggtacttgaatctttctgggggcgagtttgaaactctttcagaatcattatgtaaattatggaatttg

SEQ ID NO: 36923 - DNA, 415 bp, Glycine max
cttgatacattcgttgctggatggggtgattaagcatctacctgatggagtaccagaaaaggaagaaatcaggagaatgagaacagtggcaaatactgtaggtgttgttaatgatcatgattcagtttgggtaagatcaattttggaggaggttggtggtgcaagtgatggatcatggggcttgttaccatacttatttgccacattcatgacatctaatatttggtccaccacagcatttaatgttgacacagagggttttagtaacaatatccattgcttggcaaggtgcatttctgcagtgattgccggaagtgagtttgttagattggaacgggaacatcagcatcgacagtctttaacaaatggacatgctagtgagggaatggatcccgaattatcaagtcatatgtca

SEQ ID NO: 36924 - DNA, 408 bp, Glycine max
ctgaagatgatccatccacttttttctctcttttcgggcggcgagctgctggttttcttttaccttgctatatcatggcttgggcaatcagtattttgcaacgccggcgacaaagacaagaagcggcagcactagcggcaacccaagttgcttttgttctacaaaccgggcagcgtaggggtctgcagtttgcaataggaccaggaccaccaacaatgaatacacaccaaccggaacaagtgtaatttttgtatgccaccagtgtatgtaacaaggcttgttggaatgccatgcatttttttactcatgatttttctgagctctaatttacatacatagcttgagagactttgagatggtacttaatattctagggtccttaaaccctcaaaaagaaccgctcatttt

SEQ ID NO: 36925 - DNA, 253 bp, Glycine max
ggacccatctacacgaccgctatcatacaagtagagtgaggcgacacacctagaggacaaagccaagtttacaccaaccacagtctacacgtacgggtcacctggaccacgatacaagtggcctactcctccacacaccatcctatatagtacccatcttcaccacccgcagtgtacaagtgcacatctcctactgctccctacaagcaccaatatccaccacctgcaccctacaagtaccaatatcctccac

SEQ ID NO: 36926 - DNA, 337 bp, Glycine max
ggataatatccgtggaaatgctgtcgcatctggacctgttatgactgtccttatggagggtgtcatgaattcttcagaagtgagcgacgttgtgaatgcagcaacgtctcaatcacttgttggtcgcatgggagaagctaaacagatatcagcattagttgcttttctttgccttccggttgcatcatacatcactggacaagttatatgtgttgatgggggtctcacaacttaattagtattctgttaattactatcatttggctgctgaattaaattctaatgtatgcagttggtgtttcctgcaaccccattcatgctttgcatatcattgggc

SEQ ID NO: 36927 - DNA, 389 bp, Glycine max
attcatttacatcgtttcatcattttcataattgaatagtgtgcttaatatgatttgatgacctgaccattccgtctcttaaaattgtatgaatagtgattccttggctgcgattggaggcatggatcaaagactggtcatctgggatatacaacatttcttatctcgagccacctgtgaccatgagggtggagtgacatgtttgacatgggttggttcatcgtgtgtggctactggatgcgtggatggaattgtgagattatgggatattcggtctggtgaatgtgtagaaaaattcagggggcactcagatgcccttcaatctctttgtgagtctgctaatggggattatattgtcttgggcttcttggatcatacagcttggggtt

SEQ ID NO: 36928 - DNA, 458 bp, Glycine max
cacacttacccccaactaacaataattccttcacttgcagaacttaggttctctgttgcatcatcatcatcttcattagtgttagccctaaacttcaccttcaaccatgaccacagtgccaccacacagtgtccaagtgcacacaacaacacaccgctacgaagccggcgtcgtcccgccggctcgttttgaggcgccgcgttacgaagccggcatcaaggcgccctcttccatttaccattccgagagaggtccgacgacctctcaggttctcgcagttgtcgccggccttccggtcggcggcatcctcctgctcctggcaggactgaccctggctggaactctcaccgggcttgtggtggcaacaccgctcttcatcatcttcagcccggtgctgattccggccacggtcgcaattggcctggccgtggccgggttcctgacgtcgggagtctttg

SEQ ID NO: 36929 - DNA, 397 bp, Glycine max
  unsure (1)..(397): unsure at all n locations
gaccaacacttccattcttttttttttttttttttttccaacctaggggggccaaccaatccgcccttaatttgggaaggttcggccgggcaacctcttccttcttaaccggggcctccggccggcgcttttcttccaacgtgccgggaacccccgccggggttcccggcttcgcgaggcgtggaaaaaagtgggccccaacaatcgaaccggcgaaaacgccggttggcgtacatgaaagccctgaccacccacttcctcggctcttccttcncaagctcacagtcaacttcgtcttgccctactcttctcaattggccgcaaaagaggttgatatggtcattgtaccagcaacaactgggcagatgggtgttctcccaggacatgtagcaacaat

SEQ ID NO: 36930 - DNA, 437 bp, Glycine max
cagctatgacgtccatgcacgcgtcctagcttgggattccggttcagggtggattcaggaccgatgcttttttcaaaactaatctttccgagggtatgctgttggtgatgttgctactttccctttgaaattatacggtgaattgagaagagttgaacatgttgatcattctcgcaaatcagctgaacaggctgtgaaggccataaaggcagctgaggaaggaagaacagttgaggagtatgattaccttccatacttctattcccgttcatttgatctgtcttggcaattctatggcgacaatgtcggcgacacagtactattcggagacaacaatcctgcgtcgtcaaagcctaagtttgggacatactggattaaagatgggaaagttgttggggtctttctggaaggtggaactcctgaagagaaccaggcta

SEQ ID NO: 36931 - DNA, 419 bp, Glycine max
  unsure (1)..(419): unsure at all n locations
agctatgacgtcgatgcaccgtactagctcgaatttcggtcgagttncacacatttttttctacaagaactcaaattacaaacgtatgtttcaactctttttgcaccaacttataaaatcctcatatctgttcccaaaagcttgttgtgagaatggacttcggtgaaaagagattcccaccttaaccaacaacaaacacagcctgggaaggagcatgctatgaatccagtaccccaattcactagccctgactacaagccttcaaataaacttcaaggaaagatagcattagtgactgggggtgactctgggattggacgagcggtgtgtaacttgtttgccttagaaggtgctaccgtgggcttcacatatgtgaaggggcatgaagacaaggacgcgaaggacacgttggaaatgat

SEQ ID NO: 36932 - DNA, 442 bp, Glycine max
gcacaaagcacgctcatcctagagttacaaaaatggcagcagcctcctccatggctctctcttccccatccttggctggcaaggccgtgaagctgggcccatcagcccgcgaagtcgggagggtcagcatgaggaagaccgtcaccaagcaggcctcctccggaagcccatggtacggcccagaccgcgtcaagtacttgggcccattctctggcgagcccccgtcctacctcactggcgagttcccaggtgactacggctgggacactgctgggctttcggccgacccagaaaccttcgccagaaaccgtgagcctcaagtgatccacttcaggtgggccatgctcggggccttggggctcgtcttccccgaacctgtgtcccgcaaccgggtcaagtttggagaagctgtgggttcaaggcccggtcccagatcttcagc

SEQ ID NO: 36933 - DNA, 381 bp, Glycine max
  unsure (1)..(381): unsure at all n locations
gggatattttgcatacatggcaattgatagtctcccagggaatcaagtntgggaaaggatatcgcttctgatcatcccaccaagtcgacgctataagatattggaaggttatcatgcctcgtttgtggagtcagtaccattcaagaccatagctgtattcacaatattacagtttgtgtatttcctaatctgttttggagtgacatggatacctgtaggaggaatactttttccattaccatttttccttctcataactataagagagcatttgcttccaaagatattcaaacctaatcatcttcaagaactagatgcatctgggtacgaggaaattggtggtgctccacatattacacataatataccaccaagggaaaa

SEQ ID NO: 36934 - DNA, 427 bp, Glycine max
  unsure (1)..(427): unsure at all n locations
aagagctatgacgtcgctgcccgctggattcggtcggatatcgatgggtctccttctttagcgctttagctcgtaccgcgacatggaaggtatcgaggaattagatgtcggaatcggagcgnntcgtcgagaaattatattgcatcaaatatcgatacctctgagattgtcgccatcaagatggaaagcaagaagaccaagcatccgcagctattgtatgaagcaaagttatatagtattcttcaaggagaaagtggtgttccaagtatgaagtggtgtggcacagatggagacaataatgttctagttattgatcttttggggcggagtcttgaggactcttttgtctattgcgggaaaaagttttcattaaaaacggtttttatgttggccgatcagatgctgacaagaatagagtacatgcatt

SEQ ID NO: 36935 - DNA, 385 bp, Glycine max
ctcgcacttctagttttggtgttctgagttcgagcgaggaaggtctatgacctgagaaagtcttgctgctgtggtaactgaaggtgcggaagctcctgcaagtgcggcaacggctactgaggctgcaagatgtacctaaacttgaactacactgagtcaaccactaacgagaccttgttcatgggaatggcacctgttaaggctcaattggagagtgctaagaagggtgagaccattgagaacgacggctgcaaatgtggaccatactgctgctgaacgtctgcacttgcaatggaggtgttgggagagcaagcttcaagcagagagttcccttaattacgataatgatgaactattaatgagtaactaagaacttatgtactat

SEQ ID NO: 36936 - DNA, 395 bp, Glycine max
tggcaagcaaagcgggggtgaacaaaaacaatggcgacatcgctatgggttttgacatctgtttatttcaacaatgtgtgttttggcaaagcgcttcctctatctcggcccttccttgtatgtctcgctctccgcaaatcccttctatctctgtgcacgcgccgacgaaccttcgccgtccgcgccgaatcccaaaacggggccgatgccgtccccgcacactacgacttcgacctcttgaccatcggcgccggcagctgcggcgtccgagccgctcgcttcgatgtcaactacggcgcttccgtcggcatgtgcgagcttcctttgtccactatctcctgcgaaaccaccggaggcgtcggcggaacctgtgtaatacgaggatgtgtgccaaa

SEQ ID NO: 36937 - DNA, 376 bp, Glycine max
gtgggaatgcctaatgctggtaaaagcactttactcggggctatatcaaaggctaaacctgctggtggtgactatgccttcactactattaggccaaatttggggaatctaaactatgatgatctctcaataactgtggctgatattcctggacttataaaaggcgcacaccaaaatcgtggactcggacatgcgtttatgcgccacatagaacgcacaaaggttcttgcttatgtggtagacttggctgctgctttaaatggaagaaaaggaattccaccatgggaacagctgagagacttaattctagagctagagtaccatcaagatggtttatacaaacgaccattcttgatagctgcaaattagactgatg

SEQ ID NO: 36938 - DNA, 371 bp, Glycine max
tttctctctcactccaaacctgcgattctcacccctgcccaatggcttcgcaggagaatggtcgtccattacctaaattcggtgagtgggatgtgaacaatcctgcctcagctgacggttttactgtcatactcaacaaggctagagatgagaagaagactaacacggcaaccccacgtagatctgatcctgtgttcaagaatgagaattataacactcctcaatattctggaaagagaaagtggttttgctgcggctgaatctagaagagggcatgatggatcatgaccctatttgctgtggaccatgatcccgctaatcaagtggagcaaggaatggcttatgatcctatttgctgactgtcacttctt

SEQ ID NO: 36939 - DNA, 402 bp, Glycine max
  unsure (1)..(402): unsure at all n locations
cttcctcagtagtgtcatttacgcttctcttctctgcagcggctatgcctaaccctaaggtcttcttcgacatgaccatcggcggtcaatctgctggccgcatcgtgatggagctctacgccgacgtcactccccgcaccgccgagaacttccgcgcgctttgcaccggcgagaagggcgtacggcggagcggcaagcccctccactacaagggctcgtccttccaccgcgtgatcccgagtttcatgtgtcagggtggcgacttcaccgncggaaacggaaccggcggcgagtcgatttatggcgccaagttcgccgacgagaacttcgtgaagaagcacaccggtcccggcatcctctccatggcgaacgccggtcccggaaccaacggatcttagttct

SEQ ID NO: 36940 - DNA, 392 bp, Glycine max
aagaggtccaagtcaaatcaatacccaagcacctccctaaggcagattgagaatgtaaactctaaggaagaagttgcgtggtactgtgggaagcgcatggcttacatctacaaagcgaaggtaaagaagaacggaagccactatcgctgcatttggggtaaggtcaccaggcctcatggtaacagtggtatagttcgagctaagttcaagtccaatctgccacctaggtcaatgggtgcaagggttagagtattcatgtatccaagcaatatatgagttatgatggggctgtggtagaaagtgatgaataatgcaggtacttctgatgacatgtctagcgctgttctcttggtgcagccgaaatggctgtgccgagcatctgcactgtgtct

SEQ ID NO: 36941 - DNA, 313 bp, Glycine max
  unsure (1)..(313): unsure at all n locations
gtgagtgatcggcgttcactagatccttcataagccgtcatgatcatcatcatcatcaccgttgattgaagaagattccgatcagaaacatcgtcatcggaaggcctgaaaaggctactcaccccgacacgttgaacgcgtggttggctgagttcatgtgcaccttgatcttagtgttctgcggttcaaggtccggcatcgnctacgacatgctcaccgtcaacggtgccgncactgccgccggcctgatgtacgatttcattgtccatgctttcgccctgttcgtcgccgtcttcgtcggggccaacatctt

SEQ ID NO: 36942 - DNA, 367 bp, Glycine max
gggactaacattaaggaactttggtcccaaaaagagggaagagcatggtggttcatcaagattcagttttggaagcagctttcggaaaacgggaaagtacgtcaaggaagaagaattcctcattgaaaaaggagcagaagatagtgatggtaatcagaagggatatcacaaacacaaccacaggattactatatctgatgttgtgttcaagcacaggtggagcaacgtgagttcttcagaccttatgtttctgaattcggagatgctgaacgatgcatcaagcaacagattcagcaacttggaatcaaatgctgacatgatgtctagtacaagaagggtggtggaaaatgagcaaattatgaatatt

SEQ ID NO: 36943 - DNA, 412 bp, Glycine max
gtatagccctacctttccgttcaagatgcacatcttcgtcaagacgctcaccgtcaagaccattacccttgaggtggaaagctctgacaccatagacaacgtcatggcctagatccatgactaggaacgaatacctccggaccatcaacgattcattttgaccgtatagcatctagatgacgggcgtacctttgctgactactacattcagaaggagagctctcttgaccttgtgctgcgtctgctcggaggcatgcataccttcggtaagacactcaccggcaagaccataaccctagaggctgaaagctacgacaccatcgatgacgtgaaggccatgatccaggacaagggaggtatccccccggaccagcaacgtctcatcttcgccggaaagcagctcgaggacggc

SEQ ID NO: 36944 - DNA, 390 bp, Glycine max
gctagaagcaataagatgaaaatgaaagtgcttgatttgtttgctgctacagttgtggcagcatatgaatgccatggctcagactaccagaagttccctctccaaatgaaaactgggtttggtgggcaatacagcaatgaggtggcatgtgccagttggaggcttggcgtggaagcaaacaacgtagtcaagtggcaaactgttcctgcagcttgcggagagtacatagctgactacgttctaggagaccaatatagatcagatttcaaaacagttaaccaacaagcttatttctatgctaaatccctcaaactcaccaacaaagatgtctttgtcttggacgttgacgacactactctgtctaatcttcagtattttgctaaccatgga

SEQ ID NO: 36945 - DNA, 387 bp, Glycine max
cccaattcctaattgtttaaacctaattctcatttcttgatcggtcgattcttctcctcctaaagatgcagatcttcgtgaaaactttgaccggtaagaccatcacccttgacggggagtcctccgacaccatcgatgacgtgaaagctaagattcaagacgaggaacggatcccacctgaccagcagagacttatctttgggggttaacagcttggggatggtcgaacccttgtcgactacaacataccaaaggaatccactcttcaactcgtgcttcgactcaggggtggcatgcatatctttgtcaagactttgactggcaagaccatcaccctcgaagtcgaatcctcggacaccattgataatgtcaaggccaagatccagg

SEQ ID NO: 36946 - DNA, 393 bp, Glycine max
cgggtattgcttatcatatgaacaaggaaactagtgctcatgcacccagtaccatgatgattaaggtggtcgctcctcctgagagaaagcacagtctctctattggtggttatatcttggaatcacttatcaccttccaacagatgttgatctacacgggtgaatatgatgaatatgtgccacatatccgttatcacaagtgcttctaaagttgcataaacgtcgagctggatggtgaacaagctcttaatgcacccaatcctagaccatattatactctagtacgtctgacttatttactgtttgaacattcaccatcctaatatatctatctagctgacactatgataccataccgcgaatagtttataaccattctacggtagtgaacct

SEQ ID NO: 36947 - DNA, 349 bp, Glycine max
aacaaccaaagcaagcgccatttacggctgttcatgaacgcgggcgccggcggaggaacacggtggagatccgttccgtttactcatccggcgacgtttgaaacgatggcgatggagaaggatctcaagaacaagatcaaatcatatctcgaatcgtttctcaaggcgaagcagtattaccggaaactcggccgcgcgtggaagaggagctatctcttgtatggtgcctcctgcaccggaaaatcgagcttcgtcgcctcgatggcgaacttcctctgctacgacgtgtacgacgtggatctttgcaagattcgcggcgttacggatctgtagtttctgatgactgaaa

SEQ ID NO: 36948 - DNA, 326 bp, Glycine max
gcccggtgcacatagaattgccttatacaatcaagaatacactgacactaaccagtctaggaatgcagttaagtgaccgatgtcggacatgtacgactatgagaacgatatatggctctgaaactcatttccacggtcaatgctagaacttcactgcattatgaccgtctattaatactttgaaagaagtgcatgcgttcttgactgataatccaactgacattgagaccatcataactgaagactatgcgcacactcactaggagttgactaatgtgttcacatgtgcatatactggatcagtattagttccctgtgaccaagac

SEQ ID NO: 36949 - DNA, 252 bp, Glycine max
gtgaaatttctgtctaatgatgaacttgcttatgcatgaacggataatacactgggattatgggatgtgaaggaaaacttgtcagttcgtactttcaaaggccatgcaaatgacaataactttgttgtccttacagttatcactgaatacattacgtgtgtcacttgaaactaatgaagtatacgtgttctacaaagtaataatgcgacctatgactcgcctctaactcctctcctcttcatatgaatgacc

SEQ ID NO: 36950 - DNA, 408 bp, Glycine max
gtgttccatcattttgaaagaagcaaatttcgctgcggttaggattactattgggggtgggtattcaatgtggaatatactgaccccacctctggtcatacacacgttgcatccgctgagactgccaatgagaccctcacacgctatatcactcctaagagatgcgctcctctgatgacacattatacatgcaactctaatgagacttacgacgtgagctacacgaccggcggtcccttcgtaaccatacagcacaatatgctactcgatcactggtctaactactgtcttgacttaactgttatgctatcacagtcactcacatcatactatcctattttgtgctacgccaattccttccagcctaatggcattgctaccttacatttcatgtgttgaccttaattt

SEQ ID NO: 36951 - DNA, 401 bp, Glycine max
ccataacacatagcacaaagcaaagctcatccttgagttagaaaatggcagcaggttcgtacatggctctctcatccacatccttggctggcaaggccgagaagctgctcccatcagccccagaagtaggaagggtcagcatgaggaagaccgtcaccaagcatgtctcctcaggaagcccatggtacagcccagaccgagtcaagtacttgggcccattctctggcgagcccccgtcctacctaaccggtgagttcccaggcgactacggctgggacactgctgggctttccgcagacccagaaaccttcaccaagaaccgggaactcgaagtgatccactccaagtgggccatgctcggagccttgggctgcgtcatcccggaattgctggcccgcaac

SEQ ID NO: 36952 - DNA, 399 bp, Glycine max
attgaattttgattctagcaagcagagcttttgtcaatttgctattgaccttctcggtggaggaattttagtggacaaaactggagattggatcacacttatacaaaattctccaattagtaacttgttgagagttgctgcttggaagaaaggctgtttaatggttaagattgtgatgtctgggaatgcagcagtcaaaaggagtgattgggcctgattggtacaagtgtttctaacaaacagcaacagtacagagcattttgatgcatgtaagtggacaaaatctgaaccacattccttggaattgatccttccaattgaagtattgggtcctaaatatgggtttgaaatggtgaagtcttaattggccaaataaacctcattgcctttggattttcc

SEQ ID NO: 36953 - DNA, 457 bp, Glycine max
  unsure (1)..(457): unsure at all n locations
tccccccttccttagcccggaattccgcttcaagttaaaaaagttccttgccattggttgaaggaagaaggaatgggtttggcagtccgaaccttccggttttcaacttccccaaacaccttcccttcaaaacttcctggcttcgagaaattggccagagtacggtgcacgcccctgcttgatcaatgcccncacgggagacgtctacagctacgaggaggtggaaagcaccgccagaaaggtggcgcggnggctgaagaaagagggcgtggaacagggccaggtcatcatgatcctnctncccaattgccccgaattcgtcttctcgtttcttggcgcatcccaccgcggtgccatggccactgctgccaaccctntcttcacccccgccgagattgcaaagcaagcccatgcctccaatgccaagctcctcatcacccaggcctcttactacgac

SEQ ID NO: 36954 - DNA, 228 bp, Glycine max
cctggttacaccaagggtgatggtcttggtgctgagattgtgggcactcacatcctagcaaacactgcgttgatctctaccgatgccaaacgtagcgtcagagactccgatgttcacattgcttcacccttcacaattggaatcgctgatctcttggaaaagtcggtaaccatgcttgattgtcaaaaccggcatcgatgctgcccgcaaatacagcgcgattaagcc

SEQ ID NO: 36955 - DNA, 334 bp, Glycine max
  unsure (1)..(334): unsure at all n locations
gtgcaatcctatttcagcttgttacaggaagaacgcctttcgctggaaacaatcaaatacagttactacaaaatattatgaaatcaacagaattgcagtttccgtctgatagccaaagtctgagttttgaatgcaaagatttgtgtcagaaattgctacgtcggaatccagtggaacgtctaacttttgaagaattctttaaccatccattcctttctcagaagcaaacagaacaggatgagccattgagggatcgaagttctccaaggctggttggtgggttttggtctacagggtctgaccctttgagaagaactgangaaaattatcaaga

SEQ ID NO: 36956 - DNA, 129 bp, Glycine max
gaaaaccctacctaaccgtttcaagatgcaaatcttcgttaagaccctaactggtaagaccatcactctcgaagtcgagagttcagataccatagacaatgtaaaggccaaaattcaagacaaggaagg

SEQ ID NO: 36957 - DNA, 333 bp, Glycine max
actcggaattcaactcgagagtatttattctttggttcaacaatttcagattgtgtctatggtaaaatgtacatatacataacaatcccagattattaactacaccaccttataatatcaccaaatactcaatataaccaccaactacatcctcacaccttctcgtattatctacaacaatattcacatcctcaaaaaacagttgcagaaaaccaatttcaatttccaatcctacaaagacaaaatcaatgataatcattataatattaacttcaataagcatataccctaccttattataaacatcacttacatatttcaaatgaacccata

SEQ ID NO: 36958 - DNA, 366 bp, Glycine max
  unsure (1)..(366): unsure at all n locations
cactctataagagctatgacgcacgctgacctaagcccgggattcgggttcgggatgggccccaacgagccttctgagctgtctatccatgagaacgcctatggcttggctagatacgctgtcatatgccatgagaatggcctggttcccattgttgagcctgagatccttgttgatggacctcatgacattcacaagtgtgccgncgtcaccgagcgtgtccttgcagcatgctacaaggctttgaatgatcaccatgtccttcttgagggtaccctattgaagccaaacatggtcacccctggatcccaatctgctaaggttttccctcatgtggttgccgagcacactgtcagagcccttcag

SEQ ID NO: 36959 - DNA, 260 bp, Glycine max
agaaaacaaagcatatgtggtctgaaatgctcaaatggacggaggaattcggagctgacacgatcacggaggacttcgaattcaaagaacttgatgaagtcttgcactattatcctcaaggccatgatggactggaccaagatggaagacctgtgtacatagagagattatgccaattcgatgccacgaatatgatgcatgtcacatccatggatcgctacgtcacataccacgcaaaggagcttgagaggacatttgat

SEQ ID NO: 36960 - DNA, 215 bp, Glycine max
tgcaaagcacaatgcaaagctcatccttgagttaaaaaacggcgacaggttcttccatggctctctcatccccatccttggctggcaaggccgtgaagctgggcccttcagccccagaagtgggaagggtgagcatgaggaagaccggcaccaagcaggtctcctcaagaagcccttggttcgggccataccgagtcaagtgcttgggcccattc

SEQ ID NO: 36961 - DNA, 406 bp, Glycine max
ctcgagccgtgctgccaaagtgacaggcatgcttcttgagagggaccagactgaagttctgcatttgcttgagtcgccagaagccctgaaagcaaaggtggctgaggcaatggacgtcctaaggaatgttgctcagcagcaggctggcggtactgctgatcagctggcttccttatctcttaatgacaaccttgcttcttaaggtttatatcttggagtttactgaccgatgatgaattgttacactgtgcactggcttggatacagattacatgtcgagcgtgaaaagggaaacttgaatgcttctcattaccattaacacatttggaattgttgtggagtcaattgacctctctatctctctaattcatgccccatggaagccaacgcttacaaccatgaagct

SEQ ID NO: 36962 - DNA, 259 bp, Glycine max
caaagggactcgttgttcttctcccaggttattcagaaaagcagagtggtgaagatttgctgcattggtgctggatatgtggggagtcctactatggcagtcattgcacttaagtgcccatccatcgaagacgcatgtggtgatatctataaatcccagattgcaaactggaacagtgaccagatttgtatctatgaacctggccttgaaggtgttgtgaaggaatgccaagtcaagaacctctttttcatcactgatg

SEQ ID NO: 36963 - DNA, 166 bp, Glycine max
ggcggtggtcatccatttagggccaatgctctggcttaccttgccaggttttgcagaaacctgaaagtcctaaatctttggggatgtgttaaagctgcttccgatactgctttacaggcttttggacaatactgcattcagctacaatctttgaaccttggatggt

SEQ ID NO: 36964 - DNA, 305 bp, Glycine max
gtataccttaataaataatttaagatactatgatgagagcgcggttcccattactgttgctgggacttgttttcctggcttcagtttctgtctcatttggcattgcttactgggaaaaagagaaccccaaacacaacaagtgtctccagagttgcaatagcgagagagactcgtacaggaaccaagcatgccacgctcgttgcaacctccttaaggtggagaaagaagaatgtgaagaaggtgaaattccacgaccacgaccacgaccacaacacccggagagggaacctcaacaacccggtgag

SEQ ID NO: 36965 - DNA, 343 bp, Glycine max
  unsure (1)..(343): unsure at all n locations
ctcagggatagcgaaaattcatgggagaagatgggagaagagggggatttggatccaaagaaacacgggtaatttattaggagtgtacagaatcagagacagagcaagcgttcttaagcgccatccttgagcaaccaattagtgtctccattgatgcaaaagattttcatttatacaccgggggaatttatgatggagaaaactgtacaagtccgtatgggattaatcactttgttttacttgtgggttatggttcagcggatggtgtagattactggatagcgaanaattcatggggagaagattggggagaagatggttacattttggatccaaagaaaca

SEQ ID NO: 36966 - DNA, 350 bp, Glycine max
  unsure (1)..(350): unsure at all n locations
tcggtgaattccaattccacattttcaagagatatggaggcanaaatgttcaggtatgaatcggaatctattgtcctcttattatgcctatcctgaagccaaaggaaatgagatcggtacttctcggagaattccaattccacattctcaagatataaggaggcatacatgttcatatatgaatgggaattacttgtatcattattaagcctatcctgaagccaaatgaaatgagatcggaattcctcggagaattccaattccacattctcaagaaataacgaggcagatatgttcatatatgaattggaattattagttaacttattaagcctatcctggaacccaaa

SEQ ID NO: 36967 - DNA, 130 bp, Glycine max
caataattccttcacttgcagaacttagctctctgggtccatgagaataacttgattagtgttagccctaaaatttacctttaaaccttaccacagtgccaccacacattgtacaaatgcacacacacaa

SEQ ID NO: 36968 - DNA, 225 bp, Glycine max
gtttagcctttctatcacctgaaaatgtcttgctgcagtggtagactgcgttgccgaagcgcctgcacgtgctgtaacagctgcagaagctgctagatgtatccagacttgagcgacaccgagtctagcaccaccgagaccttgatcatcggagtggcaccagctaatgctgaatttgagagtgctgatataggcgttcccgctgagaacgattgctgcaaatgc

SEQ ID NO: 36969 - DNA, 370 bp, Glycine max
atttggaaatttggctgatgacaccatcaattttgaggctttggcccacaagctggtgcagtttggagagattcaggtaaaagttgtattgaaattttcacaagacgaatttcttacagcttggtcaactcacgtgcgtcctgctacaactctgttggctgatgggtgtccatatgtgtatgctatggtgcatgatagttcagtgtctacaataccaggtgattttgtcattggtgttaagttgacaaccatgaacaatatgtgtgcatatgggctcaatcccgggaagtcacgttcctggctttgggcaccattcctaagtctatttcacagcatactgtttggaatcaaatggcaacagtgagaacac

SEQ ID NO: 36970 - DNA, 342 bp, Glycine max
caccgcattaaagaatttaacatatactatgatgagagcgcgggtgccattactgtagctgggagttgcaaacctaccctatgccaaatgtaaaaaaaccgaggtagaagaagaagaccctgagctcgtaacatgcaaacaccaatgccaacagccacagcaatacactgagggtgacaaagcggtatgcttgcaaagatgtgacaggtatcatcgtatgaagcaagagcgagagaaacaaatccaagaggaaactcgtgagaagaaagaggaggaaagccgtgaaagggaagaagaacaacaagagcaacatgaagaacaagatgaaaatccctacatttt

SEQ ID NO: 36971 - DNA, 190 bp, Glycine max
aagaatcaaagaaaggggtggtggctgcttcaaaagcttagtaagttttttatttccagaacatcatagttttcgcagcagcaaactaacaaattactcatatcatataataagatggcccgttctctctcgcaagccaaacgtattggtgtcctttgtgctcaatctatctccctaattcccgttcatc

SEQ ID NO: 36972 - DNA, 400 bp, Glycine max
  unsure (1)..(400): unsure at all n locations
actcnagcttcaaaacggtattacatactatatgtcaccaattataanagcagccgtctttttaataaaactagattcacctctaaaaaaaatatgccctctcactctattccaatcacccaattatctctataacacgattgcactattctttacatctccattacataccctttttatcgccaaacgctatcctttgagcattaactttggttcatttacacttataacgctgtgtgccaacattcctacttacttcgctattgtacaaatacattttctacaaacttttaaactttcttcacgcgatacaatataatctttctttaatattcaaatattttccccctaatacaatttctttaacctttatttcttttcacaacaacctttaaataac

SEQ ID NO: 36973 - DNA, 277 bp, Glycine max
tcggtgaattccaattccacattttcaaaaaatataagagccaaaatgggcgtgttttaatttgaaataattcgtttcttaataaaccctttcttgaacccaaagaaaataaaaccgaaatccccggggaatttccatttcacattttcaaaaaataaagaagcaaaaattttcatatattaattggaaatatttggtttcttattaagcctattcttaaacccaaagaaattaaatccgaatttcttcgggaaatcccattccacatttttaaaaa

SEQ ID NO: 36974 - DNA, 367 bp, Glycine max
gaagggggtctttcttttccatgttgccaacttgctaataataagaggatcaagttgttttgttttgttgctttttgttcaagaaacgaggtcgcatgttcatgcacctggggaagaagagaaggtgatgtagcacagaatgccaaagattatgctcaaaagagcaaagattatgcgggtgatgctgtacagaatatcaaagattatgcaaatgatgcagcgcacaagagcaaagattatgctggtgatgcttctcacaagagcaaagaagcttctgattatgccagtgagacggctcagaagaccaaagactatgttggtgatgctgctcaaaaaagcaaagaggcttctgaatatgctaatgatg

SEQ ID NO: 36975 - DNA, 330 bp, Glycine max
tcggggaattgcaattccacattctcaagaaataaagaggcagaagcggtcatatgtgaacaggaattctaggttgacttattaggactatcctgaaaccaaacgaaatgagatcggaattcctgggggaaattcactgccccatttccaagaaatgacgcggcaaagctgttcatatatgaattggaattatttgaatccttattaggcctatcctggagccaagggaaatgagatcggaagtgcttatggaattacaattgcacattgtcaagaaataacgaagctaaaatgtgcatatatgaagtgggaatagttggtttcttatta

SEQ ID NO: 36976 - DNA, 350 bp, Glycine max
tgggaatgcatcaatcaaaatgagtgattcgggcctcattggtacgggtgtgtgtaacaaacagcaacagtacagaccattttgatgcatgtaagtggacaaaatcagaaccacattcctgggaattgatcttcccaatagaggtatgtggtcctaataatggctttgaaatgtggagtcctgagtgggcaaatcaaacttcatgccatttgagtttccttaatgacaatcccaaacagtctacagtttttgatattatcttgcgaatctctcaacattttgaaattgctggtaatacttttatgccagctttttctgtttcacaagctacttgccaatattttgaaaat

SEQ ID NO: 36977 - DNA, 311 bp, Glycine max
taaaattctcaattctaacgccactaatcctatacttactctacttcttcacaactgtcaaattggtaaatatctgatttattagtgtccttttgcattactgaactagcatgtaatatcttattcacttaaataaaacgcattactatttgcaatcagtctgtttaaatataaaacaaataaaaatataattcaactacaacatcaacaattacactttatcaccaaatttaataaaaaaaaaaaataaaattgtctaccacccactaataaacttctttaccacacaattaattcctaacctatacctt

SEQ ID NO: 36978 - DNA, 146 bp, Glycine max
tgaaattctgagttctaacgccactttccctattctgactcgacttcttgagaacgataagtgggtcaaatatgtggttgatgagtgtcctcttgcatatatgaactagtatgtaatattttattcacttaaataaagcgcattac

SEQ ID NO: 36979 - DNA, 227 bp, Glycine max
taccaagcaagttatgagcaagatggcagaaatgagcaacagtggttgtggtgatgatgaaaaactgatgcttgaaacgtcacacttgctgttggcttgtctttcatggatggcacattgtaggagcgatatttggagagataaatgtgcaacacgttgtgcatcatcgatagcagctgtttccactagcacatcatacgatgtccatattctatgatggcatgatt

SEQ ID NO: 36980 - DNA, 286 bp, Glycine max
ttacattagctctggcaggcttctactcctcttcgttctatcatctacaccaccactctttgacccatttgatcttttctagatttaatctcctctacaattttctactgctcgtgcatgtccagactttatgtggcaactccaatcatcaactacttttttccctccagtttttgttccactctgtttttaatttaattcaacttctccatcgtcatttccacttttttcctcgttttctcataaactttgctttcctggttcaccactcttgaaaccttcttat

SEQ ID NO: 36981 - DNA, 282 bp, Glycine max
ttagtattagaatcaaagaaaagaatatatgaaaggattgatggttgaaaatgcaaggaggaaagaaagcggcagagtccattaaggaaacagctacaaacattggtgcttctgccaaggctggcatggataagaccaaggccactgtccatgagaaggcagaaagaatgacagcacgtgatccggtgcaaaaggagttggcaacccaaaagaaagatgcaaagattaaccaggctgatctggacaagcatgcggctcgtcagcataacacggcagccaaac

SEQ ID NO: 36982 - DNA, 334 bp, Glycine max
aaatgaccaagttcacaatactgctgataggtctgaatttatgggtgacccagacttgcagagcgtccaaatggcagctccagcaagatacgatgtcgaagattggtacatgtggtcatagctgacgtcctgagagaaccacatcatggataagatacacgcgacaagaatctacaccatgatgatcatgacgacaacaattagattctcatgaccatgcggggaagactcaactacctaaggtggaactgcagacaagacgacgacgtaacacaagaaggacacatgccgaaatgatggacagacacgagcgacatgagaagcacaacatgcc

SEQ ID NO: 36983 - DNA, 449 bp, Glycine max
cccaatcacgtaatatctccatattccaccaaaaatgaatatcagcatcttctggactctctaactgttatgttccttcaccacctcatacctaccttcatccatcacttatttaatactccataataaaaataaccctcttgaaaatgctgccacatattatatcttgtcagacataacatcatttgatggaataagatcaaccccaactttaaattaaatatgccctctcactgtgatacaatctctcaatgagctctacaaatggattgcaacaatcatctcgtccccatatcgaatccgttttatcgccgaatgccatcctttgagccttaagttcgattcatttccacttataatgctgtctgttggaattcctacctaatggtctcttttggaagatctaccacaaagacccttgctttgttttaaaaaaaatttttgtttta

SEQ ID NO: 36984 - DNA, 318 bp, Glycine max
  unsure (1)..(318): unsure at all n locations
gtctttgaacactcatcaccatggccaagcttgttctttccctttgtttccttcttttcagnggctgcttcgctctgagagagcaagcacagcaaaatgagtgccagatccaaaagctgaatgccctcaaaccggataaccgtatagagtcggaaggtgggttcattgagacctggaaccctaacaacaagccattccagtgtgccggtgttgccctctctcgctgcacccttaaccgcaatgcccttcgtagaccttcctacaccaacggtccccaggaaatctacatacaacaagggtatggtatttttgcatgat

SEQ ID NO: 36985 - DNA, 230 bp, Glycine max
cacacaactactacaagtactttcttacaatcaaaaccaacaaccactatggcaaggtatcaaaaacacttccatgatcaaggtccccagggtgaccaattttgcaaccgttataagcaaaccgaccaataccggaacccctgttcatgctgctaagtgcacctatgtagccaccaaaactgctgctggtggttacagtgatgacattaataagcaacattgattccacc

SEQ ID NO: 36986 - DNA, 389 bp, Glycine max
tgctagttttgatggtttgattaccaagcaagttttgagcaaaatggcagaaatgataaacagtctttgtggtggtgatgcaaaattgatgcgtgaaaggacacacctgctgttggcttgttgttcaaggatggcaatttgtaagaaagatgtttggagagttgaatgtggaatcccttctggatttccgctcacagttatttgcaatagcatttttaatgagatgctcattagatatagctatgaaaaattactgcgccaggctagagctccaagcatgtttttacaatccttcaaaaattttgtttctttgtgtgtgtatggtgatgataacttaattagtgttcatgaatatgtcaagccttactttagtggttctaaattgaaaa

SEQ ID NO: 36987 - DNA, 424 bp, Glycine max
aaagcttaagcttttgaccaaagccttttcctggatgtaacatggaaagtccccactctgtgaacagtccaagaagaaccctcagcctatcgaaaaagcagagggcaactgtatccttttttgaccccgatgacataacctctggctttggattgtctggcgatcatggccctaagccttctgaagtttatggttttgtaggttctattaccactgttgatgctacagttattttcttggtatgggcatatgctccagaatcatggctacaatctgttggcatctcttactatcctagcagatattgcgctctagcagtaccaacttatgtgatggtgaccattgtattggtgctgggattctacattggccttaacttcatttcaacaccttcccctgcatctttaaacacttgtttcgatga

SEQ ID NO: 36988 - DNA, 387 bp, Glycine max
agaaacacaggagggacacatgtgattgttactactaggttgtgcaaagtaatgagctatgatactattcagcttcttcctttgccattatctgatgcaatgattctgatgataggaagaaaaatgaaagattatccagcagatgagatagacatccttgaaaaattcaatgagaaacttggaaggttgagctttggcttgtggatgattggttcattactgtctgaacttgcaataggcccttcttctctctttgaggccataaaccaggtgtcactcattgaagattcaaactcttgctatatgagcattgcagaagggcaatggtgcaagagcaacccttttctcatgaagaccctcctcttttgtttggagactttggaaaaa

SEQ ID NO: 36989 - DNA, 225 bp, Glycine max
agctggcataagagtattaccagctttttctgttccacaggctactgccagatcttctgaaaatgcggaatcctctgcatgatctggaatttgtgttttctttcgcttgttcgtttgtttaattcaataaaggaaattaggcatgaccctcttgtgagtatgctcttgctatttgaaaatttcacacctctttaaattgcgtatgatgtggaaggtgtgtatttt

SEQ ID NO: 36990 - DNA, 356 bp, Glycine max
ctcgagccgctcgagccgtgcgattatgctagttttgatggtttgattaccaagcaagttatgagcaaaatggcagaaatgataaacagtctttgtggtggtgatgcaaaattgatgcgtgaaaggacacacctgctgttggcttgttgttcaaggatggcaatttgtaagaaagatgtttggagagttgaatgtggaatcccttctggatttccgctcacagttatttgcaatagcatttttaatgagatgctcattagatatagctatgaaaaattactgcgccaggctagagctccaagcatgtttttacaatccttcaaaaattttggttctttgtgtgggtatggggatga

SEQ ID NO: 36991 - DNA, 319 bp, Glycine max
gaatttgcctaatgcctgtccttcaatgtggagggattgggttatagatctcgggtttgaagtttctaagatgacttctccctacattaaatgtacagtctctttcttcatagcatttggaaatttggctgatgacaccatcaattttgaggcttttccccacaagctggtgcagtttggagagattcaggaaaaagttgtattgaaattttcacaagaagaattttcttacaacttggtcaactcatgtgcgttcttccacaacctctgtggctgatgggtgtccataattggtatgctattggtgcattgatagttc

SEQ ID NO: 36992 - DNA, 176 bp, Glycine max
cactcttcgttttgctttttcaacttaaccttttctactggtaagggtaacaacttgctagaataagataaagaaagagtaaaagtgtgtgtgtgtgagagagagctatggctggcttgtgggcacgcctttctctgattgttctggctttgatttgctacgcgatgtttatatgc

SEQ ID NO: 36993 - DNA, 333 bp, Glycine max
cattcttgttctctttccaagtctctcgaagcatctttctgtctgttccttcagaatctatgggcgttactcgttcccaagtctccaacaagcaaagtacatggttgatttgaaaatccaagtccccagcgcattcgacccgtttgccgaggcgagagaatcagatgcccccggggcaaaggagtatgtgcacatacgaattcagcagaggaatgaaaagaagagtctgacaacagtgcaagggctgaagaaggagttcagctactagaagatcctcaaggacctcaataaggacttctgctgcaactggactgcggctcatgacaaggagct

SEQ ID NO: 36994 - DNA, 325 bp, Glycine max
gctagtctgcccgcaggacgcacgcatacgatcccttggatgaattccaaggccacattttcaagaaatagggatgcatatatgttcatatctgaattgcaatcatttgatggcttattaggcctatcctgaagccacaggaaatgagatcggaattcctgcgcgaattgcaagttcacattttcaagatataacgacgcacaaatggtcatatatgacttggaattatctgttcccttatcatgcctattctgtagccaaacgaaatgagatcggtattcctagcggaattacaattccacattgtcaagatacaaggatgcac

SEQ ID NO: 36995 - DNA, 303 bp, Glycine max
gcacgcgacgtaactgggacatctttacttcgattctttttcattcacaccaccacactaacacccagttggtcttcacgagatttagtcaccacaaaaactttcctcaatgccttcaagaccaaactgaacatttctccaacaacaaacaactgctgcttgcccgcctgttgctgttccttccccatgggaatgtaatccaaatacaagatggtggcctacagcctcttccaaagtcacacactaacgtgcctggactttatcacaactcaaaaaaccgtctcattatacacaccgccgtac

SEQ ID NO: 36996 - DNA, 379 bp, Glycine max
catgcatgtgtgtggtggacactgtaaccgtgccgtcacttatgccgctctgcttggtggaaggatctgcgaacttagagcatatgactctcgggtatattaacttactatgttctatagtgcctgctctatagttgaggcttgtcactaacaacatgagaccacctgtgatgacatagtcaataaggcttggagcgattcactggcttgaacttaaaattgctttcacatttgggctcatatacacagcttatgctacttgtattgatcatcacacgggtagcgtcggctcaattatagcctgatctatcgcattctcggtcactgactacatgctctctggcggtccgcttgatcgagcatgcttaaatcactctaa

SEQ ID NO: 36997 - DNA, 431 bp, Glycine max
  unsure (1)..(431): unsure at all n locations
ggacaagcttagttgccaagttggaatcaatccatactccatggaatggaccggtttggccaacagactactgagtaagggcaacgatattctgtgttgcgattatgctagttttgatggtttgattaccaagcaagttatgagcaagatggcagaaatgataaacagtctttgtggtggtgatgaaaaattgatgcgtgaaaggacgcacctgctgttggcttgttgttcaaggatggcaatttgtaaaaaagatgtttggagagttgaatgtggaataccttctggatttccgctcacagttatttgcaatagcatttttaatgagatgctcattagatatagctatgaaaaattactgcgtcaggctaaagctccaagtatgtttntacaatccttaaaaaatttgtttctttgagtgtgtatggtga

SEQ ID NO: 36998 - DNA, 344 bp, Glycine max
caatatcctagtataccttaataaataatttaagatactatgatgagagcacggttcccattactgttgctgggacttgttttcctggcttcagtttctgtctcatttggcattgcttactgggaaaaagagaaccccaaacacaacaagtgtctccagagttgcaatagcgagagagactcgtacaggaaccaagcatgccacgctcgttgcaacctccttaaggtggagaaagaagaatgtgaagaaggtgaaattccacgaccacgaccacgaccacaacacccggagagggaacctcatcaacccggtgagaaggaggaagacgaagatgagcaaccacg

SEQ ID NO: 36999 - DNA, 328 bp, Glycine max
ttatcttttagacttccgcatattggcgttcaactccgaaccgggcaccctttttctgccttaccatgcttacgctgattaccttagcgttatacaaaacgggactgccattcttaccttggtgaacaacgacgactgagactcttacaacctttaatctgtcgatgccctaatagtccctgcatgaaccacatactatgtggttacccctagctacgacgagtttttcttaatgataacactcgtcatatcttttaacaaacccggtagatttgagagtttctttctatctatcactcaaactcaacatttctacatgcaagggttc

SEQ ID NO: 37000 - DNA, 336 bp, Glycine max
gcttggagaaccagcatcgccagatgcctatgagatgctatctagctgggaaccaagagcaagagatggtaaaatatcacccagagcaaggaggtcatcaaagccggagaggaacgcatcaccaggaagaagagaacgaaggaggcagcatattgagtggcttcaacctggaatactcggaacatgcagtcatcgtggacaagcagatagcgaaaaacgtacaaggagagagcgaaagcgaagacaagggagccattgagacagagaaaggaggcctgagcgtgattaaaccacccacggacgagcagcagctgagaccccaggaagaggaagaag

SEQ ID NO: 37001 - DNA, 192 bp, Glycine max
tgaagaagaagaagaagaccaagacgaggatgaggagcaaggacaagggaggccagaaaggggaaggtctgagtcttaaagaggaccacgaagaccttagaattagaacccctttcacttcaactcttaaagggttccaactttttttaaaaacccatattggcaacgttggggtcttcaaaaggtcaacca

SEQ ID NO: 37002 - DNA, 372 bp, Glycine max
atccttttatattactatagtttaagaaaggttcaccaattgtttcaggtgggttgaaatgatggctcctgttttctcaagagctgcttggcgttgcatttggtatatgatccaggtgcacccttctctcatttaatgttactgctgaagaattactataaacattgctttgctaagattactttatttattcaccattcatggtttactttattttacagaatgacttgatccatgcatggggtctagatatgcagctaggctactgtgctcaggcatgttaaaagctccttaatttctcgtttcagtttgatgagttccatttctacatgttgaatattcccctgatgccttaatcctcgttaatttttt

SEQ ID NO: 37003 - DNA, 375 bp, Glycine max
ccaagagagatggaatgttcctcctccttgttctggtcctcggtatagtgaccgaggtgtgcctgctccttatggttgtcatcctagtgaatcagttggttttccaggtcatggatggagatttcctcccccatcaatgaattacagggactccttgccttttagaccccactttgaagatgcaattccagtagcaaaccgaggcccaggcttttggcagccaagatgacaaaaattaccaataaaaaaaaaaaaaaaacaaaactaaaaaccaaaataaaaaagaagaaacaaaaagacacaatagaaaataaataccaaaaaaaaggggcggccgccaactatggacctcgcaaacccgggaataaattccga

SEQ ID NO: 37004 - DNA, 357 bp, Glycine max
aaacaaagagaaaaaaaaacccttagccaacacaaccatcatggccacctctgctattcagcaatcagcattcactggtcaaactgctctgaagcagctcaatgaggtcggaccgcagaaccggggcgcccggcaagggtggacctaccaggcccggaaccgtcaaaagggctcctaaaagcattgggaagggcccggccggtccaaggtcctggggcccatgctcgaagcaaattccatcataccggacgggagattacctggggacctccggagggaacactgctgaattatcagtggacccggaaaccttggccaggaaccgggagctggaggtgattcacagcagatgggcaa

SEQ ID NO: 37005 - DNA, 355 bp, Glycine max
tgcaattctcacatgttcaagacatagccgaggcagccatgtgcagtatatgaattgcaattatcagtgttcttattaggcctatcctgaagccaaaggaaatgagatcggaattcctcgccgaattccaatgccacattatcacgaaataacgaggcaaacatgtccatacatgaattggagtcatacgattacttattaggcctatcctgaagccagaggaactgcgatcgatactcctcgaagagtcccagttcgaccttttcatgaaacaaggaggcaacattgttcatatctgagttgtaattatgagcttccttattgggcctctcctgaagccaacggaaatgagatc

SEQ ID NO: 37006 - DNA, 406 bp, Glycine max
cgacacacggaagcttcctatggacatgtaaagtgaacctacgagtgcacgaacttcagcctctgaccactcactactgctatctaccggctcaactcgtccgggactcaacggagacatagctcgcctctgaccctaagctttactagatgacaggcatacgaaccgtcagtgatcctggtgacagcacctccgatcgtctcagcaacgcgaccggcgcatcgtacatcgccgtctgctatgtcaaattcgatgaggccacaggcgcccgtgacgttacagtgatctataccgagcctccgtagaagcttgtcaggaagctcgactggtcaaatgacgttctctttactggtggatgggctaaaagtggtttatattatgaaactgtcacaaaaatatttaagaa

SEQ ID NO: 37007 - DNA, 268 bp, Glycine max
cttaattattaacacttccttagttcaatatggggaagccctggactctctctctttcttccttacgcttgctactcttgtcgagtgcatgctatgctattagctacagcaagctcaacgagtgccaactcaacaacctcaacgcgttggaacccgaccacctggttaagtccgaatggggattgattcaaacatggtactgtcaacaccctgagctgaaatgctccgatcggactgtttccaaacttacccttaaccgaaatggcct

SEQ ID NO: 37008 - DNA, 344 bp, Glycine max
cagcgtgaccgctcttagttggagttgagtgctaactgcttcgctggggtcagtttgggtctcattaaaggcgatagaggatgagacacaggcttactccttgaaatgctctaacgcatacgaacttaattcgcaaaccaaaagggacgcatttcctatcgcgcagagctccatcaaacgactggcacagctctacacccttgaggactaccggatggaccatgttcatcaaaagccaaacacaatctttctactcaagcatgctgccgccatttgcatgaggttggaccttagctggagagccatacttaccttgtggaacaacgacaactgagactactaca

SEQ ID NO: 37009 - DNA, 385 bp, Glycine max
ccgggttggtatatcagcaaggctaaccctaaatcgctcttactctgggcggtcgttcaggggaagagatccagcacccctgttgtacgtcaagctcacaaatcaaaagcctactttaagagatatgaagtcaagttcatgagaagaagagagggaaaaaccgattaccgtgccaggattcggttgattaatcaggacaagaacaaatataacactccgaaataccgatttgtggttcgctttagcaacaaggacattgttgcacaaataatatctgctagcattgccggcgatttagttcttgctacagcatattcacatgagctgccacgatatggtcttgaagtacgacttacaaattatgcagcatcttattgcactggtc

SEQ ID NO: 37010 - DNA, 238 bp, Glycine max
aacttactaacactatccttagagcaatatggggaagcccggggggactctgtatcatgcttgcctttgcttgctactctagtcgagtgcatgctttgctatgaccttcagcaagttcaacgagtgccaactcaacaacctcaacgcgttggaacccgaccaccgcgtttagtcccaaggtggtcttattggaacattggaactatcaacaccatcagctgcaaaacgccggtgtcac

SEQ ID NO: 37011 - DNA, 259 bp, Glycine max
gtctggtcagagacatcatgaaataacggctgatcatactagagttcatcgttttccagtatctttactggctgttctttttggcgttaagaatgaaattctgagttctaacgccactaaccctatgctgacgcgacttcttgagaactgtaagagtctcaaatatctggttgatgagtgtccttttgcatttgtgaactagtatgtaatattttattcacttaaataaagcgcattactatgtgcaatgagtgtgttt

SEQ ID NO: 37012 - DNA, 219 bp, Glycine max
cacaatggcttaactagcagctcggccgattgatcacatgcattgaataaccctaaacttgagctccttccttgaccgctcaagtgccacctcacagtgtccatgtccacacaacatcacaccgctacgaagctggcgtcgtcccccccggagcccgtttcgaaccgccgcgttatgaagccgtcgtcaaagcgccctccatttaccattccgagagag

SEQ ID NO: 37013 - DNA, 256 bp, Glycine max
atcgcccaacgctcggggagaggcgctttgcgcattcggcgctcttacggttcctgctcactgactcgttgcactcagtcgctcggctaaggatgacggcatcagctaactcaaaggcgacaatactggtatacacagaatcaggggacagcgctggaaaaaccatgtaagcataacgccagaaaagggccaggacccgaaaaaaggcagcgtagatggcgttcatacataggctccgccctcttgtatagcataa

SEQ ID NO: 37014 - DNA, 397 bp, Glycine max
  unsure (1)..(397): unsure at all n locations
atactaagagctatgacgtcncatgcacgcgcgcgtacgctagcaattcaactcgagtccatgccgtgccctcacgtgagcggcttacccgctctgggggaggcggctcccctgattggagcccatcctcggtccgatcggctcttatgcaacggcttacacagtttacaaaaccggtgagaagctgcaagacagcgcaacgggaaagccctccacgccgttcgatcacggttccggacacgtggaccccgtcgctgtcctcaatccaggactcgtctacgatctaacgggggatgattatttaggttttctctgcgcgttaaactactcagcttccgagatcaacacattggccaagagaaaatttcagtgcgacgcgggcaagcagtacagtgtg

SEQ ID NO: 37015 - DNA, 312 bp, Glycine max
acttgtgattgatgataacacaaattccctcagaactgggcatgtctattaggtgtgaaaacaacaccacgcatacagcaagatggccacttccgacagtaacatgctactaaattatgttccagtttatgtgatgctcccactcggagttgtcaatgttgacaatgtttttgaagacccaaatggccttaaagaacagctcttgcagcttcgagctgcggctgttgacggcgttatggttgatgtgtggtgggggatcatagaactgaaggggcctaagcagtatgattggagagcctacaggagtttgtt

SEQ ID NO: 37016 - DNA, 248 bp, Glycine max
ctcatggcgggaggcatctacactgtcttgttgcaacctggtcatggttatctattgtgttggactgctgtcatggggggaaataaaccggctcatattgggacttacctctcatagagaaccaacgatgagaaactgagaaaccgttgtggaccagctcaaatgcctaatgctctgctcttgccttctagtaaggaaggattaactttcagaggaattccaaactagttccctatctgaagaggttg

SEQ ID NO: 37017 - DNA, 186 bp, Glycine max
acctggctatacacgacaccatccacacactaagatgaagaacggtttccatactccactacttgctagccctatctcttacttgctctcttcttatcttcttatccgactcattcacccgtacggaacccaataaaccttgttgttctacccgttcaaaatggatgggttccacagggggctcca

SEQ ID NO: 37018 - DNA, 216 bp, Glycine max
gaagaagatgggtttgaagaacaacatggtggtgctaaaggtgtgtttggtgctacttttccttgtggggggtactactagtgccaacttgaggctgagtaagcttggcctgctcatgaaaagtgatcatcatcaacactcaaatgatgatgagtcttcaaaaccatgctgtgatcaatgcgcatgcacaaagtcaaaccctcctcaatgccgctg

SEQ ID NO: 37019 - DNA, 269 bp, Glycine max
caccttttcttttcccacacaagtacgtttgctctagatgcaacatattacattggaaccatttgctttcttatgaggcctatcctgaatccaatggaaatgacatcggaattccttggggaattccaattccacattttcaagaaataaggaggcaaaaatgttcatatatgaattggaattattggttttcttattaggcctatcctgatgccaaaggaaatgagatcggaattcctcggggaattccaattccaaattttcaagaa

SEQ ID NO: 37020 - DNA, 300 bp, Glycine max
ctaaatccgtgcttatactaaccgatcattgtatgagcaggatagcagaaatgattatcagtctttgtggtggtgatgaaaaattgatgcttgaaaggacacacctgctgttggcttgttgttcaaggatggcaatttgtaagaaagatgtttggagagttgaatgtggaatcccttctggatttccgttcacagttatttgtattagcatttttaatgagatgctcattagatatagctatgaaaaattactgcgccaggctaaagctccaagtatgtttttacaatccttcaaaaatt

SEQ ID NO: 37021 - DNA, 275 bp, Glycine max
gtcacacctgtcatatgtttcgtgtaatcatctggaaatgcaagatgcttatcttggcaatgtcgtacatgtgttacgcgagctgtatctgcacagtccatacgaagctcgccaactgacaaggacagctttgtctcatattgaatggctcgcaaaagctgatgtgcctaccatagcacagattgaagagttgcattcgatgcatagaatgatgaatgcttctgattcacatgattatcttgatctactgtacaacattgactagttggctttac

SEQ ID NO: 37022 - DNA, 416 bp, Glycine max
gtcacaacttcattatgtttcgtgtaataatctgaaaatgcaagaagcttatcttgtcaatgtcgtacatgtgttacgcgagctgtatctgcacagtccataggaagctcgccaactgcgaaggaaagctctctctcgtattgaatggctgcaaaaaggtgatgtgcctaccatagcacagattgaagagttccattcgatgcaaagaatgatgaatgctcctgattcacatgataatattgatctactgatgagcattgatttgttgggtttacaaggagcacttaaagctttttcaaaatagaatgtttttgatgataagcttgtgtcggctaacacacaagaattcttttatggaaaatttccagaggatgcttggttaccaatctttgtgaattgtctttattctttaagtc

SEQ ID NO: 37023 - DNA, 407 bp, Glycine max
attggtccttaaacactcatcagtcatcaccatggccaagctagttttttccctttgttttctgcttttcagtggctgctgcttcgctttcagttccagagagcagcctcagcaaaacgagtgccagatccaaaaactcaatgccctcaaaccggataaccgtatagagtcagaaggagggctcattgagacatggaaccctaacaacaagccattccagtgtgccggtgttgccctctctcgctgcaccctcaaccgcaacgcccttcgtagaccttcctacaccaacggtccccaggaaatctacatccaacaaggtaagggtatttttggcatgatatacccgggttgtcctagcacatttgaagagcctcaacaacctcaacaaagaggacaaagcagcagac

SEQ ID NO: 37024 - DNA, 401 bp, Glycine max
ctctcatttagcttctccaaaagcttgttttagtttatgcataagctaattttaactcacaggagaaccttaattcattttaccttattttcttctcctataagttcttattgaaaaatttatccaaacaggaccgaatgttcaagtctaaattggattggtgggattatgtaggtgacatgtttaccgaggaacagaatgagttaattgaatcagcagccgaaatgctttatggactgattcatgcccggtacatattgacaagcaaaggaatggctgcaatgctcgacaagtacaagaactatgattttggcagatgcccacgagtttactgctctggacaaccttgtattccagttggtcagtcagacatccctaggtctagtactgtgaaaatatac

SEQ ID NO: 37025 - DNA, 115 bp, Glycine max
gaaatgtctgcttttgtttacaaggattggctttttacaaagcgagcgttgcctgctgatttttagaaaagaggattggcaattgaggatccatctgccctcatggcattcgcct

SEQ ID NO: 37026 - DNA, 318 bp, Glycine max
cgtcgccatgggccttgttatcttttgacagaggaagggctccgggtaagaatgtttcgctcacatgaaggaccgtaaaggcgctgctcgcctgcgcgccttggatttcgctgagcggcacggctacatcaaggtcattgtcaaggacatcatccactatctcttccgtggcgcgcccttcgccaaggtggtcttccgggatccgtatcggtttaagaagcgtacggagctgttcattgccgtctagggcattcacacgggccagtttgtgtattgctttaagaatgcccatctcaacattggcaatgtgcttcctgt

SEQ ID NO: 37027 - DNA, 254 bp, Glycine max
tgacttcacaaacacttaataaagatgagttgtcggaacaacatgctggcgctaaaggagcgctagccgtttatctcactcgtggcgcttacacatgttcgcatcccactcaagcagttcataagctatcacgcttaaccacaactacgctgacatccactaagcactatacaccacactatacctgaactccttctcacacgctggcgcatgcatgtggcacgccatcaatgccatcttacgcaactcacatt

SEQ ID NO: 37028 - DNA, 373 bp, Glycine max
tcctgaattcccgggtcgacccagcgcgtccggcaccatctgccacgggatcgtggaggtggatcctttgctcaccccacaagagcctcacctgaacgagatgcagaaccatgggtatgagaaccccacctacaaatacctggagcagatgcacatttaagtggcacggagcgcggcatccctggcagaggcatgcacgaagtccggaagatcccacgattccaatcgactgtcaagcagcagcagctgtcacgggctgcgtctgacatcctgaccttctggactgtaggactatataaagtactactgcataactgcaatttccattcttttaaatgtgtgaaaaatggtgatataacaatatatgatatat

SEQ ID NO: 37029 - DNA, 229 bp, Glycine max
cagctgtcctctgtttcactttcccggcctgcctctttgttgccatgaagggcttctacctatggctggtggtcctgcctgcatgctagctggctcacggccagtatgacctgtaccctcttccgtctttctctgaccactaccagttcacccactatatctaccagatcgacaacccatactactatgattattatgaggtgactccttatacttccgaggaacattt

SEQ ID NO: 37030 - DNA, 213 bp, Glycine max
gactgcaacaacaattaatcaagatgagtgtgagggaacaacatggtgctgctaacggtgtgtttgttgcttcttttccttgtggaggttacacatgcacccatgaacctgagcttctctacaagtgatcagtcttcaagatatgccgacgatcagtgttcaaagaccatcccatgatctcttatgtgtaccccactcaaagcctcctcaatg

SEQ ID NO: 37031 - DNA, 292 bp, Glycine max
acaggacctgacaccctaccgaccttacacttactccgcacgcctctttgcctccgtgcggggttcctacccatgtccggtggttctacctccatacttgctgtcctctggccagtattacatgtacccgcctccgctcttccctgaccacgttcactacacccactatagcgaccagctcgacaacccctattactatcatagtcaccaggggactccttccacctacgtggaacacatcccgtctcaattccagcaccatatccatcacgaatgcataccaccaacaacc

SEQ ID NO: 37032 - DNA, 341 bp, Glycine max
gacacatccagtgcagacacaacttactcgtagactcatctcattacaaccctttgtacccgtaggtttccttacctaccgagagtgttccacaaattcatcaaaatgaccaactattacgcttaacacaccatcattaatgatactcctggatatttcaactatccatttgtgaccattgttccaagtgtcaaaaacaagcctctattcttttacgacaaactttacaaatccaagaaaattgctgtcacacatgactaatactctcaccaggatcatgctatacctcactgacattgacctagctaacatccatatggaattcattgacaaaccataca

SEQ ID NO: 37033 - DNA, 313 bp, Glycine max
atcaaggcggtgagtgccaacaagtgagcctgttgccgagcctgtcatcatggccacaaatgtcgaggtccatgtaatcaccaatgctctgcagactacagccaacatacctgacgaaagacacgatgaacttgcagactctgcgcttgagatcttcatacaagcatcaacagtattccagatgcattcccacaagtctgtgcgactagcccctgtctatcaaaagttattacagaccatgaagcattaccttgaagcactacacgatgaatgcaccaccctagctctcctacaatttctctcacatttcctc

SEQ ID NO: 37034 - DNA, 281 bp, Glycine max
gaccgacgcgtacggtgaacatgacccttcgccatgggccttgttatccttgaacagaggaaaggcgccgtctagatgttcttgacacacttgaagcaccataaaggcactgttttctttttttccattcatttctctgatcttcacttctacatcttgttcatcgtcaacgacatcatccaccacccgggccgctgctctcccctctccaaggtggtcttccgggatccgtatcggttcaataagcggacagatctattcattgtcttcgatggcattca

SEQ ID NO: 37035 - DNA, 235 bp, Glycine max
gggggtcaaagacttcactgacaggcagctttctcaagtgggctggcacgaatactatgattgttagctgtgccttcatcacctcatccctaccttcatccatcgatcatttcgtgctcgataatgaaggtagccttattgaaaatggtgtcacatattatatcttgtcagacataacatcatgtgctggaataagatcatccccaacttgaaatgaaagatgctctctcactgt

SEQ ID NO: 37036 - DNA, 228 bp, Glycine max
acatcctagggcgacatcacaaccaattattacttctaaaacaattaatcaacatgactgggcaagacaactttgtaatgctaaagggccatttgatgcttacattccttctcatgattacaactgcacgcataaaactgaacttattcaaaaatgatcattcatcaaattatcatcattattagtattcaaaaccatactcacatctcttcatgtgcacacactcaa

SEQ ID NO: 37037 - DNA, 361 bp, Glycine max
ttattcacacaactaactaagaaagtcttccagagcgccccaaaaatgaagagcaccatcttctttgctctctttctcttttgtgccttcaccacctcatacctaccttcagccatcgctgatttcgtgctcgataatgaaggtaaccctcttgaaaatggtggcacatattatatcttgtcagacataacagcatttggtggaataagagcagccccaacgggaaatgaaagatgccctctcacttgtgtgccaatctccaattgattccaccaaaggattggaaccatcatcttgttcccataatcaatcccttttatcgcccaaagccattcttttagccttaagttccaatcatttt

SEQ ID NO: 37038 - DNA, 348 bp, Glycine max
  unsure (1)..(348): unsure at all n locations
cggttccagtttacccctaaagggtccggttgccaaaaggcggccgggggggacagccaaaacgcttaatataaataagattgagaagcaccacatggtggctctaaaggtgtgtgtggcgcttctttcccttgtggggttcacatctgcacacatggaactgctcttcttcaaaagtgatcagtcatcaagttatgatgatgatgagtattaaaaactatgctgtgatctctgcatgtgcacactctaaacgcctcctcagtgcagctgagaagatatgaggctgaattcacgccactcagattgtaacagctgtatgtgcacactctcacagncagaacagtgtcg

SEQ ID NO: 37039 - DNA, 386 bp, Glycine max
gacagcactaactattaatgaagatgagtgtgaagaacaacatggtggtgctaaaggtgtggctgtcgcttcttttccttgttggggttactgatgcacacatggaactgaacttgatcaaaagcgatctgtcatcaggttatgatgatgatgaggattcacatccatgctgtgatctctgcttgtacacacgctcaatgtctgatcaatgcagatgtgaagatattaagctgaattcattccagtgagattgtaagatctgcatgtgcacacgcttacagccatgacagtgtccttgtattgactccaacgacttgtgctacgaactttgctagtccataaatgactagaataactaatagctatgctaaatggacgaatccctt

SEQ ID NO: 37040 - DNA, 406 bp, Glycine max
gattcacacgactaactaagaaagtcttccgtagccccccaaaaatgaagagcaccatcttctttgctctctttctcttttgtgccttcaccacctcatacctaccttcagccatcgctgatttcgtgctcgataatgaaggtaaccctcttgaaaatggtggcacatattatatcttgtcagacataacagcatttggtggaataagagcagccccaacgggaaatgaaagatgccctctcactgtggtgcaatctcgcaatgagctcgacaaagggattggaacaatcatctcgtccccatatcgaatccgctttatcgccgaaggccatcctttgagccttaagttcgattcatttgcagttataatgctgtgtgttggaattcctaccgagtggtctgttgt

SEQ ID NO: 37041 - DNA, 268 bp, Glycine max
ggaacggcccacaaaggtgccgattacaacttcagggccaccaaaggcaaggccaccaacggcaccagttacagattcagaaccagagccaccaatttcacattcaggaccaccaaaagcagggcaaccaagagcaccaatttcaacttcgggaccaccaaaagcaagtgcaacaacggcaccgattacaacttcaaggccaccaaaggcaagtccgccaatggcacctattacaacttcagggccagccaagacaccaattacaact

SEQ ID NO: 37042 - DNA, 411 bp, Glycine max
gacagcaaaaacaattaataaagatgagtgtgaagaacaacatggtggtgctaaaggtgtgtttgttgcttcttttccttgtgggggttacagctgcacgcatggaactgagcttcttcaaaagtgatcagtcatcaagttgtgatgatgatgagtattcaaaaccatgctgtgatctctgcatgtgcacacgctcaatgcctcctcaatgcagctgtgaagatattaggctgaattcatgccactcagattgtaagagctgtatgtgcacacgctcacagccaggacagtgtcgttgtcttgacaccaacgacttctgctacaaaccttgcaagtccagagatgactatgaaaactaatagctctctcaaatggacgaagccccttttaggctttgttgtatgttagggg

SEQ ID NO: 37043 - DNA, 401 bp, Glycine max
  unsure (1)..(401): unsure at all n locations
gcttcacagcaaaaacagttagtaaagatgagtttgaagaacaacatggtggtgctaaaggtgtgtttgttgcttcttttccttgtgggggttacagctgcacgcatggaactgagcttcttcaaaagtgatcagtcatcaagttatgatgatgatgagtattcaaaaccatgctgtgatctctgcatgtgcacacgctcaatgccttctcaatgcagctgtgaagatattaggctgaattcatgccactcagattgtaagagctgtatgtgcacacgctcacagccaggacagtgtcgttgccttgacaccaacgacttctgctacaaaccttgcaagtccagagatgactagaanaactaatagctctctcaaatggacgaagcccctttaggctttgt

SEQ ID NO: 37044 - DNA, 144 bp, Glycine max
tgtagtggtaagtgtaacacgtacgtgggatgtgtagttgatcttttgctcggtcgttgtagaggatccaagcatacgtacacgtgcatgcgacgacatagctcttatattgagtcaactctgtatagtttactgacgcgacca

SEQ ID NO: 37045 - DNA, 377 bp, Glycine max
gacagcaaaagcaattaataaagatgagtttgaagaacaacatggtggtgctaaaggtgtgtttgttgcttcttttccttgtgggggttacagctgcacgcatggaactgagcttcttcaaaagtgatcagtcatcaagttatgatgatgatgagtattcaaaaccatgctgtgatctctgcatgtgcacacgctcaatgcctcctcaatgcagctgtgaagatattacgctgaattcatgccactcagattgtaagagctgtatgtgcacacgctcacagccaggacagtgtcgttgtcttgacagcaacgacttctgctacaaaccttgcaagtccagacatgactagacaaacaaataggtctctcaaaatgga

SEQ ID NO: 37046 - DNA, 375 bp, Glycine max
ggggggaatcattgattgtggcatgccatcgcgcaagcctaacgagagcgaaaccctcttgaccatcagcttcttggatagagcagccatcgttgtctggggacaatttccaagctcgtagtgcccaataatcggtaacattatcgttgtcaaagcaatgacttcctcatcgagcgtgaacagcgaatgccaatgtagaaaggccaaacacaaaattgaagtataggtcgacaattgtctcgagttttgccctctgaggattctgagctcctaacttgttaccaacatgtgtggacattttgaaactcaaagaagaccaaaaaatgtatatcaaagttgttgtttgaatcaaaacccccattgatgcacaagaag

SEQ ID NO: 37047 - DNA, 311 bp, Glycine max
gattcatgcacctgaattattgatgaagttcgatttccatcacagcggtgcaaaatgtatatcagtagcttgttcgccatctttcgagggtacgcgctcacctgaaactgagcttccgccaacgctcatgatctgctcgacatggatagcgatactattcggaacggttccataatctacgttttgccggccacacaaggactcggtggcggaacagtgcgaaccgcacgcgggaatgacacttgcccgatcgttgtagtggtatctcccaatccacacaccaaggggtgtgtcattaactttgaatctgc

SEQ ID NO: 37048 - DNA, 354 bp, Glycine max
acgcgtccgtacaaacgtccgtacgcgagaagacgacagagaggacagagacccggaaagggtgggaatcgcttttggaaatccattgggcttggatttaagactcccagggaagccatcgaaggagtctacattgacaacaagtaccccttcactggcaatgtttctatctgtggccgtaacttggctggaacatgtcacagtgctaacattaataggactattattgttaggacgaattatctccattttatcaataagtaccagaggtacaagaaaaggcactccaacattcctgctcatatatcacctgccttccgtgtgaaagaatgacatcaccttaatactggtcaa

SEQ ID NO: 37049 - DNA, 316 bp, Glycine max
gagaacagaaacacttaataggtatgagtttcaagaagaacatggtggtgctaaaagtgtgtatgttgcttcatttccttgtgggggttacagctgcacgcatgtaactcagcttcgtcaaaattgatcagtctgcacgttacgatgatgaagagtattcaagtccatgcagtgatctcagcatgcgcacacgcacaatgcctcctcaatgcagctgtgaatatcataggctgaattcatggcactcagattgtcatacccgtatgtccacaggctcacatccaggagagtgtcattgtcttgataccggtgactt

SEQ ID NO: 37050 - DNA, 161 bp, Glycine max
gattcacgcagctacgtaagacttgaatagtactatcgtctttgctctctttccaatctgtgccatcatcagcgcagtgggggcttcagccaccgctcagttcgtgctcgacactgatgatgatcctcttcacataccgtcgcacacaccatactgttgcc

SEQ ID NO: 37051 - DNA, 282 bp, Glycine max
gacacaactaactaacaaagtcttcgataggccgccgaaaatgaagagcaggatcttctttgcgctctttctgttttgtgccttcaccacctcatacgtaccttcggccatccctgatgttgtgctcgataatgaaggtaacgctcttgaaaatggtggcacatatgacatcttgtcagacataacagcagttggtggaataagatcagccccggcgggaactgacatatgccctcttaatgtcgtggaatctcgcaatgatctcggacaaatggattggaa

SEQ ID NO: 37052 - DNA, 408 bp, Glycine max
ggttctagtgtatgtgattgttgtgactcgttcttcttcgtcgttatcttcttcttttgttgtttgtgtgtttgttttttctctcacctgaaaatgtcttgctgcggtggcaactgtggttgcggaagcgcctgcaagtgcggcaacggtcgcggaggctgcaagatgtacccagacttgagctacaccgagtcaaccaccaccgagaccttggtcatgggagtggcaccagttaacgctcaattcgagagtgctgaaatgggtgttcccgctgagaacgatggctgcaaatgtggagctaactgcaactgcaacccctgcacttgcaagtggggtgttggagaactaaagcttcaagcaaaaatgggacttagaaaataatgataaaactatatgtaatttcaaaac

SEQ ID NO: 37053 - DNA, 379 bp, Glycine max
gattcacacaactaactaagaaagtcttccatagccccccaaaaatgaagagcaccatcttctttgctctctttctcttttgtgccttcaccacctcatacctaccttcagccatcgctgatttcgtgctcgataatgaaggtaaccctcttgaaaatggtggcacatattatatcttgtcagacataacagcatttggtggaataagagcagccccaacgggaaatgaaagatgccctctcactgtggtgcaatctcgcaatgagctcgacaaagggattgggacaatcatctcgtccccatatcgaatccgttttatcgccgaaaggcatcctttgagccttaagttcgattcatttgcagttaaaatgctgtgtgt

SEQ ID NO: 37054 - DNA, 417 bp, Glycine max
gacagcaaaaacaattaataaagatgagtttgaagaacaacatggtggtgctaaaggtgtgtttgttgcttcttttccttgtgggggttacagctgcacgcatggaactgagcttcttcaaaagcgatcagtcatcaagttatgatgatgatgagtattcaaaaccatgctgtgatctctgcatgtgcacacgctcaatgcctcctcaatgcagctgtgaagatattaggctgaattcatgccactcagattgtaagagctgtatgtgcacacgctcacagccaggacagtgtcgttgtcttgacaccaacgacttctgctacaaaccttgcaagtccagagatgactagaaaaactaatagctctctcaaatggacgaagcccctttaggctttgtttgttatgttaggggagaca

SEQ ID NO: 37055 - DNA, 341 bp, Glycine max
tgggaagcaaggacggaagaaataaaccgaatgagagcattaacctcgtcttcatccacgttcattccaaagcgttattccttcatcgtcttcctctcgattctcttcgctcttcgatcctcgtcagggggctgctccgaataccaccaccatcacgcgccgatggccactataggatgcttacacgactcgcaaggctctcaggacagcgtccagagtgaggcccacgctcagttcgcacgtcgatgaatacatgaagaagcacaactcacttctggagttctcaacggtggtgatgacacatgaacacgttgttgcgggaaccctgcatcaccgtactc

SEQ ID NO: 37056 - DNA, 360 bp, Glycine max
ggggaaacaaaaacaaaacatttcgtccgaaactaatataacgtgttcctccttggaagaagccatagccataacatagccaccagaaaacaaaacccaccttagttattaaaagaaccaaagaaaaaaaatcaaaaaaaaagaaggcggcggcccaaaaggttcaaacctaaggtatccttgaagggaagttcaaaccccttcaaaatggtcaccaaaattaaattcacgggccgccgtttaacaacgtcctgctgggaaaaaccctgcggttaccaaatttaacccccttgaacaaaatccccctttcgcaagctggggtattaccaaaaaggcccgaaccgttggcccttccaaaaa

SEQ ID NO: 37057 - DNA, 303 bp, Glycine max
gattcacacagctaactaagaaagtcttccatagccccccaaaaatgaagagcaccatcttctttgctctctttcacttttgtgccttcagcatcgcataccgaccttcagccatcgctgatttcgtgctcgataatgaatgtaaccctcttgaaaatggtggcacatattatatcgtgtcagacataacaacatttggtggaataagagcagccccaacgggaaatgaaagatgccctctcactgtggtgcaatctcgcaatgagctcgacaaggggattggaacagtcatctcgtcgccat

SEQ ID NO: 37058 - DNA, 406 bp, Glycine max
gattcacacaactgactaagaaagtcttccatagccccccaaaaatgaagagcaccatcttctttgctctctttctcttttgtgccttcaccacctcatacctaccttcagccatcgctgatttcgtgctcgataatgaaggtaaccctcttgaaaatggtggcacatattatatcttgtcagacataacagcatttggtggaataagagcagccccaacgggaaatgaaagatgccctctcactgtggtgcaatctcgcaatgagctcgacaaagggattggaacaatcatctcgtccccatatcgaatccgttttatcgccgaaggccatcctttgagccttaagttcgattcatttgcagttataatgctgtgtgttggaattcctaccgagtggtctgttgt

SEQ ID NO: 37059 - DNA, 338 bp, Glycine max
gcactcactcatatgtgtgagaccagcttttgcttctttgtgaacatggagatgaggaactcatgtggcttcttcttcttgctcctcctccttgtctttgcttcccaggtggtggtgcatacggagggaacagtgtgtgagtcacaaaaccactggtactagggtttgtctaatataaaccacaagtgtgctttggtctgcaagaaccaatgtttctccggtggtaagtgtaaaggcttccgctgccgttgcttttgcaccaagatttgttgagatctcatcaaatacgactcttgccatgccaattcataaatcatagctaggccaaatgaaatgca

SEQ ID NO: 37060 - DNA, 416 bp, Glycine max
gacagcaaaaacaattaataaagatgagtttgaagaacaacatggtggtgctaaaggtgtgtttgttgcttcttttccttgtgggggttacagctgcacgcatggaactgagcttcttcaaaagtgatcagtcatcaagttatgatgatgatgagtattcaaaaccatgctgtgatctctgcatgtgcacacgctcaatgcctcctcaatgcagctgtgaagatattaggctgaattcatgccactcagattgtaagagctgtatgtgcacacgctcacagccaggacagtgtcgttgtcttgacaccaacgacttctgctacaaaccttgcaagtccagagatgactagaaaaactaatagctctctcaaatggacgaagcccctttaagctttgtttgttatgttaggggagac

SEQ ID NO: 37061 - DNA, 326 bp, Glycine max
ggattcacacaactaattaacaacttcttccatacccccccaaaaatcaacagcaccatcttctttgctctctttctcttttgtgccttcacgacctcatacctaccttcatccatcgctgatttcctgctctataattaacgtaaccctcttcaaaatcgtggcacatattatatcttgtcagacataacagcatttggtcgaataataccatctccacacgcaaattaaaccatctcctcccactgtgtcgcaatctcacaatgcgctccacaaacggattccaacaatcctctcgtccccactatctagtctgtctttattcc

SEQ ID NO: 37062 - DNA, 419 bp, Glycine max
gacagcaaaaacaattaataaagatgagtttgaagaacaacatggtggtgctaaaggtgtgtttgtcgcttcttttccttgtgggggttacagctgcacgcatggaactgagcttcttcaaaagtgatcagtcatcaagttatgatgatgatgagtattcaaaaccgtgctgtgatctctgcatgtgcacacgctcaatgcctcctcaatgcagctgtgaagatattaggctgaattcatgccactcagattgtaagagctgtatgtgcacacgctcacagccaggacagtgtcgttgtcttgacaccaacgacttctgctacaaaccttgcaagtccagagatgactagaaaaactaatagctctctcaaatggacgaagcccctttaggctttgtttgttatgttaagggagacaaa

SEQ ID NO: 37063 - DNA, 355 bp, Glycine max
gacggcaaaaacaattaataaagatgagtttgaagaacaacatggtggtgctaaaggtgtgtttgttgcttcttttccttgtgggggttacagctgcacgcatggaactgagcttcttcaaaagtgatcagtcatcaagttatgatgatgatgagtattcaaaaccatgccgtgatctctgcatgtgcacacgctcaatgcctcctcaatgcagctgtgaagatattaggctgaattcatgccactcagattgtaagagctgtatgtgcacacgctcacagccaggacagtgtcgttgtcttgacaccaacgacttctgctacaaaccttgcaagtccacagatgactagaaaaa

SEQ ID NO: 37064 - DNA, 190 bp, Glycine max
  unsure (1)..(190): unsure at all n locations
cagaagggtacggcctacanaacgggatcaagacccagttcaatatcctactacatcgtattaaagaatttactatatactatcatcatatctcggttcccagggggtgttggtgggagttgtcttcctcacaccactgtcttctccatttcgcattccctattttgatctgcaccagtccactccccct

SEQ ID NO: 37065 - DNA, 383 bp, Glycine max
gattcacacagctaactaagaaagtcttccatagccccccaaaaatgaagagcaccatcttctttgctctctttctcttttgtgccttcaccacctcatacctaccttcagccatcgctgatttcgtgctcgataatgaaggtaaccctcttgaaaatggtggcacatattatatcttgtcagacataacagcatttggtggaataagagcagccccaacgggaaatgaaagatgccctctcactgtggtgcaatctcgcaatgagctcgacaaagggattggaacaatcatctcgtccccatatcgaatccgttttatcgccgaaaggcatcctttgagccttaagttcgattcatttgcagtttatatgctgtgtgttggg

SEQ ID NO: 37066 - DNA, 205 bp, Glycine max
gattcacacaactaactaataaagtcttccatagccccccaaaaatgaagagcaccatcctctttgctctctttctcttttgtgccttcaccacctcatacctaccttcagccatcgctgatttcgtgctcgataatgaaggtaaccctcttgaaaactgtggcacatattacatcttgtcagacataacagcatttggtggaac

SEQ ID NO: 37067 - DNA, 342 bp, Glycine max
gattcacacaactaactaagaaagtcttccatagccccccaaaaatgaagagcaccatcttctttgctctctttctcttttgtgccttcaccagctcatacctaccttcagccatcgctgatttcgtgctcgataatgaaggtaaccctcttgaaaatggtggcacatattatatcttgtcagacataacagcatttggtggaataagagcagccccaacgggaaatgaaagatgccctctcactgtggtgcaatctcgtaatgagctcgacagagggattggaacaatcatctcgtccccagagcgaatccgttttatcggccgaagaccatcctttgagc

SEQ ID NO: 37068 - DNA, 399 bp, Glycine max
ggggttctcctttggcagaaaaagcgatgattgattgcttctctctatctccacatttcttgcgtactcttcccttccggaccaaatcaaacctttttcataggtcgtttatcgagttttcgctttgacacttttacctcgttgatcctcgtcagtgtagaattctccgaattgaggtatggggaggctgtttgtgaaccatctggaggggcatgtctatagctgcaaacactgccgcacccaacttgctcactatgaagacatcgtttccaagtcgttccacagtagacatgggaaagcttatcgcttcagtaaggtcgtgaatgttaacgttggagtatatgacgacagatatatgctcaatgggatgcaaactgtggctgacattttctgtgtggg

SEQ ID NO: 37069 - DNA, 418 bp, Glycine max
gacagcaaaaacaattaataaagatgagtttgaagaacaacatggtggtgctaaaggtgtgtttgttgcttcttttccttgtgggggttacagctgcacgcatggaactgagcttcttcaaaagtgatcagtcatcaagttatgatgatgatgagtattcaaaaccatgctgtgatctctgcatgtgcacacgctcaatgcctcctcaatgcagctgtgaagatattaggctgaattcatgccactcagattgtaagagctgtatgtgcacacgcccacagccaggacagtgtcgttgtcttgacaccaacgacttctgctacaaaccttgcaagtccagagatgaactagaaaactaatagctctctcaaatggacgaaacccctttaagctttgtttggttagttaggggagacaa

SEQ ID NO: 37070 - DNA, 416 bp, Glycine max
gattcacacaactaactaagaaagtcttccatagccccccaaaaatgaagagcaccatcttctttgctctctttctcttttgtgccttcaccacctcatacctaccttcagccatcgctgatttcgtgctcgataatgaaggtaaccctcttgaaaatggtggcacatattatatcgtgtcagacataacagcatttggtggaataagaggagccccaacgggaaatgaaagatgccctctcactgtggtgcaatctcgcaatgagctcgacaaagggattggaacaatcatctcgtcaccatatcgaatccgttttatcgccgaaggccatcctttgagccttaagttcgattcatttgcagttataatgctgtgtgttggaattcctaccgagtggtttgttgtggaagatcta

SEQ ID NO: 37071 - DNA, 182 bp, Glycine max
gagtgcaatttagctgaagcaaagcaatggctacttcaaagttgaaaacccagaatgtggttgtatctctctccctaaccttaaccttggtagtggtgctactgaccagcattgcaacctcagcggaaaccgtctcgttcatctggaacaactccgtgccgacacatccagacatgatcctc

SEQ ID NO: 37072 - DNA, 254 bp, Glycine max
cgggattcacacacctaactacgaaagtcttccatagccccccaaaaatgaatagcaccatcttctttgctctctttctcttttgtaccttggggaggtcatacctaccttcacccatccctgatttcgtgctcgataatgaatgtaaccctcttgaaaattcttgcacatactacaccctgtcagacataacaacacttcgtggactcatagctgccccaactggaaattaaacatgccctctcactgtggtg

SEQ ID NO: 37073 - DNA, 304 bp, Glycine max
gattcacacaacggactaagaaagtcttccatagccccccaaaaatgaagagcaccatcttctttgctctctttctcttttgtgccttcaccacctcatacctaccttcagccatcgctgatttcgtgctcgataatgaaggtaaccctcttgaaaatggtggcacatattatagcctgtcaaacaaaacaacaattggtggaataagaacacccccaacggaaattaaaagatccctcccactgtggtgcaatctcgcacatagccccacaaagggatttggacaatcaactcgtccccaaat

SEQ ID NO: 37074 - DNA, 323 bp, Glycine max
ggacccacttcgctgcgcgccaaacattgcactgcgcgaaaagtctggcttggtaggtcacacaagtttaaacattacattcctctcagagtatggacactcagaaagggccgtcttcatcggctgcagctgttacttcatgtcgaaagaagaagaacgaagaagccacttttttggaggacttgaaggatcacattgacgagtttattaatgcttctatggatgaacataagacttgcttcaagaaaacggttcagaagatgttcggaatgtccaatgctgttgcagacagggacaccaatgctgccaaagaaatttgagag

SEQ ID NO: 37075 - DNA, 417 bp, Glycine max
gacagcaaaaacaattaataaagatgagtttgaagaacaacatggtggtgctaaaggtgtgtttgttgcttcttttccttgtgggggttacagctgcacgcatggaactgagcttcttcaaaagtgatcagtcatcaagttatgatgatgatgagtattcaaaaccatgctgtgatctctgcatgtgcacacgctcaatgcctcctcaatgcagctgtgaagatattaggctgaattcatgccactcagattgtaagagctgtatgtgcacacactcacagccaggacagtgtcgttgtcttgacaccaacgacttctgctacaaaccttgcaagtccagagatgactagaaaaactaatagctctctcaaatggacgaagcccctttaggccttgtttgttatgttaggggagaca

SEQ ID NO: 37076 - DNA, 246 bp, Glycine max
gattcacacaactaactaataaagtcttccatatccccccataaatgaagagcaccatcttctttgctctctttctcttttgtgccttgagcacctcatacctatcttcatccatcgctgatttcgtgctcgataatgaaggtctccctcttgacaatggtggctcatactatatcttgtcagacataacaccatttggtgcaatactagcagctcctacgggaatttaaacatgccctctcactg

SEQ ID NO: 37077 - DNA, 422 bp, Glycine max
gaataatgttaatatcagagagacagcttatccttaaggcttgacccaaagccactcactcgtgcgtgtgtatagcgtagcagctaaggggaatgcccactttgaatctcttcacaaacgttcctgtcgacaccgtcgttgcttctgacattctcagagatgccaccaaagctgttgcaaaaatcatcggaaaacccgaatcctatgtgatgattttgttgaatgggggagtgcctattgcatttgctggaactgaagagccagctgcttatggagaactgatctcgattgggggccttggtccgagtgtcaatggaaaactgagttctacaattgcagaaattcttgaaactaagctatacattgacagttcccgtgtctatatcaagttttatgatgttcagcgctcattctttgggttc

SEQ ID NO: 37078 - DNA, 163 bp, Glycine max
cggtaccgctgccacaataccacagaatgggacagcacagacaattgggtaccatcactttcaaaaacaacatggtggtcctaaatgtctctttgttgcttcttttccttcttggggttacatctcctcacattgatctcaccttcttcaaacctcatcactc

SEQ ID NO: 37079 - DNA, 257 bp, Glycine max
acacgtctcttattacccatcctcccacatttcggtaattttgcaaataatgctcccatcgccctttgtttcattctctgttctaacattttgttctgtgtggccttctcttcatctgttatgtgtgcctcggtgccatttgtgcctaaaaacctgagctggaccttcaccaacctctggatctattgtgtcgggcctctcatccgttgttttctccctgtcttttatttaccatgttttctttatcttcttctctc

SEQ ID NO: 37080 - DNA, 245 bp, Glycine max
gacagcaaaaacaattaataaagatgagtttgaagaacaacatggtggtgctaaaggtgtgtttgtgacttcgggtccttgtgggccttacaaatgcacgcatggaactgagcttcttcaaaagtgatcagtcatcgacttatgatgatcaccagtactcaggatcatgctgtgatccctgcatgtccacacgctcaatagttcctcactgctactctggggataataagctgcattcatgccaa

SEQ ID NO: 37081 - DNA, 200 bp, Glycine max
cacatagagggatgcacggaactgacgatcgaagtcttccatagggccccgcagttgaaaggcaccatcttgtttgctctctttctcttttgtgccttcagcagctcatagctaccgtcagccatcgctgatttcgtgctcgatactgcaagtagacctcttgaatatggtaggacatagtatatcttgtcatacatggg

SEQ ID NO: 37082 - DNA, 306 bp, Glycine max
gacactcctagtcatcaaacgtcttcgataacaccacaaacttgaagatcaccatcttcgttgctctcgttctcgctcgtgccttcggaacctcatacctagcttcatgtatcgctgatttcgtgctccatagtgattggtaaccctcttgaatatggtggcaatgatatatcttgtcatgacatagcatcatttggttgaatatgacctgccacaacgggaggtgacagatgatctctcactgtggtgcaaactagcagtgagctcgacaaacggattggaacactcatctcatcaccatatcga

SEQ ID NO: 37083 - DNA, 301 bp, Glycine max
tcaatcgcaactgtcgctcgacgctcacaaaccggtaccgtagctcccaacacgtgttcaccggcacggatcgcgtcatgacgggaggagggtccagctgcgaatctaagacagccgggtatcctgctgctgtgatgacaaacggagccgccaccactgcgacgtaagcccccggcaaagggaaagcagcgaaagaacctaacaagcgaacgaggcgtctaagtgctttcttcgctttcatggaagatttcaggactgtattcaagatacaacatccctgaatacaaggcagtgtctgctg

SEQ ID NO: 37084 - DNA, 325 bp, Glycine max
aatagcagaaacaattaacattgatgactttgacgaacatcatgatagtgcaaatagtatgtttattgcatctgttccctgtggaggtgacagctgacaacacagatctcagcttcatcaaaactcataattcatcacgataagatgacaatcattaatcacaatcatgctcagatctctgcaagtgcacatcctcaataccactgcaatacacctgtaaaaatattatgctgcattcaagctactcatagtgtaagatctgaatgtacacactctcacactcattacagtgtcgctggcgtgaacaaaacgtcttctgctacaa

SEQ ID NO: 37085 - DNA, 318 bp, Glycine max
tgggacatcaatcacaattaacacacacgcaattccataacatcatggcggtgctaaacgcgtgcttgttgcttcttttcattgtgggggttacacctgcacccatagaactgaacatcttcacaagtgatcagtcatcaatcatacaattactatcattcaccatcatcatgctatgatctcagcatgtgcacacgcgcaatgtttcctcaatccacatgctcacatattatgatgaattcattccaatcagatcgtacgaactcttcgtgaatacactcacagccaagacagtatcttttacccgagatcaacaaa

SEQ ID NO: 37086 - DNA, 394 bp, Glycine max
gatccaatccaattgaattctccagagagaagaagaaacttaatcgatcatcacttcacttcactaatacatcatggcagacgggacccagaacaagtatgagagctctgaggttgaggtccaggatcgtggtgtttttgactttctcggtaagaaaaaggatgaagaagacaagcctcatcctcaggaggaggtcatcgccaccgagtttcaaaaagtcactgtctcagaccaaggagagaacaagcacagcctcttagaaaagcttcaccgatttgacagcagctctagctctgtaagcttcttttcctttattttctttgcatgcataaacattatatatataacttgttcatcctgaaaggaataactttatattaacttgtcttttttt

SEQ ID NO: 37087 - DNA, 160 bp, Glycine max
cgtccgtagagaagactacacaaggggacgcacattcacaacacaacacaaacaacatcacgtcaccataaataaacaagcggccgctctacaggatccaagcttacctacccgtgcatgcggggtcggagctcttctatactgtcacataaattcagct

SEQ ID NO: 37088 - DNA, 405 bp, Glycine max
gacagcaaaaacaattaataaagatgagtttgaagaacaacatggtggtgctaaaggtgtgtttgttgcttcttttccttgtgggggttacagctgcacgcatggaactgagcttcttcaaaagtgatcagtcatcaagttatgatgatgatgagtattcaaaaccatgctgtgatctctgcatgtgcacacgctcaatgcctcctcaatgcagctgtgaagatattatgctgaattcatgccactcagattgtaagagctgtatgtgcacacgctcacagccaggacagtgtcgttgtcttgacactaacgacttctgctacaaaccttgcaagtccagagatgactacaacaactaatagctctctcaaatggacgaagcccctttaggctttgtttgttatg

SEQ ID NO: 37089 - DNA, 143 bp, Glycine max
  unsure (1)..(143): unsure at all n locations
gagtgcaatttagctgaagcacaccaatggctacttcaaagttgaaactccanaatctggttctatctctctcccggggcgggggcttggcactgctcctactcacccgcaccgtaaactcatcttaccctgtctctttccac

SEQ ID NO: 37090 - DNA, 348 bp, Glycine max
gactcgcagttgtattgttgaacaagggtttctctgtctgcttcttcactttctctcgtttcaatcgaaaccaaaacaaaaacatgggcagaaaattcttcgtcggtggcaactggaaatgcaatgggaccactgaggaggtaaagaagattgttactactttgaatgaggctaaagtccctggagaagatgtcgtagaagttgttgtgagccctccttttgtgttccttcctgttgtaaaaagtttgctgcgccctgatttccgtgtttcagcacaaaactgttgggttcgcaaaggtggtgcctataacgggtgaggttactgctgaaatgcttgttaatttgggg

SEQ ID NO: 37091 - DNA, 335 bp, Glycine max
  unsure (1)..(335): unsure at all n locations
gacagacagacacacactcggttctgccttcacaaaaaaattatcgagatcccctttttctcctaagaaaagccatggctaagggtcccggtctctactctgacatcggcaagaaagccaggggtactctctctctaattatgttgaaattctattaaattgtggtttttttggggggtagaatttttccttactgttaaaaattggtgctttttgatgaatcctaaatgggtttttgtttgtttggtgtagatctgctgttcaaggactaccacagtgaccagaagttcaccatcaccacctactcacccactggagttgtgagtgtntttttt

SEQ ID NO: 37092 - DNA, 228 bp, Glycine max
taccgatgcgcatggtggagctaaaggtgctgttgttacatcatttccatgggtacggttgagatgcacgcatcgaacggtacttcttcaaaaataatacttcatgatattgctgatgatgatcgatattcagagccatgcttttatctctgcatttgcacacgctcaatgcctcctcaatgcacctgtcaggatactacgctgaattcacgccacttagattcttac

SEQ ID NO: 37093 - DNA, 290 bp, Glycine max
taggggcacatgtgagtttgttgatcgagatagctacagacagtgtgatgccaatgaaggtccttgttatcggcgttgctacaattttggtactcatggcaatgccatgcctataagatgattccctctccgaatgaaaactggctatggtgcgcgttctccggaggtgaaatgcgcaagttggaggcttgctgtggaagcacacatcatctttggctttggtaccattcctgaatagtgccttgaaacgtcaaatgaatacatccatggcgaacaatatagatcagact

SEQ ID NO: 37094 - DNA, 329 bp, Glycine max
gacagcaaaaacaattaataaagatgagtttgaagaacaacatggtggtgctaaaggtgtgtttgttgcttcatttccttgtgggggttacagctgcacgcatggaactgagcttcttcaaaagtgatcagtcatcaagttatgatgatgatgagtattcaaaaccatgctgtgatctctgcatgtgcacacgctcaatgcctcctcaatgcagctgtgaagatattacgctgaattcatgccactcacattgtaagtactgtatgtgcacacgcgcacagccagaacagtgtcgttgtcttgacactaatcacttctgctacaaacct

SEQ ID NO: 37095 - DNA, 138 bp, Glycine max
gacaccagacaacacacaatattatgcaagcgatgccattggcgttcacttcgccaatcggccgctcgataggatccaagcttacatacgcgtgcatgcaacgtcatcgctcttcaacactgtcacctaaattcagtt

SEQ ID NO: 37096 - DNA, 369 bp, Glycine max
  unsure (1)..(369): unsure at all n locations
gacagcagaaacaattaataaagatgagtttgaagaacaacatggtggtgctaaaggtgtgtttgttgcttcttttccttgtgggggttacagctgcacgcatggaactgagcttcttcaaaagtgatcagtcatcaagttatgatgatgatgagtattcaaaaccatgctgtgatctctgcatgtgcacacgctcaatgcctcctcaatgcagctgtgaagatattatgctgaattcatgccactcagattgtaagatctgtatgtgcacacgctcacagccaagacagtgtcgttgtcatgacaccaacgacttctgctacaaaccttgcaactcganagattactagaacaactaataactctctc

SEQ ID NO: 37097 - DNA, 420 bp, Glycine max
gacagcaaaaacaattaataaagatgagtttgaagaacaacatggtggtgctaaaggtgtgtttgttgcttcttttccttgtgggggttacagctgcacgcatggaactgagcttcttcaaaagtgatcagtcatcaagttatgatgatgatgagtattcaaaaccatgctgtgatctctgcatgtgcacacgctcaatgcctcctcaatgcagctgtgaagatattacgctgaattcatgccactcagattgtaagagctgtatgtgcacacgctcacagccaggacagtgtcgttgtcttgacaccaacgacttctgctacaaaccttgcaagtccagagatgactagaaaaactaatagctctctcaaatggacgaagccccttaagccttgtttgttatgttaggggagacaaata

SEQ ID NO: 37098 - DNA, 372 bp, Glycine max
  unsure (1)..(372): unsure at all n locations
gacagcanaaacaattaataaagatgagtttgaagaacaacatggtggtgctaaaggtgtgtttgttgcttcttttccttgtgggggttacagctgcacgcatggaactgagcttcttcaaaagtgaccagtcatcaagttatgatgatgatgagtattcaaaaccatgctgtgatctctgcatgtgcacacgctcaatgcctcctcaatgcagctgtgaagatattaggctgaattcatgccactcagattgtaagagctgtatgtgcacacgttcacagccaggacagtgtcgttgtcttgacaccaacgacttctgctacaaaccttgcaagtccagagatgactagaanaactaatagctctctcaaa

SEQ ID NO: 37099 - DNA, 416 bp, Glycine max
gacagcaaaaacaattaataaagatgagtttgaagaacaacatggtggtgctaaaggtgtgtttgttgcttcttttccttgtgggggttacagctgcacgcatgggactgagcttcttcaaaagtgatcagtcatcaagttatgatgatgatgagtattcaaaaccatgctgtgatctctgcatgtgcacacgctcaatgcctcctcaatgcagctgtgaagatattaggctgaattcatgccactcagattgtaagagctgtatgtgcacacgctcacagccaggacagtgtcgttgtcttgacaccaacgacttctgctacaaaccttgcaagtccagagatgactagaaaaactaatagctctctcaaatggacgaagcccctttaggctttgtttgttacgttaagggagac

SEQ ID NO: 37100 - DNA, 406 bp, Glycine max
  unsure (1)..(406): unsure at all n locations
gacagcanaaacaattaataaagatgagtttgaagaacaacatggtggtgctaaaggtgtgtttgttgcttcttttccttgtgggggttacagctgcacgcatggaactgagcttcttcaaaagtgatcagtcatcaatttataataatgatgattattcaaaacaatgcggtgttccctgcatttgcacacgctcaatgcttcctcaatgcacctgtaaaaatattaggctgaattcatgccactcaaattgtaaaacctgtatttgcaaacgctcacagccagaacattgtcgttgtcttgacaccaacgacttctgctacaaaccttgcaattccagagatgactagaaaacctaatacccctctcaaatggacgaagccccttttaggctttgtttgttaag

SEQ ID NO: 37101 - DNA, 286 bp, Glycine max
catccgtcaggaaggcagtaggctaccgacggggagaccactggcaatttataaagttgcgtttgacgatcaacatgttggtgctaaaggtgtgtttgttgcttcttttctctgtgggggttacatctgcacgcatggaactgagcttcttcactagtgcttagtcatccaattatgatgatgatgacttttctaaatcatgctgtgatctctgcatgtgcacacgctcaatgcctcctcaatgcaactgtgaatatattaggctgaattcatgccactcagattg

SEQ ID NO: 37102 - DNA, 234 bp, Glycine max
gacattacaaacattctctccattgtctttgaacactcatcaccatggtcaaccttgttcgttctctttgtttccttcttttcggtggttggctcgctctgagtgagcaggcttaccatagtgagtggcatatcgtattgctcaatgccctcaaaccggctaatcgtatacagtcggcatgcgggtgcattgagacttgggtcccttacagtacactattccactctttcggtg

SEQ ID NO: 37103 - DNA, 419 bp, Glycine max
gacagcaaaaacaattaataaagatgagtttgaagaacaacatggtggtgctaaaggtgtgtttgttgcttcttttccttgtgggggttacagctgcacgcatggaactgagcttcttcaaaagtgatcagtcatcaagttatgatgatgatgagtattcaaaaccatgctgtgatctctgcatgtgcacacgctcaatgcctcctcaatgcagctgtgaagatattaggctgaattcatgccactcagattgtaagagctgtatgtgcacacgctcacagccaggacagtgtcgttgtcttgacaccaacgacttctgctacaaaccttgcaagtccagagatgactagaaaaactaatagctctctcaaatggacgaagcccctttaagctttgtttgttatgttaagggagacaaa

SEQ ID NO: 37104 - DNA, 428 bp, Glycine max
ggagagtcagagatggtagctattggctttggagcccctccttctccacttccgtttcatcttcgcctggcttcctctccttctcctttggccttcccaataatccacaaattccaaaacgcaggcaagtcagtgataacaatctgttcaaagaaaaatgcaaaatcaagggtggtcactctctgctctgcacctgtgcaagaggttagtgatattactttgagagagagaagtgtttcggttgtcctattggctggagggcagggcaagaggatgggagctagtatgccaaagcagtatcttcctctttttggtcaacccattgctttgtatagtttccacactttttttcacctggttcaagtcaaaaacattactgtgggttgtgatccttcatacaaagacatttttgaacatgcaaagggaga

SEQ ID NO: 37105 - DNA, 250 bp, Glycine max
acaacagagacaattactctagataagttttacgatcaacatggtggagctaagggtgtgtttgttgattcttttccttgtggaggtaagagctgcacttctgaaactaaggtatcgtcacaactgataattcatcattttatgacaaagatgattattcaacaccatgctgtgatctctacaagtacacacgctcaatccctcatatctgcatctataaatatattaagcatagttcatgcaactcaga

SEQ ID NO: 37106 - DNA, 266 bp, Glycine max
gaggggagaaagagttaataaagatcagtttggtgcacaacagagtggcccttaaggtgtgtttgttgcttccatcacttgtaggggttcgatgtgttgtcatggatatgagcttcctcataaatgatgaatcagcaacttatgatgatgatgaatacataatcaatgcagtgatttctgtctgtacaaacgcacaatgaatactgaatgcacctgtcacaatattaggctgaattcatgcgacgcacatagttgtaactgtttat

SEQ ID NO: 37107 - DNA, 324 bp, Glycine max
ggataggacacagctaactaatttcggtcttcgataccttcccaattgtggagagcaccagtcttctttgctcgctttctcttttgtgccgtcagcatctcatgcctaccttcagccatcgctgatttcgtgcacttaaatgattgtaaccctcttgaacatggtggcacatattatatcttgtccgacatgataccatctggtggaataagagcagccccaacgggaactggaagatgttctctcactgtggtgtaatcgcgcgttgttctccaaaatcggattggaaaaatcatctcgtctccatatcgtaaccgttttatc

SEQ ID NO: 37108 - DNA, 270 bp, Glycine max
gggtggaaaaggacgccacaaggtgctcatgtaagaaatctacaccacaggaggcctatgctacacgataaaagcttgtttcttcttccattaaacgtcatacggcgtcgggcgtgacacctagattcaattcattggccgtctttttactacttcccgattgggaattcccagacattcaccagcttaatcgccatgcaccatatccccctttcgcatccttgcttacctacgactgggcccgctctcatgactctccacaagagttgc

SEQ ID NO: 37109 - DNA, 287 bp, Glycine max
ggtacggcagcgcggcgacaacacaacggtagggtaccgctgcgacaacacgacggtacggtagcgctgcgacaacacgacagggcgcggcacagttgattttgctgatcgagataactcaatacaatgtgattagagttcatgtccttcttctcttcgatgctacaggtttcatagcattgcaatgccatgcatacgatctctcccctctccgactcagcactggctacgcttcccctacaccggaggtgcactgctcagattcgtggcgtgctgtcacaccacac

SEQ ID NO: 37110 - DNA, 133 bp, Glycine max
cggggtaacatttacttacgcaccttttccaagaacaagcttgaagctgggggcgggcgctctacaggatctaaactttcatatgcgtgcatgcgacatcataactcttctataatgtcacctctattcattt

SEQ ID NO: 37111 - DNA, 379 bp, Glycine max
gattcacacaagggactaagaaagtcttccatagccccccattaatgaagagcaccatcttctttgctcgctttctcttttgtgccttcaccacctcagagctaccttcagccatcgctgatttcgtgctcgataatgaatgtaaccctcttgaaaatggtggcacatattacatcttgtcagacatatcagcatttggtggaataagagcagccccaacgggaaatgaaagatgccctctcactgtggtgcagtctcgcaatgagctcgacaaatggattgggacactcatctcgtccccatatctaatctgttttatcgccgaacgtcatcctttgagccttaagttcgattcatttgcagttataatgctgtgtgt

SEQ ID NO: 37112 - DNA, 329 bp, Glycine max
tccgttaggatgcaacaacagaacgggaggggattcacaagtgtattcagtgagtgcttcgagatcacccgataactgaacagcaccatcttctttgctctccttctcttttgtcccttcaccacccgcagggcaagcttgagccagcgactcatttcgtcctctataatgatggttcgcctctttacaacgctggcatctattacatcttgtccggcataagatcatttggtgcatacaaaacacccccacagggaagtgctgcatgccctctcagtgtgatgtactctcccaatgacctcgactttgggattgtgaacaaccatctc

SEQ ID NO: 37113 - DNA, 232 bp, Glycine max
gattcacacagggacctaacaagtccttcgtgatcccccgattgctgaatagcacggtcttccttgcgctctttctcttttgtcctttcacggccgcgggattgcctgcagccatcgctcatttcgtcttcaaaaatgatggttcccctctttacaatggtggcacatattcaatcttgtccggcacacgctccttgggcgcacaaagactgcccccacagggaagtggtga

SEQ ID NO: 37114 - DNA, 414 bp, Glycine max
gacacaactaactaagaaagtcttcaatagccccccaaaattgaaaagcaccatcttctttgctctctttctcttttgtgccttcaccacctcagacctaccttcagccatcgctgatttcgtgctcgataatgaaggtaaccctcttgaaaatggtggcacatattatatcttgtcagacataacagcatttggtggaataagagcagccccaacgggaaatgaaagatgccctctcactgtggtgcaatctcgcaatgagctcgacaaagggattggaacaatcatctcgtccccatatcgaatccgttttatcgccgaaggccatcctttgagccttaagttcgattcatttgcagttataatgctgtgtgttggcattcctaccgagtggtctgttgtggaggatctacc

SEQ ID NO: 37115 - DNA, 389 bp, Glycine max
gacagcaaaaacaattaataaagatgagtttgaagaacaacatggtggtgctaaaggtgtgtttgttgcttcttttccgtgtggggggtacagctgcactcctaaaactgagcttcttcaaaagtgatcagtcatcaagttatgatgatgatgactattcaaaaccatgctgtgatctctgcatgtgcacacgctcaatgcctcctcaatgcagctgtgaagatattaggctgaattcatgccactcagattgtaagagctgtatgtgcacacgctcacagccaggacagcgtcgttgtcttgacaccaaaccacttctgctacaaaccttgcaagtccagaaatgactacaaaaactaattaccctctccaatggaagaaaccccttt

SEQ ID NO: 37116 - DNA, 260 bp, Glycine max
gatttgtttgcagatcaacatggagcttctaaaagtgtatttgctgcttcttttccttgtcctggggacaggggggcgcgtggaaccttccttcttcaaaagtgatgaaatcacaacttatcatgaaaatcaatattcacaaccatgttgtgatctctacaggtccttaccctcaatacctcttcaatccatctgtgtatatatcagacaaagctcataccattcagaatttacttcctctatgtttacacgttcacaac

SEQ ID NO: 37117 - DNA, 407 bp, Glycine max
gacacaacacaatcttaagaccaacctctctctctctctctatatccagactccaccctctcagtactcttcctcatcatcttcttctctcgtgtcgcgttctctctatgagaattgagatactagaggaagaattcgaagaagaaggcatgagaaacagcatccggtgttgcatctcctgcattctcccatgcggggccctggacgtaatccgcatagtgcactccaacggccgcgtcgaggaaatcagcggcaccatcaaggccagcgaaatcatgaaggcccaccccaagcacgtgctcaagaagccttcctccccctccacccaagacggcgttgttcccaagatcgtcgtcgtccctcccgacgccgacctcaaacgcggcaagatttacttcctcatgccc

SEQ ID NO: 37118 - DNA, 278 bp, Glycine max
ggaaaaaaagagctaccggggcgtcacacagacatgacgtgacgattcctgcttacccgcagaacttccaggcattttagctccggtcattgccgtatcccttatccggtaaggagccggcggcctgcaaaacaccggtggcatacatcaccactcgatcgtattcgatagttaccattcgtgcttcctcggtaatgttggcatgatgtacttccataaccttcgcactcaattctactcgtcccatccgtcatcgctgaattcctatagtctctcct

SEQ ID NO: 37119 - DNA, 334 bp, Glycine max
gacacaactaactaagaaagtcttccatagccccccaaaaatgaagagcaccatcttctttgctctctttctcttttgtgccttcaccacctcatacctaccttcagccatcgctgatttcgtgctcgataatgaaggtaaccctcttgaaaatggtggcacatattatatcgtgtcagagataacagcatttggtggaataagagcagccccaacgggaaatgagagatgccctctcacggtggtgcaatctcgcaatgagcgtcgcaacggggattggaacaatcatctcgtccccagagtcgaatccggttttatcgcccgaaacgccatc

SEQ ID NO: 37120 - DNA, 350 bp, Glycine max
accacgcgtcagtaccgatgaagacgacagaaggggaacaacatttgttctagacaagatctccatatctgttcccaaaagcttgtttgtaagaatggcttccggtgaacagaaattccctcctcaacaacaacagacacagcctgggaaggagcatgctatgactccagtaccccaattcactagccctgactacaagccttcacataaacttcaagggaagattgcattagtcactgggggtgattctgggattggacgagcggtgtgtaacttgtttgccttagaaagtgctaccgtggccttcacgtatgtgcaggggcaataggacaaggacacgacggacacat

SEQ ID NO: 37121 - DNA, 310 bp, Glycine max
taggtatggctgcaagaaaactacagagagggacagcacaattaattaatatgcattagtttgacaaacaacatggtcgtgctgaatgtgtgtttcttccttcctttccgtgtgggggttatagctgcatgcatctgaccgaccttcttcatgattgatcagtcatcaacttatgatgatgatgagtattcacaaccattcattgatctctgtatatacacacactcaatgcctcctcaatgctatctgtaacatagcacgcttcattcaactcactcagattgtaacatctgtatatacacacactcac

SEQ ID NO: 37122 - DNA, 216 bp, Glycine max
gacatcacaaaccattaatacagatgagtttggagaacaacatggtggtgctaaaggtgtgtctgttgcttcttttccttgtgggggttacagctgcacgcatggaactgagcttcttcacaagtgatcagtcatcaccttatgatgatcatgactattcaaaaccatgccgtgatctctacatgtgcacacgcccaatgcctcctcaatgcagct

SEQ ID NO: 37123 - DNA, 324 bp, Glycine max
gcgtccgaacacgagtccgaccgctgctacatgacacaacgagacaacaatagcaagtggtagagatgactttgaagaacagcatggtggtgcttaaagtgtgtatgatgcttcatttccttgtgggggttacaacggcacgcatggaactgagcttcttcaacagtggttagtcatcaagttaggatgaaaactagtattcaaaaccatgctgtgatcgctgacatgtgcacacgcgcaatgtcacctcaatgcagactcaagggatattacgactaattgactgcactcagattgtatgagcgctatgtacacacgctcaga

SEQ ID NO: 37124 - DNA, 407 bp, Glycine max
gacagcaaaaacaattaataaagatgagtttgaagaacaacatggtggtgctaaaggtgtgtttgttgcttcttttccttgtgggggttacagctgcacgcatggaactgaacttcttcaaaagtgatcagtcatcaagttatgatgatgatgagtattcaaaaccatgctgtgatctctgcatgtgcacacgctcaatgcctcctcaatgcagctgtgaagatattaggctgaattcatgccactcagattgtaagagctgtatgtgcacacgctcacagccaggatagtgtcgttgtcttgacaccgacgacttctgctacaaaccttgcaagtccagagatgactagaaaaactaatagctctctcaaatggacgaagcccctttaggctttgtttgttatgtt

SEQ ID NO: 37125 - DNA, 374 bp, Glycine max
gacagcacaaacaattaataaagatgagtttgaagaacaacatggtggtgctaaaggtgtgtttgttgcttcttttccttgtgggggttacagctgcacgcatggaactgagcttcttcaaaagtgatcagtcatcaagttatgatgatgatgagtattcaaaaccatgctgtgatctctgcatgtgcacacgctcaatgcctcctcaatgcagctgtgaagatattatgctgaattcatgccactcagattgtaacagctgtatgtgcacactctcatagccagtacagtgtcgttgtccttacaccaacgacttctgctacaaacctttcaagtccagagatgactacagaaactaataactctctcaaatg

SEQ ID NO: 37126 - DNA, 305 bp, Glycine max
cgggacagcaaaaacaagtaatacagatgagtttgaacaacaccatggtggtgctaaaggtgtgtttgttgcgtcttttccttgcgggggttacatctgcacgcatggaactgagcttcttcagaagtgatcagtcatcacgttacgatgatcatgagtagttccacatcatgctgtgatctctgcatgtgcatgcgcgcaatgcctccccaatgcagctgtgaagatattacgctgaattcacgcgactcagaccgtaagagccgtatctgcacacgctcatcggcaggacactgtcgttgtct

SEQ ID NO: 37127 - DNA, 396 bp, Glycine max
gaaagatagatagaaattaagaggccccaaaagctgcacacattgcccttcctgtccaggaatttgagatctagcaactaacaaggcaataatgaagttcttgttccagtgcccttgctgctcttgcttttgcttcatgaagccaaagcaagggaaggcaaaggtcaaggaagtcaaagaaaccaaggtggaagaaaaaaaggttgaagaaaagaaagactgaccatgtaactccgtttcaagctttctttggttattattagtattatataagcatgcacaacaaatttgtgtctacttaatttgtgcttctttgttcctttaattaccactgctatgatgccttcctactacaattagtttgaaaatgtacaatgcgtttgcaagtaacttctt

SEQ ID NO: 37128 - DNA, 267 bp, Glycine max
gaacgcagccaggaaaagaaaatccgcacccattttcttcgtagccaaacacgctgaaattcccagttatgtcgtggcaggcgtaggtggaagatcacctactgtgtgaaatccaatgtgagcacctcactcaggcagcgtatcaccggacaagacggaagcgtttgggctcagaccaccaacttcactcagtgcaggcctgaggaaataaccgccatcaggaatgacattaatgagcctggatcacgtgctccaactggattgtat

SEQ ID NO: 37129 - DNA, 367 bp, Glycine max
gcaaaaaaacaacagaaggggataccaaaaccatttaaaaacaatgaccttgaaaaccaaaatgttggtgcaaaaggtgtgtttgttgcttctttcccttgtgggggtaacagctgcacccatggaactaacctccttcaaaattgttaattcatcaagtgataagcataataattatccaaaacaatgctgtaatttctgcatttgcaaaccctcattgctccttcaatgaacctgtaagaatattaggctaaatccatccaactcaaattgtaaaagctgtatttgcacacactcacagccaagacagtgtcgttgtcttgacacaacgacttctgctacaaaccttgcaagtccacacatgact

SEQ ID NO: 37130 - DNA, 267 bp, Glycine max
gacacacaactaactaagacagtcttccataaccccccaaaaatgaagagcaccatcttctttgctctctttctcttttgtgccttcaccaccgcatagttaccttcagccatcgctgatttcgtgctcgataatgaagggaaccctcatgaagatggtggcacatattatatcttgtcacacataacagcatttggtggaataagaccagccgcatagggaaatgaaagatgccctctcaatgtggtgcaatctcgcaatgagctc

SEQ ID NO: 37131 - DNA, 360 bp, Glycine max
gacagcaaaaacaattaataaagatgagtttgaagaacaacatggtggtgctaaaggtgtgtttgttgcttcttttccttgtgggggttacagctgcacgcatggaactgagcttcttcaaaagtgatcagtcatcaagttatgatgatgatgagtattcaaaaccatgctgtgatctctgcatgtgcacacgctcaatgcctcctcaatgtagctgtgaagatattaggctgaattcatgccactcagattgtaagagctgtatgtgcacacgctcacagccaggacagtgtcgttgtcttgacaccaacgacttctgctacaaaccttgcaagtccagagatgactagaaaaactaat

SEQ ID NO: 37132 - DNA, 288 bp, Glycine max
gacagcaaaaacaattaatagagatgagtttgaacaacaacatggtggtgctaaaggtgtgtttgttgcttcttttccgtgtgggggttacagctgcacgcatggaactgagcttcttcaacagtgatcagtcatcaagttatcatgatgacgagtattcaaaaccatgccgtgatctctgcacgtgcacacgctcaacgcctcctcaatgcagctgtgaacataatacgctcaagtcatgccactcagattgtacgagctgtatgtgcacaccctcacagtcacgac

SEQ ID NO: 37133 - DNA, 328 bp, Glycine max
acacaagggggttgcaatgcattgagaaactacacaagttacaacagagaatgagaaaagatgcagtagaaaaactacaaaaaaaacacttaaattttcacagacagtttaatacaagaatcaagatggacgcccaaaatatgagctacaatgctggacaagccaagggccaaactcaggaaaaggctaacaccatgatggacaaggctagcaatgctgctcaatctgctgaagaatccttgcaagaggttggacagcatatgcaggctaaagcacaatgagctgctgatgctgttaacaatgccacacgatgaacaaatgaagctaa

SEQ ID NO: 37134 - DNA, 320 bp, Glycine max
aggcacaacacccggagagggaacgtcagcaacacggtgagaaggaggaagacgaaggtgagcagccacgtccattcccattcccacgcccacgccaacctcatcaagaggaagagcacgagcagaaggaggaacacgaatggcatcgcaaggaggaaaaacacggaggaaagggaagtgaagaggaacaagatgaacgtgaacacccacgcccacaccaacctcatcaaaaggaagaggaaaagcacgaatggcaacacaagcaggaaaagcacaatacagcggtaacgtaaaaaacaaaaaaccggcggccctaaagg

SEQ ID NO: 37135 - DNA, 325 bp, Glycine max
gaatctcttcacagacgattcaattcaatcagatgggtttgtagaacagcatggtggtgctaaatgtgtgtttggtcgccacttttccttgtggggggtactactattgccaacttgaggctgagtaagcctgtactgctcatgaaaagtgctcatcatcaatactcaattgatgatcaatcttcaaatccatgctgtgatcaatgcgcatgcactaattcataccctcgtcaatgtcgctgttcagatatcacgctgacttcttgctattcagcatgcctgtcatgtatgtgcgcattatcctatcctgcacagtgtttttgtg

SEQ ID NO: 37136 - DNA, 279 bp, Glycine max
gattgtatatcatttacaatttcaatctctctctctctctgtctctctctctctatacttagattttgtgaatgggtgaagtggaaaagggatatgtcatcggcgtccataccgttgatgagtggaagctgcacctcgagaatgcgcaatactcgaacacactgattgtggtggattttactgcttcctggtgtggtccatgccgttttattgacccagttctatgcagacagtgcattagtaactcctgatattgattctcctcaaattggatgtgga

SEQ ID NO: 37137 - DNA, 105 bp, Glycine max
ggcttattcacgcaactaaataagaaatgaagagtactaacttccttgctccccttcgaagttggggcttcaacaatctaaaactggctttaagcaacggccaat

SEQ ID NO: 37138 - DNA, 281 bp, Glycine max
gggttccattgtctgattgtttgttgttgtgacacattcttcttcttttgttgttctgtgtttgtctatgttttttctctcacctggggatatcctgctgcggtgctaactgtggttgcggaagctcccgcaagtgccgcaaccgctgccgaggctgcaacatatacccacacttgagccacactgagtcaaccaccaccgacaacttgcgtattctagtcggaccttttaaagctcaatttgatggtgcttaaatcggtgttctcgctcagaaccatggc

SEQ ID NO: 37139 - DNA, 253 bp, Glycine max
ggatcgggacaactcatacattcgccctattggtccttaaacactcatcagtcatcatcatcgttacgctagttcttttcccgttgttttctgcctttcagtggccgctgcttcgctttcagttccatgcaccatcctcagcgtaacgcacgtgagattcgtggcctcaatgacctcatgtcggacatccgtacattttcaggaagaaggctcactccgacagggaatgctagcatcactcccatcgagtgtg

SEQ ID NO: 37140 - DNA, 238 bp, Glycine max
accaaaaggttacggttccaaaaaaccaccaaaaggttacggttccaaaaaaccaccaaaaggttacggttccaaaaaaccaccaaaaggttacgcttccaaaaaaccaccaaaaggttacgcttccaaaaaaccaccaaaaggttacgcttccaaaaaaccaccaaaaggttacgcttccaaaaaacaaccaaaaggttacgcttccaaaacaccaccaaaaggttacgcttccaaa

SEQ ID NO: 37141 - DNA, 407 bp, Glycine max
cggggacacagctaactaagaaagtcttccatagccccccataattgaggagcatcatcttctttgctctctttcgcttttgggccgtcagcagctcatacctaccgtcagggatcgctgagttcgtgctcgataatgaaggtaaccctcttgaaaatggtggcacatattagatcttgtcagacataacagcatttggtggaataagagcagccccaacgggaaatgaaagatgcgctctcactgtggtgcaatctcgcaatgagctcgaccaagggattggaacaatcatctcgtccccatatcgaatccgttttatcgccgaatggcatcctttgagccttaagttcgattcattttgcacttataatgctgtgtgttggaattcctaccagtggtccgttgtg

SEQ ID NO: 37142 - DNA, 381 bp, Glycine max
gattcacacaactaactaagaaagtcttccatagccccccaaaaatgaagagcaccatcttctttgctctctttctcttttgtgccttcaccacctcatacctaccttcagccatcgctgatttcgtgctcgataatgaaggtaaccctcttgaaaatggtggcacatattatatcttgtcagacataacagcatttggtggaataagagcagccccaacgggaaatgaaagatgccctctcactgtggtgcaatctcgcaatgagctcgacaaagggattggaacaatcatctcgtccccatatcgaatccgttttatcgccgaaggccatcctttgagccttaagtttcgatcattttgcagtataatgctgtgtgttg

SEQ ID NO: 37143 - DNA, 382 bp, Glycine max
gattcacacaactaactaagaaagtcttccatagccccccaaaaatgaagagcaccatcttctttgctctctttctcttttgtgccttcaccacctcatacctaccttcagccatcgctgatttcgtgctcgataatgaatgtaaccctcttgaaaatggtggcacatattatatcttgtcagacataacagcatttggtggaataagagcagccccaacgggaaatgaaagatgccctctcgctgtggtgcaatctcgcaatgagctcgacaaagggattggaacaatcatctcgttcccatatcgaattcgttttacctccgagggccatcccttgagccttaagttccattcatttgcagttataaatccggtgtgttt

SEQ ID NO: 37144 - DNA, 203 bp, Glycine max
ggtccaccaccaatccgtatggctgcgaacacacacaaggggatcaagaaccagttcaatatcctagtacaccgtattaaagaatttaagatatactatgatgacagcgcggttcccattactgttgccgggagttgttttcctggcatcaatttctgtctcatttggcattgcgtattgggaaaagcagaaccccagtcaca

SEQ ID NO: 37145 - DNA, 300 bp, Glycine max
aggacacaactaactaagaaagtcttccatagtcccccaaaaatgaagagcaccatcttctttgctctctttctcttttgtgccttcaccacctcatacctaccttcagccatcgctgatttcgtgctcgataatgaaggtaaccctcttgaaaatggtggcacatattaaatcttgtcagacataacaacatttggtggaataaaaacgggcccaacgggaaatgaaagatgccctctcaatgtggtgcaatcccccaattagctccaacaaagggattggaaaattcaccccgtcccc

SEQ ID NO: 37146 - DNA, 342 bp, Glycine max
gattcacacaactaactaagaaagtcttccatagccccccaaaaatgaagagcaccatcttctttgctctctttctcgtttgtgccgttgaccacctcatacctaccttcagccatcgctgatttcgtgctcgataatgaaggtaaccctcttgcaaatggtggcacatattatatcttgtcagacataccagcatttggtggaataagaccagccccagggggaaatgacacattccctctcactgtggtgcaatctcgcaatgagctctacggagggattggatcaatcatctcgtccccatatctaatccgttttatcgccgaaagccatcctttgagc

SEQ ID NO: 37147 - DNA, 242 bp, Glycine max
tgggacagcaaaaacaattaataaagatgagtttgaagaacaacatggtggtgccaaaggtgtgtttgttgcatcttttccttgtgggggttagagctgcacgcatggaactgagcgtcttcaaccgtgatcagtcatcgacttacgatcatgatcagtattcaaagccatcctgtgatttctccatgtccagacgcccaatcccctcttcattgcatctatgaacacactaggcttacttc

SEQ ID NO: 37148 - DNA, 123 bp, Glycine max
tacaggatccaagcttacttacgcctgcacgcgacgtcctatctctcccatactgtctcctaaattcaactcactggccctcatttcacaacctcatcactggtaaaaccctccgttacccaa

SEQ ID NO: 37149 - DNA, 407 bp, Glycine max
gacagcaaaaacaattaataaagatgagtttgaagaacaacatggtggtgctaaaggtgtgtttgttgcttcttttccttgtgggggttacagctgcacgcatggaactgagtttcttcaaaagtgatcagtcatcaagttatgatgatgatgagtattcaaaaccatgctgtgatctctgcatgtgcacacgctcaatgcctcctcaatgcagctgtgaagatattaggctgaattcatgccactcagattgtaagagctgtatgtgcacacgctcacagccaggacagtgtcgttgtcttgacaccaacgacttctgctacaaaccttgcaagttcagagatgactagaaaaactaatagctctctcaaatggacgaagcccctttaggctttgtttgttatgtt

SEQ ID NO: 37150 - DNA, 387 bp, Glycine max
gacagcaaaaacaattaataaagatgagtttgaagaacaacatagtggtgctaaaggtgtgtttgttgcttcttttccttgtgggggttacagctgcacgcatggaactgagcttcttcaaaagtgatcagtcatcaagttatgatgatgatgagtattcaaaaccatgctgtgatctctgcatgtgcacacgctcaatgcctcctcaatgcagctgtgaagatattaggctgaattcatgccactcagattgtaagagctgtatgtgcacacgctcacagccaggacagtgtcgttgtcttgacaccaacgacttctgctacaaaccttgcaagtccagagatgactagaaaaactaaatactccctcaaatggacgaagcccttt

SEQ ID NO: 37151 - DNA, 252 bp, Glycine max
ggtcagcacgcgtccgtatagacgacgacagaatgggacagcagaaacaattaataaagatgagtttgaataacaacatggtggcgctaaaggtgtgtttgttgcatcgtttccttgtgggggttacagctgcaggcatggaactgagcttcctcaaaagtgattactcatcacgttatgattatgattagtattcacaaccatacggtgatctccgccactacagacgcacattgactcctcaatgcagct

SEQ ID NO: 37152 - DNA, 315 bp, Glycine max
gattcacacaactaactaagaaagtcttccatagccccccaaaaatgaagagcaccatcttctttgctctctttctcttttgtgccttcaccacctcatacctaccttcagccatcgctgatttcgtgctcgataatgaaggtaaccctcttgaaaatggtggcacatattatatcctgtcagacataacagcatttggtggaataagagcatccccaacgggaaatgaaagatgccctctcactgtggtgcaatctcgcaatgagctcgacaaacggattggaagaatcatctcgtccccatatcgaatccgtt

SEQ ID NO: 37153 - DNA, 340 bp, Glycine max
ggagttttcaagttggaattatttttgccagaagaatatccaatggctgctccaaaggttaggtttctgacaaaaatatatcatccaaacattgataagcttggcaggatatgtcttgacattctgaaagataagtggagtcctgcccttcagattcgcactgtacttttgagctttccagtatcaacctgtgtttcacttctataagatgtaatgatacacgcagagaaatagagatatgcatgcatgcagattaccagtattcaagctcttctaagtgcaccaaacccaagatgattcgctttctgagaacattgccaagcattgggaatctaatgag

SEQ ID NO: 37154 - DNA, 318 bp, Glycine max
attcacacaactaactaagaaagtcttccatagccccccaaaaatgaagagcagcatcttctttgctctctttctcttttgtgccttcaccacctcatacctaccttcagccatcgctgatttcgtgctcgataatgaaggtaaccctcttgaaaatggtggcacatattatatcttgtcagacataacagcatttggtggaataagagcatccccaacgggaaatgaaagatgccctctcactgtggtgcaatctcgcactgagctcgacaaaaggattggtataatcatctcgtcgccatattcaatccgttttat

SEQ ID NO: 37155 - DNA, 195 bp, Glycine max
ggggaatgggatacctcaggtcacgctgggctacccgctgagtttaagcatctcattaagcggagcatagaatgatccataaaagtgactgatatcgtggatgtacaatgggatccaaacttacatgtgcatgcaggcaacgtcatcactcgtcaatacagtaacgaacattcacttcactgcacgtcgtgatta

SEQ ID NO: 37156 - DNA, 294 bp, Glycine max
gattcacacaactaactaagaaagtcttccatagccccccatgaaatgaagagcaccatcttctttgctctctttcacttttgtgccttcagcatctcatacctaccttcagccagcgctgatttcgtgctccataatgagcgtagccctcttgataatggtggtacatattatatcttgtcagacacaatacgatttggcggactaagagcagctccatgggtaaatgaaagatgccctcgcactgtggtgcactcgcgcactgacctcgatcaacggattggattaatcatt

SEQ ID NO: 37157 - DNA, 290 bp, Glycine max
ccggggcgatactgacactggcaattactgaaggacatgcattcattgaacttgttggcctaaagtaacaacatcaggaccaggaacagggggaacaacctttggaactgcggcaatatagacccgaactgtctgaacaagatatatttgtaaacccaccacgttacccacttgtgctcagcgctatctcaaatctgaacttctttgctactgctatccaatgcccaccacaatcacacgcacttcctcctcacgttcgcaatacactctgctcaaccatatactttcct

SEQ ID NO: 37158 - DNA, 325 bp, Glycine max
gattcacacaactaactaagaaagtcttccataggcggccaaaaatgaagagcaccatcttctttgctctctttctcttttgtgccttcaccacctcagacctaccttcagccatcgctgatttcgtgctcgataatgaaggtaaccctcttgaaaatggttgcacatattatatcttgtcagacataatatcatttggtggaataagaacatccccagcgggaaatgatagatgccctctcactgtggtgcaatctcgcaatgagctgcgaaaatggattgggccaatcatcttgtccccatcatcgagttcgtttttatccgc

SEQ ID NO: 37159 - DNA, 320 bp, Glycine max
cagggagagcagcaacaattaataaagatgagtttgcagaacaacatggtggtgctaaaagtgtgtttgttgcctcatttccttgtgggggttacagctgcacgcatggaactgagcttcttcaaaagtgatcagtcatcaagttatgatgactgatgagtattcaaaaccatgctgtgatctctgcatgtgcacacgctcaatgccacctcaatgcaactgtgaagatattatgctgaacatcatgccactcacatatgtacagctgtatgtgcacactcacacagccataacagtgtctctgtcttgacatcaacgac

SEQ ID NO: 37160 - DNA, 202 bp, Glycine max
gattcacacaactaactaagaaagtcttccatagccccccaaaagtgaagagcaccatcttctttgcgcgctttctcttttgtgccttcacgacctcatacctatcttcagccatcgctgatttcgtgctcgatactgatcggagccctcttgatgatggtgggacatattagtatcttgtcagacataacagcatttggtg

SEQ ID NO: 37161 - DNA, 308 bp, Glycine max
gacacttactagtactaagcatggagtcctcaaagatctatgcttacctcttcctctgcatgatctttctctcttccgccactcccattcacggttgtggctactgtggcaaaccccccaaaaagcacaagcctggtaaaacaccagagacacccaaaatacccgttgttaagccagcagtcaccatccctcccaataatgttcctcccgttgttcgtccatcaatagtgaagcccaccaggtagtctccctccaattccaattattaacccaacaaccacaccacggaatggagggaacactccatg

SEQ ID NO: 37162 - DNA, 325 bp, Glycine max
gacagcaaaaacaattaataaagatgagtttgaagaacaacatggtggtgctaaaggtgtgtttgttgcttcttttccttgtgggggttacagctgcacgcatggaactgagcttcttcaaaagtgatcagtcatcaagttatgatgatgatgagtattcaaaaccatgctgtgatctctgcatgtgcacacgctcaatgcctcctcaatgcagctgtgaagatcttaggctgaactcatgccactcagattgttaaagctgtatgtgcacacactcatatccaggacaatgtcgttgtcttgataccaactacttctgctacaa

SEQ ID NO: 37163 - DNA, 428 bp, Glycine max
gattcacacaactaactaagaaagtcttccatagccccccaaaaatgaagagcaccatcttctttgctctctttctcttttgtgccttcaccacctcatacctaccttcagccatcgctgatttcgtgctcgataatgaaggtaaccctcttgaaaatggtggcacatattatatcttgtcagacataacagcatttggtggaataagagcagccccaacgggaaatgaaagatgccctctcactgtggtgcaatctcgcaatgagctcgacaaagggattggaacaatcatctcgtccccatatcgaatccgttttatcgccgaaggccatcctttgagccttaagttcgattcatttgcagttataatgctgtgtgttggaattcccaccgagtggtctgttgtggaggatctacacaaagacctg

SEQ ID NO: 37164 - DNA, 403 bp, Glycine max
cccacgcaaccgtacagctgtcagtagaggagagaatgggacacatcaagagcagaatgaccaagttcacaatcctcctcatctctcgtctcctctgcatcgcccagacttgcagcgcctccaaatggtaggaccagcaagatacctgccgcaggcagctccagggggtgaatctcacgctctgcgagaagcacatcatggataagatccaaggccgcggtcgatgatcgatgatgatgacgacgacaatcacattctcaggagcatgcggggaatattcagctatataacgaggaaccattgaatacacgatgacgaacaaaagattgcgacatgcagaactgctgcacagaaatgagcgagctgagaaacgccaaatgcgactgcatagcaccgcacaaga

SEQ ID NO: 37165 - DNA, 324 bp, Glycine max
gattcacacaactaactaagaaagtcttccatagccccccaaaaatgaagagcaccatcttctttgctctctttctcttttgtgccttcaggacctcatacctaccttcagccatcgctgatttcgtgctcgataatgaaggtaaccctcttgaaaatggtggcgcatattatatcttgtcggacataagagcatttggtggaataagacgagcccgcaacgggaaatgaaagatgcgctctcactgtggtgcaatctcgcaatgagctcgacaaagggattggaacagtcatctcgtcgccatatcgaatccgttttatcgcc

SEQ ID NO: 37166 - DNA, 422 bp, Glycine max
gacagcaaaaacaattaataaagatgagtttgaagaacaacatggtggtgctaaaggtgtgtttgttgcttcttttccttgtgggggttacagctgcacgcatggaactgagcttcttcaaaagtgatcagtcatcaagttatgatgatgatgagtattcaaaaccatgctgtgatctctgcatgtgcacacgctcaatgcctcctcaatgcagctgtgaagatattaggctgaattcatgccactcagattgtaagagctgtatgtgcacacgctcacagccaggacagtgtcgttgtcttgacaccaacgacttctgctacaaaccttgcaagtccagagatgactagaaaaactaatagctctctcaaatggacgaagcccctttaggctttgtttgttatgttaagggagacaaataa

SEQ ID NO: 37167 - DNA, 387 bp, Glycine max
gacacacaactaactaagaaagtcttccatagccccccaataatgaagagcaccatcttctttgctcgctttctcttttgtgccttcacgatctcatacctaccgtcagcgatcgctgagttcgtgctcgataatgaacgtaaccctcttgaaaatggtggcacatattatatcttgtcagacataacagcatttggtggaataagagcagggccaacgggaaatgatagatgccctctcactgtggtgcaatcgcgcaatgagctcgacatggggattgggacaatcatctcgtcgccatatcaaatccgttttatcgccgaaagccatcctttgagccttaagttcgattcatttgcagttataatgctgtgtgttggaattcct

SEQ ID NO: 37168 - DNA, 174 bp, Glycine max
aacggctgcaaaaaaacaacagaagggacccaaaaaaatgttgaataacagttaacacacgctcaaaaagaatcaagcttaacgtaaaagtggacgctccataagatcccagctaacgtatccctgcatgccacgtcatagctcttcgatattgtcacccaaattcaattaaca

SEQ ID NO: 37169 - DNA, 388 bp, Glycine max
gacacacaactaactaagaaagtcttccatagccccccaaaaatgaagagcaccatcttctttgctcgcgttctcttttgtgccttcacgatctcatacctaccgtcagccatcgctgagttcgtgctcgataatgaaggtaaccctcttgaaaatggtggcacatattatatcttgtcagacataacagcatttggtggaataagagcagccccaacgggaaatgatagatgccctctcactgtggtgcaatctcgcaatgagctcgacaaagggattggaacaatcatctcgtccccatatcgaatccgttttatcgccgaaagccatcctttgagccttaagttcgattcatttgcagttataatgctgtgtgttggaattccta

SEQ ID NO: 37170 - DNA, 170 bp, Glycine max
ccaggtacacgtacgtatcggaacaggtacacgacaacgagggacagcgaatccaattaagcaagatgtgtttgaataacgacagtgtggtgctaaaggtgtgtttgttgcgtcttttccttgtgggggtgatcgctacgctcatggcactgatcttcttcaagagtgat

SEQ ID NO: 37171 - DNA, 239 bp, Glycine max
catcctcagctaaaaaaaaaaaaaaaaagaagaaaaaaaagcgggcgctccaaaaggttcaagcctaactaagccttcaagccaagttacaacccctccaaaatggcacaccaaattcaattcaatggccctccttttacaacgtcctgaatgggaaaaacctggcgttaacccaggtaagccccgttcaacacaaccccctttcgcgaagtggggttataaccaaaaaggccccaacc

SEQ ID NO: 37172 - DNA, 304 bp, Glycine max
acgcgtccggacagaagacgacagaaggggaggcagtgcaaaactcacaagagatctaaacagcaaatcaagaagaatggcttatgctaggcttgctcctatggctgtcttcttgcttgccacttccaccataatgttcccaacgaagatagaagcagcagattgtaatggtgcatgttcacctttcgagatgcgaccgtgccgcccacgtgattgtcgttgtgtcgctataggactagttgctggtttctgcatacatcgagctggactttcatctgttgcgaagatgatggacgaacatccc

SEQ ID NO: 37173 - DNA, 303 bp, Glycine max
gattcacacaactaactaagaaagtcttccatagccccccaaaaatgaagagcaccatcttctttgctctctttctcttttgtgccttcaccacctcatacctaccttcagccatcgctgatttcgtgctcgataatgaaggtaaccctcttgaaaatggtggcacatattatatggtgtcagacataacagcatttggtggagtaagagcagccgcaacgggaaatgaaagatgccctctcactgtggtggaatctcggaataggctcgactgagggattggaagaatcatctcgtccccat

SEQ ID NO: 37174 - DNA, 326 bp, Glycine max
gacagcaaagacaattaataaagatgagtttgaagaacaacatggtggtgctaaaggtgtggttgttgcttcttttccttgtgggggttacagctgcacgcatggaactgagcttcttcaaaagtgatcagtcatcaagttatgatgatgatgagtattcagaaccatgctgtgatctctcgatgtgcacacgcgcaatgcctgctcaatgcagcggtgaagatgttaggctgaattcatgccactcagagggtaaaggctgtgtgtgcacacgctcacatccatgacagtgtcgttgtcttgacgccaaggacttctgctacaaa

SEQ ID NO: 37175 - DNA, 239 bp, Glycine max
gacagcactaacaattatgtagatgatgagtttgacgaacaacatggtgctgctaaaagtgttttagttccttctgttccttgtaggggtcacagctgcacgcctggaactgagcttcttcaaaagtgatcactcacgaagttatgatgcatgacgattagtcatggtcagcgtgtggttcctgcatgtgcagagactgaaggctgcctcaatgcgcctgtgaagatattacgctgcat

SEQ ID NO: 37176 - DNA, 325 bp, Glycine max
gattcacgggtctagctaagaaagtcttcgatgggcccccagatatgaagagcaccagctggctgtgctctctttctcttttgtgcgttcacgacgtcatatctaccttcagcgatcgctgatttcgtgctcgatagtgaaggtagccgtcttgacaatggtggcacatagtattggttgggacggagggcagcatttcgggggataggtgcagcgcctacggggaatgcaagatgccctctcactgtggggcaatggggcagtgagctcgacgtatggattgggtcaatcatctcgtcggcatatcgtgtccgttttatcgccg

SEQ ID NO: 37177 - DNA, 263 bp, Glycine max
  unsure (1)..(263): unsure at all n locations
gacgacagatggggattcccaaaatgtctcattctccctttcctctgcgaagcctcgatcactctcacgcgctcctagagtcgctcctccaccgtctgtctctcgaacaaccacaacaccatcttcatcgcatggcaaacgcagcatctggtatggcagtccaggatgactgcaagtggaggtttttgggggtgagggcgcgttggacacaccgtttcagantgtgtaaggttgacgancggcagaagcaggtcattgtggag

SEQ ID NO: 37178 - DNA, 305 bp, Glycine max
gattcacacaactaactaagaaagtcttccataagcccccaaaaatgaagagcaccatcttctttgctctctttctcttttgtgccttcagcacctcatacctaccttcagccatcgctgatttcgtgctcgataatgaaggtaaccctcttgaaaatggtggcacatattatatcttggtacgggtggcagcatttggtggaataggagcagccccgacgggaaatgaaagatgccctctcactgtggtgcggtctcggagtgagctcgacaaagggattgggacgatcatctcgtccccatat

SEQ ID NO: 37179 - DNA, 299 bp, Glycine max
gataccaaaaacaaaacacaagccaagtgaaagtgagaaaaaataaaaatcagggagcataaggtcagggatcattcacaggattggggagacccttcatgtgggagggcacaagaaggaggaggagcataagggtgagcaccatgctggagaatacaaaggggagcaccatggggaacagggtagtgactacaaaggagagcatcagggtgaagacaaagctggagagtaccatggggaggacaagccagggcacaaggaggggttcctaggcaaagtcaagggcaagattcatggtg

SEQ ID NO: 37180 - DNA, 409 bp, Glycine max
ggctcggaacctttgggctgatttatgtgcttgtttatgtgcttgctggtcgtgagaagatcatagaagggcatggtcgtgagaagatgatagaagggcatggtcgtgagaagatgatagaagggcatggtcgtgagaagatgatagaagggcatggtcgtgagaagatgatagaagggcatggtcgtgagaagatgatagaagggcatggtcgtgagaagatgatagaagggcatggtcgtgagaagatgatagaagggcatggtcgtgagaagatgatagaagggggaagaaaaggcggcgtaaggcaaaattcccgcgttcccaaacttctaacgcttaagctccgtaaagggccggttacggagtcagctaagcgctctagcgaactcgaacggggccaaggcga

SEQ ID NO: 37181 - DNA, 478 bp, Glycine max
gcttggaaccttggctgatttagtgcatgctggacgtgagaagatgatagaccgggaaggagaagtaaataccgaatccgccggtaccgaggaataataatagaggtagtaataggaagagtaattcccggaagcgtggaaacacagagtcgaaccgctcgaataagacacacccgcaactttagtaggccacttagccgcggctaatgtcattctagactcgaaccctcccgtccccggcactaacgttgacaataattagaggaatccatccgtaggcctgaaagataacgcgacaagttagacattcagctaagcgtatgagtccgtgcctttcgggctcgtaaaagacaccgagaattcaacaaagagttaaagcgagcttcatctcgcggacgtctagttctactagaaagaggaggggaatacgggaagaaagggcttcccgctcctaaccacgaaggtcccacatcgaaca

SEQ ID NO: 37182 - DNA, 404 bp, Glycine max
  unsure (1)..(404): unsure at all n locations
gacagttaanacaattaataaaggtgagtttgaagagcgacatggtggtgctaaaggtgtgtttgttgcttcttttccttgtgggggttacagctgcacgcatggaactgagcttcttcaaaagtgatcagtcatcaagttatgatgatgatgagtattcaaaaccatgctgtgatctctgcatgtgcacacgctcaatgcctnctcaatgcagctgtgaagatattaggctggattcatgccactcagattgtaagagctgtatgtgcacacgctcacagccaggacagtgtcgttgtcttgacaccaacgacttctgctacaaaccttgcaagtccagagatgactagaaaactaatagctctctcaaatggacgaagcccctttaggctttggttggtatg

SEQ ID NO: 37183 - DNA, 365 bp, Glycine max
tgacagcaaaaacaattaataaagatgagtttggagaacaacatggtggtgctaaaggtgtgcttgttgcttcttttccttgtgggggttacagctgcacgcatggaactgagcttcttcaaaagtgatcagtcatcaagttatgatgatgatgagtattcaaaaccatgctgtgatctctgcatgtgcacacgctcaatgccttctcaatgcagctgtgaagatattatgctggattcatgccactcagattgtaagaactgtatgttcacacgcttacagtcaggacagtgtttttgactttacacccatcacttttgctacaaaccttgcaagttcagagattactagaaaaacttatactt

SEQ ID NO: 37184 - DNA, 235 bp, Glycine max
gaaggtgatcgatgcgtagggccctgagatctctgcttcagagttcagaggaattcgttttctctgatcgggatctggaagggaagcgaatcgacatgggtttcttggtgacgacgctgatcttcgtagtgatcggaatcatcgcgtgcctctgcaccagaatttgctgcaacagaggatcctctgccaatctatttcaccttactttggtaattactgcatcaaatttgctgct

SEQ ID NO: 37185 - DNA, 140 bp, Glycine max
ctctgcatagtgcacactgctcaattgccttctcaatgcatgctgtgtaagatatttaggctgaattcatgccacttcagattgtaagaagctgtatgtgcacacgctcacagtcaggacagcttcgttgtcttgacacc

SEQ ID NO: 37186 - DNA, 262 bp, Glycine max
tgggacaggacaggcaattaatatggatgagttcggagaacaacatggtggtgctaaaggtgtgtttgttgcttcttttccttgctggggttacagctgcacgcatggaactgatcttcttcaacagtgatcacgcatcaagttattatgatgattaattttcacatccatccttagatctttgcttgtgcacactctcaatgctttcctatttctatttgcccttatactactcttgaatttcatgccatcttatattcgt

SEQ ID NO: 37187 - DNA, 314 bp, Glycine max
acacgtaccgaaagaactcttgcctgtttaggactctcaacttctcccacgagatcggctctctctggctatcgtgtaatctgtaagaaggagattgctacttcagaaacagccttaactctacttgcaaaagttcttcatctatcatactgcaatcgttatcgtccatggactagcagcaaaccctacactcctctactgctactactactcaattccataatctatttgactcgcactctactgactttactactgcagctgcttcttcctcaaatccctcactcttgaagtctccctacttaagcgcactc

SEQ ID NO: 37188 - DNA, 417 bp, Glycine max
gacttcaaaaacaattaataaagatgagtttgaagaacaacatggtggtgctaaaggtgtgtttgttgcttcttttccttgtgggggttacagctgcacgcatggaactgagcttcttcaaaagtgatcagtcatcaagttatgatgatgatgagtattcaaaaccatgctgtgatctctgcatgtgcacacgctcaatgcctcctcaatgcagctgtgaagatattaggctgaattcatgccactcagattgtaagagctgtatgtgcacacgctcacagtcaggacagtgtcgttgtcttgacaccaacgacttctgctacaaaccttgcaagtccagagatgactagaaaaactaatagctctctcaaatggacgaagcccctttaggctttgtttgttatgttaggggagaca

SEQ ID NO: 37189 - DNA, 296 bp, Glycine max
caacgggatttacacgcctaacttagatacccttgcattgggaccgaatgatgagtagcgcggtgttatgtcatctctttatactttgtgccttcaccacctcatacctaccttaaaccattcctgatttcgcgctatataatgaactgtaaccatttttaaaacggaggcacatattatatcttggcagacataacaacgtatatcggactaaaaccagtctgaaccggaaatcaataacgccttgtcacttgtgatgcactttctcaatgagctctacaaatgtattggaacaa

SEQ ID NO: 37190 - DNA, 364 bp, Glycine max
gattcacacatctaactaagaaagtcttccgtggcccgccaaaaatgaagagcaccatcttctatgctctgtttctcttttgtgccttcaccacctgatacctaccttcagccatcgctgatttcgagctcgataatgaaggtaaccctcttgaaaatggtggcacatattatatcttgtcagacataacagcatctggcggaataagagcagccccaacgggaaatgaaagatgccctctcactgaggtgcaatctcgcaatgagctcgacacagggattggaacaatcatctggtacgcatatcgaattccgcttatcgacgaaggccatcctctgagccttaagttcgattcatttgcagt

SEQ ID NO: 37191 - DNA, 281 bp, Glycine max
tgggcttcacagttaagacaatcaataaagatgagtttgaagaacagcatgatgctgctaaaggtgtgtacagttgcttgttttccttgcgggggttacagatgcacgcatggcactgagctctttcaaaagtgatcagtcatcaagttatgatgatgatgagtattcaaaaccatgctgtgatctctgcatgtgcacacgctcaatgcctactcaatgcagctgcgaagatattacgctgaatttatgacactcacattgtaagagctgtatgtgcacac

SEQ ID NO: 37192 - DNA, 419 bp, Glycine max
ctgtgaagcaactgtataattaacaaaagccatttcggtagcaaccggagaaaatgaagagcactagcttgttcgctatacatctactttgcaccttcatctgatacctaccttgcgacaccgcccaagacctgctcgacgaggatggctatccgatttgcaacgatctcatatactacgctctgtcagaaactagacgaaacagttgtggaatagaacgagtcaaactatgcaaagacaattgccctatcactgtattgcaaccttccaatccaaactctaatgggttagaaatcaacaccgaattttcatacccaacctattacatcaacgaaaccctaattatgtaaataaagtctaattacccacagcactctgaaagaaagaatccttgttggaccatttctaaagatatatct

SEQ ID NO: 37193 - DNA, 196 bp, Glycine max
caattctcacattctcctataacttaccttctatccccataccttccatcaattatatcttcaatatatcataacccatctcttcaaccatatatacttcaacacacattctcatttacatcatacctttatcaaacttattatttcaacaatcttcattcctatcttttatacaatcatttttacaaaccattat

SEQ ID NO: 37194 - DNA, 407 bp, Glycine max
ggcacacagcagggaacaacgtgtaacacgtgcacagctgagagagacgcacccatggggccaagacccgcaaggtgttataggcaaattaataacacaccataccacaagtcacggttttgccgcggagctcctgatcccaagatcaggattcaccatgttggtatgaagaataagggtgttgctgagtttgctttctgtgtacatctgcctcgttgggagaaggaaaacgtttctagtgaggccctggaagctgctcgtattgcttgcaacacgtacatggtcaaatttgatggacaggatcgctttcactcgacagtcagggtgcacccattccatgttcttaggatcaacaacatgctgtcgcgtgctggcactgatagcctccaaactgcaatgagaggtgc

SEQ ID NO: 37195 - DNA, 300 bp, Glycine max
aggtgtactgcaactttgctctctgtgaggcttcaatggctaattagcgataagcttacagtgaccagtaggcatgggagacattacctttgtagtacctaaatcctgccgcgaatggtgcgtcaagcaacattccgtcgacatcgaggcctacaccgattccaccttcgatctccaaccgaagctcgagcaagccgttatcgccgatgattactccggcggagtacagaactctatctataccgtgactgctacctacgctgtctttcacgtgatagagggtggtgcaacattcatacc

SEQ ID NO: 37196 - DNA, 486 bp, Glycine max
ggaatattatagcagttactgtagcttggatcaaaggagaaggtttgttttactactagatattgaaccaacaaacacagtagggctgttgtttacataaatttgtcttaccttgtaggtctttcaatctggtttctatctatcatatactttatttccggtgttccagcatcctatgtgatgtggtatcgtcctctttatcgtgcgacaaggtagttttcaatttgattgaattcaattcttatggtatggcatggataattgatattcaagatgatttcagccttttcctaaactataaaaaattgttaatgtcatccacattggctttattgccattgtgaagcattaaacattttctgtagcagcagtatgtacatctggcgactttgtgagcagaatgtaagttaataaatgacaacgttgtcatcttgaaactgaaaggctttggggtgcaaagcttacattataaaataccttaatcta

SEQ ID NO: 37197 - DNA, 306 bp, Glycine max
gagggcagcatttgtgactagctcttacagagaaaaaagatggctgagacaagcggaggagatgcactgagaccagtggtgatatgtgataacatgggtggctgtacacttgcatgcactggtgggtccacttgcaggtgcacacgtgcttgcactgacacaggaggtggtgatcacgtgacatgctgttatgtatagaactgcacatgctatacatgctcatgatgcaagattgaggatgctagaagtggttgcagatgcggcacacattgtgcatgtacctgcagacgcacttagtctgacacc

SEQ ID NO: 37198 - DNA, 482 bp, Glycine max
ggattggggactcaagatcacgaaaacgatgtagctataggaggacagagggatgtccatgacggatcgagatggcgacaaacaagaatgggtgggacaataaatatccatctcgaccatattttggatacccatataaccatcgaagattattgaagtgactaatttcgtgaaattaagcagcggagatgacaaagaaattgctagaggtactgtagttcttatccagtaccaacatacttaatgttaagaaatcattatttacagagaggtatgatagatattttgatgtcaaaacactagccctgttcagttaataatgacaatactgcaatcttttttgattctatgaatatttatcattacacacattatgtaagagctcgatgagatgaatatcgtacgtacggatctggagcggagattctctgaaccgaatgacaacctgaacggatgttaatttaatcttaacgaaattatgc

SEQ ID NO: 37199 - DNA, 433 bp, Glycine max
atcggattgctgaagaccacattagggcaccgctggcagagaggacagaagggtacgactagatagaccacgacagatctcgtataccgcctcgagtcccagatctatggtgactgtgagagagctatgtaccggtagatgtcgctttctagggatcgagattctgacgcggtgaatgcagcaattaagaatggcatcatggactcccatgtgaatgcactgtgacgcttgtgtcctatcagctgatgagctattgctgggaggcccaacttccaccgcctgtacaagagttccttgttggaagatgtggcaattaacaccaacggcaatcttctccagcttttggatagattggcgacctgatataggtatgaggctgatgccatcaatgtaaaattttcacagactgaagctaatgttcttcatgaatctg

SEQ ID NO: 37200 - DNA, 260 bp, Glycine max
ttgtgacagcgaattcagttaataaagatgagtttgaggaacaacagggtgatgctaaaggtgtgtttgatgcttcttttacttgtgggggatacagctgcactcatgaaactgagcttgttcaaaagtgatcattcatcaagttatgatgatgatgagtattcaaaaccatgctgtgatctctgcatgtgcccacactaaatgcctactcaatgcagctgtgataatattaggctgaattcatgccactcagattagta

SEQ ID NO: 37201 - DNA, 345 bp, Glycine max
caccgattgggacaacgatttcaattagataagatgagattggagaacaacatggtggtgctaaaagtgtgtctgtggcttcttttacttagctcgactacagctgcacgcatggaactgagcttcatcaaaagtgatcattcatcaagttatgattatgatgattattcaataccatgctagaatctctagttgtgtacactctcaatgcctactcaatgcagctgagaatatattatgcttaattcacgccactcatattatctgaactatatgagcacacactcacagtcaggacattatcgttgacttgacatcgacgacttctactcctaacctttcaag

SEQ ID NO: 37202 - DNA, 340 bp, Glycine max
tatgggtcacacagctgagacacttaataaagatcagttagaagaacttcaaaattgtggtaaaggtgtgggtgttgctacttttccttgtccagcttacatctgcactcattcaactgagcttcttcaaaagtgatcagtcattaacttatgatgattatgagtattcataaccattctgtaatctctgcatgtgcacacgctcaatacctactcaatacatctgtgaatatattatgctgaattcattccactcatattgtaatatctctatgttcacactctcacagccaatacagtgtcgttgtcttgacaccaacgacttatgctacaaaccttg

SEQ ID NO: 37203 - DNA, 438 bp, Glycine max
tcccggtcgaccgcgcgtccgaccactcctacaagacgacagaatttgactcacacatttaactaagaaagtcttccatgggcccccaaaaatgaagatcaccatcttctttgggctctttctcttttgtgccttcaccacctcatacctaccttcagccatcgctgatttcgtgctcgataatgaacgtaaccctcttgaaaatggtggcacatattatatcttgtcagacataacagcatttggtggaataagagcatccccaactgcaaatgaaagatgccctctcactgtggtgcaatctcgcaatgagctctacaaacggattggaacaatcatctcgtccccatatccaatccctcttatcgtcgaacgccatcctttgagccttaagttctattcatttgcaattataatgctccgtgttggaattcctac

SEQ ID NO: 37204 - DNA, 377 bp, Glycine max
ttctgacagagatttctactgatggggacgacttcgaggaacctccgggaggttctggatgtgagatgggggcttattgttattgctgtgataacacctccacgcatggcacttagcttcttacaacgtgatcattcatcaacttatgatcatgatgagtatccaaaaccatgctatgatctctgcatctgctcacgctcaatgcctactgaatccagttgtgaaaatcttaagatgaattcatgccactcagattgctagatctgtctgtgcacacgctcacagccaggacatcgtctgcgacttgacaacaacaacttctgctacaaaccttgcaagtccacagatgactagaacatctaatagctctctgatat

SEQ ID NO: 37205 - DNA, 268 bp, Glycine max
acagctccttttagtcttcagacagcgatccacacaactaagtaatagtgtcttttataacccccccaaccttaacaacaccatcttctttgctctctttctctcttttgccttcaccacctcatacctaccttcatccatctctcatttctttctctataataaacctaaccctccccaaaataattgcacatattacatctcatcatacataacatcattttatagaataaaatcacccccaacttgaaattaaatattccctctc

SEQ ID NO: 37206 - DNA, 381 bp, Glycine max
aggggctcagcataaacaattaataaacataatttggaggagcgatcatttgtagctaaaggcgtctttgttcctccttttccttgtgggggttacagctgcccgcatggaactgagcttcttcaaaagtgatcagtcatcacgttatgatgatgatgagtattgaaaaccatgctgtgatctctgcatgtgcacacgctcaatgcctcctcaatgcagctgtgaagatattaggctgtattcatgccactcacattgttagagctgtatgtgcacacattcacatccaggacagtgtcgttgtcttgacaccaacgacttctgctacaaacctcgcaagtccagagatgactagaaaaactaattgctctctcaaatgga

SEQ ID NO: 37207 - DNA, 332 bp, Glycine max
  unsure (1)..(332): unsure at all n locations
gcgttagaacacntcagaaaggactccacattgacactgattaaagattacttcagagagcgacattttttatataaccacatacttgttcctccttttcattacgacagatacatacgcacgcatgaaaacgacctaattctaaagttatcagacatcaacttatgattacgattagtattcaaaaccatactgtgatctctgcatatgcacacactcaattccttcttaatgaagacgtcaatatattacgcttaatccatgacaatcaaattgtacgagctgtatatgcacacattcacatccaagacaatgtcgatgtctttacacca

SEQ ID NO: 37208 - DNA, 299 bp, Glycine max
ggtataaaaactagaatgaaaaaaaatagaagcggcccgtgtaaataaaaaaaaaaaaaataatgcgggcgctctataggatacaaacttacatacgcgcgcatgcgacaccatatatcttttatatagtgacataaaatcaaatcactgggcgccgttttacaaaacatcgactgtgaaaaaactgtcgttacacaaattaatatcgtttcagaacatacccctttttccagatgtcgtaatatagaaaagacccgcaccaatatcccttttcaaaagatgtgcagactgaatgtcga

SEQ ID NO: 37209 - DNA, 356 bp, Glycine max
ccggtacggctgcgatccgacttcggaagtgtactgctctccgattacaaactaccggggagtccataggaagtacctaccttgacaaaattttccacttcactagctatgttaccatcctccactttagctttgatataaccatcctcgtttctcatatacacaagtctattattgttaaaaggaattatttccattctatcaacaagtaccagacgttcaagaatatgcgctccagctctgatgatcatatcttacctacttttcgtttcaacgaaagagatctcgtaattattgacctatgcacaacactctgtaagactgtttacatcaatgtgattaaaaaaacccctgct

SEQ ID NO: 37210 - DNA, 414 bp, Glycine max
ccaagccttccaacgcttccaaaaaacctccgaatggggccggcaaaaccatttattaaggttggggtggaaaaccaccatggtggtgctaaaggtgtgttggttgcttcttttcctggtgggggttacagctgcacgcatggaactgagcttcttcaaaagtgatcagtcatcaagttatgatgatgatgagtattcaaaaccatgctgtgatctctgcatgtgcacacgctcaatgcctcctcaatgcagctgtgaagatattaggctgaattcatgccactcagattgtaagagctgtatgtgcacacgctcatagccaggacagtgtcgttgtcttgacaccaacgacttctgctacaaaccttgcaagtccagagatgactagaaaaactaatagctctctcaaatgga

SEQ ID NO: 37211 - DNA, 381 bp, Glycine max
gctcctacagatccggcaggggctgcgattttggatcggaacctcttctgcggcgtaacaatgggacactacatcgtttgaaattatcacccaataaactacggtcctggttatcgcacttgccgagtgtgtgggaacacacatggattgatcaagaaacatggccttatgtgctacaagcaatgctttcctttcaatgccaaagaaactgacttcatcaaatatggcttaaagagctgctgtcacctactgaccaacattatgttctaacactagaatgctctgaagatgttatgtatgaagaaacttgagacttacttttttcatctatgttattatcagacataatgtgtgaaacgaaaaatactcttatataaattg

SEQ ID NO: 37212 - DNA, 306 bp, Glycine max
  unsure (1)..(306): unsure at all n locations
nnnttnnnnnnnngcnnaaaaaaatgagcaaatgtgctaaaagcaaattactggccacttatcttcttcaaaagtgatcagtcatcaagttatgatgatgatgagtattcaaaaccatgctgtgatctctgcatgtgcacacgctcaattcctcctcaatgcagctgcgaaaatattaggctgaattcattccactcatattgtaagagctgtatgtgcacacccttacatccaggacagtgtttttgtttttacaccaacgacttcttctacaaaccttgcaagttcctatattactacaaaaac

SEQ ID NO: 37213 - DNA, 394 bp, Glycine max
aaaccccacaaagggggcccaaacccatttaataaatatgtttttagggaacgacttgttgtccctaaaggcgggttggttgcttcttttcctgtgggggtacagctccccctggaactagcttcttcaaaagtgatcagccatcaagttatgatgatgatgagtattcaaaccatgctgtgatctctgcatgtgcacacgctcaatgcctcctcaatgcagctgtgaagatattaggctgaattcatgccactcagattgtaagagctgtatgtgcacacgctcacagccaggacagtgtcgttgtcttgacaccaacgacttctgctacaaaccttgcaagtccagagatgactagaaaaactaatagctctctcaaatggacgaagcccct

SEQ ID NO: 37214 - DNA, 415 bp, Glycine max
  unsure (1)..(415): unsure at all n locations
ggaattcccgggtccgaccccacgcccgtccgtaccggtctggctgatgaatacctacatgaagggggatttcacacccaactaactaagaaaagtcnttccatgagccccgccaaataatgatgagcaccatcnttctttgctctctnttctcttttgggtgccttcaccacctcatantcctaccttcagnccatcgcnntgatttcgtgccctcgataatgaatgggtaaccctcttgaaaataggtggcacaatatnntatatcttgtcagacactaacagcatttggtggaataaagagccagtccccaacgggaaatgaaaagatgnccctctcatctgtgtgtgcaatctcgcaatgaagctcgacaaaagggattgggaaccaatnncatctcgtccccattatcga

SEQ ID NO: 37215 - DNA, 426 bp, Glycine max
cccacccgtccgtgcaataagacgacagatgggggacaaagaaaactaaaccctagtgggagtcttgtcgtcgtctcttcctcttcgcaacaatggttgccgccaagaaaaccaagaagacccatgagagcatcaacaacaggcttgctcttgtcatgaagagcggcaaatacacccttggttataagaccgttctcaaatctcttaggagctccaaagggaaattgattatcattgctaacaactgcccccctttgagaaagtcagagattgaataccatgccatgttggcaaaggttggagttcatcattacaatgggaacaatgtggatttgggcactgcctgcggcaaatattacagagtgtgctgccttagcattattgatcctggtgattcggatatcattaagacactgcctggtgaac

SEQ ID NO: 37216 - DNA, 228 bp, Glycine max
ttagaacacacatactggcacttcactcattaccactctcaggccggcttagagatcttttcaaaagacgtttacagaacatcatccaaagatccagaacgaggaaggacatatcactgatctttacattcccaggaagtgctacgccacaaacacattgattaaccttaaagaccatgcttcatgtcagatcaacattattcataaccatgataatatcttttacaa

SEQ ID NO: 37217 - DNA, 220 bp, Glycine max
ttgtattattttctactgaaatgcattcaacaaaccaaaaaaatattccattccccgcgaggaataaaaagcaccatcttctttactctctctctctattgacccttcaccacctcatacctaccttcagccatcgctgatcatctgctcaataatcaaagtcacaccaaattaaatgggggggacattacatatttttggtgccgtcccagccttttca

SEQ ID NO: 37218 - DNA, 371 bp, Glycine max
  unsure (1)..(371): unsure at all n locations
gacccacgcttccttccgctctttcttaccgnttctataagatttcagaaagggatgcaactgaataattaatagaagcctttttcatatcatcctactaaaatgaataccactaccttgttcgctatctttctactttgcgccttcacctcatacctaccttccgccaccgtccagtacgtgctctacgtggatgtcaatcctattcggaacggtttcatatactaccttcttccggcaataatatgaaactgtggcggaatataactagccgcactctctaaaaacacttgccctatcactgtaatgcaatcttccaatccaaaatttaaggtgttagaaattaactttgaattttcatacccctccta

SEQ ID NO: 37219 - DNA, 415 bp, Glycine max
gtcagcaaaaacaattaataaagatgagtttgaagaacaacatggtggtgctaaaggtgtgtttgttgcttcttttccttgtgggggttacagctgcacgcatggaactgagcttcttcaaaagtgatcagtcatcaagttatgatgatgatgagtattcaaaaccatgctgtgatctctgcatgtgcacacgctcaatgcctactcaatgcagctgcgaagatattaagctgaattcatgccactcatattgtaagaactgtatttgcacacgcttacagacaggacagggtcgttgtcttgacaccaacgacttctgctacaaaccttgcaagttcaaagatgacttgaaaaactaataacttttttaaatggaccaaacccctttaagctttgtttgttatgttaagggaaa

SEQ ID NO: 37220 - DNA, 422 bp, Glycine max
gacttcatctcttcacacaaaaaaaaagagaggaggatgtttttgaagaacaacattctcgttctcaacgtgtcatacgtgctacttttccttgttgcgagttctactagtgcctacttgaagctgaatatacttgacctgctcatgaaaagtgatcatcattaacactcaaatgatgatgagtcttcaaaaccatgctgcgatcaataagcatgcacaaagttaaaccctcctcaatgcatctaactaacattttatgctgcattcatgcccctcaaaaagtaagagcttttattttcttacgctcaccaaacagtttagtcttcatttttttactaccatctacttttttttcaaacctttttaatttctataatattttaaaaaaacctaataacttttttatattgaccaaaccccct

SEQ ID NO: 37221 - DNA, 276 bp, Glycine max
gtgaaaacaaacgacagagagcctttccaattgaattctccacagagaagaaggggcggagtcgatcatcacttaacttcactaatacatcatggcagacgagacccagaacaagtatgagagctctgaggttgaggtccaggatcgtgacctctttgactttctcgtgaagaaaaaggatgaagaacacaagcctcatcctcaggaagaggtcatcgccaccgagtttcaaaaagtcactgtctcagaccaaggagagaacaagcacagcctctt

SEQ ID NO: 37222 - DNA, 367 bp, Glycine max
tgtttgagtagacatattattatcaaaaagcggggggggtgtatattgaattcaatcctgacacattaacaatagtttcaattcaattgtggtgctgtcagctccctatctcagacgaccatgttatttttatatatatgggaatccaagatgtacaacactaaaccaagatgaccttataatttgacaacacaaaataagcattagattaatgaagcctttgagttattatatactgatggctcacgtactattgatgccaaagagctgaatgttgctattatggcacttgttttttaaattacataacaacaaataaattcaatgatagccatatttttaacaacgatggaagtggagcattttt

SEQ ID NO: 37223 - DNA, 274 bp, Glycine max
cactgattctagatgactacggagagcaacatggtgcgagatgacggcgtaatggttccttttgtagattacgacagatacagctacacacatggtactgaacttattcaaaagtgatcagtcatcacgtcctgattataataactattctaaactcatgctttgatctatgtatgtgctcactcttaatgcctcctaaatgcaactgacaagacattattcttaaatcatgccactcatattgcaatatcctcacgaaattaaatattccttc

SEQ ID NO: 37224 - DNA, 390 bp, Glycine max
gattcacacaactaactaagaaagtcttccatagccccccaaaaatgaagagcaccatcttctttgctctctttctcttttgtgccttcaccacctcatacctaccttcagccatcgctgatttcgtgctcgataatgaaggtaaccctcttgaaaatggtggcacatattatatcttgtcagacataacagcatttggtggaataagagcagccccaacgggaaatgaaagatgccctctcactgtggtgcaatctcgcaatgagctcgacaaagggattggaacaatcatctcgtccccatatcgaatccgttttatcaccgaaggccatcctttgagccttaagttcgattcatttgcagttataatgctgtgtgttggaattccta

SEQ ID NO: 37225 - DNA, 260 bp, Glycine max
gattcacacaactaactaagaaagtcttggcataggcccccaaaaatgaagagcaccatcttctttgctctctttctcttttgtgccttcaccacctcatacctaccttcatccatcgctgatttcgtgctcgattatgaaggtaaccctcttgaaaatggtggcacatattatatcttgtcatacataacatctatttggtggaataagagcagccccatctgttaatgaaagatgcccttttactgtggtgcaattct

SEQ ID NO: 37226 - DNA, 142 bp, Glycine max
atgcgttcgtaccgacacaaggggactccagcatctaaacatacccactaagatggctgtctgggtaatcttcatagtgctgcttcttgcagcccttatcctcatgccttaagggcttgccacttacttctaaccaatttat

SEQ ID NO: 37227 - DNA, 196 bp, Glycine max
gattcacacatctagctaagaaagtcttgcattgcccctcaaatatgaagagcaccatcttcattgctctctttctcttttgtgcctttaccaccttatacctacctttagccattgttgatttcgtgctcgataatgaaggtaaccctattgaatatggtggcacatattatatcttgtcagacataacatcatt

SEQ ID NO: 37228 - DNA, 293 bp, Glycine max
gattcacacagctaactaagaaagtcttccatagccccccaaaaatgaagagcaccatcttctttgctctctttctctttcgtgccttcaccacctcatacctaccttcagccatcgctgatttcgtgctcgataatgaaggtcaccctcttgaaaatggtggcacatattatatcttgttagacataacagcatttggtggaataagagcattctcaacgggaaatgaatgatgccctctcactgtggtgcaatctctcaattgagctcgactaagggactggaacaatcat

SEQ ID NO: 37229 - DNA, 369 bp, Glycine max
  unsure (1)..(369): unsure at all n locations
cggtgtgtgtgaagaagcagagggagcagcggcgtggagcatgcagatcttcgtgagaactctgacagggaagactataaccctggacgcctagagcagcgacaccatcgacaatgtcaaggccaagattcaagacaaggaaggcattcctacggatcaccagcatntgagtattcgcacgaaagcaactggaagatggaaggaccctggccgattacaacatgcataaagaatcaacccttcatctgagcctcatgctctcaggcggcatcattgaaccttgcctcatggctgtggctcgcaaatacaaccaggacacgatgatgtgccgcaagtgctatgcccgcctgcatcctatggctgtgaact

SEQ ID NO: 37230 - DNA, 355 bp, Glycine max
  unsure (1)..(355): unsure at all n locations
gacagcataaacaattaataaagatgagnttgaagaacaacatggtggtgctaaaggtgtgttcgttgcttcttttccttgtgggggtacagctgcacgcatggactgacttttaaaagtgacagcataatatatatatagttcaaaatctggacttgattcacacctaagctctaagcctgaaatttagctgatcatgcatcaatgagactgattcaacctaaccgacaggtcgtgctgacacacatttgtcaactgagtcaaatgctgaactatgctttaatgcaacccttagctgtgtatgaggaacataacagataaactatgcatattgttacaattgcatttatatcta

SEQ ID NO: 37231 - DNA, 375 bp, Glycine max
cccacgcgtccgcgactgaaggggacaacttaaacattctctccattggtccttggacacggatcagtcatcaccatggccaagctagttttttccctttgttttctgcttttcagtggctgctgcttcgctttcagttccagagagcagcctcagcaaaacgagtgccagatccaaaaactcaatgccctcaaaccggataaccgtatagagtcataaggagggctcattgagacatggaaccctaacaacaagccatttcagtgtgccggtgttgccctctctcgctgctccctcaaccgtatacgcccttcgttgaccttcctacaccaactgtccccaggaaatttacattcaacatggtaagggtatttt

SEQ ID NO: 37232 - DNA, 415 bp, Glycine max
  unsure (1)..(415): unsure at all n locations
gacagcaaatacaattaataaagatgagtttgaagaacaacatggtggtgctaaaggtgtgtttgttgcttcttttccttgtgggggttacagctgcacgcatggaactgagcttcttcaaaagtgatcagtcatcaagttatgatgatgatgagtattcaaaaccatgctgtgatctctgcatgtgcacacgctcaatgcctgctcaatgcagctgtgaagatattaggctgaattcatgccactcagattgtaagagctgtatgtgcacacgctcacagccaggacagtgtcgttgtcttgacaccaacgacttctgctacaaaccttgcaagtccagagatgactagaaaaactaatagctctctcaaatggacgaagccnctttaggctttggttgttatgttaggggaga

SEQ ID NO: 37233 - DNA, 416 bp, Glycine max
gacagcaaaaacaattaataaagatgagtttgaagaacaacatggtggtgctaaaggtgtgtttgttgcttcttttccttgtgggggttacagctgcacgcatggaactgagcttcttcaaaagtgatcagtcatcaagttatgatgatgatgagtattcaaaaccatgctgtgatctctgcatgtgcacacgctcaatgccttctcaatgcagctgtgaagatattaggctgaattcatgccactcagattgtaagagctgtatgtgcacacgctcacagccaggacagtgtcgttgtcttgacaccaacgacttctgctacaaaccttgcaagtccagagatgactagaaaaactaatagctctctcaaatggacgaagcccctttagggctttgttgtatgttaggggagaca

SEQ ID NO: 37234 - DNA, 344 bp, Glycine max
gacagcaaaaacaattaataaagatgagtttgaagaacaacatggtggtgctaaaggtgtgtttgttgcttcttttccttgtgggggttacagctgcacgcatggaactgagcttcttcaaaagtgatcagtcatcaagttatgatgatgatgagtattcaaaaccatgctgtgatctctgcatgtgcacacgctcaatgcctcctcaatgcagctgtgaagatattatgctgaattcatgccactcagattgtaagagctgtatgtgcacacgctcacagtcaggacagtgtcgttgtcttgacaccaacgacttctgctacaaccttgcaagttcagaaatg

SEQ ID NO: 37235 - DNA, 149 bp, Glycine max
caacagcaaaaacaatgaatagggatcaatttgaaggaccacatggtggtgctaaaggtgtgattgttgctccttttccatgttgtacttacagatatacacatggtactgagcgttctaaaaagtgatcagtcatcaagttattatta

SEQ ID NO: 37236 - DNA, 227 bp, Glycine max
tctaatacgatttattgttacagcaaaaacaattaataaaggtgagtgtttatatcaacatgggggtgctaaatgtgtgttagttgcttcttttcctttctgttgttacatcttcacgcatggaactgatctttttcaaaagttatcagtcatcaatttatgatgattattagtattccaaaccattctttgatctcttcatttgcacactctcaatgccttcttaa

SEQ ID NO: 37237 - DNA, 200 bp, Glycine max
gttttgtattttatttacattcacgtctgttgtgaggagccgctaaattgagttcggcagttaggcgaaagaagtatgactgctttaccaatagtattaactcaatcgggagatgtttcagcttatattcctactaatgtaatttccatttcagatggccaaattttctcatctgtcgatctattcaatgcttggaatca

SEQ ID NO: 37238 - DNA, 288 bp, Glycine max
ggcagcacttggtggcaatcgtgatgtggcaggaagccagaacagccttgagatcgatggtttagctcgctttgctgttgaagaacagaggaaaaaacagaatgcccttttggagtttgaaaaggtagtaagtgcaaaacagcaagtggtttctggtaccttgtacaccatcactttggaggcaatagatggtgggcaaaagaaggtttatgaagccaaagtttgggagaaggcatggttgaacttcaaggaggtgcaagagttcaagcttgttggagatgcacctgc

SEQ ID NO: 37239 - DNA, 409 bp, Glycine max
gtaggcgcgagaagacacagaaggtacgctgcacaagacacagaagggaagcaaaacaattaataaagatgatttgaaaacacatgtggtgcaaaggtgtgttgttgctctttacttgtgggggttaagctgcacgcatggaactgagcttctcaaaagtggtcagtcatcaagttatgatgatgatgagtattcaaaaccatgctgtgatctctgcatgtgcacacgctcaatgcctcctcaatgcagctgtgaagatattaggcagaattcatgccactcagattgtaacagctgtatgtgcacacgctcacagccaggacagtttctttgtcttgacaccaaccacttctgctacaaaccttgcaagtccagagattactagaaaaactaatacctctctcaaatg

SEQ ID NO: 37240 - DNA, 340 bp, Glycine max
  unsure (1)..(340): unsure at all n locations
caacaagggggggggcaaaaggtgtgtttgttgcctcctttccnttgtggggtttacagctgcacncatggaaactgagcttcttcaaaagtgatcagtcatcaagttatgatgatgatgagtgttcacaaccatgctgtgatctctgcatgtgcacacgctcaatgcctcctcaatgcagctgtgaagatattaagctgaattcatgccactcagattgttagagctgtatgtgcacacgctcacagccaggacagtgtcgttgtcttgacaccaacgacttctgctacaaaccttgcaagtccagaaatgactagaaaaactaatagctctctcaaat

SEQ ID NO: 37241 - DNA, 328 bp, Glycine max
  unsure (1)..(328): unsure at all n locations
ctcaatgggatctggcatcanaagaacaactacttgataactaagaatgagaagcaaatggcttcctcaatgatctcctccccagctgttaccacgtgtggggggtggcggtgccggcatagataaaccattcactgccctcaattccatggctggcttccccaccagaaagaccaataatgacattacctccattgctaccaacggtggaagactgcaatgcatgcacgcgtggccaccacttggcaaaaacaactttgagactctttcctacctgccataccttgatgatgcacaattggcaaacgaactataatatcttcttagg

SEQ ID NO: 37242 - DNA, 340 bp, Glycine max
agggacaccaaaaacaattaataaagatgagtttgaagaacaacatggtggtcccaaaggtgtgtttgttgcttcttggcggtgtgggggttacacctcccaacatggaagcgagcttcctcacaaatgatccgtcatcaagttatgatgatgatcagtattcaaaaccatgccgtgatctctgcatgtccacaccctcaatgcctcctcaatgcacccgtgaagatatcacgccgaactcataccacccacattgtaacagctgtatgtccacactcccacagccacgacagtctccgtgtggtgacaccaacgaccctcttgccacacaccctgcccc

SEQ ID NO: 37243 - DNA, 307 bp, Glycine max
gacagcaaaaacaattaataaagatgagtttgaacaacaccatggtggtgctaaaggtgtgtgtgttgcttcttttccttgagggggatacagctgcacgcatggcactgagcttcttcaaaagtgatcagtcatcaagttatgacgatgatgagtattcaaaaccatgctgtgatctctgcatgtgcacacgctcaatgcctcctcaatgcacctgtgaatatattaggctgaattcatgccactcacattgtaagatctgtacgtgcacacactcacagcgaggacagtgtccttgtcttgacac

SEQ ID NO: 37244 - DNA, 405 bp, Glycine max
gacagcaaaaacaattaataaagatgagtttgaagaacaacatggtggtgctaaaggtgtgtttgttgcttcttttccttgtgggggttacagctgcacgcatggaactgagcttcttcaaaagtgatcagtcatcaagttatgatgatgatgagtattcaaaaccatgctgtgatctctgcatgtgcacacgctcaatgcctcctcaatgcagctgtgaagatattaggctgaattcatgccactcagattgtaagagctgtatgtgcacacgctcacagccaggacagtgtcgttgtcttgacaccaacgacttctgctacaaaccttacaagtccagagatgactagaaaaactaatagctctctcaaatggacgaagcccctttaggctttgtttgttatg

SEQ ID NO: 37245 - DNA, 389 bp, Glycine max
  unsure (1)..(389): unsure at all n locations
gactcaacatttgcaggtcctcctcatatacagtacaaacttcagctggtagatagtgcttccaaatggagaagaaaaggaagactttactattactgctgctcatggctgcaactctcttctgcatgccaattgtgtcgtatgctgtttctagtgtcaacattcaaggtcatctcacccattctgagctggtaaaaggtcccaatagaaggcttttgccatttgtggattgtggagcgaggtgcaaggtgaggtgcagtttgcactcaaggccaaaaatttgctcaagagcttgcgggacatgctgtttcaagtgcangtgtgttcctccaggcacttacgggaacagagagatgtgtggcaagtgttacactgacatgatcactcat

SEQ ID NO: 37246 - DNA, 388 bp, Glycine max
gacagcaaaaacaattaataaagatgagtttgaagaacaacatggtggtgctaaaggtgtgtttgttgcttcttttccttgtgggggttacagctgcacgcatggaactgagcttcttcaaaagtgatcagtcatcaagttatgatgatgatgagtattcaaaaccatgctgtgatctctgcatgtgcacacgctcaatgcctcctcaatgcagctgtgaagatattaggctgaattcatgccactcagattgtaagagctgtatgtgcacacgctcacagccaggacagtgtcgttgtcttgacaccaacgacttctgctaaaaaccttgcaaatccagagatgactagaaaaactaatagctctctcaaatggacgaaaccccttt

SEQ ID NO: 37247 - DNA, 165 bp, Glycine max
taacggtactgctgccgtcaacaccacattacgggtacacggggggacaggggtcactacctttcaatccagccgctctacatgctccaagcttacgtgtccgttcatgcgacctcatcgctcttctataatgtcacctaacttcaattcactgggcgtcgtttt

SEQ ID NO: 37248 - DNA, 405 bp, Glycine max
gattcacacaactaactaagaaagtcttccatagccccccaaaaatgaagagcaccatcttctttgctctctttctcttttgtgccttcagcacctcatacctaccttcagccatcgctgatttcgtgctcgataatgaaggtaaccctcttgaaaatggtggcacatattatatcttgtcagacataacagcatttggtggaataagggcagccccaacgggaaatgaaagatgccctctcactgtggtgcaatctcgcaatgagctcgacaaagggattggaacaatcatctcgtccccatatcgaatccgttttatcgccgaaggccatcctttgagccttaagttcgattcatttgcagttaaaatgctgtgtgttggaattcctaacgagtggtctgttg

SEQ ID NO: 37249 - DNA, 288 bp, Glycine max
gacatcaagaacacttaatacagatgggtttgatctacacaacatgccggtgccaaaagtgtgtatgttgcatctggccgtgtgggggttacagctgcacgcatgggactgagcttcttcaaaagtgatcagtcatcaagttatgattatgatgagtattcaacaccatgctgtgatcaccgcatgtgcacacgctcaatgcctcctcaatgcaactgtgcagatattacgctgagttcatgccactcacattggtatagctgtatgtgcacaccctcacattcacga

SEQ ID NO: 37250 - DNA, 212 bp, Glycine max
cgcgtccgctgacacttcagtacagatggggacagtacgccttaggggcactcagtcaccaacccacactgcgttccgctgcacatttggagcgaggcatcgtcgaacagggccttcatcaggatcaggcgctctagagggtcaaagctgacttactcgtgcaagcaacgtcatagctcttccgtagggtcacctaaattcaggtcacgggc

SEQ ID NO: 37251 - DNA, 256 bp, Glycine max
tgacatgatattcaagtggcacactgtcagacacaggtatgacagttggtgccctcattgggaggcaagatattctggtgctccagtgcacgtctaatagtggattgcacaaattctaggtgcaagaatggctgccctcgtgctcagacttgtcacgaaaaagatgagagcatcagggctccacatgaggcaacgtgtttgtctacgacacatgcctatacttgagaggagcatgacatttgcgctaatgtagact

SEQ ID NO: 37252 - DNA, 280 bp, Glycine max
gacacaagaatctcatcatcgaggtcaatttcaaaagccccatgatcgtcaccaaagtgtatatctcttcacatatccttattggatcggagtgcctactgcagttgcataatcaatgtacaacattataaatactcctgttgttgccgtttctattattcacaccaacaccttggtcaaccaactcgaccacatgcctaggacattctatcttgctgtgaaccaagagcaataatttctaacatatcagcatcaacaacatggatgttcccacaccaac

SEQ ID NO: 37253 - DNA, 281 bp, Glycine max
gacaactcaaacattctctccattgggccttaaacactcatcagtcatcaccatggccaggctagttttttccctttgttttctgcttttcagtggctgctgcttcgctttcagttccagatagcagcctcagcaaaagcagtgccacatccaatgactcaatgccctcaaaacggataaccgtatagagtcagaaggagggctcattgagacatggtaccctaacaacaagccattccagtgtgccggtgtcgccctctctcgctgcagcctcaaacgca

SEQ ID NO: 37254 - DNA, 370 bp, Glycine max
gacagcaaaaacaattaataaagatgagtttgaagaacaacatggtggtgctaaaggtgtgtttgttgcttcttttccttgtgggggttagagctgcacgcatggaactgagcttcttcaaaagtgatcagtcatcaagttatgatgatgatgagtattcaaaaccatgctgtgatctctgcatgtgcacacgctcaatgcctcctcaatgcagctgtgaagatattatgctgaattcatgccactcagattgtaagagctgtatgtgcacacgctcacagccatgacagtgtcgttgtcttgacaccaacgacttctgctacaaaccttgcaagtctagagatgactataaaaactaatagctctctca

SEQ ID NO: 37255 - DNA, 369 bp, Glycine max
gacagcataaacaattaataaagatgagtttgaagaacaacatggtggtgctaaaggtgtgtttgttgcttcttttccttgtgggggttacagctgcacgcatggaactgagcttcttcaaaagtgatcagtcatcaagttatgatgatgatgagtattcaaaaccatgctgtgatctctgcatgtgcacacgctcaatgcctcctcaatgcagctgtgaagatattaggctgaattcatgccactcagattgtaataactgtatgtgcacacgctcacagccaggacagtgtcgttgtcgtgacaccaacgacctctgctacataccttgcaagtccagagatgactagaaaaactaatagctctctc

SEQ ID NO: 37256 - DNA, 258 bp, Glycine max
gagactctgtgggattcatgcaatggggtagtaaaatcttccatcatcccccatgagtgtcgtccaccatcttctctgctctctttctcatttgtgccttcaccacctcatacctagcttcagccatctctgatttcgtgctcgataatgacagtaaccctcttgaaaatggtggcacatattatatcatgtcagacataacagcatttggtggactaacaccagccccaacgggtaatgatagattccctctcactg

SEQ ID NO: 37257 - DNA, 345 bp, Glycine max
gatgtgttaacaatcgtgaagttttttctttgagaagcaaaagatcttagtgcaagtaattaacatggaatctcagcaagcaaaccgtgaagaacttcatgagagggcaaggtaaggtgaaactgtggttcctggtggaaatggcgggaagagtcttgaggctcaagaacatcttgctgaaggaaggaaccgtggagggcagacgaggaaggagcagatggggagagaagggtaccaagagatgggacgcaaaggaggcctcagcgccatggacaagtctggtgtagagcgtgctgaagaggaacgcatagacatcgatgagtctaagtttaagaataaataaag

SEQ ID NO: 37258 - DNA, 233 bp, Glycine max
gacagcaaaaacaattaataaagatgagtttgaagaacaacatggtggtgctaaaggtgtgtttgttgcttcttttccttgtgggggttagagctgcacgcatggaactgagcttcttcagaagtgatcagtcagcaggtgaggagcaggagtacgcaaaaccatgcggtgatctctgcatgtcgagacgctcaatgccgcctcaatgcggctgtgaagatattaggctgaat

SEQ ID NO: 37259 - DNA, 332 bp, Glycine max
ggagacattgttatgaggaaagtttttgtcactgaccaggacagaattgcaggagtaaactcctttcacgacacaaacaacgtacgtggtgtggcacgcgtaatggttgcttgtcaaaacagtggtatatcgatggacatctacaatatgtgtcacaagtacctaatggatacgaaacattttggagcaccattagcagctttccaaatcatccagcataaacttgttcagatgcctggtaatattcactctacgatacttgttggttgacgcctctgcaaattgtctgacaatggtaaaactacaccagttcaatctagcttgcaaaactc

SEQ ID NO: 37260 - DNA, 353 bp, Glycine max
attcacacaactaactaagaaagtcttccatagccccccaaaaatgaagagcaccatcttctttgctctctttctcttttgtgccttcagcacctcatacctaccttcagccatcgctgatttcgtgctcgataatgaaggtaaccctcttgaaaatggtggcacatattagatcttgtcagacataacagcagttggtggaataagagcagccccaacgggaaatgaaagatggcctctcactgtggtgcaatctcgcaatgggctcgacaaagggattgggagaagcatcgcgtcgccatatcgaatccgttttatcgccgaaggcatcctttgagccttaagttcgattc

SEQ ID NO: 37261 - DNA, 209 bp, Glycine max
gtcacaacagatgagaaagaacacaagcaagtttggtgggaaagtgaacgacaaagaggcgtaccccatggggggtgtatggccaagtccattatcaagcatgtttctcctaaatgcgtctctagacaccatgatccctcctcgtgttccagtcaggagcataggaccatatgtcgaccttgcatatctcaccatcacatagaagcaca

SEQ ID NO: 37262 - DNA, 292 bp, Glycine max
  unsure (1)..(292): unsure at all n locations
gacagctaaaacaattaataaagatgagtttgaggaacaacatggtggtgctaaaggtgtgtttggtgcttcttttccttgagggggttacagctgcacgcatggaactgagctttttcaaaagtgatcagtcatcaagttatgatgatgatgagtattcaaaaccatgctgggatcattgcatgtgcacacgctcaatgcctccgtaatgcagcttgtaagatattaagctgaattgatgccactcatattgtaagagctgtatgtgcacacgcttacagncaggacagtg

SEQ ID NO: 37263 - DNA, 219 bp, Glycine max
gacacagctaactaagaaagtgtttcataggctcccaaaaatgaggagcaccatcttctttgctctcgttctcttttgtgccttcagcaccttatacctacctttagccatcgctgatttcgagctcgatcatgaacgtaaccctccttgaaatggtggcacatattatatcgtggcagacataacatcatttggtggaataagagcagcccccacggg

SEQ ID NO: 37264 - DNA, 377 bp, Glycine max
  unsure (1)..(377): unsure at all n locations
gacagcacaaacaattaataaagatgagtttgaagaacaacatggtggtgctaaaggtgtgtttgttgcttcttttccttgtgggggttacagctgcacgcatggaactgagcttcttcaaaagtgatcagtcatcaagttatgatgatgatgagtattcaaaaccatgctgtgatctctgcatgtgcacacgctcaatgcctcctcaatgcagctgtgaagatattaggctgaattcatgccactcagattgtaagagctgtatgtgcacacgctcacagncaggacagtgtcgttgtcttgacaccaacgacttctgctacaagccttgcaagtncagagatgactagaaaaactaatagctctctcaaatggac

SEQ ID NO: 37265 - DNA, 254 bp, Glycine max
ttgttacagcttacacaattaataaagatgagtttgaagaactgcatattagttctaagagcgtcgtgtgttgctctcatttacttgtaggggctacatgctgctcgcatggaactcagcttctctaatagtgatcagtcattataatatgattatgatgactattcataaccatgctgagaactctgaatgatcacacgctcaatgcctgatcacatgctctatgaatattttatgcatgatattcatgatat

SEQ ID NO: 37266 - DNA, 358 bp, Glycine max
  unsure (1)..(358): unsure at all n locations
ggattcacacaactaactgaaaaagtgttccatagccccccaaaaatgaagagcaccatcttctttgctctctttctcttttgggccttcaccaccttatacctaccttcaaccatcgctgatttcgggctcgattattaaagcaaccctcttgaaaatggttgcacaatttatatcttgtcagacataacaacatttgggtggaataagagcagccccaacgggaaattgaaagatgccctctcactgtggtgcaatctcgcaatgagctcgacanagggattggaacaatcatctcgtccccatatcgaatccgttttatcgccgaaggccatcctttgagccttaagttcgattc

SEQ ID NO: 37267 - DNA, 164 bp, Glycine max
gatcatgaaccagatcattatcctagtacaccgtattaaagaatttaagatatactatgatgagagcgcggtttccatgactgatgctgagagctggtttactggcatcagtatctgtctcatatggcatcgcatattgagataagtagaaccccattcacaac

SEQ ID NO: 37268 - DNA, 313 bp, Glycine max
gattcacgcaactaactaagaaagtcttccatagccccccaaaaatgaagagcaccatcttctttgctctctttctcttttgtgccttcaccacctcatacctaccttcagccatcgctgatttcgtgctcgataatgaaagtaaccctcttgaaaatggtggcacatattatatcttggcagacataacaacatttggtggaataagagcaagcccaacgggaaaatgaaagatccccctctcactgtgtgcaatctcgcaatgagctcgaccaagggattggaccatcatttcgtccccatatcgaatccg

SEQ ID NO: 37269 - DNA, 257 bp, Glycine max
tcgacagatggggatgcaactgaataatggacaaaagccatttacatagcagactgagacaatgaataccactaataaagatgagtttgaagaacaacatggtggtgctaaaggtgtgtttgtagcttcttttccttgtgggggttacagatgcacgcatggaactgagcttcttcaaaagtgatcagtcatcaagatatgatgatgatgagtattcaaaaccatgctgtgatctctgcatgtgcacactctcaatg

SEQ ID NO: 37270 - DNA, 374 bp, Glycine max
agacgacagatggggattcacacaactaactaagaaagtcttctatagccattcaaaaatgaagagcaccatcttctatgctctctttctcttttgtgccttcatcacctcatacctaccttcagccatcgatgatattgtgctcgataattaatgtaaccctcttgataatggtggcacatattatatcttgtcagacatatcatcattcggtggaatattttcattctcaactggaaatgaaagatgccctctcactgtggtgcaatctcgcaatgagctcgacatatttatgtaacaatcattttgttcttatatcgaatcctgtttatcgccgagggccatcctttgagccttaagttcgattcatttgc

SEQ ID NO: 37271 - DNA, 314 bp, Glycine max
gacagcataaacaatgaataaagatgagtttgaagaacaagatggtggtgctaaaggtgtgattgaagcttcttttccttgtgggggttacagctgcacgcatggaactgagcatcttcaaaagtgatcagacatcaagttatgatgatgatgagtatgcaaaaccatgctgggatctctgcatgtgcacacggctaatgccttctcaatgcagctgtgaagatattaggctgaattcatgccactcagattgtatgagctgtatgtgcacacagttacaggcaggacagtgtcgttgtcttgacaccaacgac

SEQ ID NO: 37272 - DNA, 281 bp, Glycine max
  unsure (1)..(281): unsure at all n locations
gacacttgacaggaaaaacagtaaagatgggtttgaagaacaacatggtggtgctaaaggtgtgttttttggatcttttgcttgagagggatactaatgctcgctggaactgaacctgtataaaagtgattactcatgaagtgatgatgagtcttcaaaaccatgctgtgatctctgcatgtgcacaggctcaatgccacctgaatgacattgggcagatattaaganggagttcaatgtactcagcttgtgatcgctgtgcgtgcacacgctcgatgcca

SEQ ID NO: 37273 - DNA, 337 bp, Glycine max
gaacaaaaaattaacacccagttcaattctcaaatggaagctcgggaacagagaatgagaaagagaatggacgccattgattcggtgtacgatccgttgagagaatactcagaggacagcatgaggctcgttaagcgctgttacaaacttgatcgcatagaattctacaaggttgtcgtgcgtaccgtaatagttatagatgtgatgggattcgtgggtttcttcgtgaagcttattttcaatccaattaacaacattaagtttatatctagttaggattgatgttactacaagcagcttaagaattcaggttgtcaagcaaaagtaggcagaaaga

SEQ ID NO: 37274 - DNA, 419 bp, Glycine max
  unsure (1)..(419): unsure at all n locations
gacagcaaaaacaattaataaagatgagtttgaagaacaacatggtggtgctaaaggtgtgtttgttgcttcttttccttgtgggggttacagctgcacgcatggaactgagcttcttcaaaagtgatcagtcatcaagttatgatgatgatgagtattcaaaaccatgctgtgatctctgcatgtgcacacgctcaatgcctnctcaatgcagctgtgaagatattaggctgaattcatgccactcagattgtaagagctgtatgtgcacacgctcacagtcaggacagtgtcgttgtcttgacaccaacgacttctgctacaaaccttgcaagtccagagatgactagaaaaactaatagctctctcaaatggacgaagcccctttaggctttgnttgntaatgtaggggagacaaa

SEQ ID NO: 37275 - DNA, 272 bp, Glycine max
  unsure (1)..(272): unsure at all n locations
tttggacagccaagactatttatgcagatcagcttgaagaacaacatggtagtgctaaacgtgagtttgatgcttctggtccttgtggacaacacagctgctcgcataaacctgagcttactcaaaagtgatcagttatcaagttatgatgattatgactgttgacaaccatgctaagagctctgcatgtagcacacgttcaaagcctncgtaatgcctgtatgaagatgttaacctgcattgatgcgactcatattgcacgagctgtatgt

SEQ ID NO: 37276 - DNA, 416 bp, Glycine max
  unsure (1)..(416): unsure at all n locations
gacagcataaacaattaataaagatgagtttgaagaacaacatggtggtgctaaaggtgtgtttgttgcttcttttccttgtgggggttacagctgcacgcatggaactgagcttcttcaaaagtgatcagtcatcaagttatgatgatgatgagtattcaaaaccatgctgtgatctctgcatgtgcacacgctcaatgcctnctcaatgcagctgtgaagatattaggctgaattcatgccactcagattgtaagagctgtatgtgcacacgctcacagccaggacagtgtcgttgtcttgacaccaacgacttctgctacaaaccttgcaagtccagagatgactagaaaaactaatagctctctcaaatggacgaagcccctttaggctttgnnttgtatgttaggggagac

SEQ ID NO: 37277 - DNA, 194 bp, Glycine max
taagtttgctaatcgagggacttatgctccatatctaagtctttttaccaaatcccgtcacaatggtcataactattttttttcccttctgacttgttatcgttacccacctgcttgtgtttctataagacaaggacttcattataatcctcacttttcttgtggaacaattgccatgcctaaaatgcttaatt

SEQ ID NO: 37278 - DNA, 296 bp, Glycine max
gaccgcatgcacaattaatacagatgagttcgaataacaacatggtgctgctaaaggtgtatgcgacgcttctattacttgaaggcgttacagttgcacgcatggaacctgaacttctttaaacgtgatcagtcattaagtactgaggatgatgagtatataaaaccatgctgcgatctctacatgtgcacacgctcaaagcctgatccatgcagctgcgaagatatatgctgcattcatgccacttagaatgaaacagctgtatgtgcacaacctcacagactcgacagagacac

SEQ ID NO: 37279 - DNA, 438 bp, Glycine max
  unsure (1)..(438): unsure at all n locations
gacagcanaaacaattaatanagatgaagttgaagaacaacatggtggtgctaaaggtgtgtttgttgcttcttttccttgtggnggttacagctgcacgcatggaactgagcttcttcaaaagtgatcagtcatcaagttacgatgatgatgagtattcaaaaccatgctgtgatctctgcatgtgcacacgctcaatgcctnctcaatgcagctgtgaagatattaggctgaattcatgccactcagattgtaagagctgtatgtgcacacgctcacagccaggacagtgtcgttgtcttgacaccaacgacttctgctacaaaccttgcaagtccagagatgactagaaaaactaatagctctctcaaatggacgagggccccttaggctttgntngttatgttaggggagacaaataaaacaagaaataaaagc

SEQ ID NO: 37280 - DNA, 269 bp, Glycine max
ggtagtgggagacgcagtgactaaaccaaacctttcactcgccgtcgtagggtttatcctttcgcttagcgacaacaacaatggttgcagccaagaaaaccaagaagacccatgagagcattaacaacaagctcgctcttgtcatgaagagtggaaaattcaacctctgctacaagacggttctcaaatcacttaggagcttcaaagggaaaatgattatcaatgctaacaacttgccccctttgaggaaatcaagagatggatactat

SEQ ID NO: 37281 - DNA, 348 bp, Glycine max
ggcagccgacacaatgaatcaatatgagtccgaagaacaacatgcgggaactaaacgtgtgcacattgccactttaccatgtgggggttacagctgcacgcatggaactgagcttattaatgagagatcagtccttaagatatgatcatgatgagtattgaaaaccatgctgaagatctatcgatgtgtacacgcttaatggactggtaatgcagctgtcaatatcttatgctgaaatcatgccactcagatcgttagaactggatgtgcacacggttacagcctggacagcgtcagtgtcttgacaataacgactattgctacgaatcttgcaagtgcagatatcac

SEQ ID NO: 37282 - DNA, 289 bp, Glycine max
  unsure (1)..(289): unsure at all n locations
accggaggggacggcaaaaccattataaggatagtttgagaaccacatggggtgctaaagggtgttggttgcttcttttccttgtggggttacagctggacgcatggaactgagcttttttcaaagtgatcagtcatcaagttatgatgatgatgagtattcaaaccatgctggatctctgatgtcacacgctaatgcctctcatgcactgtgaaatatangctgaattatgcactcagatgtagagctgatgtcacacgctacagncagacagtgtcgtgtctgacac

SEQ ID NO: 37283 - DNA, 273 bp, Glycine max
ccacgcgtccgagacgacaggagatgacgaccacatacagcacgagatttaggcacttatagaaaatggtattaacatcatggtatctttggcaagagtgtaatttgcgactcacgataccacatgctacagatgctcgcatcgatcgtagctaatgaacttctgaatggtcataacgtgatgatgatactctgcaatgagatttgcatttacagttgtctctgcacgcacaatatgaactacttgcgtttacttcgtaagcgcatgaacacc

SEQ ID NO: 37284 - DNA, 418 bp, Glycine max
  unsure (1)..(418): unsure at all n locations
gacagcaaaaacaattaataaagatgagtttgaagaacaacatggtggtgctaaaggtgtgtttgttgcttcttttccttgtgggggttacagctgcacgcatggaactgagcttcttcaaaagtgatcagtcatcaagttatgatgatgatgagtattcaaaaccatgctgtgatctctgcatgtgcacacgctcaatgccttctcaatgcagctgtgaagatattaagctgaattcatgccactcagattgtaagagctgtatgtgcacacgctcacagccaggacagtgtcgttgtcttgacaccaacgacttctgctacaaaccttgcaagtccagagatgactagaanaactaatagctctctcaaatggacgaagcccctttaggctttnngttgtatgtaggggagacaaa

SEQ ID NO: 37285 - DNA, 336 bp, Glycine max
gattcttcaagatgatgaaaatgttggaggccttgaagtgctccacagttctacttcttttgtgccaatccctcttttccctggatcccttctagtcaatcttggagatattgctcgtgtgtggagcaatggaaggttttgcaatttgacacaccgggtacaatgcaaggaagcgaccaaacgtttttcaattgctacatttatgatagcacccaagaataggaatgttgaagccccagcagaattggtggaccatgatcacccacgtttgtatcaaccttttatttatgaagactacaggaaagctcagaattagcaataagatgcacacttgtg

SEQ ID NO: 37286 - DNA, 411 bp, Glycine max
gacacaactaactaagaaggtcttccatagccccccaaaaatgaagagcaccatcttctttgctctctttctcttttgtgccttcaccacctcatacctaccttcagccatcgctgatttcgtgctcgataatgaaggtaaccctcttgaaaatggtggcacatattatatcttgtcagacataacagcatttggtggaataagagcagccccaacgggaaatgaaagatgccctctcactgtggtgcaatctcgcaatgagctcgacaaagggattggaacaatcatctcgtccccatatcgaatccgttttatcgccgaaggccatcctttgagccttaagttcgattcatttgcagttataatgctgtgtgttggaattcctaccgagtgggtctgtgtggaggatct

SEQ ID NO: 37287 - DNA, 356 bp, Glycine max
gacagcaaaaacaattaataaaggtgagtttgaagaacaacatggtggtgctaaaggtgtgtttgttgcttcttttccttgtgggggttacagctgcacgcatggaactgagcttcttcaaaagtgatcagtcatcaagttatgatgatgatgagtattcaaaaccatgctgtgatctctgcatgtgcacacgctcaatgccttctcaatgcagctgtgaagatattaggctgaattcatgccactcagattgtaagagctgtatgtgcacacgctcacggtcaggacaagtgtcgtgtcttgacaccaacgacttcttgtacaaaccttgcaagtccagagatgacttgaaaaac

SEQ ID NO: 37288 - DNA, 321 bp, Glycine max
ccacgcgtccgatcacgcgttcgagacgacagaaggggacagcacaaacaattaatagagatgagtttgaagatcaacatggtggtgctaaaggtgtgtcagacgcttcttttccttgcgggggttacagcttcacgcatggaactgagctttttcaaaagtgatcagccttcaagttatgatcatgatgagtcttcaaaaccatgctgtgatctctgcatgtgcacacgctcgatgcctcctcaatgcatctgttaagatatgaggctgtaatcatgccacttatattgctagtgctcgctgtgcacatgctcacagcca

SEQ ID NO: 37289 - DNA, 261 bp, Glycine max
taagtggtaatcccattttaattctcagatccatgctggcgagactgataaggagaaagagattggtctccattgattctgtgatcgatccgctaagtgaattcgtagaggacatcgtgaggctcgagaagctcttctacatacccgatcgcagagaattctccaaggttgtcatccgaactgtgattgttttcatcctgaaggcattcatcgtgctgttcttgaggctcatgggtatatcgattaacatcatcatggacg

SEQ ID NO: 37290 - DNA, 272 bp, Glycine max
tcatgggtcagactagaactaaccaactcaagctaatctgcctacatcatgatgaggaaaacatgtggcttattgttcttgctcctccttgtcgtaactgctgaccagacggtgaagcaaaccgaggccaaagagtgcttgacacggaggcacgggttccatggtctatgcttattagaccagcaatgtgcacatgtctgcaggaacgaaggtttcatcggtggtcagtgccaaggccttcttcgccaatgcttttgcaccaggacatgttg

SEQ ID NO: 37291 - DNA, 369 bp, Glycine max
gagcacatagatggctattcctgtgatagatttcagcactctcaatggagacaaaaggggtgaaaccatggcgcttttggatgaagcttgtcagaaatggggtttctttctggtaaagagaattagatttgcgttaattcctccttttaatcaattgttagtttagttggctttgttgtttaatacattacatgtgcagattgagaaccatgaaattgacaaaaacctgatggaaaaggtgaaggagctaattaatattcactatgaggagaacctgaaggaaggtttctaccagtccgagatagcaaagaccttggagaaaaaacagaacacctctgatatagattgggaaagtgccttcttcatttg

SEQ ID NO: 37292 - DNA, 385 bp, Glycine max
agagacgacagagggggacacaactaactaagaaagtcttccatagccccccaaaaatgaagagcaccatcttctttgctctctttctcttttgtgccttcaccacctcatacctaccttcagccatcgctgatttcgtgctcgataatgaaggtaaccctcttgaaaatggtggcacatattatatcttgtcagacataacagcatttggtggaataagagcagccccaacgggaaatgaaagatgccctctcactgtggtgcaatctcgcaatgagctcgacaaagggattggaacaatcatctcgtccccatatcgaatccgttttgtcgccgaaggccatcctttgagccttaagttcgattcatttgcagttataatgct

SEQ ID NO: 37293 - DNA, 388 bp, Glycine max
  unsure (1)..(388): unsure at all n locations
gacagcaaaaacaattaataaagatgagtttgaagaacaacatggtggtgctaaaggtgtgtttgttgcttcttttccttgtgggggttacagctgcacgcatggaactgagcttcttcaaaagtgatcagtcatcaagttatgatgatgatgagtattcaaaaccatgctgtgatctctgcatgtgcacacgctcaatgcctnctcaatgcagctgtgaagatattaggctgaattcatgccactcagattgtaagagctgtatgtgcacacgctcacagccaggacagtgtcgttgtcttgacaccaacgacttctgctacaaaccttgcaagtccagagatgactagaaaaactaatagccctctcaaatggacgaagccccttt

SEQ ID NO: 37294 - DNA, 218 bp, Glycine max
acgaccagcttgtgggacaagagccaggaggagaccacccgaaggagccatgtgaatgagcgtaaacacgactttcaagctcaccgtggctctcttggcaaactttatgacttttgcagctgtgtgtgatagggcatatttgcccaggagtgctaaagaacttatatggctgcgcattaagacatactccaaagcttttcaccccaaaagtatcagag

SEQ ID NO: 37295 - DNA, 370 bp, Glycine max
  unsure (1)..(370): unsure at all n locations
aggccccaaaaattaaagctcaaggttatcaaccaggaatttgtaaacttccaccggcaaattcagatcctgaaaaattctaacaggcacctgatgggtgatgccttgagcacactgactgtgaaggaacttaagcagttggagaatagacttgaaagagggatcactagaatcagatctaagaaacatgaaatgctattggcctgaattgaatactttcaaaaaagggagattgagctggaaaatgaaaaatcttgcctccggactaagataactgacgttgagaggattcagcangtaaacatggtttctggaccagaactgaatgtcattcaggcattagcttcccgtaacttcttcaatccaaaca

SEQ ID NO: 37296 - DNA, 455 bp, Glycine max
cccggtacgttgcgagccttaggacactcggtcagacggatgagagatgacggccgcaggggcagagcatacgaaataccaagggtggcaaccatttctgatcaacctagaggggcctactcctatggaacctgatatggagcaccctatggaaccacgtatgagaccaacaccagcattaacaacccaccttgacgccaaacagtgaagttcataactgctgccactattggcatcacactcttgctcctgtctgggttgaccctcacaggcactgtcatgggtttgatcattgcaacccctcttcttgttatcttcagccccatccttgtccctgctgcgtttgtgctgttcctagttgcttctggctttttgttctctgggggctgtggtgtggctgccattgctgctttgtcttggatttacaactatgtgtctgggaaccagcctgcggg

SEQ ID NO: 37297 - DNA, 348 bp, Glycine max
aggcctagaagaccacatacggggatccacacgactaactaagaaagcatttcatagccctactaacatgagctgctccatcatattcgctctataactgatttgagccttcaccaccttatacctaccttaaaacatggcttattataggctcgataatgaacgtaaccctctagaaaacggtcgcacatattatatctcgacagacataacaacatttgatggaatgcgaacagtccaaacgggaaatgcaagatgccctctcactgtggtacagtctagcaatgacgctcgacaaagggattggaacactcatctcgtgaccatatccaatccgcaatatcgacg

SEQ ID NO: 37298 - DNA, 389 bp, Glycine max
acgagaagacgacagagggggcaattaaacccaagcagaaggccatattatttttttttatttgaaataatgtgcgggatcatccacaagattgaggagacccttcatgtgggagggcacatgaaagaggagcacaaaggtgaacaccatggtgagcacaaaggtgaacacaaaggagaacaccatggtgagcacaaaggtgaacacgtaggagaacaacaccatggggagcacaaggagggacttgtggataagatcaaggacaagatccatggtgatggccatgacaagggtgagaaaaagaagaagaaggacaccgaaaagaagggggtggacatgaccattatggtcatagcaacagcagtgaccgggattagatcttatatgtt

SEQ ID NO: 37299 - DNA, 303 bp, Glycine max
gacagcaaaaacaattaataaagatgagtttgaagaacaacatggtggtgctaaaggtgtgtttgttgcttattttccttgtgggggttacagctgcacgcatggaactgagcttcttcaaaagtgatcagtcattaagttatgatgatgatgagtattcaaaaccatgctgtgatctctgtatgtgcacacgctcaatgcctactcaatgcagttgtgaagatattaggctgaattcatgccactcagattgtaagagctgtatgtgcacacgctcacagttaggacagcgttgttgttttg

SEQ ID NO: 37300 - DNA, 437 bp, Glycine max
gacagcaaaaacaattaataaagatgagtttgaagaacaacatggtggtgctaaaggtgtgtttgttgcttcttttccttgtgggggttacagctgcacgcatggaactgagcttcttcaaaagtgatcagtcatcaagttatgatgatgatgagtactcaaaaccatgctgtgatctctgcatgtgcacacgctcaatgcctcctcaatgcagctgtgaagatattaggctgaattcatgccactcagattggtagagcttgatttgcacaccctcacagccaggacagtgtcgcttgcttgaccccaacgacttctgctaccaaccttgccaggcccgagatgactagaaaaactaatagctctcttaaattgaccaagcccctttaggctttggttggtatggtagggggggccaattaaaccaggaattaaag

SEQ ID NO: 37301 - DNA, 348 bp, Glycine max
gacagcaaaaacaattaataaagatgagtttgaagaacaacatggtggtgctaaaggtgtgtttgttgcttcttttccttgtgggggttacagctgcacgcatggaactgagcttcttcaaaagtgatcagtcatcaagttatgatgatgatgagtattcaaaaccatgctgtgatctctgcatgtgcacacgctcaatgcctcctcaatgcagctgtgaagatattaggctgaattcatgccactcagattgtaagagctgtatgtgcacacgctcacagccaggacagtgtcgttgtcttgacaccaacgacttctgctgcaaaccttgcaagtccagagatgact

SEQ ID NO: 37302 - DNA, 357 bp, Glycine max
gacagcaaaaacaattaataaagatgagtgggaagaacaacatggtggtgctaaaggtgtgtttgttgcttcttttccttgtgggggttacagctgcacgcatggaactgagcttcttcaaaagtgatcagccatcaagttatgatgatgatgagtattcaaaaccatgctgtgatctctgcatgtgcacacgctcaatgcctcctcaatgcagctgtgaagatattaggctgaattcatgccactcatattgtaagagctgtatgtgcacacgctcacagccaggacagtgtcgttgtcttgacaccaacgacttctgctacaaaccttgcaagtgcagagatgactagaaaaact

SEQ ID NO: 37303 - DNA, 324 bp, Glycine max
gattcacacagctgactaagaaagtcttccatagccccccaaaaatgaagagcaccatcttctttgctctctttctcttttgtgccttcaccacctcatacctaccttcagccatcgctgatttcgcgctcgataatgaaggtaaccctcttgaaaatggtggcacatattatatcttgtcagacataacagcatttggtggaataagagcagccccaacgggaaatgaaagatgccctctcactgtggtgcaatctcgcaatgagctcgacaaagggattggaacaatcatctcgtccccatatcgaatccgttttatcgccg

SEQ ID NO: 37304 - DNA, 353 bp, Glycine max
gacacaactaactaagaaagtcttccgtagccccccaaaaatgaagagcaccatcttctttgctctctttctcttttgtgccttcaccacctcatacctaccttcagccatcgctgatttcgtgctcgataatgaaggtaaccctcttgaaaatggtggcacatattatatcttgtcagacataacagcatttggtggaataagagcagccccaacgggaaatgaaagatgccctctcactgtggtgcaatctcgcaatgagctcgacaaagggattggaacaaccatctcgtccccatatcgaatccgttttatcgccgaaggccatcctttgagccttaagttcgattcat

SEQ ID NO: 37305 - DNA, 322 bp, Glycine max
acaaaaaacaaattcttgagattgactcttaaccatttcataccaccaacaccacttttaatcaaaatcttattccttgacatcaaaaacatttccccaacaaactttaaccattcgcaaaaatttttacattttaatcaataacaaaccattcaacattttttaattttccacttacaaaactatcaaacattaacacccaaaatcccacctttttataattgacatattcactcttaaaaaccttcaatatattatcccatcttaccataactatcatccttctcatttcaatctcatttactaccaactcatcaacatc

SEQ ID NO: 37306 - DNA, 313 bp, Glycine max
tgactccaagaacaacaccacaggatctagaaaagcccttccatcttcaccacccaaaaagaaaataagggcaatggccagtgcaacaacttcagccacaatcactgtgggggcaatttccagggttgccggcccaaaagaaagggagaggaatgtgcacttcatcaaaggtttgaattcctttggagggttgaaggctcaaaacagtgtgacatcactaggtcttcctgtgtgcactgaacagtgtttcgcagatgtggagagcccattgaaatatcaatcatcatctaaggccaaatgtggaggcgctgcc

SEQ ID NO: 37307 - DNA, 379 bp, Glycine max
aacgtcgcatcagaagaacacatagcagtgaactgtggaggagaagcatatggcttcctcaaccatctctgacccagctgttaccagctgtcaaccatgcacaagcagacatagttactacattcactgacctaaagtccaagactgccttaccaaccagaaacaccaacaatgacattacctccattggtagcaacactggaagagtgcacttcatgcaagcgtatccagcacataacaagaacaacactgacactgtttcctacctggcacacctttatgatgcacaatagtcaaaggatgaagaataccttattatgaacggatggatgaattgcttgcaattcaagtaggagcaccgtatctactaccataagca

SEQ ID NO: 37308 - DNA, 262 bp, Glycine max
cggattcccggtcgaccacgctcgtacgtgcagagacacggaaggggccagtgagttgttgacagatactagaacatggtgtaaaatgaagtccttggtttcttcgttgctacaattttggtagcatggcaatgccatgcgtacgatatgttccctctccgaatgaacactggctatggtgcccgtactccggaggtgaaatgcgcaagttggaggcttgctgtggaagcacacaacatctttggctttgagacccattctg

SEQ ID NO: 37309 - DNA, 301 bp, Glycine max
  unsure (1)..(301): unsure at all n locations
gacggttcacgagattgctgcgagctataacctatgttatcgtgcggcgaatatgaactggtgcgatatcactgctgctggattcggtttggtaacatcgacataccatgcngcatgctaccgacggttccctctacgaatgaaaactgactacggagagctgcctttgcaagtagactgcgcaaggtttaggcttgctgtggaagcacacagcatccgatcctttaagaccattccatgggactgcgttgaaccaacaacggactgcattaatggcaaacaatatagatcatactctaat

SEQ ID NO: 37310 - DNA, 224 bp, Glycine max
ggtgcacaagtgagtttgttgatcgagataactaggaacagtgtgatgaaaatgaaggtccttggtttcttcgttactacaattttggtagcatggcaatgccatgcgtacgatatgttccctctccgaattgacactggctattgtgcccgtactccggaaggtgaatgcgcaagtttgaagcttgctgtggaaacacacatcatcttttgcttttagaccct

SEQ ID NO: 37311 - DNA, 230 bp, Glycine max
ggagaatgggatctggcagcagaaaaacaagtagtttagaactaataagaaggaaatggctttcctcaatgattctcctccccagctgttaccaccgtcaaccgtgccggtgccgcatggttgttccattaaccggcctcaaatccatggctggcttccccacgaggaagaccaacattgactttacctcaatggttagcaccggtgaaagagtacaatgcatgcaggtg

SEQ ID NO: 37312 - DNA, 240 bp, Glycine max
gaatgtcatcacttattcaatccaacggttgtaactggtcagcaaccaatcccctccatttcacaccatcggattagtactacacaaatcacactattatatatagtaagcttgagcagaagcttggatatctggcagcagaagaacaagtagttgagaactaagtacgagaaacatatggcttcctcaatgatctcttacccagctgataccactgtcaacccgtgcggtgccagcatg

SEQ ID NO: 37313 - DNA, 248 bp, Glycine max
accgcttacgacagaacaagtctgttgagtgtagaacgctgctgcctaaacccttccggaggcctaatgtaagtgagtaatcagctgttgagaatggtggataaagccaagggtacaaaggaatgacgtgctacccatgagtacactattaacctgcacactcgctttcatggctgcacatataagatgaaagctcctaaagctatttacgtgatagggaaactctatcaacaggccatgtggaccaa

SEQ ID NO: 37314 - DNA, 319 bp, Glycine max
ggctcacgtcactgtgtcgatcgatatggctagagacagtgtgatgaaaatgaaggtccttgtttgacttgattgctacaattttcctagcatgggaatgccatgcttactatatgttcgcgtctagaatgaacactggctatggtgccacgtactccggatgtgaaacgcgcaagttggatgctcgttctggaagcacacaacatctgacgctttcacaccattcctgaagagtgcgttgaagcaaccaatgaatacatctatggggaacagtatcgatcagactccaaaagagatcgccaacaagcttacttttatg

SEQ ID NO: 37315 - DNA, 277 bp, Glycine max
gcagtgtgtgagatatctagcgagctagcggttttaaagatcggatttgtgattgggaacgctaacgattgcactgtctctcttcctcttctctttcgactcatacctcattcataatcttccaattcaacaaccttatcctgacactcacccattcccacatctatacgcctatcggcccttccatggctttaaagcgcatcctcaacgagctcaaggacttgcataaagactccaccacttcttgcagttcttgtccagtccactgacgacatgt

SEQ ID NO: 37316 - DNA, 309 bp, Glycine max
cacacgcgtgcgaatacgagcgaccggtctagaggatgcacgcgtacacaagagctcatggggaggtgcagatggcttcctgagtgatctcttgctaatctattaccactggcaaccgttccggtaccagcatggttgctccattcactggcactaagtccatggctgacttctgcatcaggaataccaacgatgacattaccataattgctagcaacggtgcatgagtgcaatgcatgcatatgtggacacctgttagcatgaagcagattgatactgattcatacctaccagacattgatcatgcac

SEQ ID NO: 37317 - DNA, 225 bp, Glycine max
gaaggtcacggcaagacgagccgtttctaattagggatagttgtcaagtagaagtgcttttatcaattcatgtgagtcatcttcacataccagaacgacccagaaactctactgctataacctagattcaatgacttactgactcaccaagacgaccaacggttacatttgctagattactagccacagttacagattccaaaacatgacagttttgccactatg

SEQ ID NO: 37318 - DNA, 247 bp, Glycine max
gaaaaaagctgcttacactgggaagttctacacgatcgagtgtgcattgatcgagtgagcttggtcttttgtagattggatagatgtgcaatggaaagagggtggaaaagagcggtaaggaggagggcggcgcccaaaaaaaaaaaaaaagcggccgatctaaaggatgccggtttacaggatccaagcttacatacgcttgcatgcgaattgatagatctaatatcaagtcacttaacttcaattt

SEQ ID NO: 37319 - DNA, 245 bp, Glycine max
gaagacactacatttcatccaatatttgaacaatattgtaggccggcttgttacgttgatgagcactatttccccaccatgctcaccattcaagcagccaatgtgttggcgaacaggagcataacttgggtggactggtctaggggtggagctcaccctgctacatttggaagaaatgatatcactgaggagtttttcaatcgagttcgcagaggtcacacttgcctatacaacaatagaaactc

SEQ ID NO: 37320 - DNA, 343 bp, Glycine max
aggcgtccgaacacctccgagaggacatctcatggcgagtgccattgaatgtgaatgggcctagatgcttaatatgtcctctcacttgtgcctagccctatgtcataccatcatcattcattctcacctttctctctgctctctccacccaatccctaactcccgaccctgttcccgtctcgtatccgtcatgaaaggaggaacgttcaagacctcatctaagatagccgatcccaaccttactgtgactaacatggcagacgtcaccaatgctaggaatcccttcggcaacggtaaggctcctcaagaccctaacaagccaaagtggcctccaagtgctttc

SEQ ID NO: 37321 - DNA, 340 bp, Glycine max
acgcatgcgtgcaggcgtccgaaagacaccgctattcctatcaagccagctactgagatcccactcttgagtaccttaagtctaacggattcgaagttaaagctcaaaaccgatcacgaaaatgctcagaccaacattgtagtgcactgtcatggataccctgacgaggcaaccaacattaaccagctgaagaagcctgtcgcggacaactaggctccaaggcatgccatatgatggccagcccataccgactacgaaggcaaccagaacattaagctaacacaataatatggaaccctaatgtatcagtgtcatcgtcaatatgtagtttaagctagct

SEQ ID NO: 37322 - DNA, 321 bp, Glycine max
cccacgcgtccgaaagacaacggaatggctagcacacacgttaatcccaatcccgagacgggtaccttaaatgtaactgattcccacttcgatctctagatccatcgctacaacgctcaaaccaacagcctatcggacggtcatggataccatgaaccagcaatcagaattaacgaactgaataagcctgttccgcaaatacaagctccacgagatgccatatgatggcctgcacctacagtctcacatgtgaaccagaaaattatgcctacataatcatcttgaaccctaatgtatcagtgtcatcatcaaagagtagtt

SEQ ID NO: 37323 - DNA, 275 bp, Glycine max
gatctggcagcagaagaacaagtagttgagaactgggaaggagaagcaaatggctttctcaatgatctcttccccagctgttaccactgtcaaccgtgccggtgccggcatggttgctccattcactggcctcaagttcatggctggctttgccaccagaaagaccaactttgactttacctgcattgctagcaacggtggaagagtgcaatgcacgcatgtgcggccaccagttgccaagaagtagtttgcgactctttcctacctgtcagacc

SEQ ID NO: 37324 - DNA, 332 bp, Glycine max
gatcgcatgacatagcactcaccctcattaccaaggcgagggcatagccaaaacctactttcgaaggctctgattttcctaatggctccggcagaggcagataagaagccaccagagaagaagccagctgcggaaaaagcaccgacggataagaatccgaaagcacgacaagaagatctcggatgaaggaaggcgcgagaagaaaaagacgcgcacgaagaagagcgtggagacctacaagatctacatcgtcaaggtcctgacgcaggttcaccccgacattggtatcaccagcaaggacatgggcatcatgaacagcttcatcatcgaca

SEQ ID NO: 37325 - DNA, 312 bp, Glycine max
agaaggggacacgtcagtttgttgatcgagataactagctacagtgtgatgcaaatgaatgtccttgatttcttcgttgctacaattttggtagcatggcaatgccatgcgtacgatatgttccctcttctaatgaacactggctattgtgcccgtactcctgaggtgaaatgctcaagttggaggcttgctgctgaagcacacaacatcattcgcttctataccatgattgaagagtgcgttgtatcaacaacggaatacatccatggcgaacaatatatttcatactacttaacagctaatcaacaagct

SEQ ID NO: 37326 - DNA, 332 bp, Glycine max
acgacaggcgacagaagagacagatggggctagcggcagataaacgggagttgcaagcgggtaagaaggaaatgtcttggcgaatgatctgatcccaaactgataccacggtgaaccgtaccgatgccggcgcgattgcttgattgaccggactaaaatccatggctggattgcgcacgaggtagaccaacactgacattaccttcattgctagcaactgtggaagaactcagtgcatgcaagtgtagtcaccaatcggctagaagaagtctgagacatctttctacttgccagacctcgatgatgcccaattggcaaaagaagtcgaatac

SEQ ID NO: 37327 - DNA, 302 bp, Glycine max
acatgggggcactcgtgattttgttgatcgggatatctagagactgcgtgatgaaaatgaaagtcctcgtgttcttcgttgctacaattttggtcgcatggcattgccatacgttcgacatgtaccatatgcgaatgaacactgactatggtgcccgctctacgtacgtgaactgcgcaagttggaggcttgttgtggaagtacactacatctttggctctgagaccattcctggagagtgccttggacctgcacaggtatacatgcatggctaacagtacacatcagactgcaaaacagtt

SEQ ID NO: 37328 - DNA, 318 bp, Glycine max
acatggaggcacacgtgattatgttgatcgggatatctagaaactacgtgatgaaaataaaagtcctcgtgttcttctttgctacaatcttggtcgcatggcaatgccataccttcgacatgttccatatgccaatgaacactcactatggtccccactctacgtacgtgaaatgcacaagttggaggcttgttgtggaagtacactacatctatagcatcgagaccattcctgaagagtgccttgaacctgcacaggtatacatgcacggctaacaatacagatcacactccaaaacagttaaccaacaggctatac

SEQ ID NO: 37329 - DNA, 300 bp, Glycine max
gactgctacacctaagcaaacgcggttagatcggtggctaagcatacttcctagcggacatggttgctgcacttatcctcattcctaacggacttggtacgtaactcaaacccactgagacgcaaccagtgtactggcttacatcgttgcaacgaacactgtgcaaaccacagtggtatgctccaacagcaacgggacacaagccgtagccagcgtgctacaagccaccatatcagaagccaccatgcacgagacgaccatatgggaagtaccctccagacgacgacaacacccatgcct

SEQ ID NO: 37330 - DNA, 448 bp, Glycine max
taccgacaggggttctaccacagcattctattcattcaatcacgcagggcttacaatatgggtgggcagacctaaatacttcaagatccctcatacaaatcagacttcttgcaagtcaacttgacgaaaatccaccctcaagcatcttccaaccaatgctgctcgtctgtatgatccaaccactcttggtgctaacatacctcatcatcatcgtcctcttactgctgctcttcatcacattatgaaataccacacgagcactcttctactaatcatcaagcttcctttcctgaacatgcttcgttacattacccatcatgacatcactgctctaccttttcaaatccatgctgagcttgcatcacacgaagatgcttattcatacctagttgggctcttttatgacactaacttgcttgccattcactccaagcgtgtgactattatt

SEQ ID NO: 37331 - DNA, 213 bp, Glycine max
gagcgtactgatgagtgtttataccatgcttgtgatatagctcatgatgcaggaagtgcaggaagacaatcattaagcggtggtacacaaaaggggccaccgttttaatcacactggctggtataagagctagctgtcattatgtcactaaactgtggatcgccagtatgtgcacgaattggtgtactacaggggcacgacttcaaaagttca

SEQ ID NO: 37332 - DNA, 447 bp, Glycine max
  unsure (1)..(447): unsure at all n locations
ccttacgcatgtgacaaaacatttgaggtcaaaagtgtgattccatttagcgagccatttactgtggatccaacaaaccctcctccagaaaaggactatgacgtatattttaaaaatttaaatgaaggcattactgggaaggaagctctccaacaaaatcctgtttctgtttagttcagctatgaatgttgcatatgcgagtactttgagagctgtgcagtctttgatctaaagagatctaaacttgacaaatctgtgatactaagttttatgataaaataggttatgtcctaacagtataaaacagttttaaaccaagttagatatgatctttaccttacaatatgcatgtatattctgtcttcaaacaatcaaacatgagtccttttcctcatatgttacagacttctagcanataggaaagcaaaagaattttatattcttggt

SEQ ID NO: 37333 - DNA, 400 bp, Glycine max
gatctggcagcagaaaaacaagtagttgagaactaagaagaaggaaatggcttcctcaatgatctcctccccagctgttaccaccgtcaaccgtgccggtgccggcatggttgctccattcaccggcctcaaatccatggctggcttccccacgaggaagaccaacaatgacattacctccattgctagcaacggtggaagagtacaatgcatgcaggtgtggccaccaattggcaagaagaagttcgagactctttcctacttgccagacctcgatgatgcccaattggcaaaggaagtcgaataccttctaaggaaaggatggattccttgcttggaattcgagttggagcacggtttcgtgtaccgtgagcacaacatgtcacctggatactatgat

SEQ ID NO: 37334 - DNA, 350 bp, Glycine max
gtcgcatgtgagtctgatgatcgagatatccagaaggggtgttatcaaatttaaggtccttgttttcttaagtgctacaattttgattgcatggctatgccgtgcgtacgatatgttccctcttcgaatgaacactgtctatggtgcccgtactgcggaagttaaatgctcaagttggaggctagctgtggaagcacacatcatctttgactgttagaccattcctgaatagtgcgttgaatcaacatatgtataccttcatggcgatcaatatatatcagacttcaaaacaggtaaccaacaagcttacttttatgccagagacctttaaatccattccaaggacacat

SEQ ID NO: 37335 - DNA, 338 bp, Glycine max
accactcgtacgtgccctgcgagaggaccacgaatggggagctggctgtagacgaacaagtcgttgagagcttataaggagaagcgaatggcttgctgaatgatctcttccgcagctgttaccactgtcaaccgtgccggtgccgacatggctgcttcattcactggcctgaatgtcatgactggcttccccaccaggaagaccaacgatgacagcaccttcattgctcgcaccggatgcagagcgcaatgcctgcacgtgtagacaccagttggccagcagaagtctgagactatggcctacctgtcagaccttgctgatgcacaattggccaacga

SEQ ID NO: 37336 - DNA, 329 bp, Glycine max
ggttctagtgtatgtgattgatgtgactcgtgcttcttcgtcgctatcttcttcttttgttgtttgtgtgtttgcatttctctcacctgaaaatgtcttgctgcggtggtaactgtggttgcggaagcgcctgcaagtgctgcaacggctgcagaggctgcaagatgtacccagacttgatctacaccgagtcaaccaccaccgagaccttggtcatgggagtggcaccaggtaaggctcaattcgagagtgctgaaatgggtgctcccgctgagaacgatggctgcaaatgtggatctaactgcacctgcaacccctgcactcgcaag

SEQ ID NO: 37337 - DNA, 402 bp, Glycine max
cccacgcgtccgttgcggaagacgacagaaggggcagtgatagagcaataacctaagaagagaaagagagagtatgagtaacgtgacagagaaattgggcatcaagattgagaggaaccctcctgaagacaagctcactcaacttggtgttaggcaatggcccaaatggggttgtcctctaagcaaattcccgtggacatatgaatctaaagagacctgctatctcttggaaggaaaagtgaaggttacccctagtggggcaaatgagtcagtagaaattgctgctggtgattttgttgagtttccaaaagggatgagttgcacttgggatgtgtcagttgctgttgacaagcactataactttgaataaaatcctacaagggatattcctaatgaatgaaa

SEQ ID NO: 37338 - DNA, 330 bp, Glycine max
  unsure (1)..(330): unsure at all n locations
ggtagacaaattggaatattcactctatatttaagtattattcagcattggaaaaacaaatgaatgcgcgaattttgttctcagatactgagcaatgggaaatacaagagcgttgttcatcgagctgtggtgaacacgaaaggcattaggttttccgttggtatagcacacgggcccgagcttgacaccattgtggggcccgcaccggagcttgttggtgatgatgatcctgctgcataccgtgccatcaaatatagagattacatgcagcttcagcanaaccatgaactcgacggtnagtcatgcttggatcgtattcgaatttgaatc

SEQ ID NO: 37339 - DNA, 386 bp, Glycine max
ggcacaagtgagtttgctgatcgagatagcgagaaacagcgtgatgaaaatgaaggtgcttggtttcttcgttgctacaatcatggtagcatggcaatgccatgcgtacgatatggtccctctctgaatgaacactgtctatggtgcccgtactcccgaggtgaaattcccaagttggacgctctctgtggaagcacacaacatctttggctgtaagaccattcctgaagagtgcgttgaagcaacatatgaatacatgcatggcgaacaatatagatcagactccagaacagttaaccagcaggcttactcttatgccatagaccgtcaagtccattccaatgacacatttgagttcagtatagatggcaccgtactgtataata

SEQ ID NO: 37340 - DNA, 158 bp, Glycine max
cttgtgctgctcctgccaatgattaacttgccaaggggtatggtcctgacagaaggaacttcttgccttaaggtctcttggaccgatccgaaattccagaatacttgaccggaaaagttccttgagactattggtatgacccatttggtcttaaccag

SEQ ID NO: 37341 - DNA, 183 bp, Glycine max
gggcagcagaagaacaagtagttgagaactaagaaagagaaacaaatggctttcttaatggatcttttcccaacttgtaccaattgcaaacgtgcccgttcccggattggtggttcattcaattgccttaaattcattgcttgctttcccaacaagaagaaccaccattaccttaccttcatt

SEQ ID NO: 37342 - DNA, 135 bp, Glycine max
gttatatatgaaaaaaaaaaaaaaaaggaagcggacgatatgcaggcgctatacatgatccaagcttacttacacgtgcatgctacgttatagctctaccatagtgtaacctaaagtcaattcactgaccacctg

SEQ ID NO: 37343 - DNA, 269 bp, Glycine max
gaaggtgcaggagttggtggtaagctttaagggagttaatcgtaaggggattttgaagtggttggtttccttggtggctgcagtagttttggaagcatggccatgccatggcccaggttaccaaaggttccttctccgaatgaaacctgcttatggtgagcgttcttcggaggtaaaatgcgcaagtttaaggctggctgtggaagcacacaacatccgagcttttaaaaccatccctgaagagtgcgttgacccaacaggggtctact

SEQ ID NO: 37344 - DNA, 394 bp, Glycine max
gaaggtgcaagagtttgttgtgagctataagctagttgatcgagaggagaatatgaagttgttaggtttctttgatgctgcagtagttttggtagcatggacatgccatggcgcaggctaccaaaggttccctcttcgaatgaaaactggctatggtgagcgttcttcggaggtcaaatgctcatgttttatgcttgctgcggaagtacacaacatccgagcctttaaaaccattactgaagagtgcgttgaaccaacaaaggactacatgaatggctaacaatctagatcatactctaaaacagttgaccaacaagctttcttgtatgctagtgaacgcagaatccatcacaacgacatatttatattcggcatagataacaccgcactctct

SEQ ID NO: 37345 - DNA, 392 bp, Glycine max
tgcgcatgcgaaaagccgacagatggctactgatacggaaagacgactgactgcttcagtgatcagatgaccacctgatgctactgttgacagagcacgagccagcgttactgctgcattaactggactgaaggctatggctgccttacgaccacggaaggctaccgctgacataacatgacttgctgggctcgttgtatgatcagcaatgcatgcaggtgtggccaccagttggcaagaggtctatagggactatgttttagttggcatacctgcaacatgctcaatctgctaaggaggcacaaaacttaattaagtgggcatggatttacagcttggaatctgagataacgcacgcgttaccgtactgagagcacttgaggtaaatacga

SEQ ID NO: 37346 - DNA, 291 bp, Glycine max
gctcatagtgtgtgattgatcggatgttgctaaggcgcggcttctatctaaaggaaggctgtggttgtgttcgttgctacatctcacctgacaatgcattgctgtggcggcaactgtggtcctggtagcttgtacacttgctataacggctgcactctctacgtgatatgcccagacttgaggttcactgagtcaacccacaccgtgaccttgttcatgacaattgctcctgagtacgctgaatctgcagatgcttacatgcatgtgcaccattataactcaggctgcaaa

SEQ ID NO: 37347 - DNA, 329 bp, Glycine max
gacacataaaccaagtactacaagggaagaagaactgagctacaagctaaggaaggatcaaagagaatggctcaagcaatggcatcaatgactagctaacgtggttcctctaaggctgtgttgaaaggtagccttggctcaaaacccttgaatgtgggaagtggaagcagggtggcctaagtcacacgtgcagggttcacagttgaagcccagaaccaccagttgaatgttgttaaggtccaaattacccgtagggcatggctttaactggttgctgctggtttgaccactggctctttggttcaagctgtgcttgctgatgccaaacc

SEQ ID NO: 37348 - DNA, 353 bp, Glycine max
gatcaccactcggacgcaaaaatggcacctgcgacactgtctctgtctctccttctactgctctcactcaacattgacgtaaccgtcagatagagcgactacgactactattgactgtacactgcatacgttggaaccgattcagtgctggaaggccaaacgtactctaagatcgggctgaagctgtacgacaagtacggtcactacatctacattaaaaacctctacgcatggcgcagcttgatgagcatgggctacgactacttccagcgcggcaacctcgacatcttcagcaggaagagaccctgtattgacggacccatatgtgccgttaaagttacttctagctgatc

SEQ ID NO: 37349 - DNA, 343 bp, Glycine max
cgacatatgtcatcgaaagggtctcgatgacccacgatggcacgaaagccgggatctttcacaaaatggattcctattccaagggtgcataacctcatggataaactgacacttaccccacgatttgggatccaattacgtgccttaggatgtatctctaacgaactttggaatgcaataatatctattgatacagatacagaagaatgggttctctattgattcaaacgctctacctacgtgatcgggatagaataagaggcagaaaccgatgatttcacatagatctttaggtcaaacaatcgatctgaggatgatcgaactattagctcaatgatcaaat

SEQ ID NO: 37350 - DNA, 407 bp, Glycine max
ggtgcacaagtgagtttggtgatcgagataactagaaacagtggtgtgaaaaataaaggccttggtttctttggtggttccattttgggtagattggaattgccttgctaccaaatggtcccttttcggatggacaattggttttggggccggacttccgaaggggaatggcccagtttgaaggttggttgtgaaacccaacacaatttttgcttttaaaacatttcttgaaaatgccttgaaaccaccaagggattcattcattgggaaccattttgatcagacttccaaacaggtaacccacaaggttacttttatggccgagaccttgaagttcattccaaggacacatttgtggtcaatatagattggaccgtactttttaatatttcatacttcaaaaaaca

SEQ ID NO: 37351 - DNA, 429 bp, Glycine max
gatctggcagcagaagaacaagtagttgagaactaagagggagaagcaaatggcttcctcaatgatcttttccccagctgttatcactgtcaaccgtgccggtgccggcatggttgctccattcactggcctcaagtccatggctggcttccccaccagaaagaccaacaatgacattacctccattgctagcaacggtggaagagtgcaatgcatgcaggtgtggccaccagttggcaagaagaagtttgagactctttcctacctgccagaccttgatgatgcacaattggcaaaggaagtagaataccttcttaggaagggatggattccttgcttggaattcgagttggagcacggtttcgtgtaccgtgagcacaacaggtcaccaggatactacgatggacgctactggaccatgtggaagct

SEQ ID NO: 37352 - DNA, 315 bp, Glycine max
ggcacaagttatgtttgacgatcgagataactagaatcagagtgaggataatgaaagaactcgtgtgatacgttgctacaatattcggtagcttggatgtactgggctcatcagataatccatcttggaatccatagccaaatctggccacataactttgcttttgatgagggagttcactctctccaacctcgcaaaatcacccatcatcgacaatttcaaaggcctcggtgtcaatcttgctttatgagatctatacgatcaccaaagcttgcttagtgctatatagcaggtcgatgtggtaatttctactgt

SEQ ID NO: 37353 - DNA, 192 bp, Glycine max
gagacctcaggtcaggcggggctacccgctgagtttaagcatatcaataagcgcaaaaaaaaaaaaaaaaaaagcggacgatatgcgggcgctctacaggatccaagcttactgccacgtgcatgctacgtcatagcgctactatagtgtaacctaatggcaattcactggccgcggcttgacagcgaaaac

SEQ ID NO: 37354 - DNA, 211 bp, Glycine max
ctgcgagaaaactactgacggggatcttgcaacagaagaacaactagttctgaactaataacgagaagcaaatggttttctcaatgatctcttccccagctgttaccactcttaaccgtgccggtgcccgcatggtcgctccattcactggcctcaagtacatggctggcttactcaccaagaagaccaacaatgacattacctccattgc

SEQ ID NO: 37355 - DNA, 227 bp, Glycine max
ggcggcgcgtagctgatcagtctgcttattgcgattaccgcacacccccatcacgcatcgtgaacgttgcgaacacaaaggatacacacctggctagtgaagactgcaggaagcacacccgtgaccacgttacccagtacaaaagagagcatgatagcgttcgcgcccatggaaaacgccgttgcgatcgcaaaccatatggctatggggggcaaactaaccccgtc

SEQ ID NO: 37356 - DNA, 296 bp, Glycine max
gatatctggcggctgaagagcatgtcgttgagaactaagaacgcgaagcgcatggcttcctcaatgatctcttccccagctgttaccactgtcaaccgtgccggagcccgcatggttgctccattcactgacctcaagtccatggctgggttgcccaccaaaaagaccaacaatgacattaccttcattgctagcaacggcggaagagtgcaatgcatgcaggtgtggccaccatttggcaagaagaagtttgagactctttgctacctgccagaccttgatgatgcacatttggc

SEQ ID NO: 37357 - DNA, 381 bp, Glycine max
gatctggcagcagaagaacaagtagttgagaactaagaaagagaagcaaatggcttcctcaatgatctcttccccaactgttaccactgcaaaccgtcccggtgccggcttggttgttcaattaattggcttaaattcattggttgctttcccaccctaaagacccaccatgacattaccttcattgctagcaacggtggaagagtgcaatgcatgccagtgtggccaccagttggcaagaagaagtttgagactctttcttacctgccagaccttgatgatgcacaattggcaaaggaagtagaataccttcttatgaagggatggattccttgcttggaattcgagttggagcacagtttcctgtaccgtgagcacaac

SEQ ID NO: 37358 - DNA, 386 bp, Glycine max
agaaaaagataatagaaaaaaaaaaaaaagcgggcgatctaaacgatccatgttgacgatccaatgtttcctacgcgttcattctactatatagctacctaatagcgataccttggtcgaatttactgaacgtcgtgattgaaaaaaccgtgtgggaaaaccatttagttacccagcttaatatccttgtttcacatgctggtttagtcagctggaggcctagccaaaaggcccttaccaatagttgttcacaacagatgggcaatgtgaatggccattgggacgcgcattgtacccgggcattaagctcggtacgcgcagcgggtacgctcaacttgaccgctacatttggcagggtcctatcgctcgcttcctttgctttcttg

SEQ ID NO: 37359 - DNA, 393 bp, Glycine max
gaaggtgcaagagtttgttgtgagctataagctagtttatcgtgaggagaatatgaagttgcttgttttctttgttgctgcagtagttttggtagcatggccatgccatggcgcaggctaccaaaggttccctgtccgaatgaaaactggctatggtgagcgttcttcggaggtaaaatgcgcacgttttacgcttgttgtcgaagcacacaacatccgagcctttaaaaccattcctgaagagtgcgttgaaccaacaaaggactacattaatggcgaacaatttagatcagactctaaaacagtgcaccaacaagctttcttttatgctagtgaacgcgaagtccatctcaacgacatatttatattcggcatagatcacaccgtactctc

SEQ ID NO: 37360 - DNA, 325 bp, Glycine max
ctgtgtctcaacacggcacatctagacatatggagggggaaaacaagattgctttaaccatatattaggatgcactctctatcagagcaacttaccgatccacagacttacgacttcactgaagccttactcttatcatacatgctcgactttcggtgcatcacatccaaggaactttgaactgttatacgttcattcggacaaaccccaactgaagcatatctccacgacatcatcaatccactggattctgatgagaatcgtacgctagacttcactgagttgctaactctcatggccattacgatgaatgacactgattctg

SEQ ID NO: 37361 - DNA, 389 bp, Glycine max
gtttcacatgattagcctgacgcagtgacttggccaaacctataagtcgacggcatacgctgtctacttctttgtatcaacaacaacaatggcaacagccaataaaaccatatatacccatgacaccataaacaactcgctcgatcttgtcatgaatagtagaaaattcaacctcatttactatacggctatcaaatcacttaagatctacaaagggaaattgattatcatagctaacaactacccccatttgaagaaatcaataattgaatactatgctatgttagacaaggttggagttcatcattacaatgttaacaatgtaaatttgtgcacttcatgtgtaaaatattacagagtgtgctgccttaacattaatgatcctggtt

SEQ ID NO: 37362 - DNA, 412 bp, Glycine max
attaggagagctcagcacattttgcgaaatgaggggcatctggtaatctcatgagcgctactaattgcaataaattccaacatgactccattctaaataactggccatgacactactagcctactgaacagcattacccctatgcatgagtcacttgtcaactatagactaccctaacgcctactcttacatctcgaaagtgctctaaatacacattgtatctagacctgcgtgcgattattataggtctcgatactgttaacgttaatgcctctgaattcagcttgcatagcgcatagcttgatggtatggcttacataaaggctgcacttagcctttgcactgctattaaagacaatgatcttggaatcaacttgaatgtgcctatcacactcagtgtgctactcagagc

SEQ ID NO: 37363 - DNA, 315 bp, Glycine max
tgatatataataataccaaaacagcaggagaaagaagggctcccgggacaatctctaatggcactaaggatgtggcctctttcaactgccatgccattaaacttttttctggcttcaaaacttatctcttggcctcctttttctttctccaaatgctaatcttccgtttggattggactaaagtcccctattcacatgaatgggtcaagcaacaaaggttcagtcgccaccattggaataactgacattgccaagaacatttttgacaagttgggtatgttgagctgcccagaaccagttggcccagtttcacaa

SEQ ID NO: 37364 - DNA, 350 bp, Glycine max
ggggctgttttgacaagacgacatattgacacagtggccggaacacaagcgaacgtaacgaatgctggattacacacatgggagccggttattataaaagatccacatgttatcactgcaaaagcactatcatacagatcagctgtgagagagaatctgatgaggccgggatacagaatagtaggaatcattgcagaccaatggagacatctgattggacaccacacaagacgaagcaggacctttcagcttgctaatacactgtactacattgagtagcaccttgacctctctcaacaatctagctagaagttgctgctatctatatgtgatcaggcatgctgatatgc

SEQ ID NO: 37365 - DNA, 240 bp, Glycine max
tccgagggggacatactttgactaggcactcatatcattctaggcaggtatcatcatgtcttacgacgagcaacatggttagcgctacagaaaactccgaagactcatgagcgtatcatcaacatgctcgctctagtcatgaaaactggcacatccaccctaaatgacaagaccgcactgacatgtatgaagaacttcacaggactattgatcatgattactcacaactgccctcctttg

SEQ ID NO: 37366 - DNA, 378 bp, Glycine max
gatttcaatttaaccaaagcaaaaggccatataattttttgttatttgaaataatgtccgggatcatccacaagattgaggagaccctccatgtgggagggcacaagaaagaggagcacaaaggagaacaccatggtgagcacaaaggtgaacacaaaggagaacaccatggtgagcacaaaggtgaacacaaaggagaacaacaccatggggagcacaaggagggacttgtggataagatcaaggacaagatccatggtgatggccatgacaagggtgagaaaaagaagaagaaggacaagaagaagaaagagcatggacatgaccatcatggtcatagcagcagcagtgacagtgattagaacttatatggtaagc

SEQ ID NO: 37367 - DNA, 179 bp, Glycine max
gagacctaaagtctggcggagctacccgctgagtttaagcatatcaataagcaaaagcggacgatctagaggatccaaagcttacggccgctctataggaaccaagctgacgtactcttgcgtgacacatcttagatcactatacggccacctacaacgaattgactggccaaagcttg

SEQ ID NO: 37368 - DNA, 332 bp, Glycine max
tgatcttacctcagcaccatcaatactataggctggcccatgagaagcttcgagaacgaccgccaatacaccctatcatcgtcacagagccattccatagacgtgtgcggtgaaggccctatcgctacagatcgagaacctagccatgtccggaggaaggcttctacctccggcttggaaaccggcgagactgccgtcgacggctcccgccgctatggcgccgaaagacgaaccctacgaaagcatcgtgctgcgacatacagcggagcttctaaccgcactacattgtacacttagaagctacatgacgatactgagcgtctcgctaatga

SEQ ID NO: 37369 - DNA, 423 bp, Glycine max
gactcacgttacacaacgcatacacatacattgcggaagcactttcgtctcggaaggcgttctttcgagttatcgcacgcttaaaggacgcacgtgtgctgctgatgcgcatgcctgacatgagtgcaccaatgatacagctagccgggtcatgcaatgacggttatgagaacctagcacactgcctatattacctgatgcacggtggacatgatccagaatcgcgctgtagcactgtgaggaacattccgggctgtgccatgaccacctttggcaaacagaccgtgagcgaatgtccacagcaagctgctaacaactatggcatcaacgacgaatacgctcaagcacttgccggccgctgcaatgtactcgtccgttacaagatcatgcgatccagcaactgcgactccatcaagttctaaa

SEQ ID NO: 37370 - DNA, 410 bp, Glycine max
  unsure (1)..(410): unsure at all n locations
gaccattcattccgacattgccatttttcacaccaccaacacaagatgtttctccacattgtgttcctccttttccttctctcatccacttcccatgccactgtccaagacttctgtgtggcaaacctcaaaggtgcacacacccttgcaggttacctgtgagcgacacgtgcttgtgactttacatgacactgtgtacactgggttagctgaaactgctaatgtgacacacataatcaatgctgctgtgaccccagcttttgttgctcaattcccaggtctcaatggccttgaactatctgcagcaaggttggaccttggtcctagtggtgttatcccactccacactcatcccggtgccaatgaactactcattgtgcttcaaggtcacatccttgcntggattcata

SEQ ID NO: 37371 - DNA, 416 bp, Glycine max
ggcacaagtgcgaatgatgatcgagatagctcggagcagtatgatgaaaatgaaggtgcttgttttcattagttactacgatgttgggtgcatggaaatgccatgtgttcgatatggtgattatgcgtatgaacattggctatggtgacagcactacggaggtggaatgcgctcattggacgatcgctgtaggagatcactacatgtttggatttgtaaccattcctgaagagtgattctgagcatcataggaatacatacattgactgcagtattgatgagactccaagacggataaccgagatgcttgctattgtgcaatagacttcgctatacatccgtgggacacataagtatccagcatagatagcaccgtgctctataatagatcatactgcaactgacatggttttggg

SEQ ID NO: 37372 - DNA, 123 bp, Glycine max
gacaccaacaccaaaacaaacccactaagatggcttactttgtatccttactagtgctggttcttgcaacccttatccttatgcctcaaaggcttgctacttactacaaaccaattaagaaac

SEQ ID NO: 37373 - DNA, 333 bp, Glycine max
  unsure (1)..(333): unsure at all n locations
cgatttcggtcgccacgcgtctacgtgcagacacagaagggatctgcagcagaagaacaagtagttganaactgagaaggagaaacaaatggcttgctcaatgatctcttccccagctgttaccactgtcaaccgtgccggtgccggcatggttgctccattcactggcctcaagtccatggctggcttccccaccagaaagaccaacaatggtattacctccattgctagcaacggtggaagagtgcaatgcatgcaggtgtggccaccagttggcaagaagaagtttgagactctntcctacctgccagaccttgatgatgcacaattggc

SEQ ID NO: 37374 - DNA, 246 bp, Glycine max
ctacacaccgccgcttgtgctgcagccatttctctaatgatccatgataagttccaacggattttttgggtacttaacaagggcatcgattggctacggaaaataccctttgccttaactgccattaaaggttcttatcatatatatactcatatcatgattattaaatccttcattaaccatataaagaagcccactgtactcaatattgatcatgtgcaacttttgataaacattattcagatt

SEQ ID NO: 37375 - DNA, 400 bp, Glycine max
cgggctagcagaagaacacgtaggggaaaactaagaatgataagccaatggaccactcattgatctcatgctaagtattaactacattctacactagccgatgccccaatatggggaacatagatcttgctactttgcatgactgtcttagcgatgactatgttaaagcttatttcgaacagttccactcaactctgattatgatgttcactgatgttggatcagccatcacttacaacgagcttacaagagatgcagtcttggatccaacagtgctggtggcagtagctgtggcacatgcatttgcactgtttgtaagtgtctccgtcgccggcaacatctcacgtggccatttgaacccagctgtcacttttggattggccattggaggcaacatcac

SEQ ID NO: 37376 - DNA, 305 bp, Glycine max
ctgggaccactgcgataacaatgaatggcttagtacaagttgcatgctacattatgcgtagcatcgcagtgccattcgtacgatatagcctcatatctacacgatcaatgtctaaggctcccggattgcaacctgctgatgctcaactcacttgctcgcttcagactgacatcacagaatttgctcaagagatgattgacgcatacaaaattgcaggattcgaccttgacatctatgctcatcaatgtatatgaagcatgtgcacaaggtgccccaaaagggataaccttgcacgaaatccagag

SEQ ID NO: 37377 - DNA, 396 bp, Glycine max
ctgctggcataatttatgtttagatagatagagcaagattgatcaaaagggttgcaaaggtcaaagaggagcaggcaaagattgacgaggctgctgatttgatgcatgaagttgctgtcgaaacatttggctccatggcaaagacggagaaaattgctttcattcttgagcaggtccggctatgcctagatcgtcatgattatgtccgagcacaaattttatcaaggaaaatcaggactagagtatttgacgcagatccatcaaaggaaaaaaagaaaccaaaggagggtgacaacattgttcaggatgctcctgcagatattccttacctcctagaattgaagcgtatctactatgaactgatgattcgatattacttgcacaacaatgattacc

SEQ ID NO: 37378 - DNA, 429 bp, Glycine max
accacagaaggttatcagctgtcccactctctttagcaatgggcgaattggcgattgattagggcaacgttagtggcacatacggctgcttacaacaactgagctcctcataaatatccatcattcatatatgttaacaatatcaacacatcgtcaacctgcacacttctagagcattagcgcgactatgaagaggcgcagcatcgatccaataaccatgatatctcaaaccgtcatctaagaaaacccataggactggccaaaacacgtaaagtacttttgcccattttgacctgaacccccatactatttcactgggcaattcccaggtgactatggttctgacactgctgagctttctgctgacccacagacttttgccaaaaaccgtgaactgtaagtcatccactccagataggccatgtttgg

SEQ ID NO: 37379 - DNA, 203 bp, Glycine max
gaatgcaccggtgaaatgatcggattgcggtgactacagcgggtcgcttctcgagacgtcgagagaatgtcactgaaccttatcatttataggatgcccaaagtgaagcctaaatacaagcggccgctctataggatccaaggttacgaacgcgtgcaagcgacgtgatacctcttctatagagttgcataacttcaatttaa

SEQ ID NO: 37380 - DNA, 294 bp, Glycine max
aaggacagatacgacatgacgaatgggttgtcatttgcaatgcgccggttctgtccgagactggggagaattacaacacggtggtgtgtctagccttcaagattatattcttgtcatgacgaacactggacacacatgccgtaacacaagcaaacttacagaatgctggataccacacatgggaaaaattaattctcaaagatccacacgatccttccactccaaatgcacattcatacacagcatccatgagacgaaaactgattacgcatggatacagcattcatgagatca

SEQ ID NO: 37381 - DNA, 386 bp, Glycine max
aagggactctgacagatgcaataattcggcttcctcctttttccatagattgcctgttcagacgcaactgcctctctgcatataatttctcagacaacctgtcaagagcttcagcatttgtactggtctagctcaactgggacaaaagtattcacattcatcctcaaagctttttggagcaagaggctatttcctacctttacaagattatccatgttcttcttgtcagcattatccatctcttccatggatggatccatgtaactcctaattccaagctctattgggatcaaatatcaatgtgtccttgttcgtcgctttaacaagcaatgaggtctattatctacttaataaataagacgaactgctttgtgttttctagtatt

SEQ ID NO: 37382 - DNA, 434 bp, Glycine max
  unsure (1)..(434): unsure at all n locations
tgggcagcagaagaacaagtagtnnctaactttgaggggggccatcagtgatcgacaatgatttacgacgttaactctactattgtccgatccttcctcagccagaagggaggctcctctgatgagatgaaatcggacgaacagaagccaaaagagcagaaacccaaagccagcgagaacaaacctataatgactgagtgataacagctgagctgcattcagttgtagaatgaaaataggtggtaggtattgtatttggtgctaaactaagatctttttggctgtgttctgaagtatatgccggcgatgttggtctttggtattggaattggttgattttggatatgggtataacgaaaacttataatggacacaagtggacttgatgcacgcatgacacatgcaatgaagtcactcggttaaaaagtggtttg

SEQ ID NO: 37383 - DNA, 301 bp, Glycine max
gacatctctcatagtagagtaaccaaaaggagagttgaataactcgttgtacattcctagtgtgtgtgagagacatggctaagatgtgtgttttggtgttggttcttgctctgtctgtggccacaagtgccataaacgttcccaaccccaaggatgctggtcttaatgaccagaagaacttcatcagctattgtggagttggtggttatttcgggattgggaacaatggactgccttttggaggagctggtgcctgaatatgtggtgactttggcgaacgtagtgtacttgatggtacact

SEQ ID NO: 37384 - DNA, 218 bp, Glycine max
gatctggcagcggatgatacaagtagttgagacctaagaaggacatgcacatggcttactcaacgatcgctctctcagctgttaccactgtcaaccgggccgtagccacgcatggttgattcattcactggcctcaagttcatggctggctacctcaccaggaagaccaccaatgacattacctacattgctagcaacggtggaagagtgcaatgcat

SEQ ID NO: 37385 - DNA, 369 bp, Glycine max
cccgtccggaattcccggtcgacccacctacgggcgagagacccacagggggccacggatgaatctacccactgagagccgtggacgacgcatagcgatcaggcgtgagcgacctcatacagcacacgactatgaattccaatattatacatcaggtgtattcagagggaaatgcggtacagaattaaatcatgctctcctgcttgtggggtatggtacagaaaaagatggacattattggatagcaaagaattcatatagtgataaatggggagagaatggctatatcagaatacaaagaatactgagcactctgtaatttggaaacgggagttactatcccattataaaagtcaccgatcaacaagc

SEQ ID NO: 37386 - DNA, 323 bp, Glycine max
  unsure (1)..(323): unsure at all n locations
ggaaccaaaaaaatattaaggtttttgaatgcggtggggcgatcctaacaactctttctgcaactttcgccgacagcttcattcaccatggcttgaacaaccgaaaaagcttttttgaaacaaccaaaaggtgttctcagctcgaagaaaactgggaaaggaaagaaacccggaaagggtgggaacccgtttttgaaatccaattgngcttggatntaagaactccagggaaagccatcgaaagaacctacattgacaagaagtgccccttcactggcaatgtttncatccgtggccgtatcttggctggaacatgtcacagt

SEQ ID NO: 37387 - DNA, 386 bp, Glycine max
gctggcagcagaagaacaagtagttgagaactaagaacgagaaggaaatggcttactgaatgatctgttgcccagctgataccactgtcaaccctgccggtgccagcatggctgctgcattcactggccttaaatccattgctggctttcccaccaataataccaacagtgacattacctccattgctagcaacggtggacgagtgcaatgcatgtacgtgtggccaccagctggcaagatgaagtttgagactctttcctacctgccagaccttgatgatgcacaattggcaaaggaagtagaataccttcttatgaagggatggattccttgcttggaattcgagttggagcacggtttcgtgtaccgtgagcacaacaggtca

SEQ ID NO: 37388 - DNA, 365 bp, Glycine max
  unsure (1)..(365): unsure at all n locations
gaaggtgcaagagtttgttgtgagctataagctaggggatcgtgaggagaatatgaaggtgcttgatttctttggtgctgcagtagttttggtagcatgggcatgccatggcgcaagcttccaaagggttccttttcgaatgaaaactggctattgggaaccgtcttcggagggtaaatgcgccaggtttaagcttggctgggaaacacacaacattcgagcctttaaaaccatttcttgagagtgcgttgaccaaccaaagactacatttatgggcgacaatntagatcagactctaaaacagttaccaacaagctttcttttatgctagtgaacgcgaagttcattacaacgacatatttata

SEQ ID NO: 37389 - DNA, 305 bp, Glycine max
cgggcagcagaagatcaagtgcttgagaactaggagggagaagcaacatggctatgctaatcgaactcttacacccgagctgttcaccaactgtcacaccgtgctcgaggcaccgcatggctgcatccatacactggcctcaagtccatggctggcttgcccaccaggaagaccaacactgacattacctccattgctagcaacggtggaagagtgcaatgcatgcaggtgcggccaccagctggcagcatgaagtttgagactctatcctacctgccagaccttgatgacgcacaattggctaa

SEQ ID NO: 37390 - DNA, 250 bp, Glycine max
agtggattatatcatagtgaaaaattgatggggatctaagtggggagagaaaggatacataagaatgaggaggaacattggaaaacccgagggaatctgcggtatctataagatggcttcttatcccactaagaagaaataagattcattcccattcttttgtctgaatatctttcagcttttccttggaaacaatgtaacgttttccatataataatagattgattgactcttttcattattcccttgc

SEQ ID NO: 37391 - DNA, 360 bp, Glycine max
  unsure (1)..(360): unsure at all n locations
aggggtgcacaagtgaatttggggatcgggataactagaaaccgtgttattaaaattaaagtccttggtttctttggtggtaccatttttggaacctgggaattcccttccttccaaattgttccttttccaattgaccttgctttgtgccctcctccgaggtgaaatcccaggttgaagctgctggtgagcaccacacatttttggctttgagaccattcctgaagagtgcgttgaagcaacanagggatacatncatggcgaacattatagatcagactccaaaacagttaaccaacaagcttacttttatgccagagacctcgaagtccatcccaaggacacatttgtgttcagtat

SEQ ID NO: 37392 - DNA, 409 bp, Glycine max
gatcgcatttgatagcactcaccctcattagcgacacgaaagcatatccgaaaccttctttggaagtctctgattatcctaatggctcctgcaaaggcactgaagaagccggcggagaataagccagcggcagagaacgcacctgcggagaagaagccggaggctgcgaatacgatctcgaaggaaggatggagctagaagaagaagaagcacacgaagaagaacctggagacctacaagatctacatcttcaacgtcctcaagcaggttcaccgcgacattggcatttacagcaaggccatgggcatcatgaacagcttcatcaacgacatcttcgataagctcgctcaggaagcgtcgcgattggctcgctactacaagatgcccaccattacctctagggagatcc

SEQ ID NO: 37393 - DNA, 412 bp, Glycine max
cggttatggtccaacaccaagactaaccctctatgaggggttcctttgaatcctagctatgactactcattacagcccttatcctcattcctcaaggtcttgctacttactacaaaccaattaagaagccaccagtacatcaccctactacttacaaacctccactgtacaaactacctgtttataagccagatccacctgtttacaagcccaaaccaccggtttacaatccaccatataagattccaccatactagaaaccaccttattgatagtaccctccagtagagctcaacacccaagcctaaagcatgcactgatgtctattatctacttaacaattatgattaactgctttgagttattctagcattgcgatttacatcttcatatcaatgcttatacttgactc

SEQ ID NO: 37394 - DNA, 398 bp, Glycine max
accggcccggaatacccaggcggacgcacgcgtgcgagagaagaccacagaaggggatctggctgcataaaaacaagtagttgcgagctaataagaacgaagtgggtgactcaatgatctccttcacagctgttaccaccgtctaccgtgcctgtgccggcatggttgctccattcaccggcctcaaatacatggctggcttccccacgtggaagaccaacaatgacattacctccattgcttgcaaccgtggatgagtacaatgcatgcatgtgtggccaccaattggcaagaagaagttcgagactctttcctacttgccagacctagatgatgcacaattggcaaacgaagtcgaataccttctaaggaaacgatggattgcttgcttggaattc

SEQ ID NO: 37395 - DNA, 302 bp, Glycine max
taaggtttgtgcgtttggttcacaacataggtggcgctcagaaaactaaaaacaaccatgggagcatgatccacaaggtcgctcttggcatgaagaggggcaaattcaacctcgggtacagaccggtctcaaatactttaggaacctgcaaggaaaattgattatcattgctaataactgcccccccttgagaaagtcagagattgaatactatgctatgttggccaaggttggagttgatcattacaatgggaacaatgtggattcgggcactgcatgtggaaaatattacagagtgtgct

SEQ ID NO: 37396 - DNA, 354 bp, Glycine max
  unsure (1)..(354): unsure at all n locations
caacagaggggttggtgcaagaattcgatgggagctatcagcgagtttatcgcgaggggaatgtgcagctgcttgttttctttggtgctgcactagttttggtagcatagccatgccatcgggcangctaccaaacgttacctgtccgaatgaaaactggctatggtgagcgttcttcggagggaaaatgcgcaagaattatggcttgctgtgaagcacacaacatacgagcctttaaaaccattcctgaagagtgcgttgaaccaacaaaggactacattaatggcgaacaatctagatcagactctaaaacagtttacccacaagctttcttttatgctagtgaacgcgaag

SEQ ID NO: 37397 - DNA, 390 bp, Glycine max
ccgttgggttaaaaaagacaacgtacgggtaaaaaaaaaaaaattacgggttctgagtgcttaagaaaaagcaggcttttaaaaaaaattgaaaaattaatacggcgcttgtaatttcagagacaaatattcattcaaacaaaacaacttatgatagtaaaagggtagaattcgaaaaaaaaaaaattgcagatattacaaagaagaagaaatgctcgattaactcgtaaatcacattcttttttaaaatttttcatgaaaaggatatacagagatatatttctatatatcagctgtattccgaggatcaatatacaactttttcttgaattaacaaaaaaatttttaaataaatccatttacgataatgaagcaaatgcagaaagaatt

SEQ ID NO: 37398 - DNA, 331 bp, Glycine max
  unsure (1)..(331): unsure at all n locations
ttacaccatctccaaaacaaacccactaanatggctaaagttgtattcttactagagctggttcttccaacccttatcctcatgcctcaatatcttgctacttactacaaaccaattaataatccaccattgtacaatcctccattatacaatccaccattgtacaaaccacctgtttataaaccaaaaccacctttttacaaaccgaaaccacctatttacataccaccatataataatccaccatacaataaaccaccttattgaaaataccctccattataagacaacacccattcctaaagcaatcaatgaagtctattatctactt

SEQ ID NO: 37399 - DNA, 243 bp, Glycine max
tcgaagacgacagaaagggacacccacacccaaacaaacccacttagatgggttcctttgggggcctcctaatgctggttcttgcggcccttatactcatgcctcaagggcttggttcttactacaaaccgatttagaagccaccactgtgcaagccctcagtgtgcaagccaccactgtgcaaaccaccgggttatatgccaaaaccaccgggtttcaagccgaaaccaccggttttcaagc

SEQ ID NO: 37400 - DNA, 393 bp, Glycine max
gcacaagtgagtttgttgatcgagataactaggagcaatgttattaaaatggagggtcttggtttcttcggtgctaccaatttggtagcattgcaatgccattcgtaccatatggtccctttttcaatggacacttgctatggtggccgtacctccgaagttgaatgcgccaagttgaagcttgctgtggaagcacacaacatctttggctttgagaccattcctgaagagtgcgttgaagcaacataggaatacatccatggcgaacaatatagatcagactccaaaacagttaaccaacaagcttacttttatgccagagacctcgaagtccatcccaaggacacatttgtgttcagtttagatggcaccctactctctaaatattcatac

SEQ ID NO: 37401 - DNA, 397 bp, Glycine max
ggcacaagtgagtttgttgatcgagatcactagaaacagtgtgatgaaaatgaaggtccttgttttcttcgttgctacaattttggtagcatggcaatgccatgcgtacgatatgttccctctccgaatgaacactggctatggcgcccgtactccggaggtgaaatgcgcatgttgcacgcttgctgtggtagcacacaacatctttggcttttacaccattcctgaagagtgcgttgacgcacccatggaatacatccatggcgatcaatctagatcagactccattacaggtgaccaacgagcttacttttatgccacagacctggaaggccatcctagggacacatttgcagttagcatagatcgctccgtactctctaatattgcatactac

SEQ ID NO: 37402 - DNA, 173 bp, Glycine max
aaaaacaattcagttataggtcaaaacaaagaaattgctttctcaatgatcttctacccaacttttaccaccttaaaccgtgccctttcccgcattgtttctccattcacctgtcttaaattcatcgcttgctttcccaccaggaagacccacaattacattacctccatttc

SEQ ID NO: 37403 - DNA, 365 bp, Glycine max
gaactccagtcgaatatgaagcgcctggatacaagttatgccttggaatggaagagaattccgaatcagctttgtctacgaacaatgaagctaagaacttataactaggaactgaaaaatttacgtttaataaaattagttattaaagtaactgaaaaatataaaataatggaaaaccattaaaatcataattaattaatgtaagataaatttaaaattggataaatttatcaaggttaaaaaatattaaaaaattggaaattatcagattaaaaatatttacttaaaataatattttaaaatacctaaaaactattaaaaaaatttattattcaaatatttaatggaatttttcaactatattt

SEQ ID NO: 37404 - DNA, 389 bp, Glycine max
cgggttgaaccacgcggtcctacggcttgagaaaactacacattgggatatctggcagcagaaaaacaactaggtgagagctaagaataatgaaatggcttcctcaatgatctcctacccagctgataccaccgtcaaccgtgccgttgccggcatggttgctccattcaccggactcaaatccatggctggcttccccactatgaagaccaacaatgacattacctccattgctagcaacagttgaagagtacaatgcatgcaggtgtggccaccaattgtcaagaagaagttcgagactctttcctacttgccagaccttgatgatgcccaattggcaaatgaagtcgaataccttctaaagaaatgatggattccttgcttggaat

SEQ ID NO: 37405 - DNA, 301 bp, Glycine max
tcttttatgctagtgaacgcgaagttcatcacaacgacatatttatattcggcatagataacaccgtactctctaatatcccatactatgaaaaacatggatatggggtggaggaatttaatgaaaccttatatgatgaatgggttaacaagggcgacgcaccggcattgccagagactcttaagaattacaacaagctgatgactcttggcttcaagattgtattcttgtcaagaagatatcttgacaaaatggctgtaacagaagcaaacctaaagaagcttgctttcacacatgggag

SEQ ID NO: 37406 - DNA, 379 bp, Glycine max
gaaggaaggaaggaaggaagagtgagcgtgaaagatgccttcggcgaggctttcagggtcaccaaggctcgacgttgctattgacatgggcaatccatttctcaatctcactgttgatggtttccttaagatcggagctgtcgcagccacgcgatcagctgctgaagatacttatcatattatccgaaacggcctttgttgtaattcaacatgtctgttccagggaatatttcaagtcatgatttcgagaaaacgttgaagaagatgtgtaaagaaggtgtatattggggaactttagctggtgtttatcttggaatggaatatggggtagaaaggatccgtggcaccagaaattggaagaatgccatgattgggggtg

SEQ ID NO: 37407 - DNA, 263 bp, Glycine max
gtctcaagtgagtatgatgatctatataactagacacagtgtgatgaaaatgaaggttcttgttttctgcgatgctacaaatttggtagcatggcattgccatgcgttcgatatgtttactctactaatgaacactggctatcgagcccgtactacgcatgtgaaatgcacacaatggaggctcgctgtggaagctcacaacatgtgtggctttgagaccattactgatgagcgcggtgaagcatcatacgaacacatacatg

SEQ ID NO: 37408 - DNA, 368 bp, Glycine max
tgtgttacaactgaatttggtgatcgacatagctagaatcagctttatgaaaatgaaggtccttgttatcttaccttctacaatcttggtataatgtcaatgccatgcttacaacttccttcactctcacaatgaacacttgctatacactccttactctccaggtgaaatgcgcagctcatactcttgctttccaactatactattaaatttggctttgaaaccattattgcacatttcgaaattaaaactaacctgtacatgcatggcaatcaatatatctcatactccaaagcttttcaataaccattttatttctatgccaaatacctcacattccaccccgacgtcacattaacattcagtat

SEQ ID NO: 37409 - DNA, 281 bp, Glycine max
ttttgttctcctgcataagactacagaacggggatcgggcacaaagccatggcttctttggcaagcttaactgatgttcaaccatcgtactgttaaaggccttgctctaactaagatctcttttaagacctctcggcaaagtttcagacccaaaaatttcaagaatgctgctgtagtaacaaactatggtgacaacaatgcgtactctcatttcgaggatctaggctccactactggtcaatgggacttgtacggatcctatgcacctttaccctacaacc

SEQ ID NO: 37410 - DNA, 413 bp, Glycine max
  unsure (1)..(413): unsure at all n locations
gatctggcagcagaagaacaagtagttgagaactaagaaggagaagcaaatggcttcctcaatgatctcttccccagctgttaccactgtcaaccgtgccggtgccggcatggttgctccattcactggcctcaagtccatggctggcttccccaccaggaagaccaacaatgacattacctncattgctagcaacggtggaagagtgcaatgcatgcaggtgtggccaccagttggcaagaagaagtttgagactctttcctacctgccagaccttgatgatgcacaattggcaaaggaagtagaataccttcttaggaagggatggattccttgcttggaattcgagttggagcacggtttcgtgtaccgtgagcacaacaggtcaccaggatactacgatggacgctact

SEQ ID NO: 37411 - DNA, 437 bp, Glycine max
  unsure (1)..(437): unsure at all n locations
acgacagaagggggttctagtgtatgtgattgttgtgactcgttcttcttcgtcgttatcttcttcttttgttgtttgtgtgtttgttttttctctcacctgaaaatgtcttgctgcggtggtaactgtggttgcggaagcgcctgcaagtgcggcaacggctgcggaggctgcaagatgtacccagacttgagctacaccgagtcaaccaccaccgagaccttggtcatgggagtggcaccagttaaggctcaattcgagagtgctgaaatgggtgttcccgctgagaacgatggctgcaaatgtggagctaactgcacctgcaacccctgcacttgcaagtgangtgttggagagctaaagcttcaagcagagatggcccttagaaataatgataaanactatatgtagtttcaaaacttcaaaattatgtagta

SEQ ID NO: 37412 - DNA, 250 bp, Glycine max
ggggcagcagaagaacaactagttgataactaggaaggagaagcaaatggcttcctcaatgatctcttacccagctgttaccactgtcaaccgtgccggtgccggcatgggttctccattcactggcctaaagtccatggctggctgttccaccatgaagaccaacaatgacattacctacattgctagcaacggttgaagagtgcaatgcatgcaggtatggccaccagttggcaagaagaagtttgag

SEQ ID NO: 37413 - DNA, 441 bp, Glycine max
acagaagggcgttctagtgtgtgattgtttgttgttgtaactcgttcttcttcttgggttgttctgtgtttgtgtttggtttttctctcacctgaaaatgtcttgctgcagtggtaactgtggttgctgaagctcctgcaagtgcggcaactgctgctgaggctgcaagatgtacccagacttgagctacactgagtcaaccaccaccgagaccttggtcatgggagtggcacctgttaaggctcaatttgagggtgctgaaatgggtgtgcccgctgagaacgatggctgccaatgtggaccaaactgctcctgcaacccctgcacttgcaagtgaagtgttgcgagagcaagctctcagcacagatagcccttaattaggaataatgatcaactattaatgcgtagctaagaacttatgtattatgtctgagatgggtt

SEQ ID NO: 37414 - DNA, 382 bp, Glycine max
gatatggggcagcagaagaacaagtagttgagaactaataaggagaagcatatggctttctcaatgatctcttccccagctgttaccactgtcaaccgtgccggtgccggcatggttgctacattcactggcctcaagtccatggctggcttccgcaccaagaagaccaacaatgacattacctccattgctagcaacggtggaagagtgcaatgcatgcaggtgtggccaccatttggcatgaagaagtttgagactctttcctacctgccagaccttgatgatgcacaattggcaaaggaagtagaataccttcttaggaagggatggattccttgcttggaattcgagttggagcactgtttcgagtaccgtgagcaca

SEQ ID NO: 37415 - DNA, 456 bp, Glycine max
atctcccgtctcgacccacgcgtgagacaggcgttagaacaccacagaaagggatctgacagcactacagcaagtgatcaacaaggaagatagaggatcaaatggctacctcaatgatctctaccgcaactgttaccactgtataccgttccatagccagcatgtgcgttatcattcactggcactaagtccactagatgccttacctaccttaaagaccatcaatgacatcacctacattgctaacatcggtagaagacttcaatgcatcgcatcaaggccaacatttatacccaagaaggataagactctttcgtatgtgccatacattgatgatacacaatcgacactggaagtagaataccttaatatgaatgaatggatcccttgcttgcaattctagcaggagcacggaaacgtgtaccgtgagcacaacacgtcaccatgatactacta

SEQ ID NO: 37416 - DNA, 326 bp, Glycine max
tgcaatgtatgggatatgaggaattgtcaaaaaaaaaaaagaatctatataaatataaaaataatatatataaggcacaaatagtaaatccaggtacccattttatgataaactatccttccatttttgttactctaataagcctagtattttccgcaatcgcaatgacttctttatttctttatgttcaaaaaaacatgatttcttagatccagaaaacaaagtaaaattctggagttctcaattccccaattataatactaaattcaaaaaaaggaaagtaatgagtataatctttcgctcacacgatgtactgatatattcta

SEQ ID NO: 37417 - DNA, 262 bp, Glycine max
agcgcaagcaggacctttaagcttactaataccatgggctacattgagtaataccttaacctctctgaacaatctagactacagtatgctactatctatatgaaacaacggatgctcatatacactaattaaataggaaacattagctatgttagataatgtcactgtacgttatataggatccatcatctaatacacttgaattacatacgatagctgtctcttaccggctccaataaataatttacccttggtccatatt

SEQ ID NO: 37418 - DNA, 371 bp, Glycine max
ggattgggcgaagacgaaaagcaaatcagcgaaggagtcctccagttttcgttagagacactgtgtcctgttttctctgaacctaacacagacccgattgctacgaatggcatccaacaggggtcaaggtggaattcaacagttgctggctgctgaacaagaagcgcaaagaattgtcaatgctgcaaaaaaatgaaaaattggctagactgaagcaagccaaagaagaggctgaaaaggaaattgccgagtatagggctaagttggagtacgagtttcaaaagaaagtgtcacagagtagtggagattctggtgctaatgtgaagagacttgagcaagagacagaagaaaagattcatcacctgaaaact

SEQ ID NO: 37419 - DNA, 391 bp, Glycine max
gcttctataagactacactattgttaccgcacaaacaattaataaagatgaatggttacatcaaaatggtggtggtaaaaaagtctttcttgcttcttttccttgtcggggttacaacttcacgcattgaactcagcttcttcaaaaatgatcactcatcaacatattatgatgatcagtattctaaaccatgctgtgatctcttcatatgcacacactcaatgccttctcaatgcacctctgaaaatattatgctgaattcatgccactcacattgtaagaactctatgttcacacgctcacaatcaggacaatgtctatgtcttgacaccaaccacttttgctacaaaccttgcaagttcacatatgactataaaaactcatatctctc

SEQ ID NO: 37420 - DNA, 274 bp, Glycine max
catttgacttacaaaaaaaaaaaaaaaaaaaaaggaaagcggccgctctacaggatccaaccttactaactcctccatcctacgacataattcttctataatatcacctaatttcaatacactagtcgccgttttacaacatcgtcactactaaaacaatgccgtcaccaaacttattaatcttgtagcacatcatccttttttcagctgctgtaatagtaacgaagacgccaccaatcatccttcttaacaactgctcagcatgaataacgaa

SEQ ID NO: 37421 - DNA, 392 bp, Glycine max
  unsure (1)..(392): unsure at all n locations
ttcacaagtgagtttgttgatcgagataagtanagacagtttgataaaaatgaaggtccttgttttcttcgttgctacaattttgttagcatggcaatgcaatgcatacgatatcttctgtcttaaaacgaacacttttctataatcctttactatacatattattagtcctcatattacaatttactattttttaactatacttatattacatattaacaccttcttactcttttttatacatttgttcttactctttgtataaaatgattcttcctatattgtattatttattcttatatttattttatttatactcaatgtgtttttatttttttattttattttatttttcctcttttttttacttttttttcatattttttttttat

SEQ ID NO: 37422 - DNA, 431 bp, Glycine max
  unsure (1)..(431): unsure at all n locations
cggaattcccggtcggaccaagccttccttccggttgcaaaaaaccaacaaaaggggaagggccaggagttggtgggaagctttaggggggttaatcgtgaggagaatatgaagttgtttgttttctttgttgctgcagtagttntggtagcatggccatgccatggcgcaggctaccaaaggttccctctccgaatgaaaactggctatggtgagcgttcttcggaggtaaaatgcgcaagttttaggcttgctgtggaagcacacaacatccgagcctttaaaaccattcccgaagagtgcgttgaaccaacaaaggactacattaatggcgaacaatttagatcagactctaaaacagttaaccaacaagctttcttttatgctagtgaacgcgaagtccatcacaacgacatatttatattcggcat

SEQ ID NO: 37423 - DNA, 385 bp, Glycine max
accgctcaattaccggggcggggcacgccttcggccaagggttccttccggttgcaaaaaaccacctaaaggggccccaagtaattttgtgggcggggttactagaaacaggggggtgaaaattaaaggccctggtttctttcgtgctacaattttggtagcatggcaattccattcgtacgatattttccctcttcgaatgaacactggctattgtgcccgtactccggaggtgaaatgcgcaagttggaggcttgctgtggaagcacacaacatctttggctttgagaccattcctgaagagtgcgttgaagcaacaaaggaatacatccatggcgaacaatatagatcagactccaaaacagttaaccaacaagcttacttt

SEQ ID NO: 37424 - DNA, 387 bp, Glycine max
cggtccgggaatatcccgggtcggacccaagccttcgtaccggttgcaaaagacacaccaaaggggttaactgggaaaaaaaaaaaggcaaaatgtgggggaaaggcacctttggttcggcggagaacaagttccggatgtcgctgggtctgccggtggcggcgacggtgaactgcgccgacaatacgggggcgaagaacctctacatcatatcggtgaaagggatcaaagggcgtttgaaccgtctcccctcggcttgcgttggcgacatggtgatggccaccgtgaagaatgggaaacccgatctgaggaagaaagttttgccagctgtcattgttcgccagcgcaagccatggcgccaaaaggacggcgtctacatgtatttcg

SEQ ID NO: 37425 - DNA, 377 bp, Glycine max
ccggggcgacgcacgcgttcgtagcgagaaaaacaaacaaaagggattttttattggaacccgcgaaaagttggctgttccggcgatcataataacctgatggacggacacaatccacaagacccaaagcagagccctgctgacatgactgcctttgtgcaaaatcttcttcagcagatgcaaaataggttccagacaatgtccgactccattgttacaaagattgatgatatgggaagtcgcataaatgagttggaacaaagcatcaatgacctgagagcagagatgggagtggagtcctctccatcacctgcagcccctgctaagctaacggaggagataaccaaagaagagggttcagcttaagtggcattctg

SEQ ID NO: 37426 - DNA, 351 bp, Glycine max
gatctggcagcataagaagaggtatttgaaaactaagaaggagaagcatatggcttcctcaatgatctcttacccagctgttaccactgtcaaccgtgccggtgctgtcatggttgctccattcactggcctcatgtccatggctggcttccccacctggaataccatcaatgactttacctgcattgctagcaacggtggaagagtgcaatgcatgcatgtgtggccaccagttggcaagaataagtttgagactctatcctacctgccagaccttgatgatgcacaattggcacaggaagtagaataccttcttaggaagggatggattccttgcttggaattcgagtt

SEQ ID NO: 37427 - DNA, 193 bp, Glycine max
ggcagttcacttccaacatattccatacggggggtgtatattcctacctttgccttcaagattcaaattttcatcaagaccctcaccggcaataccatcacccttgatgtggaaagctataacaccatctacaacgtcaacgccaagatccaggacaaggaatgaatccccccggaccaacaacgtctcattt

SEQ ID NO: 37428 - DNA, 412 bp, Glycine max
cttcctacggctgcggatacaactcaaaggcattttttgcacgtgctttaccatagagtgcgggggggtcatccgataccggaagcagccttggggatcgacctcaaggccggaggtaaaatgcaaaaaaaccaaaggaccagcgcccaagcccaaggatatctatcttaagctcttgatcaagctttatcgtttcattgcacggagaagtgaccgaaaattcaatgccgttatactcaagagattgctcatgagcatggttaacaggcccacattggctttgccaaggttgattcagtattccaaggagaaggaagataaaatcgctgtgggggtggacatgatacccatggatattctatgttatgaaattccagccttataggtgacagcactcatgtttacagagact

SEQ ID NO: 37429 - DNA, 359 bp, Glycine max
gggcacaagcgagttcgttgatcgacattgcttggagcggggagaagaatgggaacggtcatggtctgctccccaactacatcaatcactcgcacaggtcatgtgctcaaacgacctgttggggcctcatcctctaccgttcttggattgccagcaatggccaaggcggggagagtgaggtgctccatggaggaaaagccttcaagcagctcaaacctagggatgggggcatccttgttagcagctgcagctgccgcaaccatgtcaagcccagcagccatggctttggttgatgagagactcagcactgaaggaactgggcttccctttgggcttagcaacaaccttcttggttggat

SEQ ID NO: 37430 - DNA, 379 bp, Glycine max
  unsure (1)..(379): unsure at all n locations
tcttacttcttctaaagatttcannaaggggcctcattttctatcttccagaccctttcaaatgtctgcctggtccgatcatcacctctccattaaggagattctcggaacatgcgtttcggttggttgcaccgttgatggaaaggatccaaaggacttgcagcaggagatttccgatggtgatgttgaggtccctctcgattgaggaagaagactttgtttctctctctttttccttctctcttatgtttgtttcgtgttttttaaatataaatctggggaaactattgaacgttttgtttaacgctattttactgttttggataatttaaatgatggcttcgagaggttttattatgggcttattagtttatttctc

SEQ ID NO: 37431 - DNA, 373 bp, Glycine max
  unsure (1)..(373): unsure at all n locations
caccggtccggaattgggggggacacgcgcttcgttacgctgctaaaaaacaacaaaagggtccttttacaagaagacaacataagggtccgtagtncgataaaacaacagaagggagaataccaaaaagaaaaaaaagattctaaagaaatctaactaatattccttaaaataatcaaaataaatccttaatgcaaattaattttacatagaaaaaagacttaaaaaggatgatttgaactgcgagatctaaaaacatatctttccgtggcaccagtagtaagtactctatggttcgaggctttggcggctctcttaatagagatcaatcgttttttcccaaatgcattgatattccctttttttccattct

SEQ ID NO: 37432 - DNA, 350 bp, Glycine max
tttaccatagaacaagcacacagagaagcatagacgcttttaacagcagcaactactctcatcttaaatggcctctccagtgatcgcatatgtggccctcaaacctgcccctttcactgttgataagtcctcactatgaggccttccctctctctcaaggaactattcttcattcaaagtttttgccagtgtcaagaagatcaatacttacaaaccttataaaattaactgcggcatggctctaaaaaatcgaactgtatcatctagcttgaaaagaaagggaaaatgtgtttaccattttgtagacatacactattctaatgtctatagttacattcctatctaccaca

SEQ ID NO: 37433 - DNA, 273 bp, Glycine max
  unsure (1)..(273): unsure at all n locations
cgacccacgcaaactacggcttctataatactacatatagtttatagctaaacaganaatggtttcantgagagatcgtgttttaacttgatccttcataacccntcatcatcatcatcatcatcacctttaattgaaaaaaatgccgaccaaaaacatcgccttcgaaaggcctaaatattctactcacccctacactttaaaggcggagttggctaaattcatctccaccttgatcttcttgttcgccggttcaagttccggcatcgccta

SEQ ID NO: 37434 - DNA, 430 bp, Glycine max
tgcgagcatacatagagcgggataactggctgtgagcgggtgtagtttcacaaaccgtggtcttatcaactatggcggagacacttctatcgataacccagccgtgtaccaggctcaccaaaacgtcaatgagatgcactcaggcccttccgatgactacatgagcctcactcttgaggctcatatatttgaatggctgtttgccatcagggggcctcgtaatactgacttatgcggtggcatgtatcactgaccgcttcaactgccttcagaatatcccatcaaacctccttcgtttatgttgctcacacctactagccgttttgagacgcaatccatgatgtgcttgagcacatcagatcatcatcctgagcattggcatccatcatcgagcattacgactgcattacttgcattgattgcattcatg

SEQ ID NO: 37435 - DNA, 257 bp, Glycine max
gaagagacagaaggggtttgtagataatttacgcttttcttttatctttcattcaatctgttttgttttcttaccttgggttgaaagaattatcatgaatgatcctttgtgtcgatcggttagaatgcacaaaatataagtaagagtaaacaaccaatatagcggctgctctaaaggatctaagcttacgtatacgtgtatgccacgtcatatctcttctatattgtcacctaaattcacttcaatggtcgtcgttt

SEQ ID NO: 37436 - DNA, 213 bp, Glycine max
agctgcgcagagatagaagggggcacaagtgagtttgttgatcgacatatctagatccagtgtgatgaacatgcaggtccttgttttcttcgttgctacaattttggctagcatgcgagtgccatgcgtaccacatgttccctctccgactgaacactggcgtatggtgcccgtcctcctgatgtgaactgcgcacgttggaggcttgctgtc

SEQ ID NO: 37437 - DNA, 229 bp, Glycine max
gactcaccacgtgaaccaatatagcccaagccctatataaccaaaccctaacacacacccatttgattcagtttccatggctagcctcagggttggatttttggctgcagtgctctgcatggctgtggtgagtgcacccatggcacatgcagctatcacgtgcgggcaggtgactagcagcctgtccaatctcatcggttacatccagaagggaggaacgtcgttcctc

SEQ ID NO: 37438 - DNA, 450 bp, Glycine max
tctagaaaagatgaaaaaaaaaaaaaaaaaaaaaaaaaaaaaattaaaaaaaaaaaaaaaaaaaaaaaaaaccggccgcccaaaaggatcaaacctaacttacccttgaatgcaacttcaaacccctccaaaagtgtcaccaaaattcaattcacgggccttcttttaaaaacttcttaacgggaaaaaccctgcctttaccaaacttaacccccttgcacaaaatccccctttcgcaacctggcttaataccaaaaaggcccgcaccattcgcccttccaaaaatttgcccaccctaaatggcaaatggaacccgccttgtaacggcccattaaacccggcgggtttggtggttacccccaactttaccgctaaacttgccaacgccctaacgcccgcccctttccctttcttcccttcctttcccccaactttccccggttttccccg

SEQ ID NO: 37439 - DNA, 397 bp, Glycine max
ggcacaagtgagtttgttgatcgagataactagacgcagtgtggtgaaaatgaaagtccatgtgttcttcgttgctacagttttgggagcatggcaatgccatgcgtacgacaggtgccctcgccgaatgaacactggctatggtgcccgtactccggaggtgaaatgcgcaggttggaggcatgctgtggaagcacacagcatctttggctttgagaccattcctgaagagtgcgttgacgcaagagatgaatacatccatggtgaacaatatagatcagactccaacacagttaaccaacaagcctacttttatgccaaatacctcgaagtccatcccaaagacacagttgtgttcagtatagatggcaccgtactcactaatattccatactac

SEQ ID NO: 37440 - DNA, 343 bp, Glycine max
gggattgccggaaaacatgaagcttaagcagttgggaggtctcctcggtggtcttcaacagttccctcaacccaaggcagagaattcttttgaggatgtgagcgacaaagtaccggctgactttggatgcggttgtggtacgttaggtgttgcagctgcactgttgagtgcagaacatgttcttggcattgacattgatccagaatctcttgagatatcttccaataatgctgaggaacttgaggttgacatcgattttattcagtctaatgtcatggactttggatggataggtcgaagtgttgatacagttaagaatgaagcctccactttggtactcggg

SEQ ID NO: 37441 - DNA, 204 bp, Glycine max
gacgacagacgggcaacagatgtcatcgcgaggatctcaaagaccgatcaaggcacgaaagccgggctctttcatacagtggcttcctattccaaaggtgtacagctgcatggataagctcacacggtaccgtcgctttgggatcacattcggttcctgatgaggtaacaggaaggaagtttgggctgtcataatatcaaatca

SEQ ID NO: 37442 - DNA, 387 bp, Glycine max
  unsure (1)..(387): unsure at all n locations
cagangggggcacangtgagtttgttgatcgagataactagaaacagtgtgatgaaaatgaaggtccttgtttgtcttcgttgctacagttttggtagcatggcaatgccatgcgtacgatatgttccgtctccgaatgaacactggctatggtgcccgtagagcggaggtgaaatgcgcaagttggagggttgctgtggaagcactgaacgtgtttgggttgtggcatgggtggtgaagagtgagtgggcggggggaggagataaggcgatggagagcgatatacattagactccaaaacaggtaaccaacaagcttacttttatgccatagacctctgantccatcccaaggaaacatttgtgttgaatataaatggcaccgtac

SEQ ID NO: 37443 - DNA, 200 bp, Glycine max
cccacgcgtccggataggtgccatctcagaatgaacagtggctatggtgcccgtactccggaggtgacatgcgcaagttggaggcttgctggtgaagcatgcaccatctttggctttgaaacgattcctgaagagtgccttgaatcaacacacgaatacatccatggagatcaatataggtcatactccacaacagttaa

SEQ ID NO: 37444 - DNA, 227 bp, Glycine max
acgtcaggatggggcacaagtgcgcttgttgatcgagataactatgatcattgtgatgatgatgaaagtccttgttttcttcgtggctataatttcggcagcatggcactgctatgcgtatgatatgttcactcttagaatgaatactggctatggtgcacgtattcctgtggtgaaattcgcccgttggtggcttgctgtggttgcacacatcatctttggctttg

SEQ ID NO: 37445 - DNA, 383 bp, Glycine max
  unsure (1)..(383): unsure at all n locations
gagccacaacactttccacttacctccgaattagttatcttgagaaacattagtcccattgctatagattatggctagcatgaaggttacatcggtggttgtgatcatgtgcatggccgtggtgggtgcaccgatgatgcgccaagccatgacatgcaatgatgtgaccgtgaagatggcacactgcccatcctagctgatgcagggacgagcacgtgcgacagctttgggccaggcgagtcaacgacattccgtgctctgctgtcaccaccgttgactgacaaactgtgtgcaactgtctcaaggcggatgctgctangtacaacatcaatgaccagtatgctcaggcactccctggtttctgcaaggtcaatgtcccttac

SEQ ID NO: 37446 - DNA, 374 bp, Glycine max
ggattcagattacattgcaaaaatggcatcattcaccatgacaggttcgatccttggcagcccagccgtcaccaaccggtcggcagtagcaacgcagaggagatcactcgtagtgaatgctgccaaagctgttgaagcagaaaaggtcagttatgacaatgacagggatggtagcaatgggaggaggaacttggtgttcgccgcgtgcggcgcggtgcggggggcggggggtgcggggatggcagtggcggggcggcctaaaccaggaaccccagaacgcaagaaaaagtatgctccgatttgtggcaccattgcaactgctaggatttgtcgcaattgagggactttggtttttattttacttctgatgattg

SEQ ID NO: 37447 - DNA, 240 bp, Glycine max
gaaagtatgatggcattatcacgtgttagggaggacaactaccggtcatatttgcgcgaagacactgagaagaataccaaatggatatatggtgcccctccacattacgacgttgctcacacgctatatgaccatggcagagtcattgtttgggctcacggttcacttgactagcacgtgcagtctctagtgcatttctgggacatggagatgttccacagtgtcggactgcatgatttc

SEQ ID NO: 37448 - DNA, 125 bp, Glycine max
caccttgcggacccagtcaacaacaatgcctgggcctacgccaccaacttcgtccccggcaagtgagcatgaaagaaaaggatgacttgtggacttttgagagtttttagatttgtgtttggtga

SEQ ID NO: 37449 - DNA, 307 bp, Glycine max
gttcaaatattctgtgtgctgagagcagtgaaagacctttgttgaaccgcttgatgttagaattgtacaagttggaaagtgatgttcttgttggacacaatatttctggatttgacctggatgttcttctccacagatcccaggcttgcaaagtagcaagcaacatgtggtctaaattatggcgcctcaaccgttctacaatgcctaaacttagaagaagcaacgtttttggttctggagcagaccctggtatcatgtcctgcaatgctggccgacttctttgggaaacatacttgtgttcccgtga

SEQ ID NO: 37450 - DNA, 299 bp, Glycine max
gataccaggggcatcacacacgccatgtgacagtgagaaagtataagaatcagagagcataatgtcagggatcattcacaagattggggatacccttcatgtgggacggtacatgaacgaggatgagcataacggtgagcaccatgctggagactataaacgggagcaccatggtgaacacagtagtgagtacataggagagcatcatggagaacacaaagctagaaagtaccatgctgagcacaattcagaccactcagatgggttcctacacttagtcaacgacgacatccatggtg

SEQ ID NO: 37451 - DNA, 257 bp, Glycine max
gacgctgagcgacctttctcctcagtccacataaaccaaatgtcagacaagtgccaccagttcatcacgagagaaacgactacctgagccgaaatcattatataacaagaatttaatactaatacatcatactaacacaatataggtagaactgtcgtatcatatagacatctcttcagcatagcatcggtcatcgagaagatcacgaccacacaccgacacatgaaatccgggatccttcataatatggacaccga

SEQ ID NO: 37452 - DNA, 421 bp, Glycine max
aattcccgggtcgacccaagcgtccagaagacgacagaagggggtgagtgaggggtagtgatagaaggataaggtgaggtgacgataaaccgtggaaagtggaaacggtggtgtagtctgtgagtgtcattgtgaagttggagacaatgttagcttcttctctctccttcctccattcttgttcatcttcctctttcttattgtcaatttcacttcctaatcccaaaccctctcattccctacctttcgtgctcgaagccaaagacaggacccgtagggaagacaggtccgcgcgccacactcgcatcagaaagaaggtctaagggacacccgagaggccgaggctgtccgtgttccggtcgaacaagcatctctctgtgcaagtgatagatgacaccaagatgcacacgcccgcttcgat

SEQ ID NO: 37453 - DNA, 377 bp, Glycine max
gaaggtgcgagagtttgttgtgagctataaactagtttatcgtgaggagaatatgaacttgtctgttttcgttgttgctgcagtacttttggtaacatggccatgccatggcacatgctagtacaggttccctctccgagtgaaaattggctatggtgagcgttcttcggaggtaatgatgcacatgttttaagcttgctgtggcagcatacaacatctgagcctttaacaccattcctgaacagtgcgttgaatcatcattggactatattaatggcgaccactttaaatcagacgcgaacacagtttaccaacgagctttcgtttatgctagtgaacgcgaagtctatcacatcgacatatttatattcggcata

SEQ ID NO: 37454 - DNA, 405 bp, Glycine max
gacaacatcatcatcaacaacaagcagatcaatctctctctcaaccataatagtcatgggtttgaatgaggattttgagcagtatgctgagaaagcaaagactttgccaccgactcaatcaaacgaagacttgcctatcctttatggattgtacaaacaggccaccgttggacctgtcaacaccagccgtcctggaatgttcaacatgagggacagagctaaatgggatgcatggaaggctgttgaagggaaatccaaggacgaagcaatgggtgattacatcattaaggtgaaacagctgctggaagcagctggcttgcctgcttgataacattgtcatgccttgcttcctgattctgtgctagaagttcacaacagtttggaaataaacaattgcagtgtttg

SEQ ID NO: 37455 - DNA, 361 bp, Glycine max
tccagaattcccgggtcgacccacacgtctgataggttgcagaaaacaacacaaagggagacacatatcacatcacatctctttttctcgtcgataccgctgtcatgtctcaaactgttgttctccacaatggtatgtcatgtgaaagatgtgttggagcagtgaagagagttttaggaaaattggatggtgtggaatcatatgacattgatttgaaggaacaaaaagtggtagttaatggaaatgtccatccagacacaattcttgcgaccgtttccaaaactgggaagaaaactaacttctgggaagggtgagcaacaacatcccagactaacacagcaactgcctagaacatttcgct

SEQ ID NO: 37456 - DNA, 240 bp, Glycine max
attcagaggcttttggtttacgagtttatgccgaatcatagcgtggacgatcagctccctgcaagagtgccatcgacgatcatccggtgcggaacgatgttatcgatgtcgcaggatgcggtgaggggtttggcgtaccttcatcatgaaatgcattttcacctaatatttcgggattttaggacctccgtcatcttgcgtggaccacaatgtgaatgcgcagctttgtgattttggacg

SEQ ID NO: 37457 - DNA, 357 bp, Glycine max
gcacaagtgagtttgttgatcgagatacctagaaagagtgtgatgaaaatgaaggtccttgttttcttcgttgctacaattttggtagcatgggaatgccatgcgtacgatatgttccctctccgaatgaacactggctatggtgcccgtactccggaggtgagatgcgcatgttggaagcttgctgtggaagcacacaacatctttggctttgagaccattcctgaatagtgcgttgtagcagcatacgaatacatccatggggatgcaaatagatcagactccagcacagttgacgtacaatcatacgtttatgccagagacctcgaagtctatcccagaggcacatttgtgttc

SEQ ID NO: 37458 - DNA, 406 bp, Glycine max
ggaaacgtatttcactatcacgcatacatggtggagcacctaagcacactggagtcctccctagctcagtccattcaccgccgtacgctctgagatcatccgtcgtctacgcgaactccgcagcgatcctttcgatctgtcatagcaaatgggcaagagagttcactgtcctaccacctattcaggcctcattgctatgactgcaggtgaagatactgttgatggctctctgtaggttggcattggagatgttgacaaacgtaagaggacttattatctcaatgcggattcagcaggatctggcaaatcaagtgatgaggcattcatcgaatgtacaatagcggaggcagttgcaattgtgctgtattaacaatatgttgcaaatatgataaggcttttgggtgat

SEQ ID NO: 37459 - DNA, 247 bp, Glycine max
cacgcgtcccaaagctgtagaatacgacacaatgggaaagtgcaacagtttgttttgaactataaactagattatcgtgaggagaatatgaagttgtttggtttccctgttgctccactaggtgttgtaccaccagcatgccatagcgcacgctactaaaggttccccctcccaaagcaaactggctatagggaacgttcttctcaggggaaatgcgcacattttaagcgtgctgtgggagcacaca

SEQ ID NO: 37460 - DNA, 372 bp, Glycine max
gggacagagactgtgacacaacacgacacatgacacacagagttagaggagaaatcatcatggcatcagcagcatctgggtttgtgttgtggcttaatgttgcagctgccaccacgaactcacgggtggtcgtgttcaccacatagaacaacgcttctaggcttgttgtaagggcttcagatgagcctgcagcggcggcagccgctatcaccacacctccagcataagcttaagcttagctaggtttccacctactggcccctatacaggtgctaacgtgaagattcatacgatcgattcctactggtacaaaggcactggttcagtggttgctgttgatcttgagcccattactcgctaccctgttgtggt

SEQ ID NO: 37461 - DNA, 360 bp, Glycine max
gactgctactttgctctctgtgaggcttcaatttctaattacggtatcgctcacagtatccaacaaccatgcgagtcggcagctttgtcgttcgcaaatccggcagcgaatggagcgcctagcaatattccggtgacatcgaggcctccgccgaatccagcttcgatctccagcggatgctccatgcatcccgcgcgcgccgtcgcatcctcctgtggagttcagtcgtctttctctcccgatgtccctatcgtggccgtgttccaggtcatactcagtggtgcagtactcattcgacgtggtagtcatgctgtcgcaactgcatctgcacgtggttctcccacacctgatgctgcacca

SEQ ID NO: 37462 - DNA, 255 bp, Glycine max
ttcttcaaaataattttaggcctcgtctccctctcacacgcctccgtggtggatttctgcgtatcagactatacaagccccaatggccccgcacggtactcatataagagcccagcaaaggtcacagtggacgacatcgtctataccggcctttgcacccccggcaacacctcaaacatcatcaaaaccgcggtgatccccgcgttctaaacgcaattcaccggcgtcaactggctttgaatctccattgcacgc

SEQ ID NO: 37463 - DNA, 367 bp, Glycine max
gatccgtctgcagatacacaagtaggtgacaactacgaaaaaagaaatggcttcctcaatgatctcctccccagctgttatcaccgtggatcgtgcctgtgccggcatggttgctccattcaccggtctcaaatccatggctggattccccactaggaagaccagcaatgacattacctccattgctatcaaccgtggaaaagtccattgcatgcatgtgttgccaccaattggcaataagatgttcgagactctttcctacttgccatacctcgatgatgcccaattggcaaaggaagtcgaataccttctaatgaaatgatggattccttgcttggaattcgaattggagcaccgtttcgcgtac

SEQ ID NO: 37464 - DNA, 357 bp, Glycine max
ttcggttctgctgcgatatacgacataacggggttctagtgtagtgttgtctgttgttgtaactcgttcatcatcgtttgctgtactgtgtttgtgtatgtcttttctctcatttaataatgtcgtgctgactgtcgtcactgtcggtaccgtagctcctgcaagtgccgcaaccggtactgtggctgcaacatgtactcacacatgaactacactgagtcaaccaccaacgtcaccttggtcataggagtgggacctgttaatgctcaatttgacggtgcagaactgggtgtgtgcgctgaaaacgattgctgcaaatgtggaccaaactgctcctgctacccctgcacttgcaag

SEQ ID NO: 37465 - DNA, 431 bp, Glycine max
gatctggcagcagaaaaacaagtagttgagaactaagaagaaggaaatggcttcctcaatgatctcctccccagctgttaccaccgtcaaccgtgccggtgccggcatggttgctccattcaccggcctcaaatccatggctggcttccccacgaggaagaccaacaatgacattacctccattgctagcaacggtggaagagtacaatgcatgcaggtgtggccaccaattggcaagaagaagttcgagactctttcctacttgccagacctcgatgatgcccaattggcaaaggaagtcgaataccttctaaggaaaggatggattccttgcttggaattcgagttggagcacggtttcgtgtaccgtgagcacaacaggtcacctggatactatgatggacgctactggaccatgtggaagctgccta

SEQ ID NO: 37466 - DNA, 327 bp, Glycine max
cggggttctagtgtgtgattgtttgttgttgtaactcgttcatctgggtttgttgttctgtgtttgtgtttgttttttcgctcagctgaaaatgtcttgctgcggtggtaactgtggttgtggcagctcctgcagggtgggcaccggctgcagaggctgcaggatatacccagacttgagctacactgagtcagccaccaccgatatcttggccatcggagtaggacctgtgaatgatgaatttccagatgttgaaatggctgtggtagctgagaacgatgggtgcaagtgtagcccatgctgctcctgcaatccctgcacttgcaa

SEQ ID NO: 37467 - DNA, 341 bp, Glycine max
cccgggtcgacccatgcgtccgaagacgacagaagggggcacttcaattgcaatcaaattagttcattctctttgcgcagttccctacctctcctttcaagatgcagatcttcgtcaagaccctcaccggaaagaccatcacccttgaggtggaaagctctgacaccatcgacaacgtcaaggccaagatccaggacaaggaaggaattcccccggatcagcaacgtctcatcttcgccggaaagcagctcgaggacggccgtaacctcgccgactacaacatccagaaggagtcaagccttcaacttgtccttcgtctccgtgggggcatgcagatcttc

SEQ ID NO: 37468 - DNA, 391 bp, Glycine max
tcacacccaagttcgagacccttattgacatttcagtgatagagatattgtcaaggcatgcttctgatgaggtctaccttggccaaagggataatccaaattggactacggattcaaaggcattggaagctttcaaaaagtttggaaacaaactggcagaaattgagggaaaaatcacacagaggaacaatgatccaagtctgaaaagccgacatgggccagttcagcttccatacacattgctccatcgttcaagtgaggaagggatgagtttcaaaggaattcccaacagtatctccatctaaaatgtgtgtgtggtttgcttatctattgtgcttttgaataaaatagacaatacttgtctatggttattattggctgtatgtctgta

SEQ ID NO: 37469 - DNA, 228 bp, Glycine max
gacactacgggacactggggcagacttaagttggtcggtcaagagaattacaaccattgcgctgaaaaggaaggcccttgtttcctacgttgcaaaaatttgggtaccacggaaaggcaatgcgtcccaaaggttccttctccaaatcaaaacgggtcaaggtccccgtaccccggcggtgaaatgcccaagttggaggcttgcggtggcagcacacacaaccgttgg

SEQ ID NO: 37470 - DNA, 198 bp, Glycine max
gacaactcagtttgttgatcgacataaccagaaacagtgtgatgacaatgaacgtccttgttctcctcgttgctacaattttggtggcatggcaatgccacgcgtatccatatgttccctctccgaatgaacactggctatggcacccgtagcccggaggtcaaatcctcaagttcgaggcttcctgtgccagcacac

SEQ ID NO: 37471 - DNA, 227 bp, Glycine max
cagaagtgcttacagatgacaacagcgggggacatgagacatatacacaggagagcactgaccaaaccattttattttatttttgaatcaagggtgacggccttccatggcttccgcttgtgcttcctctgcaattacagctgttgccatctctacgccgagttcctggcacaagaatggatcatgaagttgttttcttaatggaacgaaatttacggtgaaaaagg

SEQ ID NO: 37472 - DNA, 401 bp, Glycine max
gttcttccaaaaggcatgaatctaagagtgctggaattgaaatggtgactgaaagggagcagggagagttgacggcaagagataatcctttgtgttcttcttgtcagatgcttgttctttggatccagaatcaactaaaacaaaaggcaacgaacgacagagtattcaactatgttaaaccacctgtttaaaagcctaccagttcaacctgaaaattcgttaatagcccttaaaatccttccaagaatcccaaactttccattcccaattggaaataaaccttttgtcctcaaaccagagcattaattctcaaaaacgtggaaaagggattacaaaattttgccttaatgggtttattgcctttgatgttcctcctccaaagggtccattgtggattcctg

SEQ ID NO: 37473 - DNA, 218 bp, Glycine max
ggagaccttgtgtggagcatgtggggagaagtatgcatctgatgagttctggatttgttgcgacatatgtgagaagtggtttcatggcaagtgtgtgacgatcagtcatggccgggctgagtacatcaaacactacaggtgcccctcatgcagcaattggacaccaaggacttgatatcatacggatatggggttaattatcacagccctgtatatcg

SEQ ID NO: 37474 - DNA, 244 bp, Glycine max
gacaccaacacgataacagaccgactaagatggcttcctttgcgtccttcctacaggagcttcttgcagcccttagcctcatgcctgaggggcttgctacttacgacacaccagttccgttgccagcagtgtgcaatcctccactcgtcaagccaacaatagtgcatccatcggttttatcgccaaaaccatcggtttacctgccgcaagcatcggtttacactccaccacatgagaggtcacc

SEQ ID NO: 37475 - DNA, 202 bp, Glycine max
gaccgtattccttacgctctctcagtcacaaacacacactgacttaacacacatcaggaggagacatgggtgagcagaccttcatggcgatgaggcctgatcgcgtccagagaggcctgagtggcgagatcattgccacccttgccgaagaaaggtttctacgtgagaggtttggaacttgttactgtcgaccgtccttttg

SEQ ID NO: 37476 - DNA, 414 bp, Glycine max
gacttcaaaacactcataacacaaagcacaaagcaaaactcatccttgagttaaaaaatggcagcagcttcttccatggctctctcatccccatccttggctggcaaggccgtgaagctgggcccatcagccccagaagtgggaagggtgagcatgaggaagaccgtcaccaagcaggtctcctcaggaagcccatggtacggcccagaccgagtcaagtacttgggcccattctctggcgagcccccgtcctacctaaccggtgagttcccaggcgactacggctgggacactgctgggctttccgcagacccagaaaccttcgccaagaaccgtgaactcgaagtgatccactccaagtgggccatgctcggagccttgggctgcgtcttcccggagtgctgtcccgcaacg

SEQ ID NO: 37477 - DNA, 298 bp, Glycine max
gacttcaggtcacgcagagcaaaccgcagaatttaagcatcatccttgagctaaagaatggcagcagcttcttccatggctctctcagcccgatccttgggtggcaaggctgtgaagctgggccgatcagctccagaatctgggaacggtgagcatgaggaagatcgtcagcaggcaggtctcctcaggaagcccatggtacaagccagaccgagtcaagtatgtgcgcccattctctggcgagccctcgtcctaccgaagcggtaagttcccaggcgactacggttgggatactgct

SEQ ID NO: 37478 - DNA, 294 bp, Glycine max
gaattcaaatcactcagcgcagacagcacagcacaaccctcatccttgagttaatggatggcaccagcgtcctccatggctcgctcatgaccatcgttggctggcaaggccgtcaatcagggcacatcatccccaggactgggaacggtgagcatcacgaaaacagtcaccacgcaagtctcgtcatgaagcccacggtaccgcccagaccgactcaagtacttgggaccattctctggcgagcccccgtcctacctaagccgtgagttctcatgggactacgggtgggacacg

SEQ ID NO: 37479 - DNA, 376 bp, Glycine max
tggggtgtgagagagcgagcgagcgagcagtttcaaacataggatttgggattggtaacgcgagggattgcgctgcgtctcttccgcttctctttcgattcatccgtcattcatctgcgtccattcgagcaagcccatgcgtcagactcacacttagacacatctcaacgcgtatggtccctcacatggcttcacgtcgcatccacaacgagctcaatgacttggataattatctagcaacttcttgtaccgctggtccagtgactgacgagatgttcgattgtcgcgcaccgattatgggtcccgctgatcatccttattctggaaggtgtattcctagtcacttgttacagtcctccggagtattcctttcaaa

SEQ ID NO: 37480 - DNA, 407 bp, Glycine max
ccgggtcgacccacgacgtccgaagacgacagaaggggaagtaaagtaaattaagaagatcattaatggcttctcttgcaaccttagctgctgttcaaccagctgcgctcaatggccttgctggaagttccctctctggaactaagctctctttcaagccctctcgccacactgtcaaatccaagaacttcaggagtggtgccgtggtagcaaagtatggtgacaagagtgtgtactttgatttggaggatctgggcaacactacggggcagtgggacttgtatggctcagatgcaccttcaccctacaaccctcttcagagcaagttcttcgagacatttgctgctccattcacaaagaggggattgttactcaagtttctgatattgggaggtggttccaccttg

SEQ ID NO: 37481 - DNA, 383 bp, Glycine max
atacagcgtcaggcgagaagacgacggggtgggacttcagagttaagttgcgagtataggatgtcaatgcgaaaagatgattctcattgaactcgctgatgtattcacttctatcattctcgcacgattctgacgtagattgctgtgtagtagaatatgcaggtctgactggtcgagcatgatatccctgtgttatgaccttcaaacgtcacatcaaatgaatttgcatacactggtcttgaaatagtcggtgatactccgcgtagtatcatcactgtaatgatacctgtatttgagtcacagtttgatggtctctactggcgtggaatttcggaagcacgtatgtacttaacagtaggttcagttatacaatgtcacactca

SEQ ID NO: 37482 - DNA, 259 bp, Glycine max
ggttctagtgtgtgattgtttgttgttgtaactcgttcttcttcttttgttgttctgtgtttgtgtttgttttttctctcacctgaacatgtcttgctgccgtggtaactgtggttgcggaagctcctgcaagtgccgtaacggctgccgacgctgcaagatgtacccacacttgagctacaatgagtcaaccatttacctagaccctggtcatgggagtggcacctgttaatgctcaatttcatggtgacgaaatggg

SEQ ID NO: 37483 - DNA, 316 bp, Glycine max
ttattgcattaccacagatgtggtaacataacgggttttgaagaagaagcagttcatttgatcaactcatatttcatggacctaagtctagctgctaatagactcgcccatcatgccatcaaacttggtggcattggatttggagcctcttctttcggactgtctgctgccattgctgctatttatctgttgagttaggatcgtaaaacctgcaatacatatactctcacagcactacgcagtccatacattttcttcagcatgccttcattaagtttcgatctcctcaagggacatcttggtaaatggattgctg

SEQ ID NO: 37484 - DNA, 278 bp, Glycine max
gatcaggcatcaatttaacaactaattgagaactaatcatgataatcatatggcttcctcaactgatgacgtccccatctgttaccactgtcaaccgttcccgtgccggcattgttgctccattcagtagcctcaactccattgctggcttccccattaaaaagaccaacaatgacattaccatccattgctatcaacggtcgtacaatacaatgcattcaagtgttgacaccaattcgcaatacctagtttgagactctttccttactgccagaccg

SEQ ID NO: 37485 - DNA, 178 bp, Glycine max
gagacctcaggtcaggcggggctacccgctgagtttaagcatatcaataagcggaggaaaagaaaagggggaaaaaaaaaaaaagcagcggccccacaagatgaatcatgcttaagtactcctggatacgacatcacacctctacaatgtcgtcaactatcatcacatcagtggtcgt

SEQ ID NO: 37486 - DNA, 146 bp, Glycine max
caacatacgtcatcgaaaggatctcgatttaccaccaatgcacgaaagccgggatctttcacaaaatggattcctaggcggggggtgcataaccgcatggatcatctcacacgagcccgtcactttgggatccaattcggttcctt

SEQ ID NO: 37487 - DNA, 308 bp, Glycine max
gactcaccacttcaaaacactcataacacaaagcacaaagcaaagctcatccttgagttaaaaaatggcagcagcttcttccatggctctctcatccccatccttggctggcaaggccgtgaaactgggcccaacaaccccaaaaattggaaaggttaacaataaggaaaacgttaacaagcaaggctcctcaaggaacccaagggaacggccaaaacgagtcaagttccttggcccattctctggcgagcccccgttctagctaaccggtgagttcccaagcgaatacgggtgggacactgctgggc

SEQ ID NO: 37488 - DNA, 370 bp, Glycine max
gtccacggatccatacagatgtcaaaagctacaggaagggaaggtgcacgaggttgttgtgagctaggaagctagtttatcgtgaggagaatatgaacttgtttgttttctttgttgctgcagtagttttggtagcatggccatgccatggcgcaggctaccagaggttccctctccgaatgaaaactggctatggtgagcgttcttcagaagtaaaatgcgcaagttttacgcttgctgtggaagcacacaacatccgagcctttaaaaccattcctgaagaatgcgtttaaccaacaaatgactacattagtggggaacagtttagatcagactctaaaacagttaatcaacgggctttcttttatgc

SEQ ID NO: 37489 - DNA, 435 bp, Glycine max
  unsure (1)..(435): unsure at all n locations
ctggtacgcctgcagngtaccgtccaaaattcnagggtccacccacgcgtccgcaagaagacgacagaaggggaataaaagtagaactgtcttttcatatagaaatccctcaacaaaacaaaaggccaccaaaaggttcccaaaaaccaacaatcgcaacaaaacccggaattctttcaaaaaatggatcccaatccaaagggtgcataaccgcatggataagcccaaactaacccttcaatttgggatccaattcggttccttaggaggtaccggaaaggaattttggaatgtaataataccaatccagacagattcagacaaaagggttcccaattgattcaaacgctctacctacgaaataggaataaagacagaggaaaaaacccaggattcaaaataggactttttggccaaaaaaccgattcgattttt

SEQ ID NO: 37490 - DNA, 250 bp, Glycine max
gaccctaaagagagagagagggagtcagagaaaccctaggttagaagaaaagatgccggctggtcaagggttgagattccgcaccaaagaatccttctctcgtcctttcaaggaaaaaggaaacatcgccctcaacacatagctgagaaactaccacatcggcgactatgtttacgtccacggtaacggtgccgttcaaaacggaatgccccacaaattctaccatgggcgcgacggacgcgtctgggat

SEQ ID NO: 37491 - DNA, 294 bp, Glycine max
  unsure (1)..(294): unsure at all n locations
gactcaccacttcaaaacactcataacacaaagcacaaagcaaagctcatccttgagttaaaaaatggcagcagcttcttccatggctctctcatccccatccttggctggcaaggccgtgaagctgggcccatcagccccagaagtgggaagggtgagcatgaggaagaccgtcaccaagcaggtctcctcanggaagccatggtacggccaanacgagtcaatacttgggccaattcccgggcaagcccccgtctaactaaaccggtaatttccaagccaacaacggttgga

SEQ ID NO: 37492 - DNA, 393 bp, Glycine max
gaaggtgcaggagtttgttgtgagctataagctagtttatcgtgaggagaatatgaagttggttgttttctttgttgctgcagtagtttgggtagcatggcgatgccgtggggcaggctaccagaggttgggtctccgaagtgggactggctatggtgagcgttcttcggaggtagaatgcgcagggtttaggcggtgctgtggaagcacacaacatccgagccttgaaaaccattcctgaagagtgcgttgaggcaacaagggactacaggaatggcgaacagtttagatcagactctaaaagagttaaccaacaggctttcgtttatgctagtgagcgcgaagtccatcagagggacatatttatattcggcatagataacagcgtactcg

SEQ ID NO: 37493 - DNA, 264 bp, Glycine max
aggggcagcgaaagaacagaagatcctcaattttctgagcagccaaacactctctctctgtctctcgaagattctcagtttgcagagaaaatccgaatcatgtcatggcaggcgtatgtcgacgatgaccttctcggtgagatcgaatgtaaacaggtcacgcacgcggctatcatcgggcaacagaggaacgtttggggtcagaggagcgacttcgctcagttcaaacctgaagagatgactgccaagcatattgactgtaat

SEQ ID NO: 37494 - DNA, 385 bp, Glycine max
  unsure (1)..(385): unsure at all n locations
gataactgangaggaaaaaagaccagcggttgacgatgaaacagaagtgtcttgttgttctggtcgttgttgtgctcttggcttgtgcggttggttgggatgagggtatacccggcgggtggaaccccatcaggagcattaacgatgctcaggtgacagaaatctcaaatttcgccgttgcggaatacgaggggcaatcggttgagaagctgaatttggtgaaggttatgaaaggcgaccttcaggtagtaacaggcctcaactagggcctcaggctcagcgccagagactccaacagttaccaagcaattgtctatgagaaggcatgggcccgggagcagtacagaaaccttacctcctttacccctcttcatgcttaacctct

SEQ ID NO: 37495 - DNA, 253 bp, Glycine max
gaccggattccttacgcgcgcgcactcagaaacacacactgaactaagggacatcaggagagagatgggtgagcggagcttcatcatgagtaagcctcgtggcgtccagagaggccttagtggcgagattaggagcagaggtgagaagaggggtggcgacttgagaggtttgaaacttgtgagtgtggaccgtcggtgtgcggaggatcagggtgcggatttgtctgccaagcctgtctttacgggtttggtg

SEQ ID NO: 37496 - DNA, 301 bp, Glycine max
ataaatgaggaggtgaaagagagagagaaagcggatcaatgatatagaggtctgatgtgtaaaggtctatgggttatctcatacgaggtagtctaggggagcaggcaatctagatcagttcatatctatttatatgtgaattagatttataacgtagacaaagtaggagctctgagtcagggagaactgagaatagtgattcacgacgaaacagatcggtattcgaggaggacggggattattaggttgaagatatgagaaaggcgccattgtcgaattcagacctaaccattaatcgaga

SEQ ID NO: 37497 - DNA, 258 bp, Glycine max
  unsure (1)..(258): unsure at all n locations
cgggagagaanagtttcatgtgacttcaatggctactgctggaagtcgttggggtgttgttatgtcacgaaatgcgggattcaatgatcaggttgttgaacttgattttctcgaggctagtgagggaatccacagacgatgggataatggttataggagtacggcaacggctgctacatgggatcagtcggctcttatacgtaagagtcgtangcgcaggggaggagatgaaacccagggaactctgggtacatctca

SEQ ID NO: 37498 - DNA, 228 bp, Glycine max
ggaaggagagtgaagagagaagaagatggcgtcgagcggagcggtgccgtgttggaggacagcggggaggacatacaggagaggcgcaaacatatgcgcgaatctggtcaggagttgcctcagggaacccgacgaggctgaagccgtctctcgtgagaaggtcgattttgcgctctccaaatgggtcgacgccaagcctgagggacctggtattcgttcagagacccc

SEQ ID NO: 37499 - DNA, 409 bp, Glycine max
gacaagtgagtgtgatgatcaagaaaacgagaatcagtgtgatgatgatgaacgtccttgcattcgtcgttgctacaattttggtagcatggtaatgccatgcctacgataggtaccctcaccaacttaacactggctatggtgcccgtaccccggaagtgaaatgcgcaagttggaggcttgctgtggaagcacacaacatctttggctttgagaccagtcctgaacagtgcgttgaagcaacacaggaagatatctatggagatcaatagacatgagactctagatgagtgaaccactatccctacctttaggccagagacctctaaatcggtcgcatggacacatttgtgtacagtacatatggcagcgtactctcgaatattccattcgactcaacatatggata

SEQ ID NO: 37500 - DNA, 302 bp, Glycine max
  unsure (1)..(302): unsure at all n locations
ggaacctttgcattcgattcattcaggattgagcaggtgcgttgtggaagcagagaccgaaatagttcgagatggggcgtagagaagcgaggctgctcgtgagtcaactggtangaaagggtcggaggaagcagcttgcaaccaaggctgcggccgaagtctgcgggaggaggtggtggtgtgaagagggcctcatcgttatcgcccggaaactgttgctcttcgtgaaattggggagcaccgggggagccggcatctcctagtcaggaagcttcctttccagaggttggttcgggaaattg

SEQ ID NO: 37501 - DNA, 379 bp, Glycine max
  unsure (1)..(379): unsure at all n locations
gagagaggtgcatacgggtagagaggttgctgtacgagataagatattgaagtagtgcggggtgcggaggaggtgcantgaacaagggcctctggatcancatcgcgtctcaagtcggtcacttgttcgtgggaggtgtgagtgggtggggggagaaacaggtcgccaaccttctgcggcagcagttgtgaggagggaggggaccagggcatggggcctcacaatcagagcgggttccgatgctgatgaggtcgttaggagggcgaggggagtggggtcgagagggaggggtattttgggcagtggatggtcgaatgcgagctgtgtgaagcgtttgggggcgattgggctagagaacagtgaagctaaccgccaggcg

SEQ ID NO: 37502 - DNA, 307 bp, Glycine max
cgggggtctagtgtgtgattgtctgatgtcgtcactcaatcgtcttctctggatgatctgcgttggtctttgttttttatatcacctgacaatgtctagctgcggtggtaactgtggttgccgaagctactgcaagttcggcatcgggcgcgtacgctgcaagatgtacccagacttgagctaccactgagtcaaccaccaccgagaccttggctatgggagcggcacctgataatgctcaatttgaggatgctcaaacgggtgtgcccgcgtaaaacgatggctggacaagtggactaacctgcta

SEQ ID NO: 37503 - DNA, 368 bp, Glycine max
agttgagacgaagccgcctaagggggggctttctccaatccacgcactagaatgggggcagtggtttgctcaacacgaatgtgacaagttcaccggttaggactggctccattgctgtgaacgtacaagcagcggatacatatatgatgaggcattggacaacactccaaatgaatatcctaacatcgcaagacacgactaatctgtacgccctaaacgttcaaccgctcactgacacactatgtgcagcctttcccgaatagctgaatatgcaaactagcagtgttacttactgaaaaaccaaaacactttgatgctcatgtgttgactaagaggccagcgaaacagcatggataaccttatcgggt

SEQ ID NO: 37504 - DNA, 428 bp, Glycine max
ggcgtaacaatagcatactcttactctgattcgttagtgaagaaaaatggcaacaatcatcgccggcaccccaactacatcaatcactcgcacaggtcatgtgctcaaacgacctgttggggcctcatcctctaccgttcttgattgcaaacataaattgtacaggattgccagcaatggccaatgcggtgagagtgaggtgctccatggaggaaaagccttcaagcagctcaaacctagggatgggggcattcttgttagcagctgcagctgccgcaaccatgtcaagcccagcagccatggctttggttgatgagagactcagcactgaaggaactgggctttcctttgggcttagcaacaaccttcttggttggatcctgtttggtgtctttggtctcatatgggctctcttctttgtctacact

SEQ ID NO: 37505 - DNA, 352 bp, Glycine max
accacgcgtacgaccacgcatacgggcgactttaaggttttttttcaaaaagactacatatgggtaccgggggaagatgacttctgaagggggcacaagttagtattttgatttaaataactaaaaacagtgtcatgaaaatgaaagaccttgtattcttcaaatctacaatattcgtagcatgggaatttgatacgtacgatatgttttttttgtgaatgaatactgtatatggtgcctatactcctaaagaaaaatatgctagttggatatttgatgaacaatcacacaacatatttggctttgagaaccttacttaataatgcgttgaagcaactaaagaatacattta

SEQ ID NO: 37506 - DNA, 435 bp, Glycine max
gaaaaacaggcgcgacgccacacgcgtctaccgacgcgaaaaaacgacttaaaggaatttattcaagaagactaccaaaggggacaccggtgggcataaacaaagaaaaaaaaaacccttatccaacacaaccatcattgccacctctgctattaatcaaacaacattcactggtcaaactgctctgaagcaaatcaatgagttcgtccacaagacccgtggcgcccgcaaaagtcgcactaacatgcgccgcaccgtcaagaatgctcctcaaagcattttgtatggccctgaccgtcccaagtacttgggtccattcttggagcacattccatcatacctgaccggagaattccctggtgactacggatgggacactgcttgaatataaaatgacccggaaacctttgtcaagaaccgggaactggaagtgat

SEQ ID NO: 37507 - DNA, 336 bp, Glycine max
ggcttctctggatgcgatacggaagaagattgtcaaaggagagatacaaactaaagttgccgaagtaaaggagccttctgtttctgaaacaaagaccatccctgatgaacttgtacagattcaagcttttatacgatgggaaaaagctgggaagcctaactactctcgggaacaacaacttatggaatttgaggaagcaagaaaagaattgttagaagagcttgagaagggggcttctctggatgcgatacggaagaagattgtcaaaggagagatacaaactaaagttgccaagcaattgaaaaccaaaaaatactttcgtgctgaaagaattca

SEQ ID NO: 37508 - DNA, 310 bp, Glycine max
gactcaccacttcaaaacactcataacacaaagcacaaagcaaagctcatccttgagttaaaaaatggcagcagcttcttccatggatctctcatccccatccttggctggcaaggccgtgaagctggacccatcagccccagaagtgggaagggtgagcatgaggaagaccgtcaccaagcaggtctcctcatgaagcccatggtacggtccagacccagtcaagtacttgcgcccattctatgacgagcctccgtcctacctaacccgtgagtttccatgcgactacggctgggacactgctgggctt

SEQ ID NO: 37509 - DNA, 364 bp, Glycine max
tggaaagtacagtcaaaccgcacgatcatcaatccattcgagtaacccattgaagaagaggctcagatcggaaaaattaacgtatccaatcccaatcccatcgttgcacatgatacaattcattctgtagcagaacaagcgaggcaagacccgtcttgccaaatactacgtgcctctggaggactcacagaacctcaacggcctataccaggggcatttgctcgacttgtacagagaccttaaatacacgggtttcgtagtgtatcgttcgcacaagataatatacatgcgatatgcagggttatttttctcactctgaggtgacatcactgataatgagttggcggctttagagtgcatacat

SEQ ID NO: 37510 - DNA, 419 bp, Glycine max
ggcgcaagtgactttgttgatcgagatgactcgaagcagtgtgatgaaaatgaaggtccgtgttttcttcgttgctacagctttggtagcatggcaatgccgtgcgtacgatatgttccctgtacgaatgaacactggctatggtgcccgtactccggaggtgaaatgcgcaccttggaagcttgctgtggaagcacacaacatctttggctttgagaccattcctgaagagtgcgttgaagcaaagaatgaatacattcatggcgaacaatttagatcagactccaaaacagttgaccaacagacttacttttatgccaaaaaccttaaagtccatctcagggacacatttgagtaaactatacatggtgccgccttttctaatgttccttactccctggcagatccaatgaggaaag

SEQ ID NO: 37511 - DNA, 235 bp, Glycine max
gaaggtgcaagaatgtctagtgagctataaactaggatagcgtgaggagaatatgaagctgactgttttccctgttgcggcactaacattagtagcatggtcatgccatggctcttgctaccaaaggagccctctccgaatgaaaacaggctatggtgagcggtcttcggaggaaaaatgctcacgttttatagctagctgcggaagcacacaacatacgagcctttaaaaccat

SEQ ID NO: 37512 - DNA, 410 bp, Glycine max
ctggcagcagaagaacacgtacttgagaactgagaaggagaagcaaatggcttcctcaatgatctcttccccagctgttaccactgtcaaccgtgccggtgccggcatggttgctccattcactggcctcaagtccatggctggcttccccaccagaaagaccaacaatgacattacctccattgctagcaacggtggaagagtgcaatgcatgcaggtgtggccaccacttggcaagaagaagtttgagactctttcctacctgccagaccttgatgatgcacaattggcaaaggaagtagaataccttcttaggaagggatggattccttgcttggaattcgagttggagcaccgtttcgtgtaccgtgagcacaacaggtcaccaggatactacgatggacgctact

SEQ ID NO: 37513 - DNA, 411 bp, Glycine max
tgaagggaattaaatagcacagagtattgaacaaagaaagaaagatcgattgaaattaagaggcctcaaaagctgcacacattggcctttctgtccaggaatttgagatctagcaactaacaaggcaataatgatgttcttgttccagtgcccttgctgctcttgcttttgcttcatgaaaccaaagcaagggaaggcaaaagtcaaagaattcaaataaaccaacgtggaagaaaaaaatgttgaagaaaagaaatactgaccatgtaactccatttcaagctttctttggttattattagaattatataagcatgcacaaaaaaatagtgtctacttaatttgagcttctatgatcctttaattaccactgctatgatgccttcctactacaataattttgaaaacgta

SEQ ID NO: 37514 - DNA, 217 bp, Glycine max
gatgggacagatgatcattaggaccaagagaaacaaatggcagcacgtgggtgcgcgtttaccgacatcaccgcgtgcacagaacagcatcgatatcgaaaatctacctcgctttgatgctgatgaacacaacatactagagagtgctgactttgcgtttgggagggtgattatagccaacaaacaaatggtgttctggcacctcgtgctatatcac

SEQ ID NO: 37515 - DNA, 293 bp, Glycine max
gaacatcatcatcaacaacaagcagatcaatctctctctctctctcaaccataatagtcataggcttgaaggaggattttgagcagtatgctgagaaagcaaagactttgccaccgactcaatcaaaccaagacttgcttatcctttatgggttggaccaaccgggcacccgtggacctggcaacaccaacccgcctggaatggtcaacattggggaccaaacttaattggatgcattggaaggttgtgaaaggaaaatccaaggccaaaccatgggtgaataccttatttaa

SEQ ID NO: 37516 - DNA, 216 bp, Glycine max
gggccggaaaaaaaccaggtggtgggaacttagaagaagggaatggctttctcaatggtcttcttcccaggtggtaccaacggcaaacgtgcccgtgcccggatgggtggttcattcaccggccttaaaatcatgggtgggtttcccaccagggagaccaaccatggccttaccttcattggtagcaaccggggaagaatacaatgccttccagtg

SEQ ID NO: 37517 - DNA, 351 bp, Glycine max
gaacaacgaaggggacctgctacttcaacaccacctacactcactggtgtgcattgacccatggctggattcattaatatcgtactttcaggaatagtgtagctaatgagaaggaagagacggtgcatatgcacaactggcgatctttgaccgtggggattctcttgtggatcatggtaacagcaacttttagccaactacaattcgagcatatgttcctccttatggagttcaatacccacacctgaagacacactggccgcgtttgtaaaggctacaacattcctgacttgattagacaatgactgggggccgaatacacattttcttacttagaaccccacctttatg

SEQ ID NO: 37518 - DNA, 396 bp, Glycine max
ttcttatggggatttttttggcccagaacaaaaagaggcactcggggccggttctcacgggcactgtccctcacccagatgaaaaagaccagagcctaaactctacttttgcttccagatatgtgcgtgaacctctttcacatttcatcatgccatagaactcaattccaaccgattcatcctttcacataataaacgatgacttgatgttggatggtgcaccaaagctcaactccgcttcgatcgtgaccacttggattgatcctgcgtatcacaagctcataatgtcttcacttaacaaaaactatggaaatatagataagtatcctgtcaccactgttctccagaacctttaccttaatatatttatctaacctattccatgctcctattagt

SEQ ID NO: 37519 - DNA, 394 bp, Glycine max
aattggagcgggcgcactacttatgggggctcatgtgagtttgttgaaacggcaacacacaggacacttggtgccccttttggggccagaagacgacagaagggagaaaaaggaatcggagatggaacagcttgctatggaatggatgatggggacgacatttacatgcggtcttggactggaaccattattgtgccccatattgctggtcgtgaaggaagaactcatcaactgtggctgttttgcgataaagactacccacaaaagccccccagtggtcggcttccttcacgaaccaatatgacttgagttcatcatgaaactggagcgggcgaaccaaaaaaactgggacctcttggaaaatggcaacggcacgttaccatggaagatatac

SEQ ID NO: 37520 - DNA, 240 bp, Glycine max
ttttaaaggatccaaccttacttccccgtgcttgcaacgtattagcttttttttagggcaacctaaattaaattaactggccgccgtttaaaaacgccgggactggaaaaaccctgccgttaccaaactaaatcgccttgaagaaaatccccctttcgcaagttgccgtattaccaaaaaggcccgaaccattggcccttccaaacagttgcccaccctgattggcaattggaacccccc

SEQ ID NO: 37521 - DNA, 347 bp, Glycine max
gccaagcgtacgtagggatgccagaagacaaccgcaggggacgccaacgccaaaacaaacccactaagatgggcgtctttgtatgcttcctagagctgattgttgcgacccttaatgtcatacgtcacaggacttgctgacttactacaaagccgatgcaccaagcctccagaatacaaaggctaccacgttcagtgaacacagtgttcaaaccaccggattataatccaggagcaccggttttcagagacgacaccagcgggttacaagccaacatataagaaggcgccctacacgaaaccaccgtatggaaagatccctgcagcggaggacaacacccctgccta

SEQ ID NO: 37522 - DNA, 358 bp, Glycine max
gaacaccaaaagggacctactacttcaacaccaactccggtcacttgtgtgcattgatccatggctggattcattaatatcgtactttcgggaatagtgtagctaataggaagaatgaagcggtgcttatgcacaactggcgatcttttgccgtggggatcctctcgtggataatggtaacaacaactttttggcaactacagttcgagcatatgctcccccttatggcgttgattacccaaccggactacccactggccgcttgtgtaaaggctacatcattcctgacttcgattagtcaatcacttgaggccgaatacacattttcttacttagatcccctcctcgacggcgaaag

SEQ ID NO: 37523 - DNA, 380 bp, Glycine max
gacgacagaagacgacacaacggggcttgagagcagcacagagcaaaggggatacacgtgacattactaagggctttgggcatcagactagtagggatggctagcctcaaagttgcatgtgcggtcagtatgaaccgcatggttgagggggccatgaatgctccacccatggcacaagccataatcacgtgcagacaagtctgcccagacatgtttcactgcttcagttatcctcgaagcggcagaaaaccatcgcaagcctgctgcaacggagtgaaacacctcagcagcgcggcgaataccaccgtggaccgacaaggggcatgcaactgcctgaaaaacccgtgcaataatatgggacaaaacttgaatgccagcaa

SEQ ID NO: 37524 - DNA, 112 bp, Glycine max
gatctggcatcataaaaacaagtcgttgtgaactgggaagagggatatggctttctcaatgatcaccttcctagttgttaccaccgtcaactgtgccggtgccgtcatggtt

SEQ ID NO: 37525 - DNA, 360 bp, Glycine max
  unsure (1)..(360): unsure at all n locations
tccgccacgcgtncgtagagaaaacgacagaagggggtgggagggaagaaacaaaaggaggagcggcattaaaaatgcagatcttcgggaaaactctgacagggaagactataaccctcgaggtcgagagcaacgacaccatcgacaatgtcaaggccaagattcaagacaaggaaggcattcctccggatcaagagccgttgattttcgccggaaagcagcttgaaaatggaaagaccctggccgattacaacatccagaaggaatcaacccttcatctcgtcctcaagcttcgtggtggcatcattgaaccttccctcatggctttggctcgcaaatacaatcaggacaagatgattt

SEQ ID NO: 37526 - DNA, 367 bp, Glycine max
gatatctggcagcagggaagacaagtagttgagaactaagaagaaggaaatggcttcctcaatgatctcctccccagctgttaccaccgtcaaccgtgccggtgccggcatggttgctccattcaccggcctcaaatccatggctggcttccccacgaggaagaccaacaatgacattacctccattgctagcaacggtggaagagttcaatgcatgcaggtgtggccaccacttgatatgaaaaagttccagactctttcctactttgccaaacctggatgatgcccatttggcaaaggaagtcgcatacccttctatggaaaggatggttttccttgcttggaaattcgagtcggagcacgcttt

SEQ ID NO: 37527 - DNA, 421 bp, Glycine max
tgccgttccggatctgcaatttccgagccaagcgtcccgtccgctgacacagtacgaccgaatgggataaggcaagaaagggaaaagagacttggcgcgaatgttgaaagcacgacaatggggcgggtttggaaggatgacaacagcgacgatgttcgacgcgataactcttcggaacgatgcgccaccaccaaggtcgtcagatctcagtgcagaacacatgaggtcgaaactggaaagttcgtcagaaagtgcgagaaaaccgaagagattctcaggaattgcatcggaaagcccgccgaaatgttgcaatcaaacaaagagtatactgaagaagatatcacagatgaagtacttaaaggaaggtctgttccatttaactcatctgacggggccagtggggtggttgactttcctgggc

SEQ ID NO: 37528 - DNA, 136 bp, Glycine max
tcagacgacacaagggaaagaatatctttgagactctttcctacctgccaggggttggtgatacacaattggggaaggaagtcaaataccttcttactaaggcaaaacctccttgcttggaattcgagttggagca

SEQ ID NO: 37529 - DNA, 349 bp, Glycine max
tgccgtccgtttcctttcgaccagcgtccgttcgtggacaagacgaagagggggcacaagtgagtttgtgatcgaatactagagacgggtgatgaaaatgaagtcttgtttttcgtgctacaattttggtagcatggcaatgccatgcgtcgatatgttcctctcgaatgaacactggtatggtgcccgtctccggagtgaaatgcgcaagttggagcttgctgtggaagcacacaacatctttgctttgagaccattctgaagagtgcgttgaacaacaaaggaatcatcctggcatcaatattatcagactcaaaacagttatcaacatcttacttttatgccagag

SEQ ID NO: 37530 - DNA, 258 bp, Glycine max
gcaccaagtgaaccaatagagtcgaagccctattcgacccaaccctaacacacacccatttgattcagtgtgcatggcttgcctgaacgatgcattcttggctgcacatctctccatggatgtcgtgagtgcacccatggcacatgcagctatgacctgcgggcaagagacgagtaacctggacaattgcatcggttacctacagaatggacgaacgccatcttcggcatgctgcaactgagtgaatagcctcaatgc

SEQ ID NO: 37531 - DNA, 223 bp, Glycine max
gcaccaagtgaaccaatatggccggggccctatacaaccaaaccctaacacacacccatttgattcagtttccatggctagcctcaaggttgcatttttggctgcagtgctctgcatggttgtggtgagtgcacccatggcacatgcagctatcacgtgcgggcaggtgactagtagctctgccaattgcattggttaccttcagaagggaggaacgccgtct

SEQ ID NO: 37532 - DNA, 194 bp, Glycine max
ggtgtgtcggtcttgtcttgttggtaaagaaagagaagagagcggtcgctctcgaggatccaagcctacttacgcttgcatgccacttcatacctcttctgtagggtcccctacaacccacttactggccgtctttatacaacgacgagactggtaaaaccctgtcactatctaacataatcacttcgaactac

SEQ ID NO: 37533 - DNA, 368 bp, Glycine max
cttggagcacttggctttcaagggtagctttcctttccaaattgagagcttgggtggaagcttcgatgcttacactactcgcgaacattccgccttccttgtccagactttcaacaacaatgttgcccagactgttgatatcttgtccgaagctgttcagaaccccaaccttagcgccattgatgaagctcgtgaggctatcttgaagcagcaacagaaggctgccaacaatggtgagcagattgtctttgatcacttgcacgccactgctttttcaaggtgaaagtcttggtcgttccattgctggtacccccgagtcttgtcaagccatcttttgcgatgacctcttcaactttatttagaacaac

SEQ ID NO: 37534 - DNA, 231 bp, Glycine max
  unsure (1)..(231): unsure at all n locations
ggcgagcgacgcgtccgttngctgtactaccgtactctcttctgtttttgctaagcgtaccttccccacctctgcggccaaccttttcaaagtttctgtcctctgtgcttcccgaggtattggccaacctctcttcctttttcttaagaacaacaccctagttactgacctttccttgtaccataatgtcaactccccccgcgtttcccctgattttatccacattaacac

SEQ ID NO: 37535 - DNA, 250 bp, Glycine max
gctctttacatcttatttgctagtctgtactttctattttctccaccgccttgtctcattcgagagctttcgtcgttgatgtgataggaccacatcctggttggttggctctcatggctggtatttctactggtgccgcatctttctttatttcatagcgccctccttctgaggacgatttggaacaactcatgttttatattgctcaactccctcttcatcttggaaagcttgaagacttgtcattatt

SEQ ID NO: 37536 - DNA, 242 bp, Glycine max
gacacaccaaaccaaagtaagagtgagcaacttgcagcaccatattgaaatttcttccaaggctaaacttaacttgtgtttcaattttctctccttcaccgtgtttatctccacatatttcccatgcaacccaccccccaaaactcctaaacacccacctgttccaaagccaccttccccaaatctagcataaatccccaaaaacacttttaactttggtgtgtcttctcattttttacttt

SEQ ID NO: 37537 - DNA, 185 bp, Glycine max
tgtttttttacaccataataacaatttcttgagagcggagaatgataatcaaatggcttcctcaatgatctcttccccagctgataccaacttcaacctttcctaatccgtcttggttgctccattcactggcctcaataccaagtctgtctttcccaccttgtagaccaacaattacattacct

SEQ ID NO: 37538 - DNA, 129 bp, Glycine max
gacggttgcgagaacacaatacaaaggtaaaaggcgcacgatctagaggatccaggcttacgatcccgtatatgcgacgtcataactcttctatagtgacacctaaatataattcactggtctgttgta

SEQ ID NO: 37539 - DNA, 206 bp, Glycine max
cggggcgacccacgcgtacgtccacgcgtactgtagaagacgacagattggtgcacaagtgagtttgtagatcgatatagcttgaaacagtgtgatgaaaatgaatgtccttgttttcttcgttactacaattatggtagcatggcaatgccatgcgtactatatgttctctctcctaatgaacactgtctatcgtgcccgtactt

SEQ ID NO: 37540 - DNA, 367 bp, Glycine max
aggggagtgtgtgaaaaaacgagcgagcgaacagtttcaaagagaggatttgggattgggaaggcgagggattgcgctgcgtctcttcctcttctctttcgattcatccctcattcataatcttccaatccaacaacctcagcctcacactcacacatacacacatctgaacgcgtatcgtccctcccatggcttcaaagcgcatcctcaaggagctcaaggacttgcagaaagacccaccaacttcttgcagcgctggtccagtagctgaggacatgttccattggcaagcaacgattatgggtcctgctgatagtccttatgctggaggtgtattcctagtcactattcactttcctccggatta

SEQ ID NO: 37541 - DNA, 339 bp, Glycine max
tttcttatgtgagtttgttgatcgagataacggggacagtttgattaaaatgaacgtccttgttttcttctttgctacaatttttgtagcatggcaatgccatgcttacgatatgttctcttctctaatgaacactgtctatttgttcccgtactctagatgtgaaatgctcaatttttacgcttgctttttaagcacacaacatcttttggcttttaaactcatctttaatatttctttttagctatataaataatacttttattgccaacaatattatattttttttttattcagttaatctatttttttttttttatttcttcaatctttttattt

SEQ ID NO: 37542 - DNA, 315 bp, Glycine max
ggctcaagtgagtttgttgatcgagataactggaggcagtgtgatgaaaatgaagggccttgttttcttcggtgctacaattttggtagcatggcaatgccatgcgtacgatattgtccccctcctaatgaacactgactatggtgcccgtactaccgaagtgaaatgcgcaagttggaggcttgctgaggaagcacacaacatctttagctttgagaccattgctggaaaatgcgctaaaagaacaaaagaattcatccatggcaaacaatatacatcatacttcaaaacaggtaaccaacaagcttactttta

SEQ ID NO: 37543 - DNA, 440 bp, Glycine max
gaccacataaggggattccataaacaaaacacaagccaagtgaaagggtgcgaatataaaaatcaaagagcataatgtctgggatcattcacaagattggggagacccttcatgtgggagggcacaagaaggtggtggaacataaaggtgagcaccatgctggagaatacaaaggggagcaccatggtgaacacagtagtgagtacaaaggaaagcatcatggtgaacacaaagctggagagtaccatggtgagcacaagccagagcacaaagaggggttcctagacaaagtcaaggacaagatccatggtgagggcggccccgccaagggcgagaagaagaagaaggagaagaagtagaaagagcatggccatgagcatggccatgacaacaacaacatgtgacagtgattaaactgctgcatcacctatatatttaaa

SEQ ID NO: 37544 - DNA, 281 bp, Glycine max
  unsure (1)..(281): unsure at all n locations
aacagctataaaaaaacaaaataanttgatttttattaaacataaaaaatatcatcattcacgacgcgttttttcattaaaactctcacacccaacactataaccctcgaagtagataccaacaacacaatactcaatgtcaatgccaacattcaatacaaagaagacattcctcctcatcaccatcacatgatttttaccaaaaaacagattaactatataattaccctggccgattacaacattcacattcaatcaaccattcatatactcctataact

SEQ ID NO: 37545 - DNA, 349 bp, Glycine max
cttctaaaaaactctcacacctaatactataaccctcaaggtccataacatcgacaccatctacaatgtcaacgccaatattcaagacaaagaatgcattcctcctcatcaccatcctttgattttcgccggaaagcaccttgaacattaaaggaccctgtccgattacaacatccataacgaatcaacccttcatatcttcctcactcttcttcctgtcatcattgaaccttccctcattgctttgactcgcaaatacaattaggacaagattatttgtcgcaagttctactcccgtctgcattctattactttgaactgcctcaagaaaaattgcaccatactaacc

SEQ ID NO: 37546 - DNA, 309 bp, Glycine max
gacaccaacatccaaacaaacccactaagatggcgggctgggtatcctcactagtgctgctactagcaacccttatcctcatgcctcaacgacttgctacttactacaaaccaattaagaagccaccaatgttcaagcctttaacactcactccagcaacgtacaaaccaccggtttataagccaaaaccaccgctttacaagccgaaaccacccgtttacaagtcaccatataagacgccaccatacaagaaaccaccttatggaaactacccttcagaacaagacaacacccattcctaaagcaagc

SEQ ID NO: 37547 - DNA, 327 bp, Glycine max
acgcgtacgcccacgcatacgaaccaatgcgagattattattcatagctaatataccagaaatgtgcttcgcagaattataagaaagcatgaacaaacatgactatgcagaagcacttcttgaggcctggcaccagtcccaagccaattcccggtcagaacgtctcctttcactgaactggtttctttaaaaaccattacctttctcataaattctgcagtaccaatcatcctggccaggaccctttcactttctaaatctgacaacgttctgttatcaaatgatggtatgacaagatgctttgcatgcaaaataaatgaatttgct

SEQ ID NO: 37548 - DNA, 353 bp, Glycine max
tacttctgcgagaagacaaacagaaggtgcggcgtgcgaaaaaacaacaaaagggaacccccattttttttttaaaagaattttaattttgtattaaaaaaatttatcttattgttagaaatccatgtcttactccattttaaggaacaaaacaagaaaacaattgcctgacaaaaggtttagccataaaatcgaattcatcattgatttgagatattgataaggtgaatactcatttctcgtcaatgctaggcataatgcgggtatatagacctaaaaaaaaatatcttttctttctatcttatgaactttaacgtgtattaaaggacatttcctatcttagattttaattt

SEQ ID NO: 37549 - DNA, 417 bp, Glycine max
ggctgcaagaatatgacgagagctataaactatgtgatcgtgaggagaatatgaaaagctatgttttctttgttgctacaagaattttggtagcatggccatgccatggctcatgctaccaaaaggtccctctccgtatgaaaactggctatggtgagcgttcttcatgaagtaaaatgcgcaagttttatgcttgctgcggaagcacacaacattcgagcctttataaccattcctgaagaatgcgttgaaccaacaaaagactacattaatggcgaacaatttaaatcatactctttaacagctaaccaacaagatttcttttatgctaatgaacgcgacatccatcacaacatcctatttatattcggaataaataacaccgcactttctaatattctatactatgaaaaacat

SEQ ID NO: 37550 - DNA, 285 bp, Glycine max
tatgaactgtgcgagagtgtggtgagaactataatctatcttatctttaggagaatatgaacttggttgttatctttcttgctgtagtacattctgtcacatggtcattccatgatgcaaactaccatatggttacctctcctaatgaaaactatgtatcgtgagcattcttcctaggtaaaaacaccacattttaggctttctaaccatgcacacaaaatgcgagcctttaaaaccatacttcattaatgccttgcaccatcaaacgacttctttaacggctaa

SEQ ID NO: 37551 - DNA, 323 bp, Glycine max
gggctttcatttaaacaagtagttgagaactaacgttgagggtatggcttcctcaatgatctcctccccagctgttaccaccgtcaaccgtgccggtgccggcatggttgctccattcaccggcctcaaattcatggctggcttccccacgaggaagaccaacaatgacattaccttcattgctagcaacggtggaagagtacaatgcatgcatgtgtggccaccaattggcaagaagaagttcgagactctttcctacttgccagacctcgatgatgcccaattggctaaggaagtcgaataccttctaaagaaaggatgga

SEQ ID NO: 37552 - DNA, 318 bp, Glycine max
catttattgtgtggcagcaaaagaacaattactcgcgaagctttattgaaaagcaaatggcttcctcaatcatctctttcccagctgttaccactgtcaaccgtgcctgtgccggcatggttgctccattcactggccttatgtccatggctggcttccccaccacgaagacccacaatgacatttccttcattgctagcaactgtggaagagtgcaatgcatgcatgtgttgccaccactttgcaagaagatatttgagactcttttctaccttccagaccttgatgatgcacaattttcaaatgaattagaatacc

SEQ ID NO: 37553 - DNA, 227 bp, Glycine max
ccgcttggaaaaaaacaccaaaagggatctgtcattttattaacacgtaacagagaactgtggaggggaagctaaaggcttcctcaatgatctctaccccagctgttaccactttcaaccgtgccactgatggcatggttgctccattcacttgcctcaactacattgctggcttccccaccagaaagaccaactatgactattcctccattgctatcaacaatgga

SEQ ID NO: 37554 - DNA, 414 bp, Glycine max
tactttttcgagaagacaacagaaggggatctcggcgcatataaacatgtagttgagaactaacaataaggaaatggctttctcaatgatctcctccccagctgttaccaccgtcaaccgtgccggtgccggcatggttgctccattcaccggcctcaaattcatggctggcttccccacgaggaagaccaacaatgacattacctccattgctagcaacggtggaagagtacaatgcatgcacgtgtggccaccaattggcaagaataaatttgagactttttcctacttgccacacctttattatgtccacatttcaatagaatttataacctttttaagaaagatggttttttgtttgaattccattttaaaacttttcttttcctctttcacaaaattttcttttttttt

SEQ ID NO: 37555 - DNA, 294 bp, Glycine max
gacaccaccccccacacacacccactaatatgggtgacttggtgttcttactagtgctgcttcttgcagcccttatactcatgcctgaaggtctcgctacttactacaaaccaattaagaagcacccagagtacaacccttctatgctcaatccaccagcttacaaaccacctgcttataagccaaaaccacccgtttacaagccaaatccacctgtttacaagccaccgtctacgactacaccatacaagagaccaccttatggaaagatccctacaatggaggacaacaccc

SEQ ID NO: 37556 - DNA, 347 bp, Glycine max
  unsure (1)..(347): unsure at all n locations
cattgactaacaacgccagtatcaaagctgtctcctctactcgctctactactcncttcaagagcnttttagcgtgtgcttttcaaaacctccgaactgaccgtgatactttcggtcatctccaacttccctcttaaagcttgttgggagcccaaacacagccatcattgcaaaacttctatatccttcgtccccgtgaacgtatgccttatcccttgattcgtgctttccgtgtctttaaaaaagaaaaccccttttttacccctttttttccttaaaacaatcaaaacccacatttcccaaaacccccccttttaaaattttttttcccccctcttttttttttt

SEQ ID NO: 37557 - DNA, 355 bp, Glycine max
  unsure (1)..(355): unsure at all n locations
ttttacaaagagtgctttaaataccttttctttaatatnaacataagaagtttcttgcgtgacttttacaatccnctactcttttaaattgcctgggaggttgccaataaagtccgtggtatctataccgttctcaagaccaaagttccagtcaccgttcacgaatatggcgaccgctactgtcttattggtcccctttcctacaagacggcccccatggaggttgaaagcccaaaattttgggggtaaaagtccccccccccaaaacaaaaagggggaaaaaaaaaattttttttctttttccccgtaaaaaaagggaaaaaaccccgtggcccccctttttttttttttgggt

SEQ ID NO: 37558 - DNA, 294 bp, Glycine max
  unsure (1)..(294): unsure at all n locations
gggccaaggaaccaatataacccaagcccnacacaaccaaacccnaacacacacccacnnganncagcnnccaaggctagccccaaggnngcatcnnnggctgcagtgctctgcatggttgtggtgagtgcacccatggcacatgcaactatcacgtgcgggcaggtgacgagtagcctggccaattgcatccgttacctccaaaagggaggaacgccgtcttctggatgctgcaacggagtgaaaagcctcaatgccgccgccaaaaccaccgccgaccgccagacggcgtgc

SEQ ID NO: 37559 - DNA, 345 bp, Glycine max
tttttgctttatcttatcatcaccatctcacgcgagagaggtagagatataatcgctaaaattatctgaacgattgggaagaagaagggagcgagctttgtgatcgattgcgcgaagccggtggaggataaaattatggacattgcttctctggagaagtttcttcatgagaggatttatgttttcggtaaggccggtgcactcggcgattccattactgtcactagggacaagagcaagatcaccgttaccttcgacagcaactttttataaacggtatcttgaaatattttgaccaaaatagtactttgataaaaacacaaatgttgatgggaatttggcttt

SEQ ID NO: 37560 - DNA, 389 bp, Glycine max
  unsure (1)..(389): unsure at all n locations
ggtcttgaggacaaaagaagaagtatcacaaccccatcgatgtcccgcgcaactcttgtgcaaaagcggatctcatctcccgttcttggtttgccagcaatgggtaaggtgggaagagtgagttgctccatggaggaaaaaccttattctgtgaaggaaagcagctctagcatgttggggatgggggcatctctgatggcagctgccagcgctgcagccatgtcaggcccagccatggccttggtagatgagagactgagcactgaaggaaccggacttccctttggcctcagcaacaatcttcttggttggatccttttcggcgtctttggtcttatctggactctctattntgtctacactttcactctngaagaggatgaagagtc

SEQ ID NO: 37561 - DNA, 371 bp, Glycine max
  unsure (1)..(371): unsure at all n locations
aaagaccacaaattttgacctctccgagtcgcataaaaagaaaagagcgatgcntagttttacttcagccttatccactttaagctttcccttctctaccctatctttcacgtatcgaaaccttaaatttaccatcacgtctgagcaatctccttgttaaaaccttttctcttagtgagccaatttttatgtctcaattataccatcaaattcctactgccttccatccttttgctgatgcaaatgctcatgactcgtttgctgcttcaaaggagtatgtgcatattcctgtacagcagcgaaatcgtattaaaagcctgacaacctttcaggtattgaaaaatgaattcatctataacaagatactttaa

SEQ ID NO: 37562 - DNA, 246 bp, Glycine max
acgttcacatagaggaatcgagattgcataaaatttgccatcgttgatggaagcacgagagccttcgttgttcaagatgagagctaagtggaagaagaagcgcatgatgaggttgaagaggaagcgccaaaagatgagacaaagatctaagctggtgcttgaacaaggagtggacattgtgtgcttttccatctgcttaaaccccccccaaaatgaccctttttccattgaaccatttttttttaa

SEQ ID NO: 37563 - DNA, 363 bp, Glycine max
ggcaccccgtgagtctgtatgatcgtagataactagtaaacatgcgtgatgagaaatgaaagataccttgttttcttcaaatcctacacattttcgtagcattggcaatgccatgcttaccgatatgttccactctccgaatgaacactgactatggtgcccgtactacggacgagaaatgcgcaagttggacgcttgctgtcgaagcacacaacatcttttgctataagaccatacctgaagagtgccttgcagcaacaaaggactacatccatggcgaacaatatagatcagactccaaaacacctaaccaacaagcttactcttatgccagacacctcgaagttcatcccaaggacacat

SEQ ID NO: 37564 - DNA, 158 bp, Glycine max
gatcacaacacaagttgaaaacacaaaaaaagtggacgctctaaagaacacaagctgccgttctagaggatacaagcttacgtacgcttgcatgcgacatcatagctctttttataggtcacctaaatacaattactggccggcgatttacaacgtct

SEQ ID NO: 37565 - DNA, 295 bp, Glycine max
gaaaacaaacgacagagatgaatggcctatcatgggctatgcaccgtctctgcccgagactcttagaaatgacatcatgctgaggtatcttggctttactactttattctggacaagacgagcactcaacaaacaggccgaggcataagccatcttatagaatgcttgcttccacacatataaaaaattagttattactgattcacaagatactttcactataaatgcaggtatatacacctcaacaagaagagatgaaacttgctatcgcatggatccaacatgtgtgtgatca

SEQ ID NO: 37566 - DNA, 361 bp, Glycine max
cacaattttaattttattaaaattacttcattctcttggctcattgtcctacctatcctttcaacatccacatcttcgtcaaaaccctcaccgaaaataccatcaccctttatgaggaaacctctgacaccatctacaacgtctaggtcaacatccaacacaaagaatgaatttccccacatcagcaacttctcatcttcactcaaaagcatctcaaggacagccgtaccctttcctactacaacatccacaacgaatcaacccttcaccttgctcttcttctacgtcgtggcatgcacatcttcgttaatactctcactttcaaaaccataaccctatatgtctaaaactctgacaccat

SEQ ID NO: 37567 - DNA, 329 bp, Glycine max
  unsure (1)..(329): unsure at all n locations
accaaaacaaacccactaggatagctgcctttttatacatcccaattctccttcctacaccccttattcttatacctaaataacttactacttactacaaaccaattaataacccaccattttacaatcctacattgtacaagccaccaangtacaaaccaccattttataatccaaaaccacctttttacaatcctaaaccacctctttacaacccaccatatattaatccaccatacaagaaaccaccttatttaaaatacccttcattaaatgacaacacccattccnaaagcaaacaattatgactattatctacttaataaata

SEQ ID NO: 37568 - DNA, 318 bp, Glycine max
gataccagcactgagtctgatcaatgcgcagtgtgtcatcttcttaaactcaaatgaacactgcaaaaaaaaaaagcggacgatctaaaggatccaagctttctacagcatccaagctaacttacacgtgcattatactgtcaacttattttatagcagtacctaaatttaatcaactggccgactgttaacaacgtggcgactcccaaaacaatggccttacacaacataatccttttgccagacatcctaatatcgacaagtggcgtaataaccaacatgcccaaaacgatcgcactttcaaacactaatgcaacc

SEQ ID NO: 37569 - DNA, 232 bp, Glycine max
  unsure (1)..(232): unsure at all n locations
tttcatgtcattaattaaataccgtnacatgttcaaattcacaagattccttaaaacattcataaacatttataatttgtgtatttaatcgcctttttacactctttatcctttaacaactgatatttccccctgctattatcgcatcacctctgcaatttgtgctttcaatattgggtcactttttactacttctctctgttatgtgacttcaaaagaacatctttttttt

SEQ ID NO: 37570 - DNA, 339 bp, Glycine max
  unsure (1)..(339): unsure at all n locations
aaaaatattaactccctctcttttctttttttctacaatatttttcttatcatttccataccattacgcaggctaccaaatcttccctctcctaataaaaactatctattttaagccttcttcttatataaaatgctcacactttangctttcttttgaatcacacaacattctaacctttaaaaccattccttaatatttcctttaaccaacaaaatactacattaatttctaacaatttacatcatactcttaaacagttaaccaacaaactttcttttattctaattaactcgaattccatcacaactacatatttatattcttcatatataacac

SEQ ID NO: 37571 - DNA, 384 bp, Glycine max
  unsure (1)..(384): unsure at all n locations
ttcttcatcaacatagcgtattgcagtgttataaaaatcaanntccttcttttcttccttnctacaatttttgtagcatggcaattccatgcttacgatatgttccctctccgaatgaacactggctattttgcccgtactcctgaggtgaaatgctcaacttggaggctttcttttgaagcacacaacatcttnttcttttagaccattcctgaatagtgcgtttaatcaacaaaggaatacattcattgctaacaatatacatcatactccaaaacatttaaccaacaaacttacttttatgccatagacctctaaatccatcccaaggacacatttgtgttcagtatatattgcaccgtactctctaatattccatactac

SEQ ID NO: 37572 - DNA, 427 bp, Glycine max
tattgggaaggttcatgactttcttgtgagctagaagctacgttatcgttaagagaatatcaccgctcctccctttctttgttgctgcagaatttattggtagcatggccatgccatggcgcatgctaccaaaggttccctctccaaatgaaaactgcctattgttagcgttcttcggaggtaaaatgcgcaacttttatgcttgctgtggaaccacacatcattctatcctttaaaaccattcctgaatagtgctttgaaccaacaaatgactacattaatgtccaacaatttacatcacactctaaaacagttaaccaacaagctttcttttatgctcgtgaacgcgaagttcatctcaactacatatttttattttttcattatataacacctttctttcttatattccattctattaaaaaca

SEQ ID NO: 37573 - DNA, 307 bp, Glycine max
caaatttcttcctcaatcatctcttccccagctgttaccactgtcaaccgtgcctgtgccggcatggttgctccattcactgtcctcaagtccatggcttgcttccccaccataaagaccaacaatgacattacctccattgctagcaacggtggaagagtgcaatgcatgcacgtgtgtccaccactttgcaagaaaaattttgatactctttcctacctgtccgacctttgataatccacaattttcaaaatgaaataaaattaccttctttatgaaagttattgaattccctttcttttaaatt

SEQ ID NO: 37574 - DNA, 327 bp, Glycine max
  unsure (1)..(327): unsure at all n locations
tgnnnaacatcattatttagaattacgtttttancctttacaccggtcatttgcaccttctttaacacccatccttctcaaaactgaactatgcctattcattggtgccaacatctacccatgaaagggcatcacatttgttcgtggtgattctcacgttttcctgtttgcaaactcaaaatgtaagacgtatttccacaatcgcctgaatccttcaaagctcaccttgactgcaatgtacataaagcaacacaaaaaggacattgctcaataatcttttatgaataggatacgtgctgccaaaaagccttactctaagtccatttt

SEQ ID NO: 37575 - DNA, 340 bp, Glycine max
ggagagagcgagcgagcgacccgtttcaaagagaggatttgggattgggaaggcgagggattgcgctgcgtctcttcctcttctctttcgattcatccctcattcataatcttccaatccaacaacctcagcctcacactcacacatacacacatctgaacgcgtatcgtccctcccatggcttcaaagcgcatcctcaatgagctctaggtcttgcataaagacccaccaacttcttgcagcgctggtccattagctgaggacatgttccattggcaagcaacgatgatagggcctgctgataagccttatgctggaggtgtattcctagtcactattc

SEQ ID NO: 37576 - DNA, 413 bp, Glycine max
aaacaacacaaggggatctggcagcagcaaaacacgtacttgagaactaagaagaaggaaatggcttcctcaatgatcttctccccagctgttaccaccgtcaaccgtgcctgtgccggcatggttgctccattcaccggcctcaaatccatggctggcttccccacgaggaagaccaacaatgacattacctccattgctagcaaccgtggaagagtacaatgcatgcaagagtggtcaccaattggcaagaagaagttcgagactctttactacttgccagacctagatgatgcccaactggcaaaggaagtcgaataccttctaaggaaaggatggattccttgcttggaattcgagttggagcactgtttcgtgtaccgtgagcacaacaggtcacctggatactatga

SEQ ID NO: 37577 - DNA, 311 bp, Glycine max
gacatgtgagtttgtcgatcgagataactagaaggagtgggatgaaaatgaaggtccttgttttcttcgttgctacaattttggtagcatggcaatgccatgcgtacgatatgttccctctccgaatgaacactgactatggtgcccgtactcctgatgtgaaatgctcaagttggaggcttgctgttgaagcacagaacatctttgtctttgagaccattcctgattagtgcgttgaaacaacaaaggagtacatccatggtgaacactatagatcggactccaaatcagttaaccaacaagcttacttt

SEQ ID NO: 37578 - DNA, 449 bp, Glycine max
ccggggcacgacccacgcgaagacccacgcaggcgacaccaccaccaaaacaattttcagtacagatggcatgactacgggcgtgctgggctagtagctagcttctagtagcccttatcctcatgcctcacgggcttgctccatactacataccaagtaaagacatcaccagggtgcagcgcctcagtgtacaaaccaccagtgtgcaaaccacgcggcttatatagacataaccacgcgttttaccaagccgaaaccacctggattacacgccaccatataagaggccaccatacactacaccacctcatggaaagtacccttcagtagaggacagcacccatgcctaaagcaagcgatgaggtctattatctacttaataaatatcaagaactgcttcgcgttttctagcattgtgatttacaacttcttagcagtgcatattcttg

SEQ ID NO: 37579 - DNA, 347 bp, Glycine max
cggtgtttttgggggggtgattaaggcatagcggctggtggtgcaagggttcatatactacatcactttgtaagcacaagacggtgaaacacaaaaatgtgtatgaaacgaaagtgtgggtgacatcatggttaaactccaaggaggtcctcgaattcaagcccatcagtattaatcctatttcggtgacggtctagtctttataaggttacataaataaatggcaccacgctgacagttgtactaaaatttattttttataaataaatcgaacgtagcattaaatatgctatatgtatgtattgtgcggaataaatgcagccacgtactatatataatggcacata

SEQ ID NO: 37580 - DNA, 266 bp, Glycine max
ggtttttgctgagatgattaggtcataggggcgggtggtactacggctcatatccctcatccttatgcctcaaggacttgctacttactacaaaccaattaataaatcaccagtgtacaagcctccagtgtacaaaccaccatcgtacaaaccaccgccttataaatcaaaaccacctcggtgtacgactagactacatcatgttacacaaccaaatgataacacgccttacactagactacactttatttattacactccactcg

SEQ ID NO: 37581 - DNA, 345 bp, Glycine max
tcgacccacggcgtacgcccacgcactcgtacggctagacgacgactattgaatgggagcttcaataatgtgagcattgagggggttcatagaatcccaaaacaagccctccatctagcagtccactaccgaactcattacgagcgctaagcttgccgcggaggaggctcacacagctctgcagagcgacagaaacaaagttgacatggccaatgttgctgactctaacggccatcttctagactcggtggggaagcatagaaaacttgatgacaaacaacgcatactgcaatatgctgacaacgctgctgattatctgcataattaccagggtgataatacacc

SEQ ID NO: 37582 - DNA, 222 bp, Glycine max
atcatatccatactatttctcatactatcaaaggttcccttttaaaatgaaaactctctaatttcagccttcttaacacgtaaaatgctcaatttttaagcttgctttataagcacacaccatcctatcctttaaaaccattcctaaaaactgcttttaaccaacaaaagactacattaattacgaacaatttacatcatactctaaaacatttaaccaaca

SEQ ID NO: 37583 - DNA, 419 bp, Glycine max
gacggtgcaagagtttcttgtgagctatgcgctggtttatcgtgaggagaatatgaagttgtttgccttctttgatgctgccacagttttggtagcatggccatgccatggcgcaggctaccaaaggttcccttttcgaatgaaaactgtctatggtgagcgttcttaggaggtaaaatgcgcaagttttaggcttgctgtggaagcacacaccatccgagcctttaaaaccattcctgaagagtgcgttgaaccaacataggactacattaatggcgaacaatttacatcagactctataacagttaaccaacaagcctttcttttatgctagtgaacgcgaagtccatcacaacgacatatttatattcggcttagataccaccttactctctaatattccatacttataaaaacat

SEQ ID NO: 37584 - DNA, 215 bp, Glycine max
atccgtatgcggtgcacatgtgattttgatgagcgatatgcctagaaacagagtgatgaaattcaacgtcctcgttttcttcgttgctactactgtggtagcatggcacttccatgcgtactatatgttccctctacgaatgaacactgactatggtgcccgtactgcacacgtgaaatgctcaagttggacgctcgctgtggtagcacacatca

SEQ ID NO: 37585 - DNA, 430 bp, Glycine max
acgaaaacgaacactcatagccgcgaatcgatctgcatgatgctcatgtttcgctctatcgcgtctaaatccaaaaccagcaacactgctcttcttcttcatcgtgctatcgctacatcccaatcccttcacagcaacattaccaacctacaccctcccaatgctaataattcttatcattcattttctcgccgtcatgctttgtcattctctaagccacgcgccaattctagggctccgacttctcagagcttctgcaccgcgtcctccgacagggactcaatcgagtacgacgtcgtcatcgtcggcgcaggtcccgccggcttatcggcggcgatacggctcaagcaaatgtgccgcgaacgaaacgccgatttgtccgtctgtgtcctcgagaaaggtgcctaagtcggtgctcacattctttctg

SEQ ID NO: 37586 - DNA, 334 bp, Glycine max
gtccggaattcgacgggacgagtcagactcgatacacgctgtcaagagccttcctcccctgtgcctgtgcctacaagaacatggaaaggaaagggctctttaccagaagctgtagaacttgtgtctgatattgagaaattgaagggtagcaatgattcttttgtggaaactggtccaagttcatttgctggtgctagtcatccctcagaacctgttgatactgatcttatgagaacagtttttgtaccaataggtcaaactaaatctgaagctggatgcttaatgaagagcgtgtccttgaacggtactttcttagaagatctttcaattcgtg

SEQ ID NO: 37587 - DNA, 469 bp, Glycine max
  unsure (1)..(469): unsure at all n locations
cgcctgcaggtaccggtccggattcccggggttcatttctacacatccctagctctgtcgttccgtcgttgacgatggcgtttcgggtgcgaagccctgacctccgctctctctttcttctctctctcttgtccatcgcttccgccaatgtcttcttcgaagagcgtttcgatgacgggtggcaaaatcgatgggtttactctgatcggatagcagcagctaccgtcattcctgtacggaaccacaactatgagcaaatggaaacaggtccctcgtatgggtctcttagcatcctcatgctgcattctcattgctctcctactcctcactcccaaaggtgttatgggtgccaccttcacattctttaacaaatgcgactacacagtgtggcctgggattctcgcanatgccggtagcccaccactcgacagcaccggttttgagctccccaaggacacttctcgcgcct

SEQ ID NO: 37588 - DNA, 426 bp, Glycine max
cccacgcgtccgtgcaacgttctactcgcggaagcgccaaatcccaacgataccccaaaccccactcacccttcttctcccatatcctaatccccaaattccctcattcaactttcccctcaccaccttcttccacttcctgcaagctcagctagggtttcctcttctcttaaccgctccatgtcgaagaggaagttcggattcgaaggtttcggcataaaccgccaatccacctacagcttcgagcgaccccaggcccctcagcgactctacatccctccctccgcgcgtcacggccacgaccactacgaagacaccgacatcgacaacatcgactacgacgacaacaacagcaacaacaacaacaacaaggacgacgacgacgattacgggagcaataataacaacggtggcggcaacgacgaa

SEQ ID NO: 37589 - DNA, 372 bp, Glycine max
caacaaccctggtctcaattttctccccctctctctctttctctcttgtggtaacatacacacacacacacacacatatctagctattttggtcccattttcactataactctactaaattaacatggacaaccttcaaaaatgccaagcaaactacacagcactcacacctttaacgtttttgatgagggctgctgcatgctatgcaaacagaacctcagtgatacatgaaggaacccgtttcacttgggcacagacttatgagcgttgtcgccgtctcgccttctccctccgtgcccttaacattgctaggaatgatgttgtatcagtgctggcccctaacatcccagcaatgtatgagatgcatttcgc

SEQ ID NO: 37590 - DNA, 423 bp, Glycine max
cggacgcgtgggcggacgcgtgggcggacgcgtgggcggacgcgtgggcggacgcgtgggcgattctcgccatgccgaaagccaaatccgacgccaaagccgccgatagccggttgaagcgcaagggcgctggtgctggaaggaagcaatcgaagaaagctgctaaggatcctaacaagccaaagagacctccaagcgctttcttcgttttcatgtccgagttcagagagcagtttaagaaggagcatcctaacaacaaatccgtcgctgttgtcggtaaagctggtggtgacaaatggaaatcgctgtctgatgcttttgcgttcatttaatgtttcaggaaaaggcccccttcgttgccacggccgaaaagaagaaacaagagtatgagaaaactattttggcttacaataagaaattgga

SEQ ID NO: 37591 - DNA, 435 bp, Glycine max
gtgaatccaaggtcagcctaaaaggtagctataggccaggttcatatccatcacttggaaactgatttgacagatatgcagtccaatttgaattgggagaccaatctccccccttacgtcccagcggctaccgtcaaaggcctgcaccaccatggaggtcggcctcaggtgtaacgcgttgaaaggcagtttgtccaatgtgcttttgggcatgacattcagcgacgatccgttgtcgataagaatcttggccacgatgtggtccaaacacttgatggacacatgtaaggccctattatgcccctggccctcgatgggtatctcctcatcggcgaaggtaaggtaattgttggcagtaatattgttgatgatgccctcgaagctctccacagagatgtcttgggccacatgggcttcattcaagattttaccaat

SEQ ID NO: 37592 - DNA, 425 bp, Glycine max
  unsure (1)..(425): unsure at all n locations
agaaaatctccacccaatacatgcctgcagccacctccaccgccgccaccaccaattacaagtgtaggaagaaattctccatccaacacatgcctgccgccgccaccaccaccgccgccaccgccaattccaactccgcctttggcaagattagctaacacccaaaaggcccctaccattgttgaactatttcactccttaaagaataaggatgggaagatagactcaaaaggatcagtgaatcatcagagaccagtagttattagtgcacacagtagcattgttggagaaattcagaaccgttcagctcatcttctagcaataagggcagacattgaaacaaaaggagaattcattaatgaccttattaaaaaagtagtagatgcagccttcacggatatngaagaggtcctaaaagtttgtga

SEQ ID NO: 37593 - DNA, 412 bp, Glycine max
  unsure (1)..(412): unsure at all n locations
cttgatttaccaaatttctgtgtactagatatgtatagtgttattgatactgataactctaaagtttgaattgatttttgcaaatctctgttcacttctcttcaagcaaaaatccattggcataaatgtcaattataacacgcagaggcatccgttacatgccaagactagatgcagcaaaagtatctgctgctttgctagaaaaaggccaaaatcgtgtcatagatgcttcacttacacttattcgagaaagagcaaagcttaagggagaacttgtgcgtgctttgggaggtgctaaagcaacttcaactcttcttggagttcctttgggacataattcatcgttccttcaagggcctgcatttgcacctnctcgcattagggaggccatttggtgtggtagcaccaactc

SEQ ID NO: 37594 - DNA, 481 bp, Glycine max
ctgcatgtaccgttccggaattgacggatccactccagcgcgtccgcatggaagcaagaccattggaggaaggtcttgctgaggccattgatgatggcaagattggaccaagggatgaccccaaggttcgttccaagatcttgtctgaagagttcggttgggacaaggatcttgccaagaaaatctggtgctttggccctgagacccttggacccaacatggtggttgatatgtgcaagggagtccagtatttgaatgaaatcaaggattctgtggttgctggattccagtgggcatcaaaagaaggtgctttggctgaagaaaacatgagagccatctgctttgaagtatgtgatgttgtgctgcacgctgatgctatccacagaggaggtggtcaaatcattcctactgccaggagagtcttctatgcttcccagattactgccaaacccaggcttcttgagcctgtctacctggttga

SEQ ID NO: 37595 - DNA, 398 bp, Glycine max
ggaaattttgagggaagggagcagaataagtcttttacattttgacgactcatgttctgcttggtctgtattgcaaatataaaattacctaaaaaattatgttaatttatctgctgtattgtctttaatgattagtataaattgatataggttgtatattttggtcccttttacattttctgatctttgtatttccttgtgtagtttacaatgcaagaaggatctgtggagggtattgcatggcgggcaagctcgctcacctttgagaatgaaatatatccactcaatgagtcgtgggttgtgtctggactgggtcatgattataaaactgatactcagcccattaagacagcttcggtgctacactacgatgggaaaatgaaaccttggcttgatct

SEQ ID NO: 37596 - DNA, 461 bp, Glycine max
accggtccggaattgccgggtcgtacccacgcgtgacgcacacgcgtgggggaatattaaactgacggaatcttagtacttcaaagtgtggtcataatagattctctgcctagtggatctggtattgatacacggaagccactagtgctgcaacttcacaagacggaagatgggacacaggagtatgctgagtttcttcacataccaagaacgagattcaccgactttgctgctgcgaggaaggaaatatcggatgaaacagatcgtataactgggaagacaaagcagatttctaatattccaattcacctcagcatttattctccaaatgttgtgaacttaaccctcatagatcttcctgggttaacaaaggttgcagtagagggacaacaggagagtattgttcaagatattgaaaatatggtccgttcttatgttgagaagccaaactgcattatctt

SEQ ID NO: 37597 - DNA, 429 bp, Glycine max
  unsure (1)..(429): unsure at all n locations
aacgatcatagcagcttctttgtgaaggtgtacatggaagggattccaatcggaaggaagctcaatatactagctcatggaggctactatgagttagtcaggactcttgaacacatgtttgacactaccattctttggggaacagaaatgaatggagtgcaaccagagagatgccatgtgctaacttatgaagatgaagaaggggatttggtcatggttggagatgtcccttgggagatgttcttatcgacggtgaagaggttgaagatcacaagggtagacacattcgggtgttaagtgaagaacatgacactgcctcttccttcaccggtgattntagattttgtcctctagagtgagactctaatgaggtcgctgatcagaaaatttagaaaaatcttagtgaagtatatgcacagataggtgatg

SEQ ID NO: 37598 - DNA, 403 bp, Glycine max
cactcttttattattattattattattattattattattattattattattattattttgggtttgactactttcatgatgccagtttcaaccatgtgaagttgttgtgcgtgctgtgtttgttgttgtgtactgttttggacctttataaccaaccatgaatctcagcaacggcaagggatccacttttagttctcctctgaaagccggagattctgtctctgaccagtttccggcgggtctccgtgtgctcgtggtggatgatgactccactcgcctcatgatccttgagaggatgctccgtgcttgtgtctattaagtgactcaatgccagctagctgaggttgcattgtctctctagagagagaacaataacgggtttgatatcgttttaagcgatgtg

SEQ ID NO: 37599 - DNA, 272 bp, Glycine max
gaattcccgggtcgacccatcgcgtccgcccacgcgtccgcccacgcgttcgggccgtcctccttgtaccagacggatccctctggcagcttctcggcgtggaaggcgaacgccacctggaggaactcaaattcgattagggagttcctcgagaagaactataaggacacctcttgccaggagactgtcaagtttgctattctcgcattgcttgaagttttggtaagcggaggctagaacattttaattttcttttaatttcttatgagctt

SEQ ID NO: 37600 - DNA, 355 bp, Glycine max
gtgttactacgttagtctatgaacagtcacccccggtagacttaaaatttccaagaccctcaaatcaaactcttctattctctcatcaatcaatcaatccagttccctctcggataggaatgggaatatatctcagcacttcaaatactgaaaagttttctgaagatggtgaaaatgactgtcttagatatggtttatcatccatgcaagggtggcgtgcaacaatggaagatgctcatgcttcatatactgatctggatgagtccacttcattttttggtgtctatgattgccattgatgtaaagttgtttccaaattttttttccaaatttctttatttaccttttgttcaaa

SEQ ID NO: 37601 - DNA, 301 bp, Glycine max
aaatgatacagggtcatctcaaacgagtggcagtcattaccaaagggtgcttgttgttggattggtacagatcacacattctctacacatcttatgaccgctactgggaatttcaattcaaaaaatattctatgacaaggtggatttggtgttgtctacaaaggatgccttgcaaataaaatgttggtggcagtaaagaggctgaaagatcccaattacactggagaagttcagtttcaaacagaaattgagatgaatggcttggctgtgcattggaacctcttgcgtctttatggatttt

SEQ ID NO: 37602 - DNA, 307 bp, Glycine max
cccacgcgtgcgtttacacgttcgtacactcgttctagttcctggagtttccagcggtggtgactgtaacagccttagtcaagacctatttccttggcggagcaatggacagaggatcgacgattgactggaagttcataaagcacacaggcatacgaatatacttcgaagataaggcggtgccgacactcgtcggtaagttgaatggtccaacttcacagagagttaagtcacaccgttcagttatacagggatatcattcaatgtgcgaacgaaaagctcattacagggtcctagattctgtcaa

SEQ ID NO: 37603 - DNA, 299 bp, Glycine max
gggatccgcaaagtcaaagtcggaacctccttcgcaatagacgttctggaagcctcgttcgctccctcgaacggtgcgtttcgaaaagacctaagtgcccccgtcatgaaacccatgctaaagttcctcaacagaacaaaatcctttttcttcttagacgtctaccctttcttctcttggtccgctgaccccttgaatataaacctcgattacgctttgtttcagtccaagaatttaacggtaacggatccgggtacgggtctggtttacaccaaccatcttgatcaaatgggggatgc

SEQ ID NO: 37604 - DNA, 347 bp, Glycine max
  unsure (1)..(347): unsure at all n locations
cccacgcgtccgaatttaccagctatacttgttccttttgaaggttagaagtgctacaatgcanacaatggcagctactcaggaagatgtgaagcttttgggtattgtgggaagcccatttgtgtgcagggtccagattgcccttaagttgaagggagttgaatacaaatttttggaagaaaatttgtgcaacaagagtgatttgcttctcaaatacaaccctgttcacaagaaggttccagtgtatgttcacaatgagcaggccataccagagtctcttgtgattgatgaatacattgatgagacatggaagaacaaccccaatcttaccttctgatccttaccaa

SEQ ID NO: 37605 - DNA, 402 bp, Glycine max
cggtccggaattcccgggacgacccaggcagacgccaacacgtccggaagaggaagattgaggatctaactctcgaagaaaaccccgcggagaagctcctggaaccgtccacaaaggagcagctccactctctcgtaacccaggccgtggatatgtttcccgaattcgtcgatagcgagcgccggctcgctgacgaggaccctgcgcacaggaaaatcttcgtccatggccttggctgggacgccactgccgatactctaaccgccgtgttcgggaaatacggcgagatcgaggattgcaaggccgtcaccgacaagggctccgggaaatcaaagggttacgcctttatcctcttcaagcacaggaacgatgctcgcaaggcgctgaaacacccccaaaaga

SEQ ID NO: 37606 - DNA, 362 bp, Glycine max
cccacgcgtccgcccacgcgtccgcccacgcgtccgttttaggcagacattactggcaaatggtgtcaatttttctgggttacagatggcttggcctccgagtattttatggtgagtttaaatggtgctttgactatattatgcatttgcttttgtgctaacatatgttgcaggtgaaaggctggatcagtcatatagggctaaaaatctttactcagaatcatagattttgcttctcctagtttactttctgaaatatgtgcccaaagaaatttgcttgactgtactttaatttcttgacttttatatgattggtttaggataattacttgttctcctccatctccgcagttggggcacaa

SEQ ID NO: 37607 - DNA, 254 bp, Glycine max
ctttggcaaaaccgcacctacgatcgcttatagcttcatctcccaaaacagttttgtcaaggaccaaacttccctttccctgaggacttccctgaataccccacaaagtttcagttcataagctaccttgaaagctatgcaaagcacttcaacatttccccacagttcaatgaaacagtgcagtctgcaaagtatgatgagacctttggcctctggagggtcaaaaccatcacgaagatcaagaagttaggaga

SEQ ID NO: 37608 - DNA, 218 bp, Glycine max
gctttgcaaccttcctcttctccaaagcttttattgctaggagcagcacttaacagattgggagtatggtcaattggaacaggaattattcttcctaagacatttaatttggtgttgaagccccggctttgatgcttaaaggtgttgaaaaacttgcccattccctcaaaattaccattggcccttaagggccttatgtggttattggaccaaagttt

SEQ ID NO: 37609 - DNA, 263 bp, Glycine max
cggacgcgtgggcggacgcgtgggcggacgcgtgggctttgaggggcttgagcatccctgtgggtaaaaactttgccatgacatggaaaatggggtgataggttgagtggtctcatatctgatttatcattttgaaactttggtatggtcttttttctttgctacaattcttgtagggcgtgtgagggaaaagagatgtgctagaattatgctcgtccttttccaaattaacaaggccaaggcacaaatggcgtatggggttg

SEQ ID NO: 37610 - DNA, 346 bp, Glycine max
atctgttccaccccaccaacaaagtatggttacttgttagcagatattatcaagcttatggaggtgaggttgatgaaagagtaggcatccagataagagtttttgacactggaactggtccatttcaacatgtgttggatcagatcttagctcgctctttgaaggagaatcttttgcctgatgttaaccgaaagggggatattgtcaattcattggcaaagccgaagtcaaaagctgtgctgatgacttccttgagctctgggtattctgacatggtgagagacatgtttatggaacatactactgtgacaggagaagttgttggcatttaccagccaagccatga

SEQ ID NO: 37611 - DNA, 181 bp, Glycine max
gctccgtaccagtttcactgcataaattttagagaaaactctgcaaacatgttggtttagcatgacctccttacaggtgatgagcttctctcggactccttccgttacaatgaaattgagaatggaatgctgtgggaagttgatggtaagtgggttgtgaagggagcagttgatgttgaca

SEQ ID NO: 37612 - DNA, 364 bp, Glycine max
ctcacactacttactctctttctgtctctaaagggtatgctttgatctgttgcaacttcggagagatgtccattctataacgcagaggcatctgttacatgccaagactagatgcaccaaaagtatctgatgctacgctagagaaaggccaaaatcgagtcatagatgctgtactcacacttagtcgagaaagatcaaagcctaagggatatcttgagcgtgcatagggaggtgctaaagctacttctactgatcgtgaaaggcctatgggacctaatcgatagatccattaatggccggcatctgcacattcacacattaagggaggcactaggcgatgttgcacatactttgcaactgaaaa

SEQ ID NO: 37613 - DNA, 381 bp, Glycine max
ctcacgcgttcggcaaaaactggcatggcagtggatgaacccgtggtacccacaatatgcgtaaacaggataaactcaattataacactacttgctgtatcttcaggttcaacccaactaagtgtggtgtgaggaatatgtgaaaagtaacatatatgtgaaagagagaggaagagatgtctacgacgctagatcatcctatacgacagaaaaggctaacatatgtcgcagtggtgcatcttaagaaacatggcatgcgctttgaaattgcttgatacgctaacaccgtcctctcttggcattctggcgtggaaaaagatcggcatgaagcgctgcatgtccacactgcttataccaatgtttgcaaaggggatcttggca

SEQ ID NO: 37614 - DNA, 433 bp, Glycine max
ccggcccggaattcccgggtcgacccacgcgtgcgcccacgcgtccgcccacgcgtccggaggttaagaacaataacataaaccattcttcaccgctcctgtctcccaccatagtaatgggtcagagcctaagttgcagtggcaactatgaccacggtctcttcaccggcgggcagcacggtgaccttgaaattgtcacaactgtgttggactccgacccctctgtcttgcaccaaaccactctctacgatcgccactctcctgttcatattggcgctaccaatgaccagatcgagattctgtctaagctcttagatggatctctcaacccagatgttttaaatcgccacaaacagactccgcttatgctggcagcaatgcatgggaacatcgcgtgtgttgagaagcttcttcaagccggagctaatgtttt

SEQ ID NO: 37615 - DNA, 463 bp, Glycine max
gaattcccgggtcgacccactcgtcgcacgcacgcgtccgctcgtattcggacgcgttgtcggactcgggtcgaattaccaagcatgtggcaactggattactctaccgagtcaaacccctctttctctgcaacgctgctcataatatccaactgacctatcattagctctcctctttaatacatactggactctcttcgatttgagggaacagtacaagagtctgagcatctagtaacccaactgcacaggtagtctccaaataatggagcctcatgatgagactggatgccaggctcctgaacgccccattctttgcattaataattgtggcttctttggaagagcagctaccatgaacatgtgttccaagtgttacaaggacatgctgttgaagcatgagcaggacaaatttgcagcatcatccgttgaaaacattgtgaatggccaattccaatggcaa

SEQ ID NO: 37616 - DNA, 336 bp, Glycine max
cggatcgaccgacgcgtccgctcaaacgctcgactagatcatccagctaattgtgactgatggagcactggattctgcggctgacgatgcagatgttcaagtaaacttcgaccggcaagaccattgatcgtgaagtggaatactatgacaccatagacagacgtagaagctaagattcaacacaatgaaggatgcctcacctggccagcataaaactagactactatgaaaacaacatgaggatggtcagcccctaatcgattaccgcgtccataaggcatcaaccctacatattgtgctatggctgactggtggtatgcaaatatcatgtgtaga

SEQ ID NO: 37617 - DNA, 418 bp, Glycine max
tcgaccgacgcgatccacgcacgcgtacatccacgcatacgatcttgtctgtatgacgatgttatatctgaatacacgtaaaaaggcacaagttcaaattgcttataatgctatacttcgctacttgccactggtttttgtccatcacagatggcttgtatccaaatggatacttcgaggaatgtccagaaccatcagaatctaaaggttcgacagatactacacccaatggcattcacattgtacaatctcaggaatggctgcatacatacaatcattggctaatcaaggtgacatggcactcgatgtgcctcatggtacctatgctgataggcttgccaccgaagcttccattaagcagaagattccaattgcgaacggcatgttctactcattaacattcattgcctcacgcact

SEQ ID NO: 37618 - DNA, 373 bp, Glycine max
cccggaattcccgggtcgacccacgcgtggcgcccacgcgtccggtgaaggccattaggagaaagaccaccggaactggaaggatgaggtgcttgcgtgacgtgcctcgcagattcaagagcggcttcagagagggtaccgaagctgcacccaggaagagaggagctgctgcctctgcctaagctttgaatgaatgacagcaatttttgctgggtcagtgaattataggagttaatgtttctgtgttggtgccaaactctttggaacacattttctttctgtcgttttaatttcatttaatatgtagtggctttgtatttcgaaatgaggattgtaaggaattttggtttttcaaagggaagttttgacatcc

SEQ ID NO: 37619 - DNA, 269 bp, Glycine max
acccacgcgtgcacccctcctcccactcctccgagcctaaatttatatgaacttttgcactgaaaatctcactgccaccggtcttagaccatatgggccaaggctcaatactatcaacattagctcagtaaagcattcgcctgttacagactccgatatgtcttgcatatcttgctagccatgacccaactgtgatccatatagatcttaaatgtgactataatcatattaacggaaaccaatgggaacatgaaattggagatcttggg

SEQ ID NO: 37620 - DNA, 277 bp, Glycine max
cccacgcgtccgagcaaatagaaatatcaactttgtgactgaaatgttcacttctggcagccttagacagtataggcaaaagcacaagagagttaacattagggcagtgaagcattggtgtagacagatcctgagaaggcttctctatcttcatagccatgacccacctgtgatccatagagatcttaaatggggatatatttttatcaatggaaaccaagggggagttaagattggggatcttggggtggcagcaattctccgcaagttccatgct

SEQ ID NO: 37621 - DNA, 321 bp, Glycine max
  unsure (1)..(321): unsure at all n locations
cccacgcgtccggtggcagaagagtatttgtaacggctaaagcccatatagatgccagcggtaacgtaaatttactgagtggaaaaaaccgttttctgagaaaggattattttcttaccctgaaaagggatcattcatcttgtaagaagagtttgctgtgactatcgatatagatctaangagggtgcaagagagaactgaatntgctgtgatgggcactcgtagatatgcttttggaagagctgatgaagccactcatccagactccatgagggccactttggcttgaaattgttctactttcatctttgtctttgctgg

SEQ ID NO: 37622 - DNA, 388 bp, Glycine max
aggcatttgagatattctgcaataaaactgttggtggtagttccagtgctgaacgtttagctacattctgtgacaatatccttaagaaaggtggaagtgagaagctaagtgatgaagcaattgaagatacccttgagaaggtagtcaagttgcttgcatatatcagtgataaggatctctttgcagaattttacaggaagaagcttgcccgaagattactttttgacaggagtgccaatgatgaccatgaaaagtgtattttgacaaagttaaagcagcagtgtggtggccagttcacatcaaagatggaggggatggtggtagacttgacattggctagggataatcagctgaaatttgaggagtatcttcgtgataactcacatgt

SEQ ID NO: 37623 - DNA, 375 bp, Glycine max
cggccggagccactcgtccgcccgcgcgtccggttccagagagcacgtctaagaactgtgaacaacagggtaactgcaggccagctagcaaaacagaagacgcagcgatggagaggatgaagagggtgcttctgctgcttctggccttcactgttcttctcatgttgccagaagcttctgctacaaagtttactgttggaaacaaccagttttggaaccccaatattaactacactgagtgggctaaaggcaaacatttctaccttggtgactggctctattttgtgtacaataggaaccaagcgagcgtgttggaagtgaacaagacagattatgaaacatgtaactctgatcatccactcacaaattggacta

SEQ ID NO: 37624 - DNA, 387 bp, Glycine max
cgactccacgcgtccgcttcattctcaagggattcttcattgggatctcaaatcagaaaatctgcttttgggggaagatatgtgtgtaaaagtagcagattttggtatctcatgcttagaatctcagtgtggcagtgcaaaaggattcaccggaacataccgttggatggcgcccgaaatgatcaaagaaaagcatcataccaaaaaagtagatgtgtatagttttggcatagttctatgggagcttttgacaggaaagactccatttgacaatatgacaccagaacaggcagcatatgcagtttcgcacaaggaacagtttccgtttgcattattgtttacacgaagatggaaacatgggcatgcataattatctataatgcaaga

SEQ ID NO: 37625 - DNA, 293 bp, Glycine max
  unsure (1)..(293): unsure at all n locations
gcgagcgtccgacacgtgggtgctattttccaagngctgcgtcttcaaagaaaggagatgggagaatcgaaagacactgaggcttacgaggaagagctcatcgactacgaagaggaagaagaaaaagctcccgattctgctaaacccgttgctgaatctggcaagaagggttatgttggcatccatagttcgggatttcgagacttcctgttgaaaccagagcttcttcgagccattgtggattcaggatttgagcatccttcagaaggtaatcactactagcatattaaaat

SEQ ID NO: 37626 - DNA, 278 bp, Glycine max
aggcttgtagtttcgttgtcgtggatccattcagatcgcatgccaggcagaatcgagagctggtgttcaaggaggaccgacacgagtacgcgcaggtgctccggatgctgggaaacaggcggggccaggcgatgtgcatcgacgggacgaacaggctctgccacatccgcgggaagatgcacaagaaggtgtggaacgccgtcggagacatcatcctggtagggactcaagggactaccaggacgacaaggctgacgtcatcctcaagtacatgcccg

SEQ ID NO: 37627 - DNA, 302 bp, Glycine max
  unsure (1)..(302): unsure at all n locations
tcgtccgaccgctgacgctttaacttctagcttgcataaattatctgctaaattactttagcactcgctgagttttctgcaactcaacttggtgatgtctttctttgtaaggaagtggtatccagaaaagttttggttgatcagggtcataggcaagtggttgaacttgaccaagcagccattttggaaatttctttggtggtccgggactatatcgattaatgttttggtagatcaaaacaggagaagaccactctatgaagttcaagcanaccaaggctggattcatgaaaaaaatttga

SEQ ID NO: 37628 - DNA, 400 bp, Glycine max
  unsure (1)..(400): unsure at all n locations
gtggtactgttaccatgtggaagccaaccagtgcttctcctcttgtcaagatgctatgtcatcaggggcctgtctcagcactggcatttcattcaaatggcctcttgatggccactgccgggaaagataaaaaaattaagctttgggacttgaggaaatttgaggttcttcaaaccttaccaggtcatgcaaatactctggattttagtcaaaaaggcttgcttgcttgcggtaatggttcattgatacagattctgcgtgatgtttctggtacacaaaattattccaagtatatgactcattccatggtgaaaggttaccagataggaaaattggtatttcggccatatgaagatgttctaggcatanggcattccatgggctggtctagtattcttac

SEQ ID NO: 37629 - DNA, 319 bp, Glycine max
aatcctcaccacgctcccgcaacaccgactcctgggacgagcccttctcgccggcggcggcgaagctccgactcatgtgcagctactgaggccatatcgtcccccgcccccacgacaagtgcctatgttacatctgctgcgactcacgcatcatcgcctacgaaccccccacctcactgccggacctgtccacgcgcctatcataaacattactgaacggaagacccttcacgctccagtaccatgtccccaaccaggacctctattccctcatatgcgtcaccaccgacgaagacctccagaacatgatcgactcgta

SEQ ID NO: 37630 - DNA, 413 bp, Glycine max
ctatcgtaatcgatcatactaaccaccggctcttatttaaatgtgcgggagcatgaccgctttgaaatcatttccaacgaccatgggaacagaaccacgccgtcttacgtctgattcactgtcaccgagcgtcttatcagtgatgcagcctagaatcaagtctacatgaaccccatcaacaccatcttctatgccaataggatgattggtcgtagattcagtgattcctctgatcatagtgatatcaaattgtagcctttcaaggtcattcctgttgctgctgacaatccaatgatcgtggataactacaatgatgtaaagaagctatttgtcgcagaagaaatctctttcatgctgctcatcaagattcgtgagattgcttaagcttacctatgcttcacaattaagaatgc

SEQ ID NO: 37631 - DNA, 382 bp, Glycine max
ccggctggagccactcgtacgtcagaactgatctatttcccttctccttcttacttctgtcgttctctctgcggcaaatcgaaaaactcaccaaatcgcggggccaaattgcaatttctcgagcgaactttgcgagttctagggttcccccactgccatggaccaggccgaattaacctccgaacaggttctgaggagggacatcccatgcacaaagatcccatattctggcgagaaaatataaacaactttgaagaaaatgatttccagatcctaagggtcctaataacaattttggacacgtccaatgatccaaggactctggctgttgcttgctatgacctttcacagtttatccagtgccattctgctggacggatca

SEQ ID NO: 37632 - DNA, 348 bp, Glycine max
atacacatacaacatatttcgctacattaaaggctatgatcaactctctagcgcatgcatttcaccttaggatggcattcatctcctatatgatacatttacgcatataatcccatcaaaggctctgatccttattactcgttccttactcccaataaagccccttcagctggaacgtaataagagtaatctactggccctgctcacacacatatacaaacaccttaacactagagacacccagacaccaacatcgtaacaatgcactctgaaaaattatcattgactacagcaccatcccacaacattacttaacctacatcccatactatgaatctacaattatca

SEQ ID NO: 37633 - DNA, 376 bp, Glycine max
attcccgggtggacgcacgcgtacgcgggcgcgtgggcggacgcgtgggcggactcttggggctccgtaccagtttcactgcatgaattttatagaaaactgtgcggacatgttggtttatcaggacctccttacaggtgatgagcttctctcggactccttccgttacaatgaaattgagaatggaatgctgtgggaagttgaggggaagtgggttgttaagggagcagttgatgttgacattggtgcaaacccttctgcttacggtggaaaagatgagggagtcgattacgcagcttgtaatgttgttgacattgttgatacattcaaacgttcagaaccaccccgcttttgataaaaaacagtttgttacctt

SEQ ID NO: 37634 - DNA, 138 bp, Glycine max
acgcgtcgggccacgcgtccgtgcagattgagtttgctaagtacaagagcatctcttctcggtttgtagtattgcttaaggagcacggattcacgggctctttccgtggctggatgcctaccttgctagcttacagtg

SEQ ID NO: 37635 - DNA, 263 bp, Glycine max
cccacgcgtacgcactggtgaggcttaagtctatggtgtcgaagatgaataccagctggaggatctggagattgttgcagcaaattacttgttgaaagtgggggtgtctaattttaggaatgcttgggaaagcttaggccctgattttgaccgagtggatgagtatggccttggtcctaaacagagcttggctgaagctgtaaacactgttatcaacctacttggcttgaagccttgtaagggcacataggaggttccaccca

SEQ ID NO: 37636 - DNA, 382 bp, Glycine max
gtcggtaccgttccggaattcccgggtcgactcagccttcggccacgcgtccgcccacgcgtccgtatcagcagtcgttacagagactccatagcccgaaaatgcctttcaagaggtacgttgagattggaagggttgctcagatcaactatggcaaagagtatgggaggctcgtggttattgtcgatgtcattgaccagaatagggctcttgttgatgctcctgacatggtgaggtcccaagtgaacttcaagaggctatcactcactgacatcaagatcgatattaagaggatccccaagaagaaggatctcattcaagccatggaggctgctgatgttaagaacagatgggagaagagttcttggggcagaaaaactga

SEQ ID NO: 37637 - DNA, 372 bp, Glycine max
  unsure (1)..(372): unsure at all n locations
cggaattcccgggtcgacttacgcgtcgggaaatgcattcaaagataccgagattatggatttaaacacaaaagcaattaatacaagactaagcgatttgaagattgaggggatgcaggaactggaagcagtgacaagtgagattgttaggttgattgaaacagcaacagtgcctattttggcagttgatttttatgttccacccattgaccagcaaaaatatctcaagtcccaaatatcatcttgggagaagttctcaaggtagtgtccttgatatattgcccaatacaactaaggagacactactagatcattgggtgtgcagtcaggaattgctgangcacttttggtcttcatatccaattacaacac

SEQ ID NO: 37638 - DNA, 383 bp, Glycine max
ccgttccggaattcccaggtcgacccacgcgttcggccaacgcgtgggttagatttggtttgcctacaatgtgaaggcacaagcatttaagactgccattgaagccgcttgtatgcttctgaggattgatgatatagtgagtgggatcaagaagaagcaagcccctggagctgctccttcaaaacccaaggttgagaccgaggcagatgctgacagtgagcaaatccttcctgactgagaatctcggttcaacagacattgttttttggtagagttgatgatgtgcaaggttctttatcttccttaaatcttatcactattcttaggagttttgagtcctttattgggatgctgttttttgtgccttctctactgtttgcaag

SEQ ID NO: 37639 - DNA, 286 bp, Glycine max
accgttccggaattcccgggtcgatcatcgctgaagcgttcagagggcacccggcaacacctaaaccaccaccgcctctcctacctgcgggagccatggccgccaccgactcctccgctgcttcgtcacgccagctttcgcagagggagacggacatccagatgatgctcgccagcgacgttcacctcggcaccaaaaactgcgactttcagatggaacgctacgtcttcaagcgccgcaccgatggtatttacataattaaccttggaaagacatgggagaagct

SEQ ID NO: 37640 - DNA, 358 bp, Glycine max
ttcccgggtcgacttaggcgtcggcccacgcgtccgcggacgcgtgggtacacataaacacactccaagcgctcgggagcaacctacgctgtcttcgccaccgcgcgatcgccgtcgatggagtctctcttcgactcgatcaacgtgcgcgaccttctttcggcgcacgatctctcggaccctaactcccctctctcggcgccggatctccgtctcctgatccagcgcctggagtcgcactccctgcaaatccgctctcaggtgcagtcctacctcgtctcgcaccgcgaggatttcgcgcgcctcttttccctctgcaacgacgctggttcgcagacgcgcgaggtctccgacgacg

SEQ ID NO: 37641 - DNA, 344 bp, Glycine max
  unsure (1)..(344): unsure at all n locations
attccccggtcgacccacgcgnncggccaattcgtccgcccacgcgtnctgaaagatcttatccaattgaaatttagaaatgactgggataaacttaagaattcaattattgaaattgaataagtaaacaatttaattggattggtcgaatggtatcaaaaaaatggagtactaactcccatttctcattcatcattgaattaaccgatcaacttgctttgttatcgaacattcctatttgatttcaaaaattttccggaaaaaattcgaatctattattatatgccaatcaatcctactacttctggtcctgaaggttctgcgcttggaaaaaaaaatctggg

SEQ ID NO: 37642 - DNA, 357 bp, Glycine max
aaaccctaggttgagagcgctgatacggtgaatcggagtgcagccatatgggcagcttcagaagtccttgaagtgctgctctagtttgaggcacaatgagattggagaaatgctggttttgctcttcaaccatataccctggacatggaatccagtttgttcgtaatgatgcacagattcttcggtattgtagatctaaatgccacatgacctttaatctgaagagaagtgtttagatgccactgttcaagattgggaagagacgcaaaatagcaagagagatgcaatactaaaattgcaacaaaggattcaatcacttcaggctgggaaaggcaaggcatagttttccctcacata

SEQ ID NO: 37643 - DNA, 343 bp, Glycine max
cccaggcgtccgcccacgcgtacggttgattgacaactatgacagttacacttataatggattccaggaactatctattattaatggcgtgcctcctgtggtgatccaaaatgatgattggacatgggaagaactttgccattacttatacaaagaaaatgcttttgataatattgtaatatcacctggacccggttctccagcatgcccggaagatataggcatttgtcttcagctgttgcttaagtgctgggatattcctattctgggtgtttgcctaggacaccaggcattaggttatgtgcatggagctcaagttgtccatgcatctgaaccaatccat

SEQ ID NO: 37644 - DNA, 478 bp, Glycine max
ccggtccgtaattcccgggtcgaccgacgcgtccgcccacgcgtccgtttatatctcaccctgtatgtatcagacctgcctttatcagttacctcgatctaggtgtttcacatgatcaagcgtcatcaaatcactactcagattctcattcaaacactcgcagctaatatgtactctgatcccttataccatactatgaataaaaagatattatgatactcaacaacgagttaagcgcgtgaccaatagcataagcagatgcccgtcatcacgcactgctatctaaacactgatgttgtcaccactatctgatgctccctcgatataatcaccacatatcatttgcactggaaccctataaaggtgatgaagcactattaaatctgacgcctggttactaatttcatgagctttaataaaatgctcttagatttcctcgtggatatcgtagaccgtgctctatactgcaagctttttt

SEQ ID NO: 37645 - DNA, 434 bp, Glycine max
tccgtaattccagggtcgaccgcacgcgtccgcccacgcgtccgtttatatctctccctctctgcatctcaccttcctttatcacttacctccatctacgtctttcatattatcaagcatcatcacatcactactcagattctctttcaaccactcgcagctaatatatactctcatcccttttaccattttttcactaaaaatatattatgatactcaacaactactcaatcgcttgaccaatgctataagcacatgcccgtcatcacgcgctcctatctaaccactgctcttgtcaccactatcatattctccctcgatataatctctcacatatcatttatacttgaaccctataaagctcatgaagcactattaaatctatcacctgtttactaatttcttgaactctaataaaatgcacttagatttcc

SEQ ID NO: 37646 - DNA, 454 bp, Glycine max
cccacgcgtccgcacacactaaagataagcttttttcattctacgacactataactatcttcgggttggcgtttacattaaaccctgcaaaatccttccaatatgacaatctcctatccaccaccaaccgcatatccccatcggcatcagtctatcaaaccttactcgcgataaaaccgcgctttaaccgaggaatccactcttacatgataccaagagatggccagccacaccaacaacaacaacaagcgtcgtctctaatatactctctcgtcaacagatcactccgaaacgacatctactagaccatcctaagaaccgcatcgctctacaactgcctattcgaaacgaacctacacgctaccgttcccgtcctcataatcaaaacccgtggcataattcgagatatatacaacactgataattacctcggtttggtgaccactgatcttca

SEQ ID NO: 37647 - DNA, 506 bp, Glycine max
  unsure (1)..(506): unsure at all n locations
ccggtccgtaattcccgggtcgaccgcacgcgtccgcccacgcgtacgtccacgcgatcgatgctaccaccttctcaagcttccacttcacaagtcatcagtgcgtgtcaatcatattgatcatctgatcctactaagataaacctccattctgtatcagccactatgacccttttatgctatcacgtcaatcaacgtaccttttacttttctctgcccttattcacctacgctacccttcattctgcgcagactaacagaacgaataaagcaggcattgtcggaaaatatggtacccgatatggtgctagtctgctgaagcagattaatatgatggaagctagtcaacatagcaaattctattgcgaatcctgtggaaagtatgctgtgaagaggtntgctgtgggaatatggagatgcatggattgcggataagtaaaagctggcggtacctacactttgaagtaatgccctttctgctatctttcactcataaattttgatat

SEQ ID NO: 37648 - DNA, 316 bp, Glycine max
ctgacgcatgcgttgctgaacaggcagtctcatatatatagacctaatatgcatatactaatgagggatgggccaaatattcatacgcatcatcactgcttgctactcttagatatctgatattaatcagtctagatcaaggcctatgccttggatgacatatggtcttgaaaatgttctagtgcattacaactctgagttgaaacgctcccgattatacatggctaagctcatggatgcgaaattataacatgctcagatcgctgagactctaaatagctcaggattgacttaagctgcctcagatgactactca

SEQ ID NO: 37649 - DNA, 336 bp, Glycine max
acgactatttccaactcattcttcatgtcttaactcaaactattaatgtccctagtctattatcttatcatagacatgcttaacaaatataatcaggaaaattaacaacatcgatcacaataatgattactttaccatcaactggattaataatgtcatgactttcactgctttgtactttcaatcctctgtatactatatccctacctagaataaattctcattctaaagtattcattgcaacttcttcacctctaactacatctaccataaacttgccccaaaccctctttgaacgtttcacttagaaaaccatcaaagtcattattctatccc

SEQ ID NO: 37650 - DNA, 394 bp, Glycine max
cgccacgcgttcgaccactcgtccgcccactcgtccgatctctttctattttctattacactctacaaattcttgggctgccatttttaacaacaactggtttttatccatatcctctagacctccaattctcctgtactattatcatcctttgtttcaaacttcaaattttaatctctaacttattccagaacgcttatcacataccaccctcgctatttcacatcatctctttgaagtcacccatgacatttctcacctcacatgcacatatatccttcaagctcctaaagttcatacacctgtaattgttacattctcaactgtcattcatgatcgtgttatcccataaacctttacccaccctaaatgcttttcctttaagttctacacc

SEQ ID NO: 37651 - DNA, 406 bp, Glycine max
cacgcgttcgaccacgcgtccgcccactcgtccgcccacgcttacttcaaagcatccttcgtttcaatttctctcgggtagcgctttctgcaatcgaacctttcatctacaaagggatccacaagccgaaagaaaaatggggctgacattcacaaagcttttcagtcggcttttcgcgaagaaggaaatgcgaattctgatggttggtcttgatgctgctggtaagaccactatcctgtacaagctcaagctcggatagatcgttaccacaattcctaccatcgggttcaatgttgaaactgtggaatacaagaacattagcttcactgtttgggatgttggtggccaggacaagattcgtcccttgtggaggcactactttcataacacccatggtcttattttt

SEQ ID NO: 37652 - DNA, 387 bp, Glycine max
cacttttatactaccctttccactcacttgccgacttaatatcccaagatggagaaggatacctacgacgcttatcgtctcactctcatgaaagtcaactatattaaagaaggaatgaagaccattgtggaaggaattttactcatacaagatctcattcatacatatatactcattctccaaattagaaacacattctacaaactcccaagcgttcgtctcaaaccagtagataatgaaattgatgtcttgaatatgaagtctactaccaagctttttactaattcaccagcttttgtgccttactggcatattaatcagtatgtaacaatctggtagaatccaaattattcaaccataatgtatccctactgcccttcttatata

SEQ ID NO: 37653 - DNA, 490 bp, Glycine max
acgcgtccgcccacgcgtccggttgtcattcataattggttactaattgcccatgaatttgtatgttttggggaggagctatataccatctgagaatcatcgatatccgatcgagaaaacgattaccagctaccatgctagtcatagctctaggagttgttgcatcaattctagtggttctctgcctattatgggttggcatagagtacatcgactctcatatcatagggaccacactcaatcttgcaactcttcctgttgctgatggtctttatggctactggtactctggacatgctgtgttcccaaacatttatacatccatggcaaatccaaaccaattccctggagtcctcttagcatggtaaatgacttataactataatctataattcatctgccactattcctttcactaaatattaaatcttcttaagtcctgtacaaattcaaattacctatattaatcaaagatataattattctgttt

SEQ ID NO: 37654 - DNA, 426 bp, Glycine max
accggtccgtaattcccggctcgagccacgcgttcgcccacgcgtcctgtttataccatatttactgatattggcgcatttctttgagaaagttactagttgctagattgaggcaaaaatggtgggaattttcaaggagaagttggttaaagcacccaaagagctgaacagtccagcttcgttgaattcatgcactaagcctaagctaagtcacgaaatccttcaagatttcatgtcctgcaattcctccaatgctttctcaatgtgctttgggaatgaagctttgctagcctattccccttcaaacaagcccttcattcatcaaaagttgtttagtggtttggataacatatactgtgtcttcctgggtggcctgcacaaccttagcatgctcaacaagcattatgggctatcaaaaggaacaaa

SEQ ID NO: 37655 - DNA, 390 bp, Glycine max
gacagaccctcctacttctgtgctgcttacctacgacccttctctctctgaccccttactgcgtggcctcgtcctaatggctgtacccgactctccatacagccgcatctccctgatcctcttcttcatctacttcactatctccatcactcttcctgaactccacacacttaacttcatctccgacatcgccacctaccatccaccggacaaccttcacgccccatctcacgtcctaatgatatccctctcccagctagtcactcatcatctagatgtactcctgcgcctactactactgctgaaccgaccaaggaatactcaattgtggcctgactcacatggtcggcactcctactgacctaggccattgtgatattcactaacgat

SEQ ID NO: 37656 - DNA, 276 bp, Glycine max
cttatgtctcacacaaaacactagtcccttcctttttacttgtctctttctcttcgcaacaacgggcagatcttccacaagactgtgactggcaaaaacataaccctataggtccatagtctcgacaccatcgacaacgtcaatgccacaatccaggacaaggaaaggatcccttctgaccaacacagggtgatttttgctggtaagcagcttgaaaatggtcgcactcttgctgattataacattcaaaaggaatcaacactctacttggtcttg

SEQ ID NO: 37657 - DNA, 380 bp, Glycine max
tcgcccacgcgttcgagacagttagcttcagctggaatcaaaatgttgctcacagcaagaaatgagaagaaaggtcttcaaacactggaaacaactaaagacataaggctatcccaacctggactggttcaataaggggaattgggttatgccaccaatgtaacttctttggcagaatttggtcaaatccaaattggggaaactggtaattctggataaaaatgcaagggattggtgggaagtggtaattgatgacactgattttaatcactacagtcatcatgaatcgtggggctataccagaagataatgggacaaagggaataactcatacatacgagttagctgaagaatgcttgcaaataaattactatggcgct

SEQ ID NO: 37658 - DNA, 310 bp, Glycine max
gaaagacgccaagggtccattatctcacgaggctagggaccatgggattgaccactatatcgctgaatgcagcgcatggggcaacatctgtgggaaccatgcagatgatagagagctcattcattggagatatatgacgtatgctaggggtccagatcagccagccgatgtctacggagttaggacctgatacagcacaatgccacctagacagcggatcgtcaaggtctacactggagagaccatggatagagtgcaggtgccagatgtagcatacgctgccaagctatccgatatcatggtattaaag

SEQ ID NO: 37659 - DNA, 298 bp, Glycine max
ctgactcgtgcgatcaacttctattgcggcttgggttttagcgcaacttcttctagatttagggaagatgggtaaggaataaggttcacatcagcattgtggtcattggccatgtcgactctgggaaatccactacctctggtcacctgatttacaagcttggaggcattgacaagcgtggtattgagaggtttgagaaggaagctgctgagatgaacaagaggactttcaagtatgcctgggggctggacaaacttaaagctgatcgcgcaagatgaatcaccattgatattgcttt

SEQ ID NO: 37660 - DNA, 368 bp, Glycine max
gaagaacaagttgttgagaactaagacggactagcacatggctcactcaatgatctcattcagagctgtgaccactgtcaaccgcgcccgtgccgacatggttgctccattcactggcctcaagtccatggctggcttctccaccaggaagaccaacaatgtcattacctccattgctagcaaccgtggaagagtgcaatgcatgcatgtgtggccaccagttggcaagaagaagaccgagactctgttctacctgccagaccttgatgatgcacaattggcaaaggaagtagaatgccctgttaggaagggatggattccttgctacgaactcgagtttgagcacgcttttgtgtaccgtgagcaca

SEQ ID NO: 37661 - DNA, 373 bp, Glycine max
cacctttgttcactcttcttctctttcggctagggttttagcgcaacttcttctagatttaaggaagatgggtaaggaaaagggtcacatcagtattggggtcattggccatgtcgactctgggaaatccactaccactggtcacctgatttacaagcttggaggcattgacaagcgtgttattgagagggttgaaaaggaactgctgagatgaacaagaggtctttcaagtatgcctgggtgctggacaaacttaaggctgaccgtgaaagaggaatcaccatggatattgctttgtggaagtttgaaccaccaaagtattattgcacagttattgatgcgcctggacatagggatttcattaagaatatga

SEQ ID NO: 37662 - DNA, 335 bp, Glycine max
tcacatgatcaatcctaaaatgccgtaccctattgcaatcttagacatgacaatcgagagcacgcccaccagccggatcatcatggacctctactccgatgtcactccccgcactcacgagaacttccatgcactctgcactattgagaatgaagtcagcaaacgcggcaaaccccttcattacaaaggatcctccttccaccgtatgatccctaatttcatgtgccatggacgtgattacacccccggatatgctacatgatgagaatcaatctacagatccaagctctccgattaaaacttcatcaagaagcacaccgaacctagtattctat

SEQ ID NO: 37663 - DNA, 324 bp, Glycine max
gaagaacttacagatcatcgatataggctgcggtcgttgtcgaggagatggtgtctgcgtcggtgagtggcgctgtgtctcaacgagtgtcatgctatttcatatttgaagactcgttgtagtattacgggaacaattgtcagcttcaatctttagcatgagctgattatttgccttatgggattgatcttggtggacctactggaagattctgcaactgctgaactactgctgacgctattgcctagctactatgatgtgacgatcatatttcaccgcatgccacagcacgaggtctagacatattgagcagtgtcaattatg

SEQ ID NO: 37664 - DNA, 325 bp, Glycine max
ggaaacaaccttttattaattcatcaactacattcaaaaaaatttaattgcacctctctctcaccaaagccttcctagaacgaataaaaaaagaagagcaattttccctcaccaaagaagaagaagcaaacaatggccgatcaacttaccgatgaacagatctccgagttcaaggaagccttcagcttgttcgacaaggacggcgatggttgcatcacaaccaaggagcttggaactgttatgcgttcattggggcaaaacccaactgaggcagagctccaggacatgatcaatgaagtggatgctgatgggaaatggtccattg

SEQ ID NO: 37665 - DNA, 347 bp, Glycine max
cacgctttctgtatggcacgttcttactcttagtcctccaataaggaaaaccaacgaagatggaggcgcctactcatgccacgatgcaaattgtggctacactctcttgatctctcttgatgagcttgtcaaagatggtgtgctcacaaaagatgagtttgccagaaccagtcgaccatgaccatgtagtcttctccactgttgctgatataaaagatcccttgatagcaaaagctgccgaaaggttaattcaaagtgatggtgatcttaaaagacagcttggagaattttgttaagaccctgaaatatcaaactggcttgaaaaaacaacttattttgctgctatt

SEQ ID NO: 37666 - DNA, 307 bp, Glycine max
tcgacaaataataaaattaaaaaaaatccgcgattcgctcttctcttggaaaagtgaaaaccagaagttcgaacgaaagagaagagcgatttataagtgagagaagatggggttgtcgttcacgaagctgttcaacaggttgtttgcgaagaaggaaatgaggattctgatggttggtctcgatgctgctggtaagacaaccattttgtacaagctcaagcttggagaaatcgtgaccacttttcccaccatcggatttaatgttgagactgttgagttcaagaacattagcttcactgtgtgggat

SEQ ID NO: 37667 - DNA, 264 bp, Glycine max
  unsure (1)..(264): unsure at all n locations
ctcattatgatgcgttcaatcctgctgaatatggtccacaaaaagagccaaaggatggcgtcatttttgctatatttaactgatgttgangaaggtggggaaactatgtttccatttgagaatggcttgaacatggatggtaactatgggtatgaagactgcattggtttaaaaggtaaagcacccccaaggggatggcctctaatttaatcaatggttacttaagggtccaattgttccaccttaattccttggaacctgccc

SEQ ID NO: 37668 - DNA, 431 bp, Glycine max
cggacgcgtgggcggacgcgtgggcggacgcgtgggcggacgcgtgggtttttctcttggcacaaccaaaagatacccttaactcaagttctatatcattcaagttcttggttaattctcaattccatctacctattgatgtaaattgtcatgagattaatgattcttcgtagttgcaaaattttgaatgatctgaactatggtttagactggttagtgcccattccttcccccaattgtgtatttctttttggaatatcagatgattattggacagagatattaatatttgataattagttggctccaaccctaaagtagttatgaaaatttgttgctcgagttgtagaaatcattgtttgccacgtgcttcttcagcagttttttatggttattcaactggttttgctgactgcatatatcaacttttt

SEQ ID NO: 37669 - DNA, 333 bp, Glycine max
  unsure (1)..(333): unsure at all n locations
tcggaaggcgaaagagtagcagcagcaggcggcgccgagtagcggctccccacctcgagctggccaccatggctagaggattgaagaagcatttgaagaggctcaatgcgcccaagcattggatgctggacaagcttggcggagcttttgctcccaagccatcttctggacctcacaagtctaaggagtgcctgccactgatcctcatcatcaggaacaggctcangtatgctcttacataccgtgaggtcatttccatcctgatgcaacgccatgtacttgttgatggcaagggtcgggacagacaagacctaccctgctgggttcatggat

SEQ ID NO: 37670 - DNA, 209 bp, Glycine max
ctatatctctagcgcccgtcgactatctttatataatcatatatataacagggaaaggatacaaaataaggaagaatctctatatatataaaaataatatatctaaggtacacatagtaaatctaggtacccatcttatgataaactttccttccatatttgatcctctaataagcctataatttcctgcaattgcaataacttcttta

SEQ ID NO: 37671 - DNA, 190 bp, Glycine max
cttcggtttttaattcttaccagaagggccaaatcaaactggcccataaaagtggtttgggaccggttacccaaccaaaggttttacaacaccgtccaaaaacccattgccatcctttactactccaaaagaacttccaacggaggccttttaattactgaagccactggcgtttttgaaacggttaaag

SEQ ID NO: 37672 - DNA, 301 bp, Glycine max
aactttaaccccaaaatgtgctttttttacccatggaaactttattgcaattgttgctaagaatactatgaactagaaattcggtccttcttatgtttatatttcctatctccctttttcacacatttattatcgatcaaaccatttcatgacactacattttttcatttcagtgggattctaccatggggatagtattaaattaatggatgacatagcttctctaatacctactttcttttttattgttcctccgctttataacaaaatatattctggtattactaattcttttaaaaca

SEQ ID NO: 37673 - DNA, 436 bp, Glycine max
  unsure (1)..(436): unsure at all n locations
tcgcggacgcgtggggttgtatcgtcatctcatattaaagcctttaaactattgaacctcagagtataaattgggggtgcgggcattacanaaggagatgcaagatcagagcgccgtgctgtgatgaggtttttgactgtaggcattgccataatgaagctaagaattctgaggaggttgatgctgtggatcgtcatgatgttccacgccatgaaattaagaaggttatctgctccttatgtgatgtagagcaagatgttcagcagtactgtataaactgtggaatatgcatgggcaagtacttttgtactatatgcaaattctttgatgatgatatttcaaagaatcaataccactgcgatgaatgtggcatttgcagaactggaggcaaggataatttttttccactgcaaccgatgtggatgttgctactcaa

SEQ ID NO: 37674 - DNA, 337 bp, Glycine max
gacccacgcgttcgcgctgttgctgagtcggtcccataaattgaagaatgactcgcttacgactctgtacaagcgtgcttctgtgaggcgggccaaggataaagcggtgagtgcctaagcattaaagccgcttctcgaactttttgcggaggatgggagcggaatggctgataaatcgatggtggtgctgaacaacttgacgggcattgagaataggaaagatgccattgttgaataaagtgggattgatgcacttctggaagcaattgatgattgttctgtataaagaaatgaattcgattgtttgactatgtgcagctgtaggctcacaacattt

SEQ ID NO: 37675 - DNA, 362 bp, Glycine max
tcggcgtgtgccatggctaaacatgcttttgaggaagcaattgctgagcttgacaccttgggggaagaatcttacaaagacagcacgctcataatgcagcttttaagagacaacctcaccctttggacttctgatgttcaggaccagctagatgagccctgatatcccttataggtcgatgggtggtattcttcctctcatggaggtgggctttgaatgtcatttatttgtgctaattaagaatcgccctagtttataaaatgattggcaatctgtgatataatgttgtatgaacagagaccaggcttcttttttttgtgtgtcatatggtattggaaaaaattaactagtgatccttattt

SEQ ID NO: 37676 - DNA, 417 bp, Glycine max
cccacgcgtccgctgacactcttctctccttaaagccaccacattctgatacccttttgatcaatcaaagtgaagatcagcatagaatgcttgtttgattctatttcattgctatggataagtacgaggctgttaaggatttgggagctggcaattttggggtggctaggctcatgaagaacaaggtcaccaaggagcttgtagccatgaaatacatcgagcgtggccccaagagaacgaaaggcttcaattttacttcaaatttcaaattgatgagaacgtggcaagggagattatgaaccacaggtcccttcggcatcccaatataattcgttacaaggaggtggttttgactcccacacatttagcaatagtgatggagtatgcagcaggaagagagctctttgagaggatatg

SEQ ID NO: 37677 - DNA, 409 bp, Glycine max
cttcgcttgcctaaccttggatcctcggtccttggtttggtccggttccgcgtttggccttcttccgggaccttgaccaatgaagaatgcaaagggcaagggagcagcaagggcctcaaaagaatcactgaagcccgttgatgaccgctgttacaggaaataatgtagtgatggaacatatatctctgttgttttcagaaaggttggaaagcggaaggcttccggtaagcctgggagaagtagtgcaccaaagaaggagaagaaggccaagaaagaccccaacaagcctaaaagaccacccagtgctttctttgtgttccttgaggagttcaggaagacctttaaggctgagaatcctaatgtgaaggctgtatcagttgttgggaaagctggaggagagaaatggaaa

SEQ ID NO: 37678 - DNA, 410 bp, Glycine max
ccgaacccttcttttcggcacaaacacaactggttaaaggtccacggggcacaacttatgatgcatgccataccagatgagcggctcatgcacctcgggcgctgctttttattaccgtaaaggtcattagaagggtctcctttctgtgactcaaagtgcgcgcagaggtgtgccaaagctggggttcaggacagatgcttgaggttttgcgggatctgctgcgagaagtgcaactgtgtcccatctgggacttacggaaacaaggacgagtgcccttgctacagggacatgaagaactccaagggcaaggacaaatgcccttgaagaatatctaatttcatcatcacactccattccaataaactaccttgtattgtatcttcagccttccttttcagagtattgcatta

SEQ ID NO: 37679 - DNA, 307 bp, Glycine max
acgcgtgcgaacaagtatttgataactaataatgagaagcaaatttcttcctcaatgatctcttccccagcgtttccactgtcaaccgtgccggttgccccattgtttctccattcactggcctcaatttcattgcttgctttcccaccatgaataccaacaattacatttccttcatttctatcaaccgtgtaagagtgcaattcattccagttttgccaccactttgcaagaaaaaatttgatactcttttctaccttccataccttgattattcacaattttcaaatgaaatttaataccctct

SEQ ID NO: 37680 - DNA, 401 bp, Glycine max
  unsure (1)..(401): unsure at all n locations
attgcattagttctaantgctaacaccttcagtgttcaatggcctctgcatcancatcgatgctgaagtcttcacttgttcttgacaantctnagtgggtgaaaggacaaaccctttcccaaccttctgcatcagttgtgagatgcaaccccaccaccccatcatgcctcaccatcagagctggttcctatgctgatgaactcgttaagaccgcgaaaacagtggcttcaccagggaggggtattttggccatggatgattccaatgctacctgtgggaagcgtttggcttcaattgtgctaaagaacactgaagctaaccgccatgcataccgtaccctcctctttacagtttcaggccttggtcagtacatctctggtgccattctctttttgaaacac

SEQ ID NO: 37681 - DNA, 251 bp, Glycine max
ccaaattctttctgggcttaagtatatacattctgcaaacgtaatccatagagatttaaaaccttaaacttgattcaaacaaaaatgtatcccacctaaacagcaaagacttatctttgcgggtaaacagcttgaggatggtcgaacccttgccgttttccaatataatacaaaaccccccaacacctgttgcatttccttaattacaccattcatatatattttaaaaacttttacttgcaataccatta

SEQ ID NO: 37682 - DNA, 296 bp, Glycine max
tcctgcggggagttacattttattagttctacatggtgaaacagaaacactcaggaggacacaatgagacgcgggggaggaaagatgcaagagtatactaccctctcatgcctcaggtgaaaaaacaatagctgaaggacgactactccaagttcgagctaccgaacaccgactcgagcatagtcaacgcactgcagaacacgatgatcaccgaggagccaacggtctccaaagaacccttggagatcaaggtcaaatgccctgaactcaataacgaggatatcgctcacaggctg

SEQ ID NO: 37683 - DNA, 381 bp, Glycine max
  unsure (1)..(381): unsure at all n locations
agacacgcctacccatcctcacacaacaactcncaaggcctaacaaaaaaagggtgccggcccatttatgagtactggtctctcagccttcccatctctcctctcttcctcaaaatccagattcgccaccccaattcctctttttagatttgccgtcaccaaaacctcttcttctcgcttttctatgagtgctgactggatgccaaaccagcctacacctccttaccttgatggttcaccacctggtgactttcgattccaccctcttcgtcttggtgaagcaccacacaaccttgagaggttcaaagagtcaaaactcattcacttcagatgggccatgcttgctgttccaaggattttgggtccatacgcattgggctt

SEQ ID NO: 37684 - DNA, 317 bp, Glycine max
  unsure (1)..(317): unsure at all n locations
cacgaatatggagatgcctggagcgaagcgcaaaaaacacatnacacatgctgggatagcatgacctcattacagggggggggcatttctctgactccgcccatgcaaggaaacaaaaatggaatgctgtgggaagatcaggggaagtgagctcattaacgagaatgtgctgtaaacactggtgcaaacccttctggtgaaggtggaggacaagattaaagagacaatgatgcacttcataaagttgctgacattggtcacacatgcaaacttgaggagcaacccgcattggataaaaaggagtttgtgaccttaat

SEQ ID NO: 37685 - DNA, 385 bp, Glycine max
  unsure (1)..(385): unsure at all n locations
tcttaactcatttaacttcacaactttctcttactaatagcaccatttttaatttgagtccatctccaaagccttcaaaacctacccttagcaattcggtaccatccttaagaacggctacatcgtcttcaaatgccttccttgatagtttttttaattttttcttacattattgtaatgcacagncacgctatattttaattttatctaattgttattttcacttctcagaaacttgacgatattttgccctattcttacaattatgatgttcctcatgttaatcgttctgattaccatcttattgatattgctcaagatggatttttgagtctgcttactgaaaattgtaacactaatgttgacctcaagctttccactgatt

SEQ ID NO: 37686 - DNA, 414 bp, Glycine max
gcgtccgctcttttctttgcgcgctgggttttagcgcagcttcttctagatttaaggaagatggggtatgaaagggttcacatcagtattgtggtcattggccatgtcgactctgggaaatccactaccactggtcacctgatttacaagcttggaggcattgacaagcgtgttattgagaggtttgagaaggaagctgctgagatgaacaagaggtctttcaagtatgcctgggtgctggacaaacttaaggctgagcgtgaaagaggaatcaccattgatattgctttgtggaagtttgaaacaacaaagtattattgcacagttattgatgcgcctggacatatggatttcattaagaataatattactgcgtgcaacatcgcatgctgattgtgctgtttttatcattga

SEQ ID NO: 37687 - DNA, 382 bp, Glycine max
caaatattgacgaaaggtggtctgaaagaagaaaatattatcgattttatgtatggggacgttgcattcaatgggtaaaacccaaggcctgtagtcatcattaacaaaccagattgatgtaatgtttataaagtgagtccaaaggatcacaccgtctaatatttgactaatgattacttttctgctgattcatttggatatttattatgcactgacttatgtcagtgtcaatgttgtagacagtgatcctgatgatcatatattagtttactatactgaccatggaagttcttatgtactcagtatgcatgctgattatgacttatactcggatgatctgatcgaagtcttgaagattaagcctgcttcttgaacatataca

SEQ ID NO: 37688 - DNA, 426 bp, Glycine max
aaagagaacgaagacaaacgaaaacgcttactgaacgatctccatcccaggggctaccggcgacaaccgtgccggtgccggcatgggtactcacatgcacacgactaaaaagcatggctggagtcctcacaaggaagacctaacatgacatcacctacattgctagcaacggaggaacattacaatacatgcagatcgggccactaattgatacaatgaagtactcgactctaccctacttaccagacatgaaatcaaccacaacaagtaaaggaaagtgacatctaaaaaaggaaaggatggatcccttgcacgtaattatgagtcgagcacgggcgtgagaacgctcagcacagcatgtcacctagatactaggatggacactactcgaccgagaacaagcaaactatgaacggcagcactgat

SEQ ID NO: 37689 - DNA, 439 bp, Glycine max
tttgacaggagggaatatattccatggagctatggggttggattcccttttcctcatgcgacctgcaaagggatggtgaaactacaagactccgcttcgagggttatacttatgcggaagtggggcacatcctggtggtggtgttatgggagcacctgggcgtaatgctgctcgtttagttcttcaagaagttggagaaagaacttaaagtggtgatactgagttatgattctcacccaaatggttactgcctgcaaactggctcggaaagatggctatggctctttcattggaattatatgcagtaactattgcaaaatttgcaacgcgtcagatagaagaatcatcgtgacaatgatttatcaatttggatgagctgcataacaaagatgcagaaacctgtaatgtggatttccgaacactacaaacttgtaaatcc

SEQ ID NO: 37690 - DNA, 426 bp, Glycine max
aaagacaacaccgatatcacccattccaaacaaaggccgattgcgtaactactgcggaaagtcggaagctcttgacatgtaccaattctgtctcaaactctcgctcctaatttcactcttccatctctcctttgctgctaggagactcaaacagctgcatcaggaccagtcacagctactccattaccacaacgatcctaacctatacggctaaaacgtcttgaacctaatctggtatgatcactttaaaccatgccaaactgccatcatcatcgacgacggtacctgactggcatactcatcgtctcacagcagtcagtcttgtcgtgccacctggtctaaaaccacggacaaatactaccacctgtattccaaaaacaagaatgctgcatcttctcttgatctatcactgggcgatcagtttct

SEQ ID NO: 37691 - DNA, 414 bp, Glycine max
aatgaatcgataagcaaccaaactgacgtggccctgagcatctcaaagctgcggtatacgggaagaagctagggacacgaacctcctatattctacgttgtcgatgcacgttgttctgagcatcatagtggctggctccaaagaccccacactcgatcaacttctctccttcctccaatccaaatccaccgatcatctaaactccttcgcctatcagctcttcaccgaagagctctccgacgcactctcccgacggaagacctcgcatcttcatcgccgactgcgtatgggttgagcaatccctcttaattgtcccttccttcaaacaacttgtcaatgctgattacaacgccagtttggcttcaattgatttccagaccaaggctgttgaagtgttcaatgaaattaattcat

SEQ ID NO: 37692 - DNA, 451 bp, Glycine max
acgccttatcagatctaacagcagaacaagcacttgctgatttttccggtctcatgacgggatgtcaagcataattactccgccaaggattgccccgttgtcttgtttggaggatcatatggtggaatgtaggctatatggatgagacagaagtatgctcatattagtgtaggagcagctagcatattccactccgaatcttagatgttgagacattgagaagcctagaactttctatgaccttgtttccaatgcttttaagcgtgaaagtgtcacgagagataactatataaaacagtcatagaatgagatagcatttacagtgcaaacaaataacgggctggagcttctgaccaaaactttcaacttatgtcagaaattgaagaggactaaagatctgtatgactgggcagaggctgcctatagttatttggcgatggtgaaactaccc

SEQ ID NO: 37693 - DNA, 433 bp, Glycine max
  unsure (1)..(433): unsure at all n locations
aatgaccggtcgaccacgcgtccggcacgcatccgttgaaatctcactgncagcaaaaacnccnnnttggattatggattcaagggagctgaaaattgaaatggcctcttattgctctgaaactccaatacttggcgaacccgggacaggccgtgcaagggccacacacacccaaagggactctttcgggctgatttcatcaaggaagacacatgangctattgagatcctcaagctcatgtnctccactttcctcattgcactttgccaagccattgacttgaggcatttggaggagaatttgaagaacacggtgaagaacgttgtgagccaagttgctaagcggactctcaccacaggtgtcaatggagagcttcacccttcaaggttttgtgagaaggacttgctcaaggttgttgatagggagtacaca

SEQ ID NO: 37694 - DNA, 404 bp, Glycine max
cccacgcgtccgcccacgcgtccgcccacgcgtccgcagcattgagcaatcagtctctatgatccatttgagagagccacctcctatcttgaggccatcagagagcaattcagagacagaagctattgaaataacagtgacaaagttgcttttgagatcatactacggcattgtcagaaaaaatgttgaggatcttatccccaaagcaattatgcatttcttggtaaacaacaccaagagagagctgcacaacgtcttcattaaaaagctatatagagacaacctgtttgaagaaatgttgcaagaacctgatgagatagctgtgaaaagaaagcgctgtcgagaacttctccgagcttatcagcaggcttttaaggacttggaggaactgcctctggaagctg

SEQ ID NO: 37695 - DNA, 448 bp, Glycine max
cccacgcgtccgatttctttttgatttcaaaaattttccggaaaaaatttgaatctattttttcaagcgcagaaacctgaactaacaagctgattgtgacaatggatgctcgaggagaggggtcttctacttcttactacaacgttcttggtgttagctcagattctaacgtggatgagattagacgtgcttataggaagctggctatgcaatggcatcctgataagtgcacaaggtcgccttctttgctgggtgaagctaagcgcaaattccagcaaattcaagaagcctattcagtgttgtctgatagtaagaaaagaactatgtatgatgcgggcttgtatgatcctcaagaggaagaggatgaaggcttttctgattttgtggaagaaatgttgtcccatatggcttaagtgaggcgagagggaaagcattacggtttggaaga

SEQ ID NO: 37696 - DNA, 360 bp, Glycine max
gacaatggatccagcgtgacccattgtagcgctgacgcttgtctagggtgccatcatcaggttcctcatcttcaacaccgactgatgcaagcgccaatacgaaatacgatccatggccgagccaactgcaaatttaaattcgagtgccactctcgtgtctttcaaacccgctttcaagaagactgtttacgaaccccattgctaggactaggatcaaaacatgcgtcaccatgcgttggatttggataccttgaagggtgacggtgatgcacaggcaggggtatgcttctcccgcgatggacgagatttggcaactggttgcgctgatggaattgcgagagtattcaagacggatgatgc

SEQ ID NO: 37697 - DNA, 343 bp, Glycine max
ctggtttccacgctttctcccacacctcctttttcatttttttttcatcaatcatcaccaggggctcgtgacttttcactgcgttccaattgttttttgcaaaaatgggatgttcagagaaagaccctctttcccaattgagtttgcctcctggttttcggttttaccccaccgactaggagcttctcgttcagtatctgtgccgcaaggacgcttgccaccatttctctctttcaatcattgccgaaattgacttgtacaagttcgacccattggttcttccaagttaagccattttcggtgaaaaaaaatggtacttttttagccccatatacaggaaata

SEQ ID NO: 37698 - DNA, 414 bp, Glycine max
caacaaccaacctcagtctgcatcttcagaatttgaggggatgactgcattaatgattgacgcaagatctgttagagcatatgcgtttggcctttgcatttcagcagcacaccacaatggccaccaatgcattcactggcacatctctctccatgcgatctgtcattcctcaaacacaggcatttgcctcaatttctggcccgacatctgcttcaatttccagctttgggagaaagaatgtttcttttagcttgcagccacgcttaattcgccttaaaatttcctgtgctgccgctaaaccagagacagtagagaaggtgtgcaaaatagtaaagaagcagctggctatgcctgaaactgatgtggtgactggggagtcaaaatttgcaactcttggggctgatttccttgaca

SEQ ID NO: 37699 - DNA, 425 bp, Glycine max
  unsure (1)..(425): unsure at all n locations
gtcggccacgcggtcggccaagccttcggttaaaccttttttaaaactctttaaaatccccctttcccagttcccaacttcatttcaaatcaatatgaaaaaaattgtgctaaagttggaaatccatgacgacaaaaccaagaaaaaggccatgagggcagtatctggtatttcaggtataaaatctcaacatctaataatcgntctcatgttagttactatatatatgcttttttatgcttagttaatcaagggtaaaaaatcatatgttatacaaaattgaattttttggggtcattttttcaggggtggagacagtctcagtggacatgaatgacctgaaaatgactataattgggaatgttgatgctgtaataatagttggcaagcttagaaaatgttgtgatcatgctgatatactatca

SEQ ID NO: 37700 - DNA, 426 bp, Glycine max
ccttatcgtatctaacagcagaacaagcacttgctgatttttccgttctcatcacggatctcaagcataattactccgccaaggattgccccgttgtcttgtttggaggatcatatggtggaatgttggctgcatggatgagactcaagtatcctcatattgctgttggtgcactagcttcttccgctccgattcttcaatttgaagactttgttccacctgaaactttctatgaccttgtttccaatgcttttaagcgtgaaagtttcacttgctttaactatataaaacagtcatggaatgagatagcatctacaggccaaacaaataacgggctggagcttctgaccaaaactttcaacttatgtcagaaattgaagaggactaaagatctgtatgactgggcagaggctgcgtatagttatt

SEQ ID NO: 37701 - DNA, 423 bp, Glycine max
ttcccgacccaagcgacccgtccgttttgaatctatacaatcaacaatcttgtttaacgaagagcaccatttctagtcggagggctacgccggagccttcaaaacctaccctcatcaagccggtaccatccgtaagaacggctacatcgtcatcgaatgcctttctttctagaattagaattttatacttttatgactttaaggcacggtcacgcataattattaattttgtgatgattatattttcactgccaagaaacttgatgatattgtgccctattttcacaattatgatgttcctcatgtgaatcgtactgattaccagcttattgatattgctgaggatggatttttgagtctgcttactgaaaatggtaacactaaggatgaccttaagctttccactgatgagagtctgctcac

SEQ ID NO: 37702 - DNA, 363 bp, Glycine max
gccacttctgaatctattgaatcaacaatcatgtcggacgaagagcaccatttcgagtcgaaggccgacgccggagcctccaaaacctaccctcagcaagccggtaccatccgcaagaacggctacatcgtcatcaaaggccgtccctgcaaggttgtggaaggttcgacttccaaaactggaaagcacggtcacgctaagtgtcactttgttggagttcgaaattttcactgccaagaaacttgaggatattgtgccctcttctcacaactgtggtgttcctcatgtgaatcgtactgattaccagctcattgatattgctgaggaatggattttgagtctgcttactgaaaatggtaacac

SEQ ID NO: 37703 - DNA, 393 bp, Glycine max
gcgcttgctaatgagcaccacatacatccgcgctcatgctgaggattacaaatcatggacttgccttgcagcatccactgctggtggttgccttacaacgtcacaactgctagaacaccctatcaacctaactgaagccacaaggacaacttcatccgcctgtaaccctgcctacttcaaaactgtccctctctgctccaaattgaaagctgcacctccaactgaagctgcaactgctgctactgccaatgatgagcttgaccagtgctatggtcctgacagaacgaacttctagcctgacggtctctaggaccgatctgacatcccatagtacttgaccggagaagtctccggagactatggttatgacccatctggaacttaacaagaagc

SEQ ID NO: 37704 - DNA, 308 bp, Glycine max
cctacgcgtccgcccacgcgtccgcccacgcgtccgattacaaaggaaaggtctcgttgtgatatggttaagaaaaatatatttaccatgtgcagcactatctctgaacatttgttattacaaaattatttcatgtgtcaaaaaaaaaaaaaaaataaaaaaaaaaaaaaaaacaaaaaaaaaaaaaaacaaaagcaaataaaaaaaacatataatgacaattagaatgctttgtacaaaaatttctaaatgataataataactcttacctggacattaaaaaataggggggaccttttaaaggatcc

SEQ ID NO: 37705 - DNA, 408 bp, Glycine max
tgcgacaggagggaatatattccatggagctatggcgttggattcccttttcctcatgcgacctgcataagggtgggtaaactacaagactccgcttataaggttatacttatgcggaaatggggcacatcctggtggatatgttatgagatcacctgagcaataagcttctaaattaattattaaagaatttggagaaagaacttaaagatgataatctaaatttagatgctcaaccaaatggttactgcctgcaaactggctctgaaagatggctatcgctaatatattggaattatatgcagtaactattgcaaaatttgcaacgcgtcagatagaataatcatcgtgacaatgaattatcaatttggatgaactgcataacaaaaatgcaaaaacctgtaatgt

SEQ ID NO: 37706 - DNA, 385 bp, Glycine max
gctgattgatgtcatgttggacctacaacataccgagccagaattctacacccgggaaagtgtcaaaggagttattctggcaatgcttgtagctggttctgaaacttcagctactaccatggaatgggctttctcccttctcctcaaccatccaaaaaaaatgaataaggttaaggaagagatatacacttatgtaggtcaagatcaaatgctgaatggattggacactacaaaactgaagtacttgcaaaatgtaattactgagacacttcgcctgtatcctgtggctccactacttctacctcacgagtcctcaaatgattgcaaagtctgtggttttgacatcccgcgaggaacaatgttacttgtgaatctatggaccttg

SEQ ID NO: 37707 - DNA, 313 bp, Glycine max
accacacgtccgacgccgatgctcaacgcacggacttgatgaccatcacccgggttctgcggaaccaacaatgcatccaccctgagtctcgtggcgatttctcaatcttgctcagtcacatagttctcgattgcaagtatctctgctctgctgttaacaaggcgggtcttgctaagcttatagcacttgcaagacagacatatgttcacgtctaacagcatatgatactggatgtcctttccaatgatgtctttatcaaggctttcgtcagtattgtacgaacatgcatcttgtagcttgaacaatatcagga

SEQ ID NO: 37708 - DNA, 348 bp, Glycine max
catatatctttgttttttctatttaggaagcatggcaatgccatgggtgggttatttactctctgccactgaacactttctatggagcccgtacttcgtaggtgaaatgcccaagatgcaggcttgctgatgaaacacacaacatactttgcctttggaccattcctgaagagtgcgttttatcatcaaaggaatacatccatggcgaacaatatatatcacacttcttaacagttaaccatcaagcttacttttatgccatagacctctaactacattccaacgacacatttttgttcagtataaatcgcaccatactcttttatatttcatactagcacaaaatat

SEQ ID NO: 37709 - DNA, 297 bp, Glycine max
agtatgaagagaatctctcgatgtttgcatacatatgtgtctcaatggacaagtgcagtgttctgattccaatgaagcttcccattaaaagaagcaataatctctcaattcgcgagactagtaccaaccatccgtatgtcgccgctaacattggtcatcagaacctgaagactcgagtaggaaaaacaactgcaaccctgactggaatgaaaaattgaccctttctgtacaggacgttaaatcctcaaaacatatgacggtatatgacaaacacactttctctgatgatgacaaaat

SEQ ID NO: 37710 - DNA, 372 bp, Glycine max
catgtttcctctccaactattgtaatcagctcacaggatgcaccatctgtgatcaagtatgcaaaaagccataagaagccaacagccaccatcaaatttcaacgaacatttgttggaataaagccagcaccagctgttaccatttactcttcaagaggtccttcaccaagctatcatggggtcttgaagcctgacataatggcacctggctctaatgttcttgctgcttatgttcctacagaaccagcagcaacaattggcaacaatgtgatgttatccagtggctacaatttgctgtctggaacatccatggcatgccctcatgcttctggtgttgctgctcttttgaaagctgcacacactaaatggagt

SEQ ID NO: 37711 - DNA, 305 bp, Glycine max
gcctatcggaacaaccaaagcgagatctaatgcgaattctaagattttagggaatgggaagcggacattctatgtcaccctatctacgatcaacttgagtcggcgcacgtcttttgcctcataaatgcctcaccagtggaccagcttcctaggatcgatgctcaaataaagcacacatattgcgtgaatgaaaagtactctggacttgcacacaacggtgtcgatgaagagaaagatcttgatcagttcatgacccattatgttctgatgctctgtgcctataaagaacaactgtatcaatatgt

SEQ ID NO: 37712 - DNA, 304 bp, Glycine max
gctcctaaacattctctgcacccaaaccgtgtgattaatcgcgctgtttacttaacacaggcttggtgcacaaattgctccgtctcaaccccattatggacgcagctcacttttttacaccaaaagcagtatgttttctggagtaacaaccagacgggcaaatgcagcagacacaagaacctatgtgataacatgtgcagcatgagactcacagacagaggtgattggactgtctgcatactcagggtgtgggaagagcaccttaatgaggaggctgaccagtgtgctaggaggagcatcagat

SEQ ID NO: 37713 - DNA, 450 bp, Glycine max
  unsure (1)..(450): unsure at all n locations
cccacgcgtncgactggttaccattttgtataccatgttcactctggaagctttaattatgttatgggcatggaaaattttgttgacagtgccactgtttattgtgattttgacgtgtaaatggagaaaaagacatttgtcaatgtttgaaagtattgaaaattatctagaacaaaataacttgatgcctattagatattcatacaaggaagttaagaagatggcgggaggttttaaagacaagttgggtgaaggaggatatggctctgtgttcaagggaaaattgcgtaacgggtcttgtgtggcaataaagatgttaggttaatcaaaaggaaatggccaagattttattagtgaagttgcaaccattggaagaacatatcatcaaaatatagtacaattaattggattttgtgttcatgggtcaaaacgtgctcttgtctatgaatt

SEQ ID NO: 37714 - DNA, 393 bp, Glycine max
tagacgtacgcgtccgcataaggatctggctgaaaagtatgatgtgagtggatttcctaccttgaagttcttcccaaagggcaacaaagctggtgaagagtacggaggtggaagagacttggatgactttgtggcttttatcaatgagaaatctggaacaagtcgagatgtaaaaggacaacttacttcccaagctggtatagtagaaagcttggatgtcttggttaaagagtttgtagctgccagcgatgaagagaagaaattcgtgtttacccgaatggaagaggaagttgagaagctgaagggttctgcctcaaggtaacttaaataaacatcatgcttctaaaacatttgctttgagttatgtcacttgagaataggttaatttgcatt

SEQ ID NO: 37715 - DNA, 412 bp, Glycine max
gttcttttgcactttgggaagcatctcatatggttctatcagttctagatggtcgctggatccgatgctcagattgtatttttggtttccttcaatgttttatcttcttcaatattctggcagttgtcttatacttgttttgtttacttgaattgttaatgtggcagagattctttttggaaaccaaaaatacaatctgagcactgagtcgcaaattcagggtatctggcatccccatgcttgtggccattgcatcaagtggtcagacattgacaacaaaagctcgagatctggtttcactctatggagcagatgcatatcctttcaccgaggagagaataaaagaaatagagacagaacaagaagagactgccaagggggtggccggagaaactgaagcatgaattacatg

SEQ ID NO: 37716 - DNA, 202 bp, Glycine max
ttgcaaacaagatatcctgttgggtctcaaacgcagtaacagcattgctttcagctaaaaggaaacccccaaagatgagacagagatccaagtaatgcgttaaacctaatttgcttacgaagcttttacaaatgcttatcttaacaaatatgacacccagttcatagactgactagtctctccttattgatgctttgataca

SEQ ID NO: 37717 - DNA, 404 bp, Glycine max
aacaaacagtcggctgaaaatgtacgtccttgtattcttggctgctacaattttggtagggtggcaatggcatgcgtacgatatgatccgtctccggatgaacactggctatggtgcccgtacttcggaggtgaaacgcgcaagttggaggcttgctgcggaagcacacaacatatctgggtttgagaccatacctgaagagtgcgtagaagcaacaaaggaatacatgcatggcgaacaatatagatcagactccaaaacagataaccaacaagcttacttttatgccatagaccatcaagtccatcccaaggacacatttgtgctcagtatagatggcaccgtactctctaatattccatactacaaaaaacatggatatggggtggagaaattaactcgac

SEQ ID NO: 37718 - DNA, 311 bp, Glycine max
acgccgcgatctatttctcagtctctgcgtttgcggctgaggattccgaacgggtgaccttggtcgtctctggcaaagtttaagtcatcatgggtaaggaaaaggttcacatcaacattgtcgtcattggacatgtcgactctgggaagtcaactaccactggtcactagatctacaagcttgcaggtattgacaagcgcgtgatcgataggatttagaaggatgctgccgagatgaacaagatgtcattcaagtatgcctgtgtgcttgacaagcttaaagctgatcgtgaaagatgaataaccattgat

SEQ ID NO: 37719 - DNA, 427 bp, Glycine max
  unsure (1)..(427): unsure at all n locations
gaaagcaagctcatcctanagttttaaaaatggcagcagcctcctccatggctctctctgccccatccttggggggcaaggccgtgaagctgggcccatcagcccccgaagtcgggagggtcagcatgaggaagaccgtcaccaagcaggcctcctccggaagcccatggtacggcccagaccgcgtcaagtacttgggcccattctctggcgagcccccgtcctacctcactggcgagttcccaggtgactacggctgggacactgctgggctttcggccgacccagaaaccttcgccagaaaccgtgagctcgaagtgatccactccaggtgggccatgctcggggccttgggctgcgtcttccccgaactgttgtcccgcaacggggtcaagtttggaaaagctgtgtggttcaaggccgggtc

SEQ ID NO: 37720 - DNA, 412 bp, Glycine max
ctctcgcatatggatcaaatttcggctcgctttacgcaacggcttattagaatgtcaaggtgctattcatatggcatgtctattacatcaaacattttgcaattccttattgtggaaacaaaataagaacgcttaacctaccagttatgctaaatttacagtgctgtcgattaattctgacaatagcatcatatacttactcaagggtcttcttactttgtatatcactccattcactgacatgataattactgagtacattatgattggctgtacaggaattgatatgcgcatgtaatcaataacaatatgaatgcctgttaaacattcttttgagctccctaattggaactatgatggatctagcactcgacattcaccttgacatgatcgctaacttatcctatttcct

SEQ ID NO: 37721 - DNA, 215 bp, Glycine max
atcgcatgtacgattacctggaggtcccttatatcacagtgctaggggcttcagccttcgtgcgccataagcagaggaatgcaatcaactattataacgatgattacattcctggtgccctttactctgacgtagatggaatatcaactcacgctacaaaatcaccacatatgctggcatcatacgaagcttaaactgctattgattctgctctt

SEQ ID NO: 37722 - DNA, 212 bp, Glycine max
  unsure (1)..(212): unsure at all n locations
cccacacgtncggttggaaggcgctcattatctcaccactggtgagctcgacagccttagcgagcatcagcttgtggattgcgatcacctgtgttatccagaacaatattgaacgtgtgactcatgctgtaacggcggcttgatgaacaacgcatttgactacatactttcaactggggcgagtcactgaagtaaaggactattcatacacc

SEQ ID NO: 37723 - DNA, 445 bp, Glycine max
  unsure (1)..(445): unsure at all n locations
gtccgagaagagcaaggataatgactgatggattcaacagttgcagaaatgtggtttgtaattttactgaaggtgccatgtattcattccctcaaatacgcttgccgccaagagctttagaggctgctaaacaggctggaaaggttccagatgtttactactgcctcaagcttttggaagccactggcatatccactgttcctggttcaagatttggtcagaaagaaagggtgttccatttgaggacaactattttaccagctgaggaagacatgcctgatattatggataggttcaaaaagttcaatgatgaattcatggagcaatacgaagacgatagaggttattcaaggttgtaagaaaatcattgtaaagctgcattatttacccttttnnncccttttttgcgcttttgaagtcttcatcatcatcctcgagagaaaaa

SEQ ID NO: 37724 - DNA, 333 bp, Glycine max
caccaatctaattcatcacaatgcttaaactcctgattcacactcatacctgatactcttattattggctaccatttactcctttgatcattaatctattatttgtaaccaatttacaaatgataataacaaatattattcaaataattcaacaactactaaagattataaaattaattccactatttcaacctaacgatgaccttttctagtttaacaaacctcgacttactctctacctcattaatttcatgctcttttataaatcttttcaactttcctacttttcaattttataaaaccccccctttttacacttcaatttcatataaa

SEQ ID NO: 37725 - DNA, 438 bp, Glycine max
  unsure (1)..(438): unsure at all n locations
cccacgcgtccgcaaaaacccattcacttttccacaagccttagttcttctcatttattctgtttttcaaaatactttcactctctctaaccttccagttctcactaaacctcgtgaagctcgtgatggacaccaagataggttcactagacgcgcccaagcccaacagcaacgacgtcgtatcatgcaacctcaccagcagcgccgccatccagccctgcttgccggcgacggtgatcaacggcgccggctgtagtgactccaccttgggcggccacctggcccgccggctggtggaaatcggcgtcaccgacgtgttctccgttcccggggacttcaacctgacgctgctggaccacctcatcgcggagccggcgcctggcnaaacccccccccccctgtcgggtgctgaacgagctcaacgcggtacgcgcgacg

SEQ ID NO: 37726 - DNA, 430 bp, Glycine max
gcgtgcgatcagtaccaattgctaaagacatttcactttttggtcacactactaatacagctggctgcgcattgcttcaactgtctgtcacatgcttctacttccccttctagtgatggttgcctatactggcgacttaaacaaagactctgacatcacatggagagatggccgctccaagatactaaaccatggagagttactcactctttcattggacaaagcatctgtctcatgttttcaatcaaagaatgagtatctcattgggaagattgacatgcagctcaagcttgtccctggaaactatgctgacaccgtcactgcctattatctatcttcaaaaggatcaacttgagatgaaatagactatgaatttcttggaaaaatttcccctttttttttaatgtgatcctacatccttacacaactt

SEQ ID NO: 37727 - DNA, 421 bp, Glycine max
  unsure (1)..(421): unsure at all n locations
cttgaatcttcgttatccttctttttttctccttgaactcgaatattcactatggcagatgaggtggttctgctagatttctggccaagtccatttgggatgagggtcaggattgcacttgctgaaaagggtatcaaatatgagtccaaagaagaggacttgcagaacaagagccctttgctcctcaaaatgaacccggttcacaagaaaatcccggttctcatccacaatggcaaacccatttgtgaatctctcgttgctgttcagtacattgaggaggtctggaatgacagaaatcccttgttgccttctgacccttaccagagagctcaggctagattctgggctgactttgttgacaataagatatttgaatcctttttttggggggggggaagaaagattggacatanagggagag

SEQ ID NO: 37728 - DNA, 413 bp, Glycine max
ccacgcgtccgcccacgcgtccggctggattttcatctgaatcagatgcaaagtctgagtggataacaagggttcgagcaacatggaagggggcagttttgaaccatctttgggaatcaaatttcacacctcagaaacttgtcaggggtttaggtccttggggtcccaacatagtccgcaagtatacaagtgctaggtttggtacacattcaactggggaaatactgactgaagaggaatcaacattgctgacagactatgtttaccacacattggcggccaaagctagtggagagctgtgcttaaaatatattttttcatttggagcatttgctaggatgccccttcttctcagtgcctcagagtggaaggtgcccaccactttcatgtatggtttccaagactggatgaat

SEQ ID NO: 37729 - DNA, 439 bp, Glycine max
cccgcgcgtccggctttctcatggctactatctttaccctcgcaacgctgtcactagccgggtcttctcgtgtttccattggcggagctccgattcgccaccaccgttctccgaaccggatcgggttgttgccgcctctcaaatgctcctctttggagccggaaaccgccccgcctcctcccttcgactggactcacaagttgatcgccggtgtcgccggcgtcggattcctcgaaacctcgtacctcacttaccttaaactcaccggcgcagacgccttttgccccgtcggcggcggcacctgctctaaaatactcgacagtgattacgccctcgttttcggtattcctcttcctctgattgggatggctgccgtatggtccctttttttttttggggggttgctgcacttggtgttcaattggcttcgaagaatttc

SEQ ID NO: 37730 - DNA, 455 bp, Glycine max
cccacgcgtccgaagtttttgtcaggggatgcttcacacccacaaagtaaagaactccatgaatatcttgaaactctgtcccaaacaatgagaaaggagggctacgtgcctgatatttcatgtgtccttcacaatgttgatgatgaagagaaagaaactatgctctgtgggcacagtgagagactggcaatagcctttggtcttttaaatacccctccaggaactaccatcagagttgccaaaaaccttcgggtttgcaatgactgccatgttgccactaaaatcatatctaagattatggacagggaaatcattcttagagatgttagaaagttccatcatttcgcaaatggaacttgctcttgtggggattattggtaaaagaaagtgaatagtaaaatattttttttcttctaatttattcatctcaacttttcccttctttcatgagcaag

SEQ ID NO: 37731 - DNA, 237 bp, Glycine max
cgtccgacaaccgactcttcatgttacaatttctcacgttctgatccgccagggtgccagttgcaataagaaggttcgctgtgcctgcctccgatgcaagagaatgtggcagctctttcgactccattcctatgtttgtcacgacaccgattcctcctgcaaggaacccttttgcaggcaatttcaattgacaatgcatcatgagaaaaggaaagatgatgctaagtggaaactact

SEQ ID NO: 37732 - DNA, 289 bp, Glycine max
cccacgcgtcctataaatctcattttaattttaagtcttcactgacgaatacaggcatacgtttctttaacctggccgactacatctactattcacatagcgtcatgaatcacttccaattcataatcaactgcatttactatgttgcatacaatgttatccatgaacctcccgctttttattaactcttcaacataacatatcacgtattttcccagcatatctaattcacgacctattccaatctttcaaacttgaatacctacctattgaatccaacatattgacc

SEQ ID NO: 37733 - DNA, 460 bp, Glycine max
cccacgcgtccgcccacgcgtccgcccacgcgtccgcccacgcgtccgggtgagttgaccgaattaagcaactgttctgtgaagaagaccttctcctctatgatgttaatcatgcatgagctgcaaagtcatgccttgcaaacaagggagagcctgtgtggtgaaaacttgcaaggtgtcatgaccaagctagagagagagatggatgcttcatttgtttggctcttccagcaggttttctggaagaccccagctctcatggtctatgtgatggtcctcttagctaactttttagtgttctctatgaatgataacactgtcaaagtaatcactccttcttccatgatcacaaaggctctaaccttgaccagcaatgagagtaaagtacagcattcgcatgttgatgttgatcaaggtgagtatgtgaatagggagttgacagaagaggagcacatgttgt

SEQ ID NO: 37734 - DNA, 240 bp, Glycine max
ctataaccaacttcagggtttatgttatcaaaagattttgatacatgtggtatggctaaatatactctctgtggttctctgattacaaatacaacgactagaatactgtttcttttgtgacattgaacaaagttgttggatttcttcaacgtattgattttactctcaagtatgcatttcgaaagaaaccttgtgatatgatcagttccactatttattgttaatgggctgaagctttta

SEQ ID NO: 37735 - DNA, 370 bp, Glycine max
ctctaccggaccgcacgcgtccgattgccttcacaccatgctcacacagcaacttgcaaactctgagaaagaaagcctgccagcacatggatcattggggctatctcatccttcccatctgtccaatctatctacaaatccatatttgccacacgtaaatccactttctagctctggtgtcaccaatgcctcttatgctcactatcctatgactgctgactggatgccatgccagcctagacctacttaccttgatggttcaacgcctgaagactttaaaatctaccctggtcaacttggtgaaataccagagaatcttgagaggttcaaagagtcagaactcattcactgcaaattggccatgctttct

SEQ ID NO: 37736 - DNA, 251 bp, Glycine max
taatccacaggggccggtcaaaactagctgaagccattatataagattctagacccacaatatcaagaggaatcaaaattccatattctatcaaactcctgaattccttgcagagtgaacttcaatcaaagatctctttaacccataccgcattcttattggatgcaaggaaaccccatatggccaaaaagctattcaaacattgaaagatgtttatgctcaatgagtccccgaagaaaaaatactgacca

SEQ ID NO: 37737 - DNA, 339 bp, Glycine max
gccagtcgttcgaagctctgcatcatcggttgcgggccgggggcgcacaccgtcagcatagacgcatcgcgcgccgagttgacgccggtcctctgtgaacgctggacggtgaacggcgtctgtcccgggggccagctcaccaccaccaccgacgtccagtacttgtggggatgttccggctgcatgcttagtaccgacctcatggaccggtgccgtcagcagtcggcacgcttcagtgccgaggtagtcacggagaccggcaccgccgtctacctctagcaacgtacgtttagggtgtactccgacttcagcatcgtgaaagccgaatacggggtggtc

SEQ ID NO: 37738 - DNA, 271 bp, Glycine max
  unsure (1)..(271): unsure at all n locations
gctaaccgtacgcatagatggacacatatcacatgctcacgacgtgagtaacangcctgcggcttacgactctagcgatgtccataaacaaaagtgcacagccgaggggctgaacactcatgacctcgtcacactagatggtgcacataccactgtgactacaggtggcgcaggcttcaatgacatgatgcacaacttcaacgcgaatggcacatgaccctgccagctacactctatgcttaaagaaactacaatcactatgccctcaaaa

SEQ ID NO: 37739 - DNA, 258 bp, Glycine max
actcataacctctccacacttgatggtccacataccactgttactacagcttgccaggtctccaataacatattgcacaacttcaccccgaattccacagaccctgccatctacactctattcttaaccaaaatacactcactatgtcctaataaccgaaaccacccaaaactactgccattatgatcggtttaccaaaccaaatttgatatatcatactatacaaatttgaggaattctacacaaattctacacatc

SEQ ID NO: 37740 - DNA, 375 bp, Glycine max
tttaaaaaaaggccgtgggttttttcgagaaaggccactctgtaagaccaattctttctgaggctggggctcctaatttcagtctttcagctttcctttgctgctaggagactcaaccagctggttcaggaccagtcacagttactccattaccacaacggtcctcttctatacggcaaaatcgccgtgaacctaatctggtatggtcacttcaaaccatcccaaaaggccatcatcaccgatttcgttacctcactgtcatccccatcgtctcagagcagccagccatctgttgccacgtggtggaaaaccacggagaaatactaccacctgagtcccaaaacaagaaagctgcttcttctctttctctatcac

SEQ ID NO: 37741 - DNA, 424 bp, Glycine max
cccacgcgtccggttcttcttcgtcgttatcttcttcttttgttgtttgtgggtttgtttggtctctcacctgaaaatgtcttgctgcggtggtaactgtggttgcggaagcgcctgcaagtgcggcaacggctgctgaggctgcaagatgtacccagacttgagctacaccgagtcaaccaccaccgataccttggtcatgggagtggcaccagttaaggctcaattcgagagtgctgaaatgggtgttaccgctgagaactatggctgcaaatgtggagcttactgcacctgcaacccctgcacttgcaagtgaagtgttgtgaaactaaagcttcaagcataaatggcccttataaatatgattaaaactatatgtttgttctaaaactttcaaattttgatttatgtattattgttgcac

SEQ ID NO: 37742 - DNA, 303 bp, Glycine max
  unsure (1)..(303): unsure at all n locations
ttaaacggctagtatacacaaannctgctcggtaaattgtgcagggagtcctctcaaatttcttatntaacctgaaaccaacatcttatctaacaataactgcacctatttgtaaagaaatgcttatcccaaattattctaatgccaccatcatcatgtttccaaccttaactcctattgccccatttcattcatttttataaaaaatattcttcttcaaacactaatattacaatttcacttatttatcataactcttttttgatgtacctacaaccaccttattactatataatgaaaaat

SEQ ID NO: 37743 - DNA, 329 bp, Glycine max
gaattaccggtgcgccgacgcgtacgtccagcatccgatacttctccttttgccgtgaacgggatttgtcacaaaacagggtcgggaaattgtgctgggaagcttctcaaatttcttgtgtgacctgacaccagcagctgatgtaacaattactggacctgttcggaaagaaatgcttattccaaaagattctaatgcccccattattatttttcgaaccctaacctggatttccccatttcgctcatttttataaaaaattttctttctgaaacaccaagattacaacttcaatggtttggcatagctctttttggatgttcctacaa

SEQ ID NO: 37744 - DNA, 426 bp, Glycine max
ctgaagaagtagaagagagaattgaggaagctgccgagaaaggagaactgactgaacttgtggtaatggtcatatggaatcgccttgatcttgctcggcgtgatgaagaaaaggatgccattagaagtctggatctgttatacagaagggttgagactgagattttgaaacgagaggctacccctgcgatgagattgctcaatgatcttttgattatgtacgacggctataattttgaagagtggctaaagaaatgtaaaaaggtcatgattgatacgtttcctcgggaggatccattcagtatccttgttccaccaggatttgagtcattcgacatagataagcatcacgggccattgcgaccatcacttgaagtcgataatactcttttgagggtggactttgtaagagaggtggatgaattgc

SEQ ID NO: 37745 - DNA, 326 bp, Glycine max
gcaatacttaaagatctcgtcttgaaatacactgaatgactatcttgggggatccactagtattattaacatgtaggttcttaaaatagattttatccttatcactatgctccatttacgtctgatctcaaggtccttggtgaacttgatattacctttaaactgtttaccctattcaaaccatataaccagcttctaacttttttatcttctgcaagctctgatgcactttcttaaccatatatcaaacttataactgatccaagctcaccaatcattgatttatatccattattactttcaaccgtacatgaatagcaaacact

SEQ ID NO: 37746 - DNA, 431 bp, Glycine max
attctctctgtgtatttccctacctctcccttcaagatgcagatcttcgtggagaccctcggcggcaagaccatcacccttgaggtggaaagctctgacaccatcgacaacgtcaaggccaagatccaggacaaggaaggaatccccccggaccatcaacgtctcattttcgccggaaagcaacttgaggactgccgtacccttgctgactacaacattcagaaggagagtactcttcacctcttcctccgtctccgtggtggcatgcatatcttcgttaagacactcaccggcaagaccataaccctagaggttgaaagctccgacaccatcgataacgtcaaaggcaatattcatgacaagggagggtattcccccggaccagcaacgtattatcttttcccgaaagcatttttaggacggcttaccct

SEQ ID NO: 37747 - DNA, 256 bp, Glycine max
attgtacaaacctaattctcattgcttcatcgtacgattcttctcctcctaattatggagagcttcgataaaactaggaccgctatcaccatcacccttgaggtggagtactccgacaccatctataacgtgaaagctaacattcaagtcaaggacgggatccaacctgaccatcatagacttatctaaacaggttaacagcttgctgatggtctaacccttcaccactacaacattgagacggaatacacttttc

SEQ ID NO: 37748 - DNA, 339 bp, Glycine max
  unsure (1)..(339): unsure at all n locations
ctctcgtcttctacaaaattttctgttcgatctcaaccaaggttgttccttgcaccgccaggagtttcatcttcggaaagcgaaaaacacccgcagagcttctgcgggaaaataagaggatgctggacaaatcaatcagagaaattgagcgcgagcggcaaggcttgcaaacgcaagagaagaaattgattgcggagataaagaaaagtgccaaacagggccagatgaaaagggaatttctacaccccatgattggaggttccaaactctcccatgtttggatcagactatgttcaggaccccagcatctacatattaattgntggagctcttcatatg

SEQ ID NO: 37749 - DNA, 374 bp, Glycine max
  unsure (1)..(374): unsure at all n locations
ttttattaaattaaaatccattggtttcatggctacctacttaaacaatggttggggtataaagtgagtgaccccacacacaaatatantggatccctttaaaacccctgcccattttcttttcaagttgttgaacctttttttaatgaaataagggcgcacataattcgaattacgctatctccattctcataatattcacactctcgacactctaattcaaaaaaatttttgctttacattataaatgccctcaataaatattgtattctttactgtcacatttttgaaccaacaattaagactgttggagaaaaaactgaatgccctcataacctgcttcctatgagaaaggccttcaattccacttttat

SEQ ID NO: 37750 - DNA, 403 bp, Glycine max
  unsure (1)..(403): unsure at all n locations
gaatacccgggctcgagccgcacgcgtcacggctatgctnncttgggttggcctggtattcccagcttgttcctgctaacatttggcgagcacttgttcagtgggtggacactccccaacagtgttgagttgaaccgtggcccgcttttggaagaagggaaaaaccagtgctttaannaaagattcgtggcacttgaccaacattgaaccttgagttccaggaattgctttgaggcccagtcgtgtggctaaagaggtcaagcatccattcaggaatcttctcaagcgcaggaaccgaccccaacttgtcatttccgttgccctacagatattccagcaattcacaggcatcaacgcaatcatgttttatgccccggtgctgttcaacacgttaggattcaag

SEQ ID NO: 37751 - DNA, 346 bp, Glycine max
cagctcgacctttacaactttttttttcttttacttcgttacggacttttttttctttgggttttcggaagtttgctgctagaggttgcatatttggggtttcacacgtgcgcaatttgaaggtattattggaggagagagtgtaaatgaagaaaccaacaaccgacgcaattagtatggggaaaaggagcctggagggtggagaagatgaccagcctgaacgaaagaggcctgctcttgccagtgtaattgtggaagctctgaaggtggacagtttgcaaaagctttgctcatggttagaacccattcttcgtagagttgtcaatgaagaaatggagcgtgcttt

SEQ ID NO: 37752 - DNA, 454 bp, Glycine max
acgcccacgcgtccgcccacgcgtccgcggacgcgtgggagaagagtcaatatgctgtcagaggtgaattataccttcgagcttctgaacttcagaaagagggcaaaaagattatctttactaatgttggcaacccgcatgcattgggacagaaaccactgagcttccctcgccaggttgttgctttgtgccaagctccattcctacttgatgatcctaatgttggactgctattccctgctgatgcaattgcaagagctaaacactatctttcattgacctcgggtggtttaggtgcttatagtgactcccgtggccttccatgagtgaggaaggaagttgctgagttcatactcaggcgtgatggttatccaactgatccagagctcatatatctcactgatggtgcaagcaaaggagtgatgcagatattaaatactatcattaagggtca

SEQ ID NO: 37753 - DNA, 340 bp, Glycine max
cacagacgatcaagagcttcattgtcgtgaggctgaaaatgatccagaagactgtccaacgggctgttcacggccttgtgaaaatgtgtgccctgctaatgcaataacacaccaagggaaatctacttcaggcatttcacataacacatgaagcaccatgagtactgatggatggagtcataacagaacgatgctatggctgtggtcgctggcttacagtccgcccctactataaaatatgagaggtatcatatgtaagagatgctattacaactgctgatctcatcaagagaaatgatgttgatgctatggagatgcatactattggaagacagagtac

SEQ ID NO: 37754 - DNA, 358 bp, Glycine max
tacccactacacattctatatcacagcttttaacattactccccttaccttgtttcaaagatggtttttaaagatagggctgcccacccctctccttcctccaattctacctctcttccaatcaatacctccctcattgccccatatagagttgtgttcaataatgcttcattgcaaaacacatatgtttctatcagtttacatatattttccatcatatctcaagtcaccactgatgcaccatccaatgttgaaaaacacttcaacaaacatcattataactttgttcctaacaattttaaacccaagaccccttacattgtatattcctactcaacacaaaaatcactttgtatta

SEQ ID NO: 37755 - DNA, 319 bp, Glycine max
acgcttaagcttactacttgcattaacgactctgtctcagattcaccctcatttatgtctacagagaagccctgagagaacaagactaccactgctgtacctgcttcagcttatgatccagctaatcagctgcaaaggcacaagtggtgggctggccaccaattatgtcatttagaaagagcatcattcacaggaacagctatgaagaataggctgacaacaacccgaagaatgcttatgcgaacgtgaacctggatggtgcaccgtatatacgaaaggtggacataaagttgtacaagagctaccatgaactgacaga

SEQ ID NO: 37756 - DNA, 281 bp, Glycine max
cacacgcttgctacaagatggacacattcattctgtcccataaacttgtcttgtcaccaagggccgggcatacgtcttacgacaacgtcccacaacttcatcccatcctgtaatactaccagatcacatcacaacacatgctcttctcacatactaaatccactgtcttatcttacacggatcaaagctatccttatacctctgccatatcaactaactaccatgatcaacctttcaaacccattcgcgattcctcacaagctactggctgcattaacttc

SEQ ID NO: 37757 - DNA, 423 bp, Glycine max
gatcttcgtgatgagccattcaatgagaagtcagatgtttacaggtttggtgtcatctggtgggagctcgcatcattgcatcagccttgaagtgatttgaatccgccacaggttgcggcggctgttgtctttaagggaaaaagacttgagataccacgtgatttaaatcctaaattagcctcaataattgaggcttgttggtccaacaaaccctgaaaacgcccttctttttcaagacttatggattctttcgaaagtattgctgaaatcccctatgctgtaacctggtcgttcaagcatgtcattacttacctgtatggacggaatcattgctgttatttatgcacatactacagggattttagttgtgatgttcaacatgaatacactgtttcactagtaccatacgcacagatgtacatt

SEQ ID NO: 37758 - DNA, 384 bp, Glycine max
  unsure (1)..(384): unsure at all n locations
gaaaaaccggccgaccgacgcgtacggacacgcntacaattttcatcatcttcttcttttttgacatcaatcatcaccacttccgccgctttttttgacaagatcgaattgccttttacaaaaattgaacctccaaagaaagaccctctttcccaactgactctacctccttgttaacccttttaccccaccgacaacgaacttctcgttcaacatctgtgccccaaagtcgctagccaccatttctctcttacaatcattacccaaattgacttgtacaaattcaacccaccaaatcttacaattaaaaccaatttcaatgaaaaaaaatagtacttttttagccccaaacacatgaaattccccaaccgtttttcacccaac

SEQ ID NO: 37759 - DNA, 367 bp, Glycine max
  unsure (1)..(367): unsure at all n locations
cggacgcgtgggcggacgcgtgggcggacgcgtgggcggacgcgtggggaaggtatccgccgagaccaacagaggttgatctttgctgggaagcaactggaggatggaaggactcttgctgactacaacattcagaaagagtctactcttcaccttgtcttgcgtcttcgtggtgggttttgagtttgagaatggtctgcaggtcccttgtttggtgtgaactgaagtatgtgaaagtctataatctggtcttttctttttatatgttcctgaactttgtgtatgtgtgcatcccgggtccattagcggaccttgaaaagctatgaatgtgtacaatttgcaatcatgttttaatgaatntagtact

SEQ ID NO: 37760 - DNA, 417 bp, Glycine max
agaaattggtcgaagagggtaaagtcaaatatattggattatctgaagccagcccagatacgataaggagagcacacgcaattcatcccatcacagctgtgcaaatagagtggtctttgtggactcgtgacattgaagaagagatagtccctctctgcaggttagttcaagttcatggcactgcagctcttcttgaaaggagggaaaagaaagtggtttagttgttgttggctgtatttttgtgttaatgcgacttcaattttttaatgcttatattggtttcagggaacttggtattggaattgtaccatatagtcctcttggtcgtggcttttttggcggcaaaggagttgtggaaaatgtgcctacaaatagctccctgaaagcacattcacgctttcaagccgagaacttaga

SEQ ID NO: 37761 - DNA, 388 bp, Glycine max
cccacgcgtccggaaacttaatcgatcatcacttcacttcactaatacatcatggcagacgggacggagaacaagtatgagagctctgaggttgaggtccaggatcgtggtgtttttgactttctcggtaagaaaaaggatgaagaagacaagcctcatcctcaggaggaggtcatcgacaccgagtttcaaaaagtcactgtctcagaccaaggagagaacatgcacagcctcttagaaaagcttcaccgatctgacagcagctctagctctgtaagcttcttttcctttattttctttgcattgcataaacattatatatatataacttggtcattcttgaaggaaataccttatattaaacttggcttttttttttaatatttat

SEQ ID NO: 37762 - DNA, 394 bp, Glycine max
ggtgcattaaaagaatttgaaattaataacctgggttgcaaaacctttggtttaatagtgtcctgtaaccttttaaggggaggttgcaaaaaaaagttttggaccaagatcactccaatctccatttggcttctccagaaaagcctcctttcttgttaaggcagttgttaccccccttgtcaagcaaggatcagacagacctttgtggtttgcatcaaagcaaagtctttcttacttggatggcagccttccgggtgactatggatttgaccctctgggactttcagaccctgaaggaacaggagggttcattgagccgaaatggctagcatatggtgagataatcaatggtcgttatgcaatgttgggtgcagttggtgcaatagcacctgaa

SEQ ID NO: 37763 - DNA, 126 bp, Glycine max
ccgttttcggagagtattatcggtttgatgcgacttcatttgtcatggtaatgaggagagaggcaaaagtacgtatttatgtgaagccagatcaaaatgccgaaaacaaaggtgtattttgttaca

SEQ ID NO: 37764 - DNA, 329 bp, Glycine max
  unsure (1)..(329): unsure at all n locations
acaacatatcanaatgctcaaattatctttcttgcaacaactaatcctccttcaaaacttgatgaagcaatactttcgcttcttcctcaagcctttgaaattgtaattccacaccaaaaggagaggtctgaaatatttaaaattatcttaaactattacaatattcaacacaacataaacttttgtcatatacatgttttttctgaaggttacactggttcacatctatttgatctttgcaagaaacctgcctattttcctattacacaactactggatgaagagaataaaagaaaacaatctcatccccctatacctttgtcccattt

SEQ ID NO: 37765 - DNA, 445 bp, Glycine max
gtttgtaaattgcaaatgggtttggggaatttttaaggagatcacccccaagccctttcttcgtgaacaagcattattaccatggtgcttcccatttttaattccacatttgcttttgattaaccccagaacccattattaccttgggggggcatttttttttgttgccctttctttaccaatggcttcactttcactcacaatcaccaaaatggcccgtgtgcaaagccctcgtggaagaagaaaagctggttcccttgtatgggagaagaaagtcgtcgactgatccaagatcaaaatctattccgggcgataacatcccgcatcgtccggctggtcaaaggcctgaaactgctcctccacctgaaacaaatcattttcatcaacatgggtttggatttatgggtggcttggggggatttgcgccaccgccgatggcaacaac

SEQ ID NO: 37766 - DNA, 218 bp, Glycine max
tccccaattggtatttccccaccggccagaaacctatggggcttaaggggatccacctgagaaccaggcaccaaggtgcactgtccactcatttcaacacattattgaccatggttggccatggccccgacctgagttggagggttggctggaaaaaactccagccgaagtaaatgcttattggtctaacccaagggaatatactaatgcaaggaaaa

SEQ ID NO: 37767 - DNA, 423 bp, Glycine max
  unsure (1)..(423): unsure at all n locations
tttcttaacaaatgttttttggttttcacanaccgaaatacttcgcgccggcccgcacaattcaaacgcgctcataactcaactanattaaaatctccacataagcatcttgcaaccaattctgcacgtaattctgcaccaacaactgatggtgtgaacaatccttatctatatctccctgtaacttttgctcttcttgagattattaaataccacaagagcactgatctcctaatcaccaatcttcctttccacacgtttcttcctcaaattgcccaaaattttaagactgatcttcttttccaaatccatgctatactttcattgcaatacgcttcttaagcatatcttgttttcctcttttatgacactaactttgtttccattcaccccaaacgttttactattattcccaatgatatt

SEQ ID NO: 37768 - DNA, 377 bp, Glycine max
  unsure (1)..(377): unsure at all n locations
aggacgcgtggacggacgcgtgggcagacccgtgctcaaacgttgttgtacgagataagattgctgtagcgctgattgctaacacctgcagagtacaatggcctgtgtatcaacatctttgctcaagtcttcacttgttgttgacagactgagtgggtgaaaggacaaacccttagccaaccttttgcagtagttgtgagaagcaaccccaccaccccatcaggtctgaccatcagagctgggtactatgctgatgagctcgttaagaccacngatacacgggcttcaccagggaggggtatttggcgcatgcatgagtgcaatgctacctgtgggagagcgttggctttaattgggctatagaacactggagctta

SEQ ID NO: 37769 - DNA, 380 bp, Glycine max
gtccggaatcgaccgacgcgtccggtgtacctcccagcctcgaatcgcgtgcggcagtggctctttctggacctggtctcggcagcgttcttgggcctggtattcctcttcttcctgctcgtcttcacgccggcgggagactccctcgccgccttcggccgccagacgctactcctctccgcctcctccgcggatccgcgcctgcgcctgcgcgtgtcggcggccatcgaggaggcggggcagcggcagcctcccgtgatcgaggcctgccccgccgacaccgccgccgaccacatgccgtgcgaggatccgcggctcaacagccagctcagcagggagatgaattactaccgcgagaggcactgcccaccgctcgagac

SEQ ID NO: 37770 - DNA, 367 bp, Glycine max
  unsure (1)..(367): unsure at all n locations
cttccgccaccccttccggggaaagccattaaattcaaagagaggggttcctggtccggattttttggattggagaattcaatcctcaatttttttttattttttcccccattcccaaaagggcaaattcttatccttcacgtattggggtcctctctttttccttttcggtctccatccatccaattcttttcccatggctacgatcggacacaacaatctcaatgccaaattggttcttctcggggacatgggtgctgggaaatccagcctcgttttgcgctttgtcaagggtcaatttctcgaatttcaggaatcaacaataggggcagcgttcttttcacagancgctgcagtaaatgatgcg

SEQ ID NO: 37771 - DNA, 404 bp, Glycine max
tcgcccacgcgttcgcccacgcgtccgcggacgcgtgggttggaatatcatgcacagcttggtcggcgccagcttcgattcagggacatggctagagatattttaggacctggatgggcaagatactatgtaggtcctcttcaatttgccatatgctttggcacagtgattggtggtcctttagtgggaggaaagaagcctaagttcatttaccagctctacaacccaaaaggatcaatgaagctttatcaatttattattatatggggggtcataacactgcttttggctcaacttccatcctttcactcccttgagcaacgtaacatgatttctctgattcttaagggggtggatgccacatgtggtacgatcgggtctatatacatttgtcattccaaaaa

SEQ ID NO: 37772 - DNA, 249 bp, Glycine max
ttccattttcagcttatcgccaatgcttcctacattggcactcctggaaagggtattcttgctgctgatgagtcaacagggacaattggcaagcgtttggccatcatcagtgtaaagaacattgaatccaacaggctatctcttagggagctgcttttcactgctcctggtgtacttcaatatctaagtggtgtcattctttttgaggaaaccctttaccataacacaggtgcaggcaatccctttgtg

SEQ ID NO: 37773 - DNA, 445 bp, Glycine max
aaaatatcgttcggtaatcattgaaactgaaaaatgacgggttgttttctgtgtacattttgcttgatcgactcccaacctgaaatagatgtccccacaaacatattttgccaaatcatttagaaggtcatgcatgacaaatccttcttcatattggcttgcttgttgaaagaaagaccttgatagtagatcattgaagtactgttggccaacttcctctggactcctactgcattgatggcagtttaggaaattttcagccatccacaactgaattaaacactccctgtcaaacacataatccttggggaataaagcacagtaagcaaagcatgtcttgagatggggaggaaggtggtgatagctcaatgctaaagcaggaacaatatcactgttctttaattcccatatttcgcttttcaacacgctttcccattcccaggct

SEQ ID NO: 37774 - DNA, 268 bp, Glycine max
ctcgtccttcttttttctatcttcttatttacttgtgggtgtggttgatttttatctcacctgaaacatactaactgctgtgttaactgtatttgcagaaactcctgcaacttctgcaacgactgcggatgctgccatatgtacccatacttgaactacaccgaatcaaccaccaccgataccttgttcatgggagttgcaccagttaaagctcaattctaaagtgctaaaatgggtgttccctcttacaactataactgcaaatgtg

SEQ ID NO: 37775 - DNA, 362 bp, Glycine max
tcggccacgcgttcggtttgaaacagagctggatatgaattcaagtttattaggaagattggtgatgatgtgttcgacaagattaataaagctgaagcaagtatatatgttgcggatcacccgggtggattacacttagaagtggaaaaaataaggaaacttttggaggctggatctagtgatgctatctccatgatagggatccacggaatgggcggggtaggaaaatcaacacttgctcgagcagtttataatttgcatactgatcattttgatgattcgtgtttcctacaaaacgtgagagaagaatcaaacagacacgggttaaaacgcctacaaagcattcttctttcacaaatact

SEQ ID NO: 37776 - DNA, 482 bp, Glycine max
cccacgcgtccgaaaaacaataaacaattttttatgtatcaaaccataggtctttcggttatgcttttgaattaatgaaagacctatggtttgatacataaatacccagaaaaaattcatgttaataagaaaaatttttataaatatattacaagaacaagagatcaaaaaataacagaaaaaaaagaaaaagataattctgatttacttgttcctgaaaacattttatccgctagacgtcgtagagaattgagaattctaatttgtttaaatccaaataatataaatagaagacaaattaatatctatatctatctatatagatagatatagatacataacataaataaagacacgcattatggtatggcattgatactaattcactgatatataccttagataaaaaaagaatccacaaaattatgttttttttaagtataccattttttatggtgaatctataaaaaaagtctccttta

SEQ ID NO: 37777 - DNA, 252 bp, Glycine max
  unsure (1)..(252): unsure at all n locations
cacgcgtncgattgaatcttcgctatccttctttttttctacttgcactcgaatattcactgtggcagatggggggggttttctaaaaatctgtgccaggccatttgggatgatggtcaggattgcacttgctgaaaagggtatcaaatatgattccaaagaagaggacttgcataacaagacccctgtgctcctcaaaatgaaccctgttcacaagaaaatacctgctctcatccacaatggacaacccat

SEQ ID NO: 37778 - DNA, 251 bp, Glycine max
atgatcatggaagcttttagggtgaaaggcaaatgcccaaaatcttatctttactcttaaacgggcgtcccttattcaagttaaaaccaaattacatgtgtttttggccaataacaccaaaaaaaatgtttgtgactttaaagtcaaaagtagttgggtggaaccatcctgcggtggttattctggtgaatctaacaacattgttggccaaatgcataaaaagcacaccggtcaaaatattttgattggga

SEQ ID NO: 37779 - DNA, 427 bp, Glycine max
  unsure (1)..(427): unsure at all n locations
cccacgcgtccggggagaaagacaccactgcttggtttgaagaacttcgtgttgatatgaatgtggttaaaaacatatcaatggagatacttgatttttatgaaagcaatagaatgttcactgatgagagaatcaatgctgctcttcagaagctgagcctgagaccctagaacttactggnagatgactcaacgctgaatatgtggaatgaagttaatgctatggtgatttgtctgaatgatttttctgggtcaatgacatgttttacggtagaacactatctaaatgtatccaaaagtaagggcacgtaatattgggggtcaattcaaagtgtcctattaaagagcaaaaggaggatgaaaaaaggtgattctcggtgaggaccagatagactcccacctgattcatagaatcttttgtttttatc

SEQ ID NO: 37780 - DNA, 354 bp, Glycine max
ggcagatgtcctgagtgaagaacaaattggtgagatcaaagaagcctttggctggtttgacaaagatggagatgggtgcattactgtggaagaattggccactgttattcggtcattggatcagaaccccacagaagaagagctccaagacatgataaacgaggtcgatacagatggcaatggaaccattgaatttgttgagtttttgaacttaatggccaagaaaatgaaggaaactgatgcagaggaagatctcaaagaggctttcaagggtgtttgacaggatcaaaatggctacatttcagcaagtgagttgaggcacgttatgatcaatctgggtgaaaaactaactga

SEQ ID NO: 37781 - DNA, 324 bp, Glycine max
  unsure (1)..(324): unsure at all n locations
aaccctatccacttctccgcatcacgattcaaatcttcgtgaagaccctttcaaataaaacgatcacatttgaaattgaatcttcggacaccatctacaactttaaagccaaaatccaagacaaagaaagcatccctcccgaccaacaactcctcatcttctccgggaaacaactttaagactgcctcaccctctcctactacaacatccaaaaagagtccacgcttcaccttgtcctccgncttcgtttcggctccaataatctcaagaaaaaaacctacaccaaacccaataaaatcaaacacaaacacaaaaaagtcaaac

SEQ ID NO: 37782 - DNA, 428 bp, Glycine max
agcacaatgaaaagaattctactaataaattttttcttcgtaaaccaatggcagacccattaggggataccatcttcagtgtgaggaaggagaccattcggataaactggcctgaatatcctaattaccacgccccaaaagtatttgcaccatttatattggacgggcgacatctatactacgttaatgcatttgaaaatgcagctagcaccatggagacaagtgctgtggcagctgagaatattgcccgactcatactgtcaagatatattggccaagtaattgtgcattcatctaatatgtctgcaagttctcaaagagagggtactcatttagatatgtgagacagtgatcgcaagatattgttagtttggatgataggagatattatataaattgcatctgaattctgaaaatttggaaaatca

SEQ ID NO: 37783 - DNA, 379 bp, Glycine max
  unsure (1)..(379): unsure at all n locations
tccagggtctaactttactgtttaacctcctgttttaaaaaatccagggttgttccatgctgtggcttcctctctctgaacccaaacaggcccttcaggcaaatggaaaaggcttctctgaattctctggcctncgcagctcatcaggcttccttcccttttctagaaaatcttcagaggatttccattctgtcattgccttccagacctatgcagttggaagcagtggaagatacaagaagggtgtgacagaagcaaaactgaaggttgccataaacggatttggaaagattggaaagaacttcttgaggtgctggcacggtcgcaaagactcccctcttgatgtcattgccatcaacgacaccggtggcgtgaaaca

SEQ ID NO: 37784 - DNA, 183 bp, Glycine max
tccgtttaagcccattttggaagttcaaaattaatcttctaaatggaagggattttgaagttgtccgatttattacattgtccagttgcacctgctacattaaccaaagttgatttaccctcatatcctgtgtatacttcaagtatttttttcatatgggttgggcatacatcattcattgct

SEQ ID NO: 37785 - DNA, 376 bp, Glycine max
  unsure (1)..(376): unsure at all n locations
ctaattgcttaaacctaattctcatatctttatcgntcgattcttctcctcctaaagatgcagatcttcgtgaaaactttgaccggtaagaccatcacccttgaggtggagtcctcctacaccatcgatctctatgaaagctaatagtcaatgactggctagtatatcatcctattagtagagactgatctcctgggctatacagtttgacgttggttacactcaaggcgtctacttcttacagcgctttctcaccttcaaggtctctctcagatttaaacgtggaacgcatcacattgccatgcacacccatgactcgcaaggtacagtgacagctgctgtgacccctgttgaaaatggcacttctgacaagcag

SEQ ID NO: 37786 - DNA, 379 bp, Glycine max
gcgggttgataacacactgtggttggatctctactatagaagcaatatgtgctgcggtgccaatgcttacgacttctgtgtgggcagctctaataggtgcatgacacccctgcaggcgtatctccgcaagcgcacctgctaatgtcactgcagatgactcagtgtacactggcttagctgaagctgctgatgtcacagacataatcaatgctgctgtgaccccagcttctgatgctcaatttccaactctcaatggccttgaactatctgcaacaaggatagaccttggtcctaggggtgtcatcccactccacaatgatccaggatgcctatgaactactcattgtgctataaggtcacatacttgctggattcatat

SEQ ID NO: 37787 - DNA, 285 bp, Glycine max
ctacgcgtacgcgtgggttgcaacaaaggactatattctagtttttttagaaagaatcacatgttgaggaatgggttatatgtggcaactgccgagctggagtatcgaaacaagaacattggcagacattcatgaaagcgaaagccaagttgaggaattgaatcactacgtgctattccttggatttttgcatggacacaaaccaagattcatttgccagtgtggcttggctttgggtcaacatttaagcatgtagttgagaaagatcccaaaaaattcctaaat

SEQ ID NO: 37788 - DNA, 296 bp, Glycine max
agattctaaagaaatataactaatattctttagaatattcacaatgaatattaaattcaaaggaactgtagatagagaaaagactgaaaaaggaggatttgaaatgcgagatctaaaaacatatctatccgtggcacctgtagtaagtactctatggttcggagctctggcgggtctagttgatagagatcaatcgtggttgtccagatgcatagatatctccgtatctttcattctaagtattgacacgtagagtagtgaagaagatcatagatccatttaagggtcaaatatat

SEQ ID NO: 37789 - DNA, 396 bp, Glycine max
  unsure (1)..(396): unsure at all n locations
cgacgaggccctcgcacgtgttcaggaggcctggcacgtgctctcccaccctgaacgccggggccgccacgaccgcgagcaaaacgcaaacgcaaaccctaggaggacgacgacgtcgttttggaccgcgtgcccctactgctggaacctcttcgagtacgagaaaaggtacgaggattgcgcgctgttgtgccaagtctgcgggaaggccttgcagggcgtgcctgtgaagccgncaaccaagacgggcgactccgtcgtggagggtgaggagctccggcagtactactcgtgtgaagcgagtgtgccattgatgtattacgaggtttaaggtaacaatggtttgggttgaccaaatattgcacaatttggttacatttctgatgatgattatga

SEQ ID NO: 37790 - DNA, 432 bp, Glycine max
gacccacgcgtgcgctttggaccagcataacgagcccatttcgcttttaggcaagcaactcaagcacagggtcaagcatttatccaaaattggaggtataggaactgttccaacatgacatgttcataccggtatctagaagcctggaatgctcgtgacttttgcaccaactggactgacaactgaagtcaagactgtggagatgcaccatgaatctcttacagaggcacatcctggtgacaatgtgggattcaatgttaagaatgttgctgttaaggatttgaagcgttgttatgttgcctcaaactcaaatgatgaccctgcataggaggctgctaactttacagcccaagtcatcatcatgaaccaccctgttcacatcggaaatgcttatacccctgtcctctactgcaacacttctaacattgattt

SEQ ID NO: 37791 - DNA, 390 bp, Glycine max
ctcacgcgttccgtgagcgctgaagttaaatttcatatcaaacaaaacaaccacaacgctagtgtaacaaactatcaaacgtataattaaacaaacgttagagtaccataaacataatcataccaacaaaacgcataccatccaattatacactttcaaatactttcaaatttatattggcaaaccccacccccctacgacctccagtccttcaaattccagcccatcaaagaatccatcgtgtcacgggaaatgacacgccgctacatgaccgacatgataacctacgccgacaccgacgtcgtaatcgtcagagccggttcggccgggctctcctgcgcgtacgagctcatcaagaaccccgtcttgagcgtggccatagtctagcag

SEQ ID NO: 37792 - DNA, 365 bp, Glycine max
  unsure (1)..(365): unsure at all n locations
cccggaagagtggttttttcacagaggaaactcttgaattccagcggaagattctggagagggctggccttggtgaaagcacttactttccagaggctgttctcaatgatcctcccaacccttcaatgaaagaggcaagaaaagaggctgaggctgttatgtttggtgcaattgatgagctgtttgctaagacttctgtgaagcctaaggacattggaattctgattgtgaattgcagcctcttttgccccacgccatcgctttcggcaatgattatcaatcattataaacttagagggaacataaagagtctcaaccttggtgggatgggatgcagtgcangtctcatttcgattgatcttgct

SEQ ID NO: 37793 - DNA, 426 bp, Glycine max
ggttgactggttgttttttaaaattgcatgaaacatttatttgttcttatagaaaaagtgacaagtaagtcttcactgcaagtagaagatattggatccagttccagggttgaactccatacgattattttttaatagaaaaattgactgtgacgtagctgtggaggacacgattggtaaattctacgatgatctcagaccgccacagaggaccttcaacttttcttttcttcaacctgtcaaatttcctcgttctcaacgccttttcgtcgtcagagccagcgatttggagttcgaagccaccgttgtcgccggcaaggtgccgcccaaaccggcggctcctgtcggaactccggtggtcccttcacttccacttcaccggcgtcctcgccggaaccggaaagtcgctgcgcttcggtcggcttt

SEQ ID NO: 37794 - DNA, 357 bp, Glycine max
aaagaagcgatatgaacatgacggcatctgtgttgaaagccgacctgtgacttgatgctgagcgcatataactgcgtgcattcgtgcattgagacctcatagtcttgcaaagactgacgttgcactgtacgacggatccagcactgtatgctgagcacactctgatacacttgacgacacttcacgagtgcaatacagctaaatttgcatgccaccaaaaagcatatcgacgtgaaggggctgtattcatatgccaaacatcttgaagacaccaatatgactatgctttactgtttgttcgttgaactcgattagttgggcttgagattcttgagaatccgatatatgttccatgtc

SEQ ID NO: 37795 - DNA, 396 bp, Glycine max
accaggcgtccgcacaccgtaaagccaccatttacgctggtgccatttgtggtctaaacgaggatcctaatcatcagcgagcctaccgcatgctgacatagctaatggactcgacaaaacggccactagctctggggagaacaatgctctgacttttgatctccgtggaggaactgtcgaagtctctctctctcaccatccaggagggtaaatactaggtcaaggccactgctcatgatactcactcgcgaagcgactattttgacaacagaatggataaccattatgatcatgaattcatgaggaaaaacatgatcgaaattagtggaaatgccagagctccgatgaggttgagaacagcatgtgagccgccaaagaagactctttctttcactg

SEQ ID NO: 37796 - DNA, 174 bp, Glycine max
cgtacgtaagcggtgagatttgcggatctgtgaaatggcggattcttttcgggaggagaacgtttggattctggaattttcggagcatgccgtgcgttactaggagatggttgtgttcatggagaatgttgcaaagactgtggatgttgaggagttgacagttgtcgagaggaa

SEQ ID NO: 37797 - DNA, 245 bp, Glycine max
ctcacgcgtccgcacgacgggaagccaccaacgacgctggtgtcatacgggggctcaacgtgatgcgaataatcaacgagcctaacggggctgacatagcatatgcgctcgacgcaagggccactagctcaggggagacgaatgttctaacttgtgatctccatggagggactccagaagtgtatgtactgaccatgcatgagagtatattcgaagtcaatgccactgctggtgacactcacttg

SEQ ID NO: 37798 - DNA, 399 bp, Glycine max
ccgggccggcggacgcgcacgctcagagccaccgcggacgctgcaggcaaacttaccctcaatgcggggcgaactatctgcgagcctaccgcggctgccatggcttatgagctcgacacaaaggccactgcctctggggcgacgaatgctctcattttggatctccgtggaggcacttttgatgtctctgttctcaccatagaggagggtatttgcgaagtgaacgccactgctggagatactcactaggcaggcgaagatttctgacaacaggaatggcgaaccattttgatcacgaattcaagatgaagaacagcaaggatatcagaggcaatgccagatctttgaggacgtcgagaacagcatgagagcgatccaatacgactttgtcttccactg

SEQ ID NO: 37799 - DNA, 211 bp, Glycine max
tcgactaatatggcaatgttgataggcattctgacgaatatggcaacccggatcataccggtatcttacttatgtagacaccaaaattgttgcaaactacaatcatgaccctaataatcaacataatattactgttatctatcccgagaaagacacctatagacatcattatggtcgtgaatactacggtcacactcacaatcaacatgat

SEQ ID NO: 37800 - DNA, 350 bp, Glycine max
tcttgtgctgatatccttgctgtagcagcaagagactcggttgtagctcttggtggacctacttggactgtgcaattgggtagaagagactcaaccactgcaagtttaagttctgctaactcagacttgcctgctcccacttcaagtttaagtgcccttatcagttctttctccaacaaaggtttttcatctaaagaactggttgctctttcaggatcgcacacaattgggcaagctcaatgttcaagtttcagaacaaggatttacaacgacaccaacatagattcctcttttgcaaaatcattgcaaggaaattgccctagcacaggtggtggcagcacattggcccc

SEQ ID NO: 37801 - DNA, 266 bp, Glycine max
gccacgcgtccgggagcttactaagtgcctaaccgatcaaaggaatgcttgcaaagaggcccgagacaacattgaagatgcttataaccttatcatgaaactggtcactgaaagagagattttaggtacaaaaggtctgaattttcaagaggaattggcttctgccaagggtgagatatcgcgcttgaagagtcgaatcaatgcttcagaagttgctgctaacaatgaccacagtgcagacagatggatgtgaaaacaaggtcaat

SEQ ID NO: 37802 - DNA, 369 bp, Glycine max
cgtacgctccatcactcttactcgctcctatattcgctcctccaccatcgctctctacatcaaggacgggcatatacaaatcacatggcacacacagcatctggaatggcagtccatgatgactgctacttgaggattttggagctgaatgcaacaaggacacaccttttcatagtttttaacattgacgatcagcataagcacgacattgcggagaatctagcagcacctgcccagggctatgtagatttcactgccagacttcctgctgacgagtgccaatatgctgctcatgatcttcaatctctttctgaacgcaatgtacctacaagcataattcatttcattgcggggtcccctgacacatca

SEQ ID NO: 37803 - DNA, 398 bp, Glycine max
gggctacgacctacgcgtgcgtcgaggaagtcagaccgcctgatggcgagtctcgaactgggcagcgtggcgattgggacgtgcgccatggaattggtcaacgaggagatccacgcgcgactgagcccgatcatggtatcaaccgcgcgtggtgaattaaactgcggctgcgttcaggctttgcacgatgtactacgaagattctcgttctgcagcatatgctgattctagttcgggctcggccagcgttgtctcctaccggatctcccaatcgcggacctcgacgtcgcgtttgacactggactcatagctgtgcgacgtacgcgccatgaacgcgtcgtcgcttattcggaagctgaaacgactcctcaacataggatccgagaggaaactgagag

SEQ ID NO: 37804 - DNA, 402 bp, Glycine max
cttcaaaccccaaactctcattcttcatcggatagcccgtcacatattcttaccacggcgctgccaccaccaaattatgctcattcaaacaaggcacaattaccatgtacttaaccctacccaactaccacctccagtccttcaaattccagcccatcaaagaatccatcgagtcacgggaaatgacacgccattacatgacctacatgataacctactccgacaccgacatcataatcgtcgtatcctgttcatccgggctctcctgcacgtactatctcagcaagaacctcgacgtgagcgtcgccatagtcgatcagacagtgagccccatctgcagcacgtatctatgatgacagctcttctactcgacggtggtcctcatgcctgcgcacctcttac

SEQ ID NO: 37805 - DNA, 431 bp, Glycine max
ctctcattctgggaaaatgatcattagcactgagtggggtgctttctcaaatggtctcccttgaaccaagttcgataggggaatggatgctgatagcatcaatccgggcgagcagatctttgaaaagacaatctcggcaatgtatctaggtgatattgatagacgagtgctgctggaaatggctgaagagggtggcccgtttggaatatctgtcccgcagacactatctacaccattcatactcgggacctcatatctatgtgccatgcaataggactgatctggcgaagtacatgcacgagggtctatgctatacgatgaatcatggtgtgaatacaattgaagcggaagataaacagctgtagatgcttgtgagactattgtaaagcgaggcggcagcttagctggtgcaggaatagaggggatactac

SEQ ID NO: 37806 - DNA, 405 bp, Glycine max
caagtttgagaactaagaaggagaagcaaatggcttcctcaatgatctcttccccagctgttaccactgtcaaccgtgccggtgccggcatggttgctccattcactggcctcaagtccatggctggcttccccaccaggaagaccaacaatgacattacctccattgctagcaacggtggaagagtgcaatgcatgcaggtgtggccaccagttggcaagaagaagtttgagactctttcctacctgccagaccttgatgatgcacaattggcaaaggaagtagaataccttcttaggaagggatggattccttgcttggaattcgagttggagcacggattcgtgtaccgtgagcacaacatgtcaccaggatactacgatggacgctactggaccatgtgga

SEQ ID NO: 37807 - DNA, 374 bp, Glycine max
cttctatccctttcccattctctccctctctgccccttgctcttcaaccctaaccctaactctaattccctgttcgtcctcttgacttccccctctctcgtacccttctccatctacctacggcttcatgacctcgagggagaagttggacgtggcgcggcagctcgccaagctgggcgttgacatcatcgaggccggcttgcccgccgcctccatggacgactgtaaggtcgtgaaaatgatcgtccaagggtcggaaatgccgttgacgacggctacgtccccgccatctgcggactctcccgctgcaacgagaaggacatttgaactgcctgggaagccggtaagtacgccaagaagcccaggattcacac

SEQ ID NO: 37808 - DNA, 454 bp, Glycine max
atagcatccgtgtgacatacagtcaatgtatgccaatggctctacaaccctaacccgagctgtaagcccctgtgcgccctcttgacttccccctctctcgaaccctaatacatctacctacgccttcatgacctcgagggacaagctggacaacgaccggcatgtcgccaagctgggctttgacatcatcgaggcactgcttcacgccgcctccatgaactactgcaagatcgtgaaaatgatcgtccaagggtaggccctgccggacacgacggctacggtcccgctatctgcggactctcccactgcaacgagatcgacatttgaactgcctgcgaggccgataagtactccaagaggtccaggattcacacccatatcgccagcaacgcccttcacatggagtacacgttgagaatgtccaaagacaaagtcgtcaacattacccgcaata

SEQ ID NO: 37809 - DNA, 465 bp, Glycine max
agaacaagtagttgagaactaagaaggagaagcaaatggcttcctcaatgatctcttgcccagctgttaccactgtcaaccgtgccggtgccggcatggttgctccattcactggcctcaagtccatggctggcttcctcaccagaaagaccaacaatgacattacctccattgctagcaacggtggaagagtgcaatgcatgcaggtgtggtcaccagttggcaagaagaagtctgagactctttcctacctgccagaccttgatgatgcacaattggcaaaggaagtagaataccttcttaggaagggatggattccttgcttggaattcgagctggagcacggattcgtgtaccgtgagcacaacaggtcaccaggatactacgatggacgctactggaccatgtggaagctgcctatgtttggttgcactgatgcttctcatgtgttgaaggagcttcaag

SEQ ID NO: 37810 - DNA, 411 bp, Glycine max
cccacgcgtccgcccacgcgtccgcccacgcgttcgcccacgcgtccgcggacgcgtgggttcagatttgtcagtatgtaatgccctgattactgtgcacagcaaatgtggtggaattgttgattctgagttagtttttggacaaatttcccatccggaccttgtttcatggaacactatcattgctgcatttgcacagcatggtctgtatgacaaagcacgctcctactttgaccagatggtgacagtcagtgttcaacctgatggcataacttttctgagtttactatctgcgtgttgtcgtgctgggaaggttaatgagagcatgaatctatttagtttgatggttgataattatggtattccaccaaggtctgagcactatgcttgcttaattgacgtgatgagtcg

SEQ ID NO: 37811 - DNA, 447 bp, Glycine max
cttcactccaaaaatactactaaagagatgagttttgcaggttttctttctcttcaatcaatgtctgctacctgcggcttcttcttcttctccttcacccttctcttctccttcttctccttcctcgtcttcatctccaggatgaagccctggtgtaactgcgatctttgcaagagctacttgacggtgagttggctgaaaaagctccccaatctctgcgactggtacactcatctcttgcgtaaatccccaaccggcaccatccacgttcacgtgctggggaacaccatcacctcgaatccccacaacgtggagcacattctcaagacgaatttccaaaactaccccaagggcttcatccctgttaataaatacagaaagaaacagaacaagagaaacgtttataggtgcctaaaaaaaaaagtgctctcttgctccaagctgccc

SEQ ID NO: 37812 - DNA, 382 bp, Glycine max
  unsure (1)..(382): unsure at all n locations
ttatcctaantcttgtgtttattttgctgcaatggcttcaaatcaggcgccggggaccatttagggagctactgcaaacccatttgtgtgcaaggttcatattgccctcaaattgaaaggagttcaatacaaatatgtcgaagaaaatttgaagaacaagagtgaactgcttctcaaatccaacccagttcacaagaaggttccagtgtttattcacaatgagaagcccataacagagtctcttgtgattgtttaatacattgatgagacatggaagaacaaccccatctttccttcttatccttaccaaaaaaccttggcttctttcttgtccaaattcattgattataaagtttttggtgctgcattgaaattcgtttta

SEQ ID NO: 37813 - DNA, 478 bp, Glycine max
cacattcgtgcaaggaaaacccttccttccagttccagcagctcccactaaaaatgttcggggagtggttcagtgcggtgtgtggtgcaggaagaaggagatacacccgcaattccacgaggaagcgaaggtgtactgcaacggggagctggtgctgacgacaggtgggacccagaaggagtacgtggtcgacgtgtggtcggggaaccaccctttctacctcggaagccggtcggcgtctatggtcagcgacgaccaggtcgagaagttccgcaagaagttcggagagctaaaagagatcatggagattcctgttctcaagggagagattgttatcccctcaagacgcaagggcgtttccaaaggaggcaagaaaaaataatttattcgattcaaacatgattgtcttttttcttcttcttaatttcaattcctgtaatgtaatatgataaaacgctttaagcctgtgctatggata

SEQ ID NO: 37814 - DNA, 310 bp, Glycine max
accggacttggcattacattgaaaaaaaaaacctttttacttttcaattatcaaaatggctgcggggggtgtcacaggagcggggctaaccctaaggatagggttggcaatacctctttcctttccaaccccctttggaaccgttacaatggccgtatccttcgaccccaagaacggcaacaaactcactcttaccaaaaccgaggaagcttttcttgctgccaaggagctgatgcttggaagggtcaactccccaatttaggccttcaaaaccgtgggtggacaaccaattgtgattgattcaatcaaa

SEQ ID NO: 37815 - DNA, 430 bp, Glycine max
caaaagattgaatatttggccctggaccaaccattttggaagtcaagggccttccaccaaatgattgggaaggtcaaaccccacccactattggctaacttcaaggggtttcaactaaaatgggcccaccagccacactttgatgcgagcccttgagggtggaacaatattgatcaattgctttgatggttttgatgcttcaattccctttggaaggtacaaaatgagcggcattggcagggagaaaggtatctacaggctaacaattaccttgaagtgaaacttgggtttcaccagtgaagaacctgcatggtgtgattgtgaatgctcaactgtataccgaatctacgtgctatcattttttcgtgagcatggctgcataatatgtgtgtctaaataaactgatagtactgacatatacagtgattat

SEQ ID NO: 37816 - DNA, 295 bp, Glycine max
cttcctttttttctaacaaaagcttcaataaacggggacgggaccctatcactagctactcccaaaccattttttttcataatacatatttccctcaatttatatagaactcaatacaaatatttccaagaaaatttaatgtacaatattcaacttcttcttaaatccaacccaattcacaacaaatctccattgtttattcacaatgaaaagcccatatcacagtctattctgactgtagaatacattcatcaaacatttaataacaaccccatctttccttctgattcttacc

SEQ ID NO: 37817 - DNA, 453 bp, Glycine max
cccacgcgtccggttcttcttcgtcgttatcttcttcttttgttgtttgtgtgtttgttttttctctcacctgaaaatgtcttgctgcggtggtaactgtggttgcggaagcgcctgcaagtgcggcaacggctgcggaggctgcaagatgtacccagacttgagctacaccgagtcaaccaccaccgagaccttggtcatgggagtggcaccagttaaggcttaattcgagaagtgctgaaatgggtgttcccgctgagaacgatggctgcaaatgtggagctaactgcacctgcaacccctgcacttgcaagtgaggtgttggagagctaaagcttcaagcataaatggcccttataaataatgataaaaactatatgtaggttcaaaacttcaaaattatgtagtatggattatgttgcactctggggtttagagcttaacaaacaccct

SEQ ID NO: 37818 - DNA, 173 bp, Glycine max
gtaattcaattattatatgtatgtaccatgccattgtatttttgtatgcttactactactactactaccactacaaacacttgttgcttcatttttcattctaaaacttgtactgagaaacagaaccttcaattttctctgccttctcattgtgcaataaatttcttaccttg

SEQ ID NO: 37819 - DNA, 442 bp, Glycine max
aaaaaattagaaaacaatatagatacgatcttttatcctataattttatcaattatgcagataagaaagactcatatatttatggatatagatccctatttcaagtaaaaaaaaaccaagtgatttcttctaattacaacacgtataaaaaagaattattggatatcatagataatctctttatcaagaattatatatcggaagatgcgattctagatatggaaaaaaatatgtatagaaagtgttttgattggatgggaatctctatagagatactctatagcgccatatatcatacccagaattggggctctttaaaaaatgtgagatattatatgacgcatataggggtaactcgcaggttataccaatcaaatcactttttttttcttataatgtaaatcaaaatgttagtgaaaataaaaagcacattactagaagg

SEQ ID NO: 37820 - DNA, 291 bp, Glycine max
  unsure (1)..(291): unsure at all n locations
aagatggagggcgcagaagcagcaaagttcattccacaagagaatcggaagggtccaaaacgacgcgcagcgattcggtctccatggagtcaaaggncgcatcgttgaggctcaccctcttaaatctagactccaatcaacagggagaatggatgaagcgatagagaggcaatgcaaagttaacctgtacggaagtgcttttcccaggaaggaggagcttgacaggcaaatcctgtccaggttagagcggccaaactggaccaattccttctgcaatgctgggttttggaa

SEQ ID NO: 37821 - DNA, 228 bp, Glycine max
tcgattaaaattttgctaccgaggctgcagacctcttgactgagatagcattggcaaagggaagtagagataacaccagtgtcattgtagttgagctaagaggaacagtaacaactgattgaggcctcgtttctgtcaaaacatgtatttttatttttattttcttctctaattcttgccttgctgctttggactaatatacactcaggttgtgctcttctcattgcc

SEQ ID NO: 37822 - DNA, 415 bp, Glycine max
gcacagattacgaacacgaagaagacgaagtttaagaacgatagtaatggaaatcatagcccggattgacagcactcgttaccaggggtgcctatggaatcggcaaaggtcttacactaactcttgcacacaacggtgccttctatcacgatacgggatttctctgaagaaaagggaagacaagctgcaagtactcgtctagaaaattaactcccattttcattctaagttaagatgcttcgctggcatattggtcaaatgtgatgcgagtcatgcatggtatctagctgctgcatctgacaagcattttgggacatatggaagactagacatttgtattaacagtgcagggattagtagatctgtaccattccgcgatgatcaaactgatgtcacccgaacattgaaatacact

SEQ ID NO: 37823 - DNA, 336 bp, Glycine max
gtcaaacatacggactcacattcacttactttttatatgatcacactttacaaaagggctggcatcattttgatagcatgcgagactctgcattatatatgacattacatgatgactgctaattcaagattttggatctgaactcaaaaaggacacaccgtttcatagttattaagactcacttccatatctagcacatcttaatgtatacatttgatgatacttcccaatactattaatatatcactgtcagccttcctactaacgattgcacatatactgattatcattttcaatatcttactaaacgtaatgtccctaaaagcataatttttt

SEQ ID NO: 37824 - DNA, 343 bp, Glycine max
  unsure (1)..(343): unsure at all n locations
tcgtgtgttagtaagctcatcctagagttttaaaaatgtcagcagcctccttcatggctctctgttccccatccttggctggcaaggccgtgatagctgggcccatcagcccccgaagtcgggagggtcagcatgaggaagaccgttaccaagcaggccttttccggaagcccatggtacggcccagaccgtgttaagtacttgggcccattctctggcgagcccccgtcctacctcactggcgagagcccaggtgactacggctgggacactgctgggctttcggccgacccagattccttcgccggaaaccgtgagctcgaattgatccactnccaggtgg

SEQ ID NO: 37825 - DNA, 195 bp, Glycine max
tcgattttatttaaggcattgatcgctgaatttaatagcgattcttgaaaagaacatacaacagtgaagagaagtgcagcatccttcaaatgtgattttgttttccttttctcattttttgtgatcaagtctcgtttgtgcagttttgaatttcaacccttgcgaacaaataaaggtttatagttcataaatttt

SEQ ID NO: 37826 - DNA, 343 bp, Glycine max
tccacccattcgttatttcccactcttatcaatttcatttattccgacccagttttttttgtcttcttttcagttcctgaaattgggtcaattaggatttcggagaggcccattggaggcgccgttaatttcaatttatctcaaagacggagcttggtaaagcccgttaacgccgaacctccacgcaaggattccattgttcctctcgcagcaacaaccatcgttgcttctgcttctgagacgaaagaggaagattttgaacagatagccagtgatctcgacaatgcttcacctcttgaaatcatggatagagccctcgacaaattcagcaacgacatagcta

SEQ ID NO: 37827 - DNA, 295 bp, Glycine max
cttgctgtttcaacttcaacgcgcttcggggggatcattgatatctcttgaaaaacggcacaagaaacctttctattcacatctgaatctgtaaacgaggggcaccctgacacgctgtgcgaccagatctctgatgcagtacttgatgcgtgccttgaacaggaccctgacagcaaggttgcctgggagacacgcactcagaccaacatggtcatgggcttcggagagatcaacaccaacgccaacgtagaccatgaaaagaatggttcgcgacacattgcccgcgaaggtggat

SEQ ID NO: 37828 - DNA, 348 bp, Glycine max
aaaaaaaaaaaaaaaaaaaaaaaaaaaaaaaaaaaaaaaaaaaaaaaaaaaaaaaaaaagggaaaaaggaaaaaaaaaaaaaaaaaaaaaaaaaaaaaaaaaaaaaaaaaaaaaaaaaaaaaaaaaaaaaaaaaaggggggggccgttttaaaggatcaaagtttacttacgcgggtttgcaaggtaatattttttttttagggccaccaaaattaaattaatgggccggggtttaaaaacgtggggatgggaaaaaccctgggtttaccaaattaaatggctttgaagaaaatcccctttttgccagttggcgaaataccaaaaaggcccaaaccaatcgcctttcc

SEQ ID NO: 37829 - DNA, 409 bp, Glycine max
cccacgcgtccgcccacgcgtccgcccacgcgtccgcccacgcgtccgcaaaacccacgtaagaaaatataaaaaagagcattacttttttaatttctccttcttttatgcaaccagaagtgtagtgtgttgtgtatgactaggtttctgccagccctggggataatgggtaattatctagattcttcagctaaagtagaagcagctcacagttccagaaccccttctggaatttcaaaaactagaccttcatctgttcctcccaacttatctattctgtcatatagtgaagcaagtgatttctcaaatcttcccacaccgaggtccgagggtgaaatcttgtcttccccaaatcttaaggcctttacctttaacaagctaaagaatgccaccaggaactttcgccccg

SEQ ID NO: 37830 - DNA, 427 bp, Glycine max
cccacgcgtccggagatgatgaagagatctggaaaacatgaagcggagggaggagaagacatactcatcgacagattcctcaagcgcctctctttcgtagccatcgcagtagcctcctcctctccgccgcttcctccaacaactacaaccactcccgcgtcctctgcgtctccgccggcgccggccacgaggtcgccgcgctccgccgcctcgggatcgacgatgtcaccggagtcgagatcctcgagtccccgccgctcgtccgccgcgccgatccgcacaatctgccgttcttcgacggcgcgttcgacctcgccttcaccgcgagattcgacgaggcactgttcccggcacggttcgccgccgagatggagcgcgtcgtccggccaggtggcgcgtgctttcttctcgttgcggagtctgggga

SEQ ID NO: 37831 - DNA, 292 bp, Glycine max
  unsure (1)..(292): unsure at all n locations
cccacgcgtccgnccacgcgtccgggccgccgggccaacggactcttttgggccaccggttgaaggcccaacccctccgccaatttttcattcgccgcggccaaggccattaacggcttgaaggatcaaagccaagttttaacttccccttacccaacttacgtgggggttaacaacggcaacgggggcccgaaacttcttgaattgtgaaacagcgcctctttccttatatgcacacattcgccactgagcaaagaaggttgtctgtggatgtgataaaaaaggcattcag

SEQ ID NO: 37832 - DNA, 358 bp, Glycine max
accttttctcttcctcaactatctcgaggcattagggtaatcgtatcttggtcctacacaatacacatgaaacaactcagcatgaacatgccaccctcattaacattgctgataaccctatcaaagtgcaccttactattctatacaactactaaaaataccccgcatttcatatcatcatcaccgataacgatttctcaacactatatgcttcactcattcattatgcacgcatgtaaaccatctactgaacacctaccatttaccatcattttggcatctataatgaaaatttcctcactaacaatgcttctaatgatgacataccctagccattttacaccttccccagacaatc

SEQ ID NO: 37833 - DNA, 329 bp, Glycine max
ggtcatttttgacgttcatagacatattaccaggcctgattcaagagtgatacaatgaattaagcgaatgggagctcgatcgattccaaatcaaaggagaattttgtgcatgaacaagattgatctagtagagaaaaagaaagacttattgaaagttgccgaagaattcaaagatcttcctggatatgaaaggtatttcatgatatcaggactgaaggggtctggagtaaaagatctgactcagtacttgatggagcaagcagttcaacgaccctgggaagaagatccatttaccatgagtgaggaaggtatgaagatgatagcattag

SEQ ID NO: 37834 - DNA, 455 bp, Glycine max
  unsure (1)..(455): unsure at all n locations
caacaacaaccacaacctcatcgttcctaatcctcaagattcactgnacatgatagattatattacaaaggaaacaatgcattctcaatcttatcctgagcttccatatgagccttattgttcatattacatgataacattcctttatagattttattcaacgtttctatttaatcatcctcctaacaagaagctctctattgccacttcaaatattatagtctagttcccacaaagaatactgcaaccataattccattactatcttaatacagtaacatgcaaatttttaaccacatgcaaatttcatcatcctaaatatcaggctttaatttctttaaaaatttccttaaatattttaagctatcctatccttcctaattatccttaatgcacttattatttgataacccgacaattcaaatttgtcaacactttcaaatttcaccattctt

SEQ ID NO: 37835 - DNA, 431 bp, Glycine max
gtggtgaaactcgacgtgtctaatttttaggagcggagggactgcacgtgggtattgaggatttacggcgagggttgctactgcggagaaccgttcttcgtggcgagggaagaagggggcgaggaagatgatgggtacttggtgagttacgtgcacgatgagaggaatggggagtcgaggtttttgttaatggactcaaattcgccgaacctagatcttgttccgccggtaaggcttccgcggcgtttgccttactggttccatggtctgtttgtgaaggatagcgagctgatgaaagtgtcgttgtcgtgaagcttacacatgatggttcctgtgtggggcttgacttccactcttctgtccattatacatgtgtcctgtaatgaaatgtttaccaccattattgtttctcacaattaatttatcaatgt

SEQ ID NO: 37836 - DNA, 456 bp, Glycine max
ttttgcagagtataagatctcgcttccacgtttctcattacttgcaaccttcatctgcactggtgaattccaaccagcctgtgggtcaaaactactccaatcccagtactagcttctttcatgtcctcttcaatgctgcagcctttgcattatacattctatcgaccctatctattgataactttgtcatcattttcctgatgactgtccttcttaccgacctttatttttgtatacccaataatgtcaatgttctaattccagatctattgatgatcttcaatgaaattaatgatctgcttgagaatgtttgtaaatttgaatgtcttgaccactagtcattgactctgatgaacaatattgactcatggctactctgatgcaccctgtatctcacagcgattctgttaatcgagcttgctatattctcactcataatgcttcaaactgattatc

SEQ ID NO: 37837 - DNA, 470 bp, Glycine max
catttcacataagagaggaatgaaacttagacttatgaatggaatagcatacaatgagacgtggtttggcagttggggttacaaatttggtcgaggatgctttggtgtaactcaatccatgtaccacaaggccatacaagcaataagaagcatgtcattatacttgatcatacaccacattgccaattctagccatggcattccactaatcttctcaaggaaccagacactttcagatcaatccctagtgacccttggtgacctattttgttacatgttagaccttaaatcatgtcttcctcgtgaaacctgaattagttcctataaaacaaatgccttagttgagaccaattgtcgttggtcccctaaaaggattgagatggcaacaagggttattgttgaggccttgaaaagaacagagtttaaatgggtttcaagacaagaagttagagatgcttgtcgtgcataca

SEQ ID NO: 37838 - DNA, 255 bp, Glycine max
ccaccgtccgctctgttctgtcttgttttcggctgattttccaacaagctcgggcttttttatggcaggtttactcatcatgggtaatgaaaagactcacatcaacattgtcgtcattggacatgtcgactctgggaagtcaactactcactggtcatttgatctacaagcttggaggtattgacaagcgtgtgattgagaggttcgagaaggaggctgcttagatgaacaaagaggtcattcaagtttccctgg

SEQ ID NO: 37839 - DNA, 448 bp, Glycine max
ctctgtttctgtctctgtgtttgcggctgaggattccgaacgagcgaccttcttcgtttctcgcaaagtttaagtcatcatgggtaaggaaaagactcacatcaacattgtcgtcattggacatgtcgactctgggaagtcaactaccactggtcatttgatctacaagcttggaggtattgacaagcgtgtgattgagaggttcgagaaggaggctgctgagatgaacaagaggtcattcaagtatgcctgggtgcttgacaagctcaaggctgagcgcgaaagaggaattaccattgatattgctttgtggaagtttgaaaccaccaagtactactgcacagtcatcgatgcccccggacatcgtgactttatcaagaacatgattactggtacctcccaggctgattgtgctgtccttatcattgactccaccactggtggtttt

SEQ ID NO: 37840 - DNA, 312 bp, Glycine max
ctctgtatctgactctttgtttgcagctgatgattccaaaccagcgagcttcttcattactggcaaagtctaagtcatcaagggttaagaaaatactcatatgatcatcgactacataggacatgatgactatgggaagtcaacttccactggtcatttgatctacaatctagaaggtattgacaagcgtgtgattgagaggttccagatagacgcatctgatatagaacatatgtcatacaaaaatgcctgaatgctctacaagctcaattctgagctcgaaagaagaatcaccatatgacatatcattaa

SEQ ID NO: 37841 - DNA, 391 bp, Glycine max
ggaattatctgtattttgcaatttgcaatgatatttggttttacattgtgtctatctggctaaaataataatggttggattatttttctttgtcatgaattgtttctgcaggtacttgaaaaggggtgtgaatgatcgggggagggttgctaatgatgttgagacagagcagattgtccttgatgaagaatcaggctcttgcaagggaaagatgagttcagttgtgcaaatgcgtggatcaataccacttttctggtcacaagaagcatcaagatttagccccaagcctgatataaatatgcagaggtatgatccaacatactcagcaacataattgcattttgaagacctaacttagaaatattgcaatccaattattgggctgaatttg

SEQ ID NO: 37842 - DNA, 386 bp, Glycine max
aacgcttgcggccaagcatctcaattacaacaaaaccaccataggggttgcttcctatggccactattggcgaaacctacggcgtttaaccaccgtggagctattttctaccactcgccttgccatgctcactagcgttcgagtagaagaggtgcagttgatggtgaagcaactgtttgaagaatgcaaaggacgtcaacaaataatgatagacctcagagcaagacttttagaggtttctttcaatattatgctgaggatgatatctgggaaacgctattatggtaagcatgcgattgcccaagaagggaaggagtttcagattctgatgaaggagtttgtggagcttctaggaaagtgaaatttgaatgacttttccccttact

SEQ ID NO: 37843 - DNA, 452 bp, Glycine max
  unsure (1)..(452): unsure at all n locations
ggatttccaatccttggagttgagtggcagaagatggaaaatcctgagttacgaatgtcaatgggcatgggaccagatcaaaaaggtgtgcgtatcagaagaattgaacccactgctccagaatctcatgttctgaagccatctgatgtaattctcagctttgatggggtcaatatttcgaatgatggaacagttccattcaggcatggggagcgcattggtttcagttaccttgtctctcaaaagtacactggggatagagctctagtaaaggttttccggaatttacagatacttgaatttaacgtaaaacttgcaactcataagcggcttgttccagcacacatcaaaggcaggcctncttcttattacatcattgctggattntgttttactgcttgttctgtcccctatcttcgttctgagtatggtaaagattattgaattgatgc

SEQ ID NO: 37844 - DNA, 462 bp, Glycine max
  unsure (1)..(462): unsure at all n locations
cttggtccaaattgctgnctatatatgcttttgccttccagaaaaagggaattctaggtccaaaatttgtatactttttggaattgagtaggtcttatttttggtgagtggctgtggagctggagcttcacctcccagatcagccttctttgggaccagttagaataacgttattgcctcaagggtccacatcagcaaggtttccggtggaagcttcaagactgttggtgtagaagagaagaaagagattgaagagacccagcataccgactaggacagatgcaagggtgttgcctatgatatctaagactaccatcaagacaatacacgaggaaagggtatggttgactcccttttccaagctctcaatgatgctggaacttactatgcattcatgagcttctacgagtacctgaccactggacttttgcagttcttggtccacaaaatggatggattcta

SEQ ID NO: 37845 - DNA, 362 bp, Glycine max
cgcgtgctacagagaactcttgcacgcgcttgtagccgacctcgccgaagccggcaaagccaggggccgcgatgccgacgaccaaggcgcctttaactgtctatcacgcttcctatctaactccaacctcgtcgataccaaactgggcctcgacggtccaaagatcgtgcagaaatgggttctctttcagatcggcccgaacgtgcgattgggcctacctaaattcttagaaggatccaccatccgaaccttgcgtctcccgtgctctctgatggctatagattaccagagactgtacgatttcttctacgagtctttcggtctagtcttagacgacacggatcgaatgcggatcacgcgcg

SEQ ID NO: 37846 - DNA, 350 bp, Glycine max
  unsure (1)..(350): unsure at all n locations
gttaaaagccttagtcttccctacaactccaaacacaaagacatcatgatccatggctgcctgcgtctgcactgtcggagctgtcaacagagctcttttgaacctgaatggttctggagctggagcttcagctcccagttcagccttctttgggaccagcttgaagaaggttattgcctcaagggtccncaacagcaaggtttccggtggaagcttcaagattgttgctgtagaagagaagaaagagattgaagagacccagcagaccgacaaggacagatggaagggtcttgcctaagatatctcaaacgaccaacaggaccataccaagaggaagggtttgggttgac

SEQ ID NO: 37847 - DNA, 463 bp, Glycine max
cacaaatctatttccattccattccctcagagagagcaagatcacccttctatagagagaaagcacactcacacacacacaaaacaaaactctgcttcttatactaactgttcttctgtgtccacagaaaaaccaagtgaatttaaggctagagctgggatcacagtgaagaacatgatcaacgaagattcctaagagaccatcgtgaagcataatgaggctcttactgacaggattggaaagaatgttgaccttgaacttgttagcactgatattgatccaataccaaatttgcaaagaaaagtaatcgatcagtgcttaaggattggtcaaagaagtgcaatcttaatgcacagagagttaattacacggcttgatccatgattgactctagatctggcgagccaggagctagtactgtgacatacatgcaccataaagagttcttcttgatagcataacc

SEQ ID NO: 37848 - DNA, 396 bp, Glycine max
  unsure (1)..(396): unsure at all n locations
gcgcccacgcttccgtattgcaccaactgcggaatttgaattcattctctctctccttcaattatgttatactggggacacctgaaagcttcctcaggatttatcaactgtaactcctacaagctttcggtttattcagttctagtcttcagaaggggttcttcatgccttgcgtctccttactaatctgaatattgatcatcaagatttaaatgtcaatttnaatcaagctatgacatacatcttgagatatataataatacaaaaactgagaacttgatgaacaaaaaaaattattcttgactatgttaaaaaaacgaaggtgaactttttttttatgcaaacaatgtttcaattgctgacacaaaaccctcaaataaagaggttcttgaatca

SEQ ID NO: 37849 - DNA, 352 bp, Glycine max
gcccacgcatacgaccatgtgcccatcatacttaccgataacgatttatcaacactatatcctgctattatccgggatgatcttatgcataagttctactgaccacctacaatctacgatcatatattctatctaccatgaaatattacaccctgacaattttcctaaagactacattgtcaatcttgctgacaccttacccgatcaatctatttataactttgatacacttatgacttgcacatatgatgatgaacaattgtactaaatatattttgcataatgatacttcattgataataatcttataaacttcaaataaacacctccaatcttcgatcaacccaatatt

SEQ ID NO: 37850 - DNA, 452 bp, Glycine max
  unsure (1)..(452): unsure at all n locations
ctcaatcttcattccccattcttactactgtgaccatttcagcattggagaccgaatcggtgcaagttaatgcagtgcaggggtatacattttcatcaaatcttcttggaggttctggcaggataatcccagagagtgtgatctacagttatggaactgttcttctggatcttctaagtggcaagcatattcctccaagccatcatactatgggaaagcgcagaaagttgaatatcattcagaatgatggtcaatcacaagcaaaagagcaatcaattgaaagctctactgaagtgaaccaaaataacaactctatacttgaagaaaatgcacaatttgaagaagaacaacacatacaagaagatagtcatgttcagtctcatacttctcttgaaagtgcaagtgaaagttcaactaangataaaaagaagactagaggttatacacatatg

SEQ ID NO: 37851 - DNA, 174 bp, Glycine max
  unsure (1)..(174): unsure at all n locations
ggagaatcgncaagtgagtcatgaatacggccgctatggatacccaacaactgtagttctgggtgataagggtagtccatagtagggggccgaatcaactgctaaaatggcgtctgcgatgttttctatcttctgcctcatgatggcccagttcccagcttggggacagttcga

SEQ ID NO: 37852 - DNA, 431 bp, Glycine max
gtttgaggacactcacccaagctgtaacctctggtgagcgacctacccaacactctgcaatgcgcgattgccgtcaatgactttgagcatatcttcatggtagctccagggtgagccaccggatcccggagattgatgaaggtagccctgatcgattgaagaacatactccatgagttcactggagagcctgttgacactgtggataaacactaggaacaaccagtggagctgcttagcatgacatcatgatatctgactcagaatgagcgagctaggatcatatgctccatcgcttttaaaatcagcatgaatgcacctctcatgggttagttagcagctgaaactgacccactataaactgctacgtaggaactacaagagcataatatgccctttacaattcagaactccttgccttatggctgttat

SEQ ID NO: 37853 - DNA, 427 bp, Glycine max
  unsure (1)..(427): unsure at all n locations
cccacgcgnccgggggnaaaagcccgacnggtgcncggccacaggcccacnagtgcccatttgataaggaataaaactactggtttttgcttgcggattctgttttttacaacttgttgtttattcagaaggttagtttcatggatgaagctgctgctgtaactgctgcatctaattcaattgaggagtctatggagtgtttaggagcaaatgtgaaggataccagtgtggtagttgcagtaactgttgtaaatgtgttagggggctctagattattattgggtaatgttcaggccccatcaaagggtaactacaattttattggctattgtttgtgtaattcttatntgtgctgtgacagaaagacaaatttaaagctcaaagttatttaactaactcgggcttttaccaggggtgctgatttggc

SEQ ID NO: 37854 - DNA, 318 bp, Glycine max
ctcacgcgtacgcagaaagcaagctcatactaaaggttcaaaaatggccggggcctcctgagggctctctcttacccatccttggctggcaaggccgcgaagctgggcccatcagcccccgaaatcgctagggtcagtatgaggaagacccgtaccaagcacgccttctccggaagcccatggtactgcccagaccccgtcaagtacttgtgcccactttgtggcgagcccccgtactacctcactggccagtgcccacgtgactacggctgggacacctgtgggctttacgccgacccagaaaccttagccagaaac

SEQ ID NO: 37855 - DNA, 325 bp, Glycine max
ctcacgcgtacgcagaaagcaagctcatactaaaggttcaaaaatgtcaggggcctcctgcgggactatctctaacccatactcgactgtcaaggccgcgaagctggaaccatcagaccccgaatactgcagggtcagcatgacgtagaccgtcaccaaacaggcctactccggaagcccatgatactgcccagaccgtgtcacgtacttgtacccactctctagctagccaccgtactacctcactggccagttcccacgtgactaatgctgggacactggtgggctttcggccgacccaaaaaccttagccagaaaccgtgag

SEQ ID NO: 37856 - DNA, 464 bp, Glycine max
tgacacactaataatacacattatgtatactagagagaaaagggatggcaacgatctcgttatcacacagaagagatctctagttgaagctctgaccggttacacagcacaactgacgacacttgatgggaggaatcttacagtctccaccaattccatcatcagtccgacgtacgaagaagttattaaaggagagggtatgccaattcccaaggaaccttccaaaaagggaaacttgaggatcaagttcaatatcaagttcccctctagactcacatcagagcagaaaaccggcattaaacgattattgacatcataaacgctggtgatgcctctccttatcacataccaaatcatgtaagattggaattatttttacccagtttttgattttcaaatggaaattctttcccttttcgagatggttttcagttagaaatatttattagaaagttgatatttgg

SEQ ID NO: 37857 - DNA, 313 bp, Glycine max
cgacccagcgttcgcgaaccttctccctcttcatgacatttttaacgcccatattaagcccacttacagcattatctcttccaacaccagcttaaccttcttcgagaatcatctcttacctcttgtcaaatcctaccttccttacgtctttaacttaacccctgacagcgacatttaaaccctccgacatcacgacttttacgtaaaactcacgttcaacatgacttctcaccctaaaataaaccctaacacatcttattgcttcccacttctttactgtcccgttctaccgttcctaatctactttcgtttt

SEQ ID NO: 37858 - DNA, 455 bp, Glycine max
cacacacacacacattgcagcagcatcaacaaccacacacgattccatgagtcgctacgatcccaatcccttcggcgaagaagccggtcgaggttaatccctacacggatggagcagctaaaggaaaaggctcatggcaatcacgttatagtgcatgtgcattatatactactaacactgcaagtgtcccttcctaaaactcaacgctctcaccactgccaccatagccttatgatcgtgaggcaactattgacatcccactcaataatcgcaacgacgcaaaagcaaaagaaaaggaacttcaagctaaagaagctgaattgaaatgaaggcaacaggaactaatacgaatggaatatgctatagcactagctataatagctatagatgcgaaaaattggccaacttttttccccatcattcatcatgacattgcaaaggaaattccagtacat

SEQ ID NO: 37859 - DNA, 462 bp, Glycine max
ctgtgctctctttttcacactcttccgtttcgagctctctctcacacacattgaatttcaaggtcgcgacgcgaaatatgagctctgaataacaaacaaacagagttggtgtcgatatcaaggcatgagagatggttagagaaaatgctgtaatgggtggtgccagtgaagagcgtggtgttcgggtcactcgagcaatggctagagctgttttgggtggggtctctgcctcttctagaccgtccttcaagaagcaacacaagaacaacaagggtttcggtagggtagcactagcagatgtcactaacataagcaagaaagggtgtgctacatcaaaatctcaggcaagaggaggttacaagaagactaacacaaagggagcttccaatgtctccattcaagttttgtcaactcaagaagatgttagagcaaaattagcaaaagatttaccctcaatatcaa

SEQ ID NO: 37860 - DNA, 437 bp, Glycine max
aaagatcttcatcaatatacgcaatctaaaaactgtatagaggaaaagacgagaaactttagggaggaaaagaagagagtgaagcggtgacatgaaatagaactctggatgtcccaccgaatgctacctgaggacttaaagcaaagaattagacgttttgaacattacaaatggcacgaaaatagcggtgttgactaggaggcattaattcgcaaccttactaaagatctcataagggacactaagcgtcacctttgcttagctttagttagaaaggtgccaatgtttggattaatggatcagcagttgatgcgtgcaatgtgcgatagactgaagacagtactttatgattagcatagctgcattgcctgtgaaggaaatccacttgatgagacgggatgcattatgagtggtaaaggttattctgcgacaacaaa

SEQ ID NO: 37861 - DNA, 356 bp, Glycine max
cccacgcgttcgcgcgaatgtttgtagaattttagacgccaccagggttcaggttttatttgactgattaagaattggtcaatcactacttgagaaggaagtgcgcggatcaaccaatctcggttcccatcatcaaataggtcgatttgtacaagatatattcatggcatcttccacaaattgactactactgctagaaagaatggtacttcttttcttctcgggatcagaaatactcgaacggttcacggcctaaaccgtgccatcttaagcggatattggtaagctcacccgcgctgataagccatcggaaataccaaagcgctagggatccaataatgctttggttttttacg

SEQ ID NO: 37862 - DNA, 333 bp, Glycine max
tcggccacgcgttcgaatagaatattctaaggctttgggaatagtgctgcaacggcttcaagtcaggaggaggggacccttttgggagctacttgaagcccaattgtgtgcaggggttatattggcctcaagttgaagggaggtcaataccaatatttcgaagaaaatttgaggaacaagagtgaactgcttcttaaattcaacccaattcacaagaaaggtccagtgtttatttacaatgagaagcccataaccgaatctattgtggttggtggatacattgatgagacattgaagaaccaccccaaattggcttttgaatcttaacaaaaa

SEQ ID NO: 37863 - DNA, 382 bp, Glycine max
  unsure (1)..(382): unsure at all n locations
ccacgcgtncgccacgcgtncgcagaatcagatgtcggatttaagggttccagtcgaaagggtctgcaagaaggattaaattgttattcaataccagaaaatttatttggcaaggtctgcgtcattattgataaaaatgggaaaattcccgctgacgagataaagaaagagttgaaagctgttggtctatctcaagaagctgtccaagagctattgcaagtcctttctgtgaagtcattgaccgagttagaagaaagacttgggagcaatggggaagcagttgctgatctgaaacagctattctcccttgctgaaaaaattggttactctaaatggcttcaatttgatgcatcagatggttcgaggtcttgcttactacact

SEQ ID NO: 37864 - DNA, 413 bp, Glycine max
  unsure (1)..(413): unsure at all n locations
nccacgcatccatccaaaacattagagagttttataacaacaacaanaatcgggggaattgccagttatacctcacaacttgctctttgctacttccattacccagctcagttactctctccaaggttgtggcgctattcttgctcattcgtatgctcctaagccggatataattcttccaggatactctacttccaattcaacgcctactacgaacactatgcatgaaatattccctaacaacgccactgagcaaccagatttgataatcttgtactttggtggtaatgatactcttattacacattcaatcagtcttggtcaacatgtacctgtccaacaatacattgaaaatatgacaaagattggtacccatttaaacagccttttaaagaagactacgcttatatttc

SEQ ID NO: 37865 - DNA, 366 bp, Glycine max
gcggcttgcggtcaaattgttatatgcgcaccttaaacaaaggtgttagaccaccctgccacagcgtgttttggtactcactgcagttggaattctaccttagtatgtgaattcaatgcggtacctttcttgtgttggccttattatgctgaccaattaattgacaaagcttacatttgcaatatgaggaaagtgggtgtgggatttgattgagatgacacacggctgatatcaccctgtgagacaaagcacaaagttgaccatgtccttggagatgagaacatgaagcgaatgtctgaaaaactgaatgaaatggttctaaattacattgcggaaggtggacaatcctatgcgaattttaacaag

SEQ ID NO: 37866 - DNA, 405 bp, Glycine max
aaaaacacttgcagactagatttgtgggtggaacatatcgcattacattacagcagattgggggcatatcaatggcctcgtcactacaagcagcatctactttcatgcaacccaccaagtttttgcagctaaagtctactcacgccatatctaacgcttttggtttggaacctgctggaattaataaagtcacatgctcccttcaggctgatcttaatagacttgactcacaagtgtcttgatgctaccaaaactgcatgctttgccctagacacctatgatctcgtaggatctggagcacgtgctgaacgaataccaaatcggataaccttacacgaaatgcagaacaagacctacttggaagtgaaggggacaggaacaccacaccagtgtccaacaattgat

SEQ ID NO: 37867 - DNA, 422 bp, Glycine max
  unsure (1)..(422): unsure at all n locations
aatccgacgaattcgtcctaaccacgttcacaacgcatactacggttttcctaatcanaaaccctaatgtgtgattcgcatctttgatccagaaattcaaacactattaagggtctcttcaattctaagcctcgcactcctccacatgtaatgctctacaccagacatcttctgctctttgttgatcgcagcccctaaacccgcaaaaccaaacgtgatgagaagatatcctagctatttaaaaatatcacggagctaaagtcaatcctgtatcgaaatagtgaatctgaaccagtctcagaagcttgtgcgcaattgactcangagttctttaacgaggacacgttgccactgcttatcaaatgtcttccaaaattgaatttggaggccacaaaagatgccactcaagtttttgcaaattt

SEQ ID NO: 37868 - DNA, 318 bp, Glycine max
gaatattttaatcacaggatgggcaacacgcttgctgaatagatgaaaaaagggcacaagggggccattagtgtgttcatcggatcagttcaaaagctgatgactgcgttcgaccacgccaggataccacttcctttgacagctgacaccaccatagtctttgatactgtatccaacggactcgatttctactgcaatgctactcttgccagatttcaggctctgaacgtggatgtctacaccatatgtatcgagcccgagaaaaaatggcaagagcttgctcaaactgccaaacaagggtgggatgaccatgttctt

SEQ ID NO: 37869 - DNA, 458 bp, Glycine max
  unsure (1)..(458): unsure at all n locations
cccacgcgtncgcagagatgcctctaattggtacttgcagtcagtatcgtcaccagggaatgtgccgactgcttgtgagtgctattgaacagatgttaatatctttcaaggtggaaaagcttgtggtatcagccattccagatttggtcgaaacatggacaaaaggctttggatttataactgtcgatgacattgaaaggcaaagattgaataaaattaacttgatggttgttactgggacagagttacttgtgaaatccttacatgggaaggagaaaattgaaagactgtgtgatctatcaattctagcaacagatgaatcaatcaaagcatgtatctgttctgaaggaatggccatttctgaatcatttgcacaagttggtggaaacataactaccaacaaaggtggagcaaaagcagaacatgaacctgtggatggaaaaaatcaatcagactat

SEQ ID NO: 37870 - DNA, 411 bp, Glycine max
  unsure (1)..(411): unsure at all n locations
cttcaaaacggtttttagattttcaacaaaaaaaacaatgggctttctgtaatttcctacgcaacanaatcaagcaagntcagaaaagaagaagggaaaaaccgattaccgtgccaggattcggttgattaatcaggacaagaacaaatataacactcctaaataccgatttgtggttcgctttagcaacaaggacattgttgcacaaataatatctgctagcattgccggcgatttagttcttgctacagcatattcacatgagctgccactatatggtcttgaagtaggacttacaaattatgcaacagcttattgcactggtctcctgttggcccgaagagtcctcaaaacacttgaaatggatgatgagtattaaagaaatgttgacgctactggagaggattattc

SEQ ID NO: 37871 - DNA, 315 bp, Glycine max
gatggctatctgcagaatgcagacttaggcagtgtgcacaacgcttagatctcgatatgcgaagtctctggttcaggtccaggattgcccagctgcgccagggaaaagaatagaagaagcgtctagactccttcatgcatgctccacttagctctagatgtaattagctcagttggtagagctccgctcttgcaattgggtcgttgcaattacaaggtaggatgtctaattatccaggcggtaatgatagaagcttgtacctgaaccggtgactcactttttctaagtaatggggaagaggaccgaaacatgcca

SEQ ID NO: 37872 - DNA, 318 bp, Glycine max
gcattctctgactcgaataaagatggtgtgatctacccatgggagactcttaaaggcgttgcgtgaagtctggactggagcattgctgtgcggtagacgtactcttttcatgaatcgtcatgtctcaggcagagtactcgtcccggataggctccatatatacgttcatcgattgaaattgagactgtccaacgcggcactcacggcaatgacactggagtctacgatactgaatgaagggtagcaccttcagaatttgaagcaatttctaacatgcatgcacatgcacatccaaatgcttcgacatatgatgagtta

SEQ ID NO: 37873 - DNA, 382 bp, Glycine max
  unsure (1)..(382): unsure at all n locations
tattgatgccgttctggaacttggtgaagctcatggcgaccccttcaactgctcctgcttggtttggcggtggtttattgggttatgtaatgtatgattgcacccattattacttgcaccatggtcagccaaagactgaagtgccccgaaatctcaagaagtaccacttgaatcatcactttcggatccaggataaaggctttgggatcacttcatcactatgggataaagtttttggaacacttnctcctaaaatggatgccaaaagtatgtaaattactgtcaaggatagcatatgttctttggttaaaataatatcaaagtcaggaattcctgcttttatttatctaatttatttgaccccccaatcattgatgttttc

SEQ ID NO: 37874 - DNA, 322 bp, Glycine max
cccacgcgtccggacaagaccattgatggcagcaacaagctctggcactcttacagcaactgcgtccctagggcaaggcacgggcaccaaagccaatgctcttagagatgatgattcaatggaaacagcaacatacaccatgggcaaagatttgtgaaatggaccagactgagagaaatacttggtgacccttttcagctcagacgccttcatactagaaaggacaatgcccacgggattatcgatgggacactgctggcttatctgctgacccggaaacctttgacaagaacagggctcatgaggatatccataggagatg

SEQ ID NO: 37875 - DNA, 459 bp, Glycine max
cccacgcgtccggaggtgtttctggagatgagatgatacggaatcgtgtggtagaagctttatatcgacggattatgcgagcttacaatgacaaaaaatctttcagggttatagttgtcatacctatcctgcctggctttcagggcggtcttgatgatagaggagcagcatctgtgagagccataatgcattgacagtatcgaaccatttgacgagggcagaattctatcatgcataatctttatgaacttcgtggttctaaaatacatgactacatctctttttatggcctaaggtcttatggtagactctctaatggtggccctgtggcaaccagacaggggtatgttcacagtaaaatcatgattgttgatgatagtattactgtgattggatctgctaatattaatgataggagcttacttggctccagagattctgagattggtatagttttag

SEQ ID NO: 37876 - DNA, 457 bp, Glycine max
attaggatgtcattgactggcaagctgacatagaaaaatgcttgacttgggaagctcacaggcgactttcaaacggattgtctattaactttcttgataccgctgccaaagagttaggctgtactatttccatgtgaaatgaaatcatccatcttagtccgtgacaatttttttctatacgtctagtaaaaaaacagttattgatatgcttattgaactaacgggtttgcaaataagcataattctgctagtcctgttgaaaagagctgcagtcataattctagtatgtttatagaaagctcattttgtatcatgtatgtactgtagctaaactaagtttcaccctgaacttgcttgtgagtctgctctcgatagaacagtcttgtacagtaacgaaaaacgctgtaaccaggtccttctctatattgtctcattttgcgttatgcttatgttgatt

SEQ ID NO: 37877 - DNA, 432 bp, Glycine max
cccacgcgtccgtagatgctagagatccttcaatatgttttaaatcattgtctgaaagatacaagtattgaaggccctttaactcccctaaccaggatggaacagaatcaaaattgttttttgaaaggtcgagggaaactaaggaagtcagattctctaaagcagatggaagtgagccataaagagcattactatcgagaaatagatggacaaggttagtacaagttcccaaccaaaatggagtggaattcaagttgttggaagaaaggtcaatctctgcaatggaattcatattttgaaaagcatccagaaatggagcttgaatttcattttctgctagattgaggacttccaatctggaaaggtttgtggctctaacaagttgatgagtgtgtaacttgttgagtccacaattcatcaattctatttcta

SEQ ID NO: 37878 - DNA, 223 bp, Glycine max
atgggacattcagcaggtgaacaacagtgcttatgaatgtcacaggaatcatgaagggctggggagctgataatgctacaagacaatcttgaaagacgagtccattgtagaaacgcgatttatgcacgacaaagtcgctgatagacgactcttcagaagctccgctagtggtagtcaactcctactaaagtcagctcaatcagtaagagtggaaagacacatg

SEQ ID NO: 37879 - DNA, 329 bp, Glycine max
ctagaacacacaatatccttcgttactgatgcatgaactcgaagcttcactgtggcgaatgaggcggctctgttagacacatggacacgtccattagggatgaggcaccagattgcactcgctgaatagggtatcaaatatgagggcaactaatacgacttgctgaacatgaaccgttcgcttctcatactgaacccggggcatatgaaaattcaggacctcatgagatctggcaaaccgatttggcaatctaatggtgctggatagaacactgacgaggtctgtaacgacacacatactttgtcgtcttctgaccttatccagatagc

SEQ ID NO: 37880 - DNA, 433 bp, Glycine max
ctcacacgtcctcccacgcgtccgatggtcatagaccacacctaattagggacacacaccgggggaacgaactagacgactcaattctcattgaatggctaaggacgctttgaaatcaccaacagcagacactactccctttcgtggttaccaagacgaggaagatgacgatgaccttcatctacgcgagccttgtgccaagagaaaacgctcaaaacgacctagttataagtcggacgaagagtacttggctctctgcctcatgatgcttgcacaaaacggtaacaacagcaacacacaattactcgctacgtcacagtcacacaaagaagcatcaccccagatgtaactatgacacacgtgctctatttgcatcaaggctttgtcttattaccaaacactcagtggacacaaggtcaaccaccgcaaggac

SEQ ID NO: 37881 - DNA, 458 bp, Glycine max
gatgacactgtcattcttgatggagcgggtgacaagaaagcacttgaggaaagatgcgagcagattaggtcagcaattgaaaacagtacctcagattatgacaaggaaaagttacaggaaagattagccaagctttctggtggtgttgcagtgcttaagattggaggagccagtgaagctgaagttggtgagaagaaggatagagtgactgatgcattaaatgcaactaaggctgctgtagaggagggcatagtgcctggtggtggtgttgctcttctatatgcatcgagagagttggataaacttcaaactgctaacttcggtcaaaagattggtgtccagattatccaaaatgctttaaagacacctgtgctcactattgcatcaaatgcgggagttgagggtgcagttgttgttggcaaactattggagcaagagaatcatgatctaagatatga

SEQ ID NO: 37882 - DNA, 338 bp, Glycine max
cggacacgtgggttttttttttttttttattgaaaactccatatgttgttaaaaaaatggttataaacaatgggcccaaatattttaacaaacaaactatcataaaaaataaaaacaaaactgaaaaacttgcaataaaatataataaccctaacatcgttttctttaagccttatcacccttggcagcacctgcaacaccttgtcctctaaaacgaccagttcttctagcagcaatgataccaaccttctgtccaggatgagcataactcctgacaatacttgcgttaccaatatgcttatgattacctcctgcgtggaattctcaacacggttcat

SEQ ID NO: 37883 - DNA, 333 bp, Glycine max
  unsure (1)..(333): unsure at all n locations
cacccacatacgtgtattgtcgtaccttgcaaccaaatgcttacaatagctcaaaatgggcgcacatcctggggttcctgatatacttcaacctttctaactgccgtttaatccacggccagacctgaccacaacctcatgaactgaaacattttattacgccagaggaaaacaaagcaaaagctatttccgtattatcgtccaacgaaatgtgagcaacctaaaccgtgaaaaccactttgcgccaaacctatacaaatctagtgcttttatgctaatcaacaaacaatgctgcatcctanatggcgagagtgcaataaccaaatgcatcac

SEQ ID NO: 37884 - DNA, 452 bp, Glycine max
cgcaaaaattctcacgtaccaagcttctgaggatgtggtttacaaaggctacagatcaactgtggggtctacaagcacggaggattcattgatgggttttgctgtctgggagccacctcatggtcgatacaaaatgcttagatatccatggcaaaattatgtgaaagtaagtggagcactaaggcattgtgcgtttatggtcatggctatgcatggatgtatactttctgaaatacaggctccacctgagaagaggcaagtgtttagtagggaggttcaaaagctaggttctgaagcagccaaaattctacgagaacttgggaacaaagtaaaaaagatggagaaactaggcgaggaagacattctttatgaagttcacgaagcagcagaagaattgcaacagaagattgacaaaaaatccttcctccttgtaaattcaaaaagctgggaaa

SEQ ID NO: 37885 - DNA, 378 bp, Glycine max
gcgtccgcataaccctaaaacatataaggcaacatgatattccctctcttttgcatacacaaagaggggataacatcgagggcgcgcaactatcttattttaatctcaaaactgacacccttacacatttttccgaaaagccaagttctgaaaagaacacccttgaatagatgctccacctgctcttaatatatacgatctgaactacttccacctaaaattcactggattcctatttgttgctactactactacctatgtctccccttctcttgttttagaacttttacaaaaaattgcacctttcttcaacaattaccttagagttctcaatgaatctttctttagcaagaactccgtgcttcgttatgaattact

SEQ ID NO: 37886 - DNA, 390 bp, Glycine max
ctacaacaatggactaaacaaacccttatccatcacaacgataatggccacctgtgctattcaacaatgggcgctgactgggcaaactgatctgaagcagctcactgagttcggcgcaagaccgaaggcgctggcaaaggtcgcactaacatgcgccgcaccgtcaagagtgatactcagaacatatgttatggccctaaccgatccaaggacttgggtccattctcggaacagattgcatcatacctgaccggagaaaaccgtggaaactacggctgggacacatggtggattatcatctgacccggaaaccattaccaggtaccctgaactgtaggtgattcacagcacaccctcaatgctcgttgcccttgactgcaccttcccaga

SEQ ID NO: 37887 - DNA, 466 bp, Glycine max
aaaaaaaaaacgcgccgccgcgtccaaaacaatccaattaatcaaaacacacagcttatatcgtatgaatacaatttttcacttcgcgacaaatataatgtgtttctttattctaatctcttattctatacttgttaatcaacaacttgttcttattaactctttttttctataatttatatataatttaatttacacaataaaagctttttctattcttctattaacttatttatgtataggattccattcaacccattttttttaactagttatttttttcttctataaacatttatcattttctcacaattatcaaattatatctgctcttgaatccacttattcagtcattttatatacatttttaaaatatttcatttttctttattttaatctcctatctccattacttttcatcatttatcatttatataataattcacttaccaaaatattcacttat

SEQ ID NO: 37888 - DNA, 463 bp, Glycine max
  unsure (1)..(463): unsure at all n locations
cactttttactgggttgcaattttaagacatancttttctncccgtcatccacanggaaggggtttggccgcaatcgagatttgattgggtagaaaatggagattccatcgtgcaactttcctggtggcactggaggtgtgaagaccattggaaactatgctgcagttctgaaggcacagtctgaagcaaaagctaaaggctactctgatgttttataccttgactgtgtgcacaaaagatatttggaggaggtttcttcatgcaacatttttgttgttaagggtaacattatttcaactccagctattaaagggacaatcctacctggcattactcgcaaaagtataattgatgtggctcgaagcgaagggtttcaggttgaggagcgattagtttcagtggatgaattgctagatgctgatgaggttttctgcacgggaacagctgtggttgtatcacctg

SEQ ID NO: 37889 - DNA, 427 bp, Glycine max
ctgcgaaggcaggatcaatcctaggattcctcggacccagtcctgccgtcagacctcggcggcgatgcacgaaccttgcttccacacgagcaacagcctcatatacaaaagcattggcgcgactgttcccagcacctgtccgccgacgaggacttctgcgatctcgatcagtcgcaattcctccgcctccaatgctgcgacaaaaactccaatcgcattctgcgcatcagatgcacgtactttcccgcatccgttgtgagtgcagagcggctgaagaggtatgtgttccacaaaatctgcagagagctgccagaggggccattctgtattgggcacatgcacagcaccgttcagaaagaggacaattcccctggcatcaccatcttgagctggatctatgaagaactttctgctgatttcaaggaca

SEQ ID NO: 37890 - DNA, 210 bp, Glycine max
aggcttatgtggatacctatgcaccgatagactatgaatgtcttaataagcgacgaagggcttctgtgggggggatatttatcttagatcctttgtttccctatattagtcaaccaatcaaactgctgcttaatccacgggcaggcaatgagacaaccttgggaactgtaacatcttagaagccagaggaaatgaaagctaaatcttttc

SEQ ID NO: 37891 - DNA, 401 bp, Glycine max
cttgtcttccgtctaaagtatccacgcatcctctctcacacttacggaagattggctaggggatggttcacactaaaatcgatgtaattgcccatgtctaacatcgtaaatactctaccactggtgacctgacccacattattggacgcattgaccatcctgttattgacaggtttgataataaagctgatgacatgaacaataggtctttcaaacatccctgcatgctgaacagactatgggccgcgcgctatagaggaacctccaccgctgttgctttgtggatttctgacacaacaaacgcttatctcacaagtatcgatgcgcctgcacatatggatttcattcataatatgattactacgacatcccaatctgactgtgactgtcttatcattgat

SEQ ID NO: 37892 - DNA, 419 bp, Glycine max
ctgcacgcgtggggttagagccataagagtgatcaactcatctcaagacatgtttgttgacgagtggggtgtacacaacaacatcactgctgttaaccaatttgaattgcactcaggatggacactatctatgttgcactcttttaatgaatctgaaagaatgcacctattattctttctgtgagtagaggcacttatggcattgtttagtgatattcttaagaatcctgtcgtcacagagattgcatagagattgtggaagacaccatcacaagctgcccttatatggggcttgcattcacgtcatattgtgctttctatgagcactattgagcccataatcaagggaatatttgatatctctgacttgcctagaaggaaaacattaatgatgtgtaccttgtttctgagttaatgga

SEQ ID NO: 37893 - DNA, 239 bp, Glycine max
aaatgaacagaagctcctcctccacttactcttcctctcactgttgctctttagagtgcaagcatatgagccccagcgggccagacagaatcaaaggcccatggagcgcccaagaggatcggatcctgacacgactagtcgaacaatacgggcctcgaaactggtccctcatcagccgctacattaagggcaggtccggtatattgtgccagctgcagtggtgcaatcagctgagcccc

SEQ ID NO: 37894 - DNA, 292 bp, Glycine max
aacctgcagatgcggggactgtaataagcgcggaggcgccctgtacgtggactttgccatagacggcatccacagcattgggtacgccaactctacactggagaagaacttccgtatgaacgaagtcaacaggctgggagccatctctatatgacttaaatccgagacaggtacgcgtatggacatggtgcattacagccactagggcacctttgatgccatacagctggacgactaacatattgactacctgtcgagcttcacagaagctgtcatgaacctagagtggatt

SEQ ID NO: 37895 - DNA, 391 bp, Glycine max
acgtcagtgctaatagaaagaaatagattaagctcttatggaactcatactgaatcacgtgatgactcatagcgagtgagggtgttcctacctgatatctgatggtatcttccttttacgcctcacctatgatcgcaagtcttttctgaagaaccatccccattattttatttcgaatcctgatactctgcccgatttaacctttaactttaatttttgtcattacactattccctttaagactgtcacttattcgtatgttttctacttccctcttactctacactttatttaatactacccattcatatcttcaaattataaattcccacatcgtttctttccaccctaatttttatccttcttttactttttgctatcctatacttaa

SEQ ID NO: 37896 - DNA, 245 bp, Glycine max
gacttttgacagctggcgggcctttcctgagacagcgtactggactaaaccatggattgtggactgttcaccatctaccggaatctgaaacctgtaaagatccttggattgcgatgcgtagagtctcctgacgctaatagcatcgtgctgaaacatgtcataaacagcatcaaccagtgcctgcacttgaacactcgcttcaacccccactactactccatcaccgtcgtgtgcaacagtatgga

SEQ ID NO: 37897 - DNA, 213 bp, Glycine max
acggaggagttcaacaccgaaccactatctgtactcatgatgagtgttaataataatactcaagtactgataaattgtgggaacaacacaaagcttctgtgtcatgtaagggcttttgacaggcactgtaacatggttcttgaaaatgtcaggtagatgtggactgacgtgccaaacactgttataggaaagaaaaaggcccagccattcaac

SEQ ID NO: 37898 - DNA, 402 bp, Glycine max
tcttacattacaattcaacaccttaccactatctctactcataatcactcttaaaaataatactcacagaacttatataaataacggaacaacataacacttctcactcttataatttcttatcacaatcacttcaacataactcttcaaaatatcataaatatatttacttactttccaaacactgataaaagaaataaaaaagcccacacattcaacaattatatattaatcaacaaaatatttctacgattaaactctatcatcattgctcttacaaaccccaaatcatatactatcatcaacttataattactaaataacttctataaattatccttttcattatatcttgaattcttcataaaccaatatatatacaattcttccttcataatatat

SEQ ID NO: 37899 - DNA, 433 bp, Glycine max
  unsure (1)..(433): unsure at all n locations
gaaaatgtagacatttttggccaaaagcttaacctacaggctcttgcacaatcccttggcgcgattcaaggtccgggggaaaacatatcccctggcattcttggtcaagcaacctctaaaaattcccatacctgccaaaaggacaagctcctggcttcttactacatatcttgataaggacttgcgaatatcaaggggggatggtggtcttttcggtcttgccagagaagggagtccacttcttgatcagtaggaaagtaatcatactcctttcttcttcccccatgtcatccccgtcccctgagaataatgtgaacggcgtattcaaaatctctccattctttctgattattttcctcttctcaagctaatgtatatctaaaggagtgaccgnttatggtggcaggatgcaattctacaatctataaattat

SEQ ID NO: 37900 - DNA, 410 bp, Glycine max
aacgcaaagaggttataatttcattctttattctgatggaacagggcaaagctacaagacaggagcttgatcaatggggtgaggaactaatcaaagaagagtttgatgaagaatgtaattttgatgtggatgatgctgttgagaaattagagaaattaggaattgttactcgggtgagattccttaaactatccccattctaatcttcggtgattatatctatgtatataatactacctctctttaaaggaaaacttttttattattatttcaatttcttcttacaacaacaacgccttatcccactaggtggggtcggctacatggatcaacttccgccataatgttctatcaagtaccatacttctatccaaatcattaagttcgagatcctttttgataatctctct

SEQ ID NO: 37901 - DNA, 249 bp, Glycine max
tagaaacatacttacacacatgcctccggtcaacctattcggtactacaattgtactagcggtccaattccgtgcgtacgatatggtcgctctccgaatgaacacttgctatagtgcccatactccgtagtttattttctcaataattatgatttctttttaatcacacatcatattttactattataccattccttaaaaatgccttgaaacaacaaaagaatacatccatggctaacaatatagatc

SEQ ID NO: 37902 - DNA, 309 bp, Glycine max
accggtctcgaatgtcccgttcgaccgacccgtgcgatcacacttactgtccttcttctcttcgacgctacaatcttgataacagtggaatgccaggcgtacgatatgttccctgtcctaatgaacactggctatggcgcccgtactcctgaggttaaatgctcaattttgaagctttctatagaaactcacatcatcttttgctttaagaccattccttaaaagtgctttgaaacatcataagaatacatccatggcgaacaatatagatcagacttccattcagttaaccatcttgcttacttttat

SEQ ID NO: 37903 - DNA, 321 bp, Glycine max
taagtcaatctccgtgaacttcttatataaatagcgcggtatcttgacgagggggtaccattgatagacaatttcaccaacaagaaaggaatgaccaaccactgctataagattgcatataggtctatggaacgttcactcactgatgaggaaatcaacgatctgcagtggaaagtaagagaacaggtgcacagcaaattgaatgttgacttaagatgagctatctatgttgaaaatctacagcttagatgacatcaatcgacttgttctgaataaatacatgagtgctctagatattcacgcatgggaatatattcctct

SEQ ID NO: 37904 - DNA, 139 bp, Glycine max
gaaaaactgcccctgtctgtaaatttttgtgagatagaaggaatctgattccttcatcacttgtgtatgtttaagttatttatttagagccgctaaatgtactctttatcctcattaataaaccatgtttgtgtaatgg

SEQ ID NO: 37905 - DNA, 433 bp, Glycine max
  unsure (1)..(433): unsure at all n locations
gtctgcaccgacgtgaacaggatcaacatcttcaaagataagggatcgatgatgaccgtccgggaccagaacatcctggtgatcaccttccacaacacactcgtcaccatacgacggaagataatgaccgggcatgatcgacggacagctttcacgagagaaagcacagatgccaaagatctcaatcttactctgaagcgttcgtccctctttccgtttatgaccgactttaacgtgttcatgcccaataacacactttaacacgttagcgactttcaggtcataggttgacgattggaacgatcttgcactgcctaagcatctgaatctcacaacatcngagacgcagatgcataaaaagcacacggttcagagtatttcgattgtgaaagaccaactcacggtcacagtgtgtcccaacattcaatatgca

SEQ ID NO: 37906 - DNA, 338 bp, Glycine max
  unsure (1)..(338): unsure at all n locations
acatctntaaacggaaattcaaagtgttttggcctacattgaactaccacaacccacgcgactcccgagtgtacgacccacgctagcttcgaaagttttccttattcccagccctaatcccctgagttcggtagcacaccttctcttactctacgtcaccatcctcaccgtcatcggctacaaccaccagacagccaccaccgccgagccctgcaacgacgtcggcgtacatcgcataggttggacctttggaagcatgatttttgaactcttctattgcaccgccggcatatcacggggacacataaacccggcggtgacgttcgggttgcttttgg

SEQ ID NO: 37907 - DNA, 316 bp, Glycine max
gtgcactcttgtgtggaacgacccattgttcttgaagaccaacgcattctatcaagcggtggggatgttgtttctgggacttcgggtcggatatttaatatgctccgcaaacagacacttcggacatactatattaaaacatgtctattgcatgatgctgatcaaatgctttcccgcgggtttaaaaagcagatctatgaaatattccagttgcttccatctaagagtcaagagagactttgatatgctacaatgcctcccgacgcacttgttatcacaacgaaattcatgaacaaaactgtgacgatccttgcaa

SEQ ID NO: 37908 - DNA, 336 bp, Glycine max
  unsure (1)..(336): unsure at all n locations
ttatttttcgattttatttcaaccttcaccacctataaacttttgccctataacaccttttgttttgttacttttttaaccaccattttttcattgaataaagtttccttaaaccaaaagttattaaatcctccaaaaancnngacagngattttcaaaatcccatatctttcacagtttttgaactccttatatgatttccaatacaagtcttttttctcagcatttgcttgcctgaccgaacaaattaagtttgaccgctatcttcatccacacttccgttattacatgagggaggtcacaacacttttttattcccaattttttgaatcttac

SEQ ID NO: 37909 - DNA, 283 bp, Glycine max
cccacacatcctaaccctcaaccacaccgttttgatcattatcaacatataactaacgagttttatttttgctttcatcccaagccgtggcgcctataatcctccataactcaaaaaccaacacaaattcttaccaaacactcatttctttcgattatgctcccctacaattttacttttccccaaattttgacatgggtgtatacaataaaactcctaaatttctaaagatctatcctattgactaggttcctttattgcaaacacatgattctccaatatt

SEQ ID NO: 37910 - DNA, 360 bp, Glycine max
gttagttgttgtaactcgttcttatttttttgttggtttccgtaagcgtttgttttttctctgaactgaaaatgtctgggtgcggtggtaactgtggttacagaagctcctgaaagtgcggcaactgttgaagaggctgaacgatgtacctatactggatctacactgagtaatccatcaccacaaccttggtgatgggagtggcacctgttaatgctcaatttgaaggtgctgaaatgactgtgccgcatgagaacaatagctgcaaatgtggaccaaactgatgctgcaaaccttgcacttgcaagtgaggtgatgcgagagcaagcttcaagcagatattgccattaattaagaata

SEQ ID NO: 37911 - DNA, 329 bp, Glycine max
cccacgcgttctgccagataaaaacttaagcatcggctaccctaacctcgtcttggtctctagtaatatcagatgtgggggtcggatctatacttgacccacatcctatccagatagagctcaagctttttaaccgctggaacttagaggatattgatgatactcacattttactgactcattacattgtagttgctgcatacatgcacgcctcatatgctcttcacaccgtctgaagttacttcgtgaagcgagacaggaaggcgcaattccccattgttgtgaggctcaccaactctctcatgctgcacgggtgaaacaacggcaag

SEQ ID NO: 37912 - DNA, 353 bp, Glycine max
gatcgcgatgtaactcacccatattgtctcgtcagaaccaaactgtgggaaagttgtaatgggaactgaaaaaactttgctgcggagaaaactatgcatacctaagctaacacaagtgcgtcaacctgttacaaggctgaacaatgcaccacaacatgatctacacttaaactaccaccaccgacaccttgtgcatgagagtgtcacctgttaaagcacaattagagggggctgctatgggtgtgcccgctgagaacgatggctgcaaatgtggaccaaactggtcctgcaaccccttcacttgcaagtgatgttgtaggacaccaatcttcaaccagagattgcccttaatt

SEQ ID NO: 37913 - DNA, 372 bp, Glycine max
gattactaaatattggggttcttctgatctaactattgttactcatacgcgcgaggcctgggccatgttgattaagcggtggatgggcatagtctgcactagtgtgaaaacatccatgctttgtcgacggactcataatttacgaactatacaaatatcggctcaagatcatgggatccttttctatcaaatacgaacggcttatacgcaccatgctctcgtacgcaatcgttccatatattctatatctaactatgtcaccaagatatcatgacacggcggggattctcatctgcacaactggtacttccaacttggaaccagactgaagaaactaacgatacatctttacctttccagttggtctgccag

SEQ ID NO: 37914 - DNA, 239 bp, Glycine max
taattccctacccgaccgcactcatacacccactcttccttccattctcatcctcttttttctctttctaccattgccatgtatcccgtcaatcttctaccgtgcggctccttcaattctcccttcttaactacaaattctcatactcctatttttaacaacaactcctctttaacccttttacctataattccaattcttcttaataattatcatctttttcataatcttccaaattt

SEQ ID NO: 37915 - DNA, 425 bp, Glycine max
  unsure (1)..(425): unsure at all n locations
acgcatncnttttatgtattcactttctttttccaaacacacattattcattanttttgtgggcgtcacttaaactgaagatgattttatttaagttattcaatgtatctggtccttgncttgaaaccattcatctcataaatgaccctcactatcctatttttaaccttggcttagcgtttgttttgtattacaataattcatatgcttattattcccttcaaaagattgcaagttctatctttaaactgaatggcaacacccctactgtcacatgtgcatatccaaataactcaccttaccattctgcttttttacaattttaaactctatacgtcaaaaacattcccgataattttaccacttaacaatttaatgaactaattccccgtcatggacaaataacaaaaattttcattccccct

SEQ ID NO: 37916 - DNA, 216 bp, Glycine max
aacgtgaaaggctatcttcttattattattgctatgcggacattgtatcagaaatgcaaattgggggcactttatctcagggaatatcatatactttattttgagggtcacttatacattattgatgtttctcaagctgatgatcctgaacatcctcatgcctttgtttttctgagtgaacactgctttcataaaacttactttttttaaaaagca

SEQ ID NO: 37917 - DNA, 216 bp, Glycine max
cccacgcgtccgtagcgattccggaaatcatgtctgtagctgctctttttatttgtgtgaggaattataacattgagtttcagagccttattctttgaagacaaaacataccgacacaacattcatataaacaaatttattgctctgccgctgctcaatcaccaccaccatcatggtcaggaacatctatacccaaacctttttattatcaacaca

SEQ ID NO: 37918 - DNA, 260 bp, Glycine max
  unsure (1)..(260): unsure at all n locations
aacccacccgtcgcgctcttcaatnatggcatctgttgccctcaaacctgcccttttcactgtttaaaattccttagttaaaggccttccctctctctcaaggaactcttcttcattcaaaattttttccaatgtcaataatatcaatacttacaaaccttattgaattaattgtttcattgcttttaaggattgaacttattcatcttacaagaaaagaaaaggaaaaggtgtttaccaatttgtaaacaaataccgtt

SEQ ID NO: 37919 - DNA, 455 bp, Glycine max
  unsure (1)..(455): unsure at all n locations
cccacgcgtccgcccacgcgtccgaagggataatgtgggtgacaaccatggctaacacatctcttcttgccaaaccatattattaccgtaatttccattatcaacatcaaagatgcttcaagatcaacctcccaaaatggacaactagagcttcctctgctgcccctggggtcgacctcaacactctcgaatctgccatttccaagaaagacagtgatgctgttaaagaggcacttaatcagcttagtgaagttggttgggccaagaaatggagttctcagccatatgtttcacgtcgtacgacatcactccgggagctgacaagtctaggaattaaaaacgcagagaatcttgcaattcctagtgtcagaaacgatgcagcttttctttttactggggttggaacaacaggatttctgggtgttctggctgggcaacttnccggggattggggc

SEQ ID NO: 37920 - DNA, 261 bp, Glycine max
tcggtgcatgtgtgtttataaaggctttggttttatggttgaaggtgaaaaatgttggcctgggaatgttatgggtgatgagaagaaggtttttcaagtaattttgcatatggttgggaacctactgggacacaaccattggggaaggatccttgtatatcgagtttttgcagaaactggaagtcaaggaaagagtgacaaaaggtggacaacctggagaccaagctcttctagtggtgatgtaaatattagatttgagat

SEQ ID NO: 37921 - DNA, 280 bp, Glycine max
ctcataacacatagcacaaagcaaagctcatccttgagttaaaaaatggcagcagcttcggccatggctctctcatcccaatccttgcctgccaaggccttgaacctggcccattaagcccaaaaattggaaaggtgagcctgaagaaagaccgtcaccaaccaggtttcttaaggagcccaatggtacggcccagaccgagtcaagtacttggcccaattctttgccaggccccgttctaactaaccgcggagttcccaggcgactacggctgggacac

SEQ ID NO: 37922 - DNA, 345 bp, Glycine max
gcttcaccttctgctctagaaaattcagtgctgaaacatggcttcggctactctctctgtagccaaaccagcccttcaagcaaatgggaaaagcttctctgaattctctggcctccgaagctcatcaagcttccttcccttttctagaaaatcttcagaagatttccattctgtcattgccttccagacctatgcagttggaagcagtggaggatacaagaagggtgtgacagaagcaaaactgaaggttgccataaacgggtttggaaggattggaaggaacttcttgaggtgctggcacggtcgcaaaagactccctcttgatgtcattgccatcaacgacac

SEQ ID NO: 37923 - DNA, 359 bp, Glycine max
tttttacaccctgctatcttaaatctaacgctgtaacatctcttgggtgcatctctcagcaccgaagcaatcactcatgggaatgcattaacctaaactgaattctcattatcaatacactcaacaaaatctcatcaacaatattcctaagcttctgcagattaacccaattcacatgacaatcccacctattctccataatgccataccaaattctaaatctgcaattctagagcactacattaatgagccctaaactgataaagctccaatcttaccctcttacccttatgatagaactcaagccaaattctccctagattacatttacacaaatgcgtatcacacttggaggaaaa

SEQ ID NO: 37924 - DNA, 407 bp, Glycine max
caccgtcagttcgtatttgttgatcctgtgaacttataactgacgctttagctctgttaggtacactttccaacatagaggggatgacatttaggattgcattagctgaaaatggtgtttaatatcaatacaactaataaaatctcattaacaagagtccttagcttttacaaatgaacccaattcacaagaaaattccaattctgatccataatagcaaaccaatttgcgaatctgcaattatagtgcagtacattgatgatgtcctaaatgataaagctccaatcttaccctctgacccttatgacagagctcataccagattctgcgtatataacattgacaaaaaggtgtatgacactaggaagaaaatgcatctttctaaattaaattatcattaatcattt

SEQ ID NO: 37925 - DNA, 398 bp, Glycine max
accacgcgaccggacatttccaccatccatactaatttcttaccatgaagaatcttaaaaagcgaggacgcataaccctagaccggcacaaaaccataccatagccatgactagtcttggccctcattctcaggatagggaacctgtaaccctccccatgaaggctaccacagccgtcgacaagaacgacgacaaagccgccaacgccaaccgccgatctagcacccaaatcgaaaccctaaaaaacactaatgctaggacaaacaaagcaccatctagcgacacttcatcgaacactaagaggctggatgatgatactgagagtctagctcatgaaaaagtaccaactgaacttaagaaagctataatgcaaactaggaaggacaaaaagcttactc

SEQ ID NO: 37926 - DNA, 388 bp, Glycine max
acgcaacgcatatattgcaaatagggtattagcttatattaatcaacatctacaatagatttcgcagcttataatacagaagcagatatcaacacctaaaatactcatccaacaactttagattcttcttctcaattggcatctacacttgattccatcaacaaagaaatctaataactacattctcgtaaactcaaacccatacttcaccccctcaagcacaattttgtcttctggtacactctcctaacacttagagttctaaatcaatcatcatacgatgacaacatatagaaaattgttcaatttagtacggttgaatgattttggttcttctactgccatctttctcttcccgcttctttacctattccaacatattttcacc

SEQ ID NO: 37927 - DNA, 435 bp, Glycine max
tgaactcaaatatctgaaacagctgattaatctttatcaagcaacaacaactatgtactgcagtacatatcaaaaacagtgttatagcatcaccgaatatgctcatccaacatctttatattcttctactcaattgacatcctcactttattccaccaacaaagaactctaatatcaacaatctctcttaactcatatcctgtcttcaccctactcaagcacaagtttatcttctagtacactctccaaacacctgaacttcaaaatcaaacatcatactaagacaccatacataacattcttaaatttactacggttgaattattctatctctgctacttacatcttgctcctcccgcttttttacctattccaacatatttgcaccttttcaatgaatgaatccgtcctctattgtaatactcttctaacttc

SEQ ID NO: 37928 - DNA, 411 bp, Glycine max
cacgcgtccattccaaagcccttatttcactttatccaatccgatatgtcacgcctctacacggctttctccaatctgggggccgtcgcaaccttgcctcgtcttctctctccgactttcgttcgttgacaaatggcacaaacacatcatatgtacggaacaagtgatcaaacttgtctcggtcattcatttcaaaacctacttataaagacgtcattgaaattgatctgagtactaccaattcatgtactttctgttatcaaatgaaagaatcccaaatatattgacaattcttaatgagctcaaacaacaccatcagtcgttgccttcaaccagaaatcagatctacttgttattacaccagccaagcgtcacaccttttacaaacccaacaaacactctttttggaac

SEQ ID NO: 37929 - DNA, 247 bp, Glycine max
attgattccgaagagaaaagaaaagatgtttgagccacaacagctatgcactctcgcgaaaacgcgggaattcgacctcggatcaagagaaaccctctacccagggctgaacgtcggcgaaaaccaacttcgatggggtttcatcccgaaggtctacggcatcctcttcgggcaaatcggccttaccaaccttgtcttcgtcaccaccggtttctatacctcaatcaatgaccttctcaaaggcaat

SEQ ID NO: 37930 - DNA, 408 bp, Glycine max
ctcttcttctcttactccttgggttttagcgcatcttcttctagatttaatgaagagtggtgattaaaaggttgacatgactattactaccattttccatgtctactctcataaatccactaccactgctcacctgatttacaagcttgcatgcattgacaatctttttattgacatttttgagaatgaatcttcttacatgaacaagatgtctatcaagtatgcctctttgctatacaaacttaatgctgaccctcaaatatgaatcaccattcatattgcttcatgcaattttgaaacatcatagtattatttcacaattattgatgctcctgcacatatgtatttcattaataatatgattactgtgacattccaatctgactttgcttttcttatcatttattt

SEQ ID NO: 37931 - DNA, 398 bp, Glycine max
cccacgcgtccgcccacgcgtccgcccacgcgtccgaacaatattaggagcagagaagatgctgttgaattggtggatcctaccattgcaaagcatgtcaaagaggatgccatgaaggtgttgaaaatcgcaacactgtgcaccgggaaaattccagcttcaagaccctcaatgagaatgttggttcaaatgctggaagaggcagatccatttaccacaaccaaaatgattgtgaccattgatgcttaaataagttgctccaaagaaggacaatttttctctcaactgcagacttttgagttttccactttggtaattaagcagctcataaagtgaggctgagaaggggtgataaatactagtaaatatgaaaacatgccttgatcttgggttcaatt

SEQ ID NO: 37932 - DNA, 359 bp, Glycine max
  unsure (1)..(359): unsure at all n locations
gttcgagatagaggaagatgaccttgaagcttcacagctatatcctgattataattacacatgcattgaccaacttcttgatatatttcttgttgatcctccaccccctgcatctgctgctttcgaataattaaagccctttcaagtttgttaaaatgaagtttgtgatcttccaaataccgctgactaaagcataattgtatttatctttgaggataagatttgttagtccaatctaggttttgctatgttctctaaataagattggtatagtatactcatgtaccatataaagaacaagcttgcataagaatttgattgtgtatcttgtgattaagaattacaccgatnaanaaaaa

SEQ ID NO: 37933 - DNA, 426 bp, Glycine max
gcggccaaggttgtgatgcatcagtactattggatgatacatcgagtttcacaggtgagaagacggcatgtgccaacgctgattcgattagaggctttcatgtaatagacaccataaaatccaccacggaaacctcataccctgatgttgtttcttgtgctgatatccttgctgtaacaactagagactccgacgttgctcttggtgtaactacttcgactgtacaattgcctagaagagacttctccacttgcagttcaagttgctctcactcacactctccacaaccctcttgaatgcatagggactattaaagcttccattatattgtgtatgttacaaccgagggattttgtatggctactgaatcactgatagtttcgaagtactgcttggtaagtatgaatacacatagcaatgcatatt

SEQ ID NO: 37934 - DNA, 419 bp, Glycine max
gccagatctatgacgtgtccaatggcaggaatttttatggtcccggaggaccatatgcaatggttgcaggaaaggaatgtagcagagcccttgcactcctgtcttttaaacctgatgacattaatgggaacctcgaaggtttaggtgaggaagagcttacaattttagaggactgggaatttaaattcatagaaaagtatccgaaagttggccagctcattgcagaacaaagaactcggcaaaatgagttcaaagaacaaactcaagacaatttggacaaccctaatgaatgcaaggaggaagaaaaatagtaaccattatattgtataggttacaaccgagggattttgtaaggctactgaatcactgatagtttcgaagtactgcttggtaagtatgaatacacatagcaatgcata

SEQ ID NO: 37935 - DNA, 387 bp, Glycine max
acgcccacgcgtacgctatctctgactacctagtgctctacgtctatgcctctctctcaaaaatggatgcggttcgattctacggttttgttttgctgctgcctacgttccccccttctcataaacaacgcgtcttctcttctgcttcgtatctattcttggctttggctttgggtggattaaaggcctcacagcattcggtgcggcattttaatccatttattccaacaaggcttaatgaacctatggagtctaaaggtgggaaaaagaaatctagtaatggtcgtactcaatcattggtctacgaaacttccctctgataccgcattgaagaccttagaccaaacggtggaatcaagaaattcagatctgctgcttacttcaact

SEQ ID NO: 37936 - DNA, 319 bp, Glycine max
ttcccgttcgaccacgcgtacgcgaaatcttaagcttgcagattttggactgacacgatcattttctaatgaccaaaatgcaggtctgagtaatcgtgtcattacgttatggtacacaccacctgagttgctgataggaacaacaaattttgtgccagctgaggatatgtaggtctgttgggtgcattttggctgagcttgttcaaggaaagcctattttaccgggaaaagacaagcagaaccaataaattaaactttttgactgattttaagagccgaaggaattgcatggccttgtgatctcaagaatccctattat

SEQ ID NO: 37937 - DNA, 197 bp, Glycine max
acgctttctccgacaacagggcagacaacgtgattcgctcttatcttcaaatcaacgacagaagcgacggacgataataggagtgagagaagatggcgttcgcgttcatgaagctgctcaacaggatgcttgcgaagaatgaaatgatgatcctgatggatggtctcgatgctgcaggtatgacaaccatctggtac

SEQ ID NO: 37938 - DNA, 326 bp, Glycine max
tggaacaaacgatgctcccgcactacatgaggccgatattggtcttgcaatgggtgtccaaggtacagaagttgctaaagagagctctgatatcattattttggatgacaattttgcttcagttgtgaaggttgtcaaatgggggcggtctgtatatccaaatattagaaaattatccaagtttaacttaacattaattataaccacaattggtataaatggtagtggttcatttaacaacggtgaccttccactaaatacagtacaagttctttgggttaatcttattatggatactcttggagcattaaccttggcaactgaac

SEQ ID NO: 37939 - DNA, 413 bp, Glycine max
acgcggacgcgtgggtcagaattctctaaaagagatctttttctgctctttgaagaaagaaggggctttgcttgattttagagatgtctctgctctcagatctcatcaaccttaacctctccgataccaccgaaaaaggtatcccaaaagtccatatgatccgtggatcccgaattgaccctaagaaccaaacaaggacttttccaagaccaagtagccacccttcatagcttccccagtggaactattaagggtccaacacaagtcaagctcctggtgaatacagtgaagcgaatttatacccacaagccattttcaaggatccattcccaaggggtaacaatatcctggatatctgagaagcctacactcctgattgaaaacctattcccacttacaagaggcccgcttct

SEQ ID NO: 37940 - DNA, 220 bp, Glycine max
acgcccacgcgtgcgaaaaggttcacatcactattgcggttattggccatgttgactctggcaagtgcagtaccactggccacctgatctacaagcttgcaggcattgacacgcgtgttattgagagatctgagaaggaagctgctgagatgaacaagatgactttcaagtatgcctggatgattgataagcttaaggcttaccgtgaaaaaggaatcac

SEQ ID NO: 37941 - DNA, 184 bp, Glycine max
acgaaagggatgccttgcgcggcactgctgcaatcaatctcactgataggcttcaccaggttctgtcgtgggcaaccggtgcagttgaaatcttctttacgcgcaacaatgctctttgagccagctgtacattgacatatctgcagaggattgcataccttgatgttggaatctatccatgcac

SEQ ID NO: 37942 - DNA, 428 bp, Glycine max
  unsure (1)..(428): unsure at all n locations
gatttgccatggtagcctgttttagaactgtttctttaatttcagtgttgatagtatggataatagggaagaaaaggatcaatccaggtggagacactgacaaggttgaactggagtaaattcctgtcagctcttacagtggagttcatcctgaggttgacaaagaggctagcctagtggtattgttcccaaataaaacatatgaaatcaaggaccttaccatatttgaaatattaaaggccactgaaaatttcagtcaggcaaacataataggatgtgggggttttggtttggtttataaagcaacgttaccaaatggaactacagtggccatcaagaaactntcaggagatttgggtcttatggaaagggaatttaaagcagaggtggatgctttgtccacagcacagtatgaacatctggttgca

SEQ ID NO: 37943 - DNA, 399 bp, Glycine max
gccacactttgtatttcactcgggactacgatcattgctacaagaatgaaagaaaggcggggggcctggcaacctatcacgtgccatatggagtgcacattcggggaagattcgatgcaaaattcgcaaaaatgcttgcaaaagatgcttcgaaatacgctgctgaactgcaacgtgagctccagaacgatatcaagcatgcattaaagcgcacattagaggccaagaaaaagtgcaatgaaaggtctattgcagggtttgatcctgccatcaatgacatcacaaagcacgtctgagtgtgtgcacctgtttcaccacctgttgctgatactaaagctgatatcaaatgccctgtcaacagaaagatggtcataaatactgtcaactatgcagttaact

SEQ ID NO: 37944 - DNA, 425 bp, Glycine max
cccacgcgtccgctcttctcccacctaaaaggataattccaggtgatgcatcgaggggccgtagtgatacattgctgtttgaagatgaattagagaaggcaagcaatgcacttcttgctcgagcgtggtcacccgggtggagcaatgctaacaaggcattgacaacattcataaatggtccactgattgagtactcaaaaaaccgcaggaaagcagacagtgccactacctcacttctctcaccccatttgcactttggtgagttgagtgtcaagaaggtcttccatctagtccgcatcaaacaagttttgtgggccaacgaaggaaacaaagctggtgaagagagcgtgaacttgttcctcaaatctataggtcttagagaatattcaaggtacattagtttcaaccatccctacagtcatgaa

SEQ ID NO: 37945 - DNA, 204 bp, Glycine max
ggaaactgtttaaagtaaacaccttatcgcatatgctttaatacctgaaataaaggggaggctttctatccttgggagtttgtcaactttaactgaaaataaactaattcacacccttccagaaccaaataatgtctttactaaacacaccaaaatttttttccaaaggaatcctttaaaattttaccatccatattttctttc

SEQ ID NO: 37946 - DNA, 430 bp, Glycine max
attaccaacatcggttatttatataatcgatgttggtaattttacgttaacatcgggttggtaaaaaccgatgctaacaataatactatcaacgtcggtacttttaacatcggttcaaaaaccgatgttaaaagtcataaataatcgatgtagaaaacatattttctaatattcttgatttgattctactggttcccatggtcaccccaatcatcgatccaagtcaagactcaagcaaccctcttcaccttcatcattcagatgggtctggcctcgttctcacatctcaaccccttgatcataagaattacataacctagagcagagcaatgaaggtagtgctctttgtcaaggacaaaatagcattcattgatgacacccttctgaagcctgacgaagacgctcctacctatgctgcttggacgggtgc

SEQ ID NO: 37947 - DNA, 232 bp, Glycine max
tccggttgatgctttcttgaaaccctatttcttggaggcttatcgtcctttcaaaaaaagaaatctattttttgtcccgggaggggttaaaaatgtaaaattcaaaggcatttaaacccatcctggggaggattgggttggtgctccaaacacttaaattttctgtgaaggggagcctttggaaaaaaaagatgaaaaaagactggaccaaatttggtattattatttgggt

SEQ ID NO: 37948 - DNA, 462 bp, Glycine max
tcggccacgcgttcggttggctggaagctttattaagtcgcaagcattttttaatcaatggtgggccttgattggttaccttaacatgggggttattaccatcaatggtattggctgaaaagaaatctggtgagaaagaaggagaagataaaggggttattggggccatcaaatccttatttgatcctaatgagaaaacaaagtctggaaaggtgttgccaaaagcttacttaaagtcagcaagagaagtagtgaaaacaatgcgtgaatctttaaacgaagtcactgatgataatgctaaatttagacggactgcagactcagcaaaggagtcaattcgggagtatttgggcagttggaggggaaatcagactgttgctcaagaagaatcatatgttattttggaaaaagtaatcagatctttggcaaacttttactcaaaggcagggccatcagctccac

SEQ ID NO: 37949 - DNA, 462 bp, Glycine max
cttcgggcatgcagatctttgttaagacccttacccgccagactattaccctagaagtcgagagctgcgacgccattgacaaccgtaaggcttaaaatcaagaccagggaggtattcccccaaaacaacaaaagcttatctttcgccgccagcaacttcaaggccggcctacccttgcttcctccaccatcaaaaaggggtaactctcaacttggtgtgcgtcttcgtggtggtatgcagatcttcgtcaagacccctacggtaagactattaccctcgaggtggagagctccgacaccattgacaatgtgaaagcgaagatccaggacaaggaaggaatcccaccggaccagcagaggcttatttttgctggcaaacaactagaagatggaaagaccctcgctgactacaacatccaaaaagagtcaactcttcacttgggtgtgcgtcttcgtggggggt

SEQ ID NO: 37950 - DNA, 439 bp, Glycine max
  unsure (1)..(439): unsure at all n locations
cacgcgtccgtccacgcgttcatccacgcgttcgggatccagtttgtttacaggctacggcacaatcgccataaccgaaaccaagaagtcccccttctccgtcaaagtcggcctagcccagatgctccgcggcggcgtcatcatggacgtcgtcgacgccgagcaggcccgcatcgcggaggaggccggtgcctgcgcggtgatggccctggagcgtgtccccgccgacatccgggcccagggcggcgtggcccgcatgagcgatccgcagctcatcaaggatatcaagcgggccgtcaccatccccgtgatggccaaggcccgcatcggccacttcgtcgaagcccagatcctcgaagccatcggcatcgactacgtcgacgagagcgaggttctnaccctcgccgacgacgccaaccacattaacaaacacaacttc

SEQ ID NO: 37951 - DNA, 231 bp, Glycine max
ttcacgcgtccgactacgcgtaggtttactttaactgtgatgttatgaatgagttatcttgacttttgaaacgagagactgagaatggaacgtggggctcttgataggatcattaatagggtgcttgaagtcataggcagaccactgaaacatgtgcaacattatgaggctgacatcaaacagctctgtcttgtctacaaggatatcttgatgaggcagaccaacctgttg

SEQ ID NO: 37952 - DNA, 359 bp, Glycine max
acgctgacgctatcgaatcaactatcatgtcagccgacgagcaccacttcgagcaccatgccgaggccagagcctacaaaagatactctcaaaaagacggtaccataggcaagaacagctacatgaacatctacggccggatctgcagggttgcctacgttgctactgacaaaactgctaagcacagtgacgctcactgtcactctgagggaaacgatattggcactgacaagaaaactgacgatatactggccgatattgacaactgtgatgacacccatgagaatcgtactgagtaccggactaatgaccatgccaatgatagagcttagagtcgacttactggaaatggtaacgct

SEQ ID NO: 37953 - DNA, 415 bp, Glycine max
aattgctttgcatgggacttgatactacatggagaggaataccttgtgcaaacgtcgttggttcattcaacaaaacttcttcctttaatacagcgaagctggttgagtacaatccagtccacattgtatcattatgagagatggagcgccagactggtgctagactgattcttacagctggcgctaatgataccatagtgcctgactacgatgatgaacccactagagatatagcgtatgtgcttgtagtcaatggattatcatatgcagatgttagaatatgatagagctaaagacagtggagacagttcaattacattgccactctttgattcaacaagtctacgatctcttaactcatgtgaagagacaatagctaatacctacagatgactgggctcttttgaagagaacg

SEQ ID NO: 37954 - DNA, 334 bp, Glycine max
  unsure (1)..(334): unsure at all n locations
atacgcaaaaggccacacaanaaaaggacattagaaagaaagtccgggagcaaccacaagagggaggagaccctccatgtgggagggcacacacgagaggagcacaaaggagaacaccatggagagcacaaaggagaacacaaaggagaacaccatggagagcacaaaggggaacacaaaggacaacaacaacatggggagcacaaggagggactagcggctaagatcaaggacaagatccatggagatggccatgacaagggtgagaaaaagaagaagaaagacaagaagaagaaggagcagggagatgaccatcatggccatagcaccagca

SEQ ID NO: 37955 - DNA, 315 bp, Glycine max
  unsure (1)..(315): unsure at all n locations
ncgccacgcgttcggattcttcttcataaccatattattggataaaaattttaaatatcttatacacatgtcatagtttggttatggtggaattaaaatcattctatttgggttcattagctgtgctaaaatacgaagaagacattgctatgtatactgntaaagcggcaaatgatccaagaacatgcaaccgcgtcgttatttatcggccacagaagaatatcatatcacagaatgagttgacatcattgtgggagcaaaaatgtggtcagacttttcacaaggctttcatttcggaagaagaaattgtcaagc

SEQ ID NO: 37956 - DNA, 255 bp, Glycine max
gtctcgcgaacattgagagcctacagagtgttgacaacacagcattgtatgaaaaggcgggcacgatccttgagacatactggttggacgaggaagatgagactatccctccataggattcttttcagccatgcttaatgtttggtagctgtgactctcatactgtgccatacagaggattcaactttaattagaagatattcatgctatactggcgagtttcgcatgcggtatccgtatagcactgcatgatga

SEQ ID NO: 37957 - DNA, 365 bp, Glycine max
gtcagtactagctgaggggtgtaaataagtgacttttggaccatgcaattgcaattttccttatgtgaaaagtgattatctataattaatttgtgttctatatttgactaagatcctgcaaccataggaagcacttatcgcttgtaattttcaatgatcaaaattttacatttgttcttttttgttggcttcttcatctgtggcaattaagtttctatcacggaatacaaaagatggctcctatttcaagaatctacccaagtcaagtgccattaagctcattgatttcgggagtacatcatttgaacatcaggatcacagttatgttgtttcaacaagacactatcgtgcaccagaagttatct

SEQ ID NO: 37958 - DNA, 350 bp, Glycine max
gccacatctgctttaaaagcctgtacttttgaacctctctcgtgatcactctaatatggtgggggtggttttgaacgatcgatttgtgaagaaggtgcgcgtgaagtgcaacgacgatgataccatctgcgaccttaacaagcttgtggcggctcacactggctcaagagccgtcaagatccgcatccagaagttgtacaccatctacaatgatcacattactctcaaggattacgagatccatgaccgcatgtgtctcgaactctactacaactctacacaacaaggtgtgccttatgcgtaatatactatgtgcttctaatgggataagcgcttaatgtaattctgac

SEQ ID NO: 37959 - DNA, 414 bp, Glycine max
gaagaacatacagtgatcgagtgcgtattcggattgttgggtactggattcgcgatcgtggcggctgattcatcggctgtgcacagcattctcgtccacaagtacaacgaggacactatcatgcttctctatttccacaaactcatcgacgttcgcgatcagctcggatacagggttcaattcactgagtacattcagaaaaacgtctgcttgtatcagatccgtaacggcatctatattaccaccgtcgactacgccaatttcacacagggcgaacttgccactgctctacgcaagaacccatactctgtgaacatacgttttgctggccatgacaaacatacaggcccttgactgcactatattgactacattgcaacgcttcagatgcttgaaaagggagctcatggttat

SEQ ID NO: 37960 - DNA, 437 bp, Glycine max
gtaaataccatgactatgaccacaagtgaaccattcatgtcaaacatgcatgtgacttttcatatatctcataataaaaccgcaagccattaatgtcaaaatataataacagactaataaactcaacaaggaggagaagatgtcgactccggactaggaagagactgatgagggaattataaaagattgcaacaagaatcctacagctggcatcagtggggctccccaagacaataatattatgctttggaatgctgttatctttggcccagatgacaccccttgggatggaggtacgtttaagttgacacttcagtttacagaggattatcctaataaaccacctactgtgcgctttggttctcgaatgtttcatcctaacatttatgcggatggcagtatatgcttggacattttacaaaatcagtggagcccta

SEQ ID NO: 37961 - DNA, 338 bp, Glycine max
gaatcacgctgatttgagtaacgaagtagttgtgctggttgctgttgtaatattggttggggtattcagcatgcatcattatggttcagataaagctggttggctatttgctccaattgtccttctttggtttcttctaattggcggcataggaatattcaacatctgtcaatatggcagcagtgttctaaaagctctttcaccattgtatatataccgctatctacaacgagaaggcaaagatggatggctttcccttggtggcattttgctcagtataacagggacagaagctctttttgctgacctagcacactttccagtttcttgtgtacaga

SEQ ID NO: 37962 - DNA, 334 bp, Glycine max
gcattattttgaggataatgtgaaggaaatcctaaattttcgtggatttaattctgaaattggcctccaaattcttgttgataaatcactcataaccattagttacgggaagatttatatgcatgacttgttgagagatttaggcaagtgtattgttagagaaaaatcacctaaagagccaagaaagtggagtagactatgggattgtgaagatctctacaaatttatgtcgagcaataaggaagcaaaaaatctggaagccatagttgttgaagatgaaccagggatgttttctgaaacaacaatgagatttgatgctctatcaaaaatgaaa

SEQ ID NO: 37963 - DNA, 298 bp, Glycine max
agaagacgagttgaaaaaagtcacggcacgtggtatcagagatatatctcaaatctacacaaggcttcttactaggctctgggtgatgggcactaaaaaaatggactacatttggttcacacatggtgtcatatttccactgctccatacacagccgcatggggtataagatgttatatacaggggagaccagttgatttgactcctgagctagaggaggctgctacaatgtatgcagtcatgcgagatacacagtacatgcagcaagatatgttcaaggaaaagttctggaatgact

SEQ ID NO: 37964 - DNA, 381 bp, Glycine max
cccacgcgtccgcccacgcgtccgcccacgcgtccggtccacggacttcagagaaaagatgggtacattgcaaagacaattgatgaatgtgagattttccggaagtgccatgaaactgactggagaaatagaagaggaaatagttaatgtctctatcgatgatgttgttttgcaacttaagaatggtaaggatgaagaatttgcggttgcacttttgagactaaaggagttcatgagcagtgaaagactggatggtggcttgattgatgaggaaagcaactctttccattcttttcaatcgtctaggttcatgtaaggctgacaataggttgaccatcattcgattgctaagaagtattgctttaggaaatgatgagaaaa

SEQ ID NO: 37965 - DNA, 297 bp, Glycine max
  unsure (1)..(297): unsure at all n locations
gaanacccgggccgaccgacgcgtaccgcaaaaccttaagtatcggatcaggttttagtaattttgttggtagaacctttcgtcgtagggtgtcaattattatggctgaatcacaccatcaaattcctactgccttcgatccttttgctgatgcaaatgctaatgactcgtttgctgtgtcaaaggagtatgtgcatattcgcgtacagcaacaaaatttaatgaaaagcctgacaactcttcagggattgaaaaaagaattcaactataacaagatacttaaatattttaacaaag

SEQ ID NO: 37966 - DNA, 469 bp, Glycine max
tttttctctctctcactctctttggcttccatcttcgtcaccacccgcactatgcaatcccgaggggttcttgattccaccatccgtaagtgatttgtggtgaaacctaagtttctgggctggttttgtggaatctggtgaagttttggattttgggggtgttggttgagtagagtgggtgaattggattggactagttggttgaagtttggtgcaagtgagttgagatatgagtgtggtggggtttgacattggtaatgagaactgtgtcattgctgtagttaggcaacgtggcattgatgttttgttgaattatgaatccaaacgtgaaaccccggctgtggtctgcttcagcgagaagcagcggattttggggtctgctggtgctgcttctgctatgatgcacatcaagtccacaatatctcaaataaagagactaattggaaggaagtttgcagaccctgatgtg

SEQ ID NO: 37967 - DNA, 445 bp, Glycine max
  unsure (1)..(445): unsure at all n locations
ggaaaacccgggccggccgacgcatacggatggtttgtaccataccacaccgattcgattatggatgtcgccgtctccncaaaggctcggtgtcaatactatacacacgctataaccatttgcaagaactaaaggccttctactaatccaaagctggagttaaaggcctgatctactccggcatcaccaaactcccaaaaattttcgtccggccgccagaagacctcgccgccgtccacccaatatccgacaaccctgccggtgcccagttcacgatccccataattgacctcgacggccttaccggcgagcgctccagcatggtggctgcagtccggcgggcggccgagacggtggggttctttcatgtggtgaatcacagaattccgctgaaggtgctgaaagatacgatagcatctgtgcatgagttccactagctgccaca

SEQ ID NO: 37968 - DNA, 470 bp, Glycine max
cccacgcgtccgatctcaccactaagtttattattatcaaaaccaaaagctagcaggctacgttgcaaagcaacacatggcttctacagacaagcatggcgacactgaatacagaacatcatcttcaactccagctcctgcgggtgttgattactttaaatttgatgttatcctaaggtttgtgttatttgcagcatcactggtagctgttgtggtgatcgtcactggtaatcaaacagaggttattcttgtgccacagcctgtgccatggccagccaagttcagatacacaccagcctttgtgtattttgtagctgcattgtccgttactggcctctacagtatcattacaacacttgcatcactctttgccagtaacaagccagccctcaaaaccaagttgctcctctactttatcttatgggatgcgctgatattggggataatagcctcagcaacaggcacagctg

SEQ ID NO: 37969 - DNA, 305 bp, Glycine max
  unsure (1)..(305): unsure at all n locations
gcgaaaaccaagagatggttagaggaaacaccttatatgaaaaatatcattcttatgctcggccttgttggtacctgcatggtgattggagatggtattcttacaccagctatatctgttttatctgccgntggtggcatcaaagtgaatcacgctgatttgagtaacgaaataattgtgctggttgctgttgtaatattaggtgggttattcaacatgcaacattatggtacaaaataaagttggttggctatttgctccaattggcccttctttggtttcttctaattggaggcataagaata

SEQ ID NO: 37970 - DNA, 381 bp, Glycine max
gttgacctcatctacttcgatggaattcgcgtcttcttcatcatccttcccaaaatccaaagcccgatggacatacgatgtgttcatcaattttagcggagaagatctccgtaagaatttcatttctcatctctcttatgccctttcaaaagctggaatcaacactgtccttgacggccaacaaatggagctggaagaactaatcaaaccagaaaagtctcagatctcaatagttgttttctccaaaagttatactgaatctacttggtgtcttgatgagcttgcaaaaatcattgaaatccatgaaacttatggccaaagagttgtggtcgtattttacgaaattgacccatcccatgtacgtgatcagaagggagattt

SEQ ID NO: 37971 - DNA, 352 bp, Glycine max
cccacgcgttcgcccacgcgtccgcagagaactagtctcctactctcacccgcaagaaaagggtggcgtctcacatcgttggatacccccgtatgggtcccaagagagagctcaagttcgctctcgagtctttctgggatggcaagagcagcgccgaggatttgcagaaggtgtcttctgatctcagggcatccatctggaagcagatggctgatgctgggatcaagtacatccccagcaacactttctgtcactatgaccaggttctcgacgccaccgtcaccctcggtgccgttccaccaatgtacggctggaccggcggcgagattgcgtttgatacctacttctgcat

SEQ ID NO: 37972 - DNA, 328 bp, Glycine max
ttcatctgaatttccattctcagataaccaattcatactcagaatggtgccatctccaatgtgcacatacactaaacactgacaaaactatgtgaatacttggtttaatcaaccatcccaaaagaccagaatacagttatctcaacagattaagactgtcaatattatccacaagcctactgctggatctctcacgcctattgctcatggccaaactctgaaatacaacatgaaagtcatagcccgtaaaggattttcactggaagaattgactgctacaaaaattcccaagaaacttgctccaactattgggatttctgatgatcac

SEQ ID NO: 37973 - DNA, 266 bp, Glycine max
cccacgcgtccggtttcgaatagattatcctatgtctttgggaatagtgctgcaatggctggaagtcaggaggaggtgacccttttgggagctactggaagcccatttgtgtgcagggttcatattgccctcaagttgaatggagttcaatacaaatatgtcgaagaaaatttgaggaacatgagtgaactgcttctcatattcaacccagttcacaatggatgtatcagtgtttatctacaactagaaacccatatcaaattctc

SEQ ID NO: 37974 - DNA, 312 bp, Glycine max
cgaccgcgctgcgaaacccagctctgatgttcataggctgggcttttcggacacgaagaataagaagggtcatgagcgcatctgcagaaagcatgaacgagaagaagggttgatgatcaagccccagagcttcactccccccatcgacacctcccaatggcccattctcctcaaaaactactatcgcctcaacgtccgcaccggccactacacccccattccctccggctactcccccctgaagcgccccctctccgagtacctcaaatacggcgtcctcaacctcgacaagcccgccaacccttcctccca

SEQ ID NO: 37975 - DNA, 446 bp, Glycine max
catcaaggtctggcaggtaggaaagagtctcaaacttcttcttgccaactggtggcgacacgtgcatgcattgcactcttccaccgttgctagcaatggaggtaatgtcattgttggtctttctggtggggaagccagccatggacttgaggccagtgaatggagcaaccatgccggcaccggcacggttgacagtggtaacagctggggaagagatcattgaggaagccatttggcaaaggaagtagaataccttcttaggaagggatggattccttgcttggaattcgagttggagcacggtttcgtgtaccgtgagcacaacaggtcaccaggatactacgatggacgctactggaccatgtggaagctgcctatgtttggttgcactgatgcttctcaggtgttgaaggagcttcaagaggctaagactgcataccccaacg

SEQ ID NO: 37976 - DNA, 401 bp, Glycine max
cccacgcgtccgaagaaacgggccacacaaaaatagtggtgcctactttgtttgacataatggctcaactgcagaagcaacaaaacttctgctttgtccttcttctctttgtggcactgggtatagcttatgctagagaagcttttgaagttagcttccaacagaactacaagattgcatggggaaagcatcatatcttctttctacagcatggtagagaagttcaactctcaattgataagacttcaggggctggtttcagatcaaaattggagtatgcttctggattcttccaaatgagaataaagatacccaacaaggactgtagaggagttgtgacagccttttatctgacttcaactgcctataaacatttgggaagcaaacatgacgagattgac

SEQ ID NO: 37977 - DNA, 392 bp, Glycine max
cccggacttcctccccctcctccgcgcctcctccctcccctaccagctcaccgccccggccgtcgcgctcctcctcgtcttccgcaccgaggcctcctactcccgcttcgtcgaggggaaaaaggcctggaccatcgtcatcgccggcaacttcgccatcaagcacgcgctcttacactacatcattgccttccccattgcgcttaagtgccacgtgctgtatggttcggatgttaggagtgatcttcagcatttgctagaagtggatgatctggcggtggtcatgaattcgaagcaccggcctcgctgcattattgagtttatatcgcagagcatccgtttactgaaattggaggagtctagaagaaatgccctggaatcaaagatgactt

SEQ ID NO: 37978 - DNA, 475 bp, Glycine max
  unsure (1)..(475): unsure at all n locations
gcgaaagaatgcattanagctctagataatgaccaagggcatatacctttcagaggaagtaaattgactgagagttctgcgagattcatttgtcggtgattcgcgcactgtaatgatatcatgcatttcacctagctcaggttcatgtgagcatactcttaacacattaagatatgctgacagagttaagagcctgtcaaaagggaacagctctagaagggatcccctttcctcctcaaaccttagagattccactgtgttgcctggctcttcagtcttatctcgtgatgaaaccatggaggatgaaataacttatgtttctagtgacaagaatcgatttggttggcccaaacagctggaaagagaaccctctcctccaaacaatgtaaaccgtgttccaagtggtagaatggggggaaatttggcaccatctatgtattctgatccacaaaatggtcaaagaggtagtcaaaat

SEQ ID NO: 37979 - DNA, 396 bp, Glycine max
  unsure (1)..(396): unsure at all n locations
ccggggggacgactctttctgttgttgtanaactcgttcttgttcttttgatgctctgtgtttgtttttgtaaagtcgggcacctgaaaatgtcttgctgctgtgttaactgtggttgctgaagctcctgcaagtgcggcatctgctgcggaggctgcaagatgtacccagacttgatctacactgtttcaaccaccaccgagaccttggtcatgggagtggcacctgttaaggctcaatttgagggtgctgaaatgggtgtgcccgctgagaacgatggctgcaaatgtggaccaaactgctcctgctacccctgcacttgcaagtgaggtgttgggagagcaagctttaagcagtgatagcccttaattaggaatatatgataaactattaatg

SEQ ID NO: 37980 - DNA, 454 bp, Glycine max
cccacgcgtccggagagagagagagaatttcatatacatgctatgatttttctttttgaagtgcattaaaatgaatgagcagaaaccttgtttttctttggtctcactttagctagcatagttatacaatttactgattgatggaagctgttattattgtttatttggtttttttaagtatttgatttgatgattcaaatgtgaaaaaacaaaattgtgcacatggtttcgtgcaatttttatatggccacatggagtatctaagtatagaagtatttgatgcccggtcattatcattacttgatcatgaaatttttattaacagcaaccaggcattgggggtgaagtagtgccacaccaggataactcgtttctttatactgaaccacaaacgtgcaccgggctgtggctggccctagaagatgcaaacatattaaatggttgcctttgggca

SEQ ID NO: 37981 - DNA, 265 bp, Glycine max
cccactccttcggtcggtacctgatatttcttgagttgcaaaaattaaaacaatggtttcggctgagaccatgaacatcccgtacggcttgtgcttcaaggtttatgccaaggtcatcgaagttgagggcccctgtggaaaatctgttcgagacttcaagcacttgaatctcaattttgagcttatcactgacgaaaacggttaattgaagctgaatgtggacgcctgcttcagttctcgaaaaacatccagcgccattcacacc

SEQ ID NO: 37982 - DNA, 277 bp, Glycine max
  unsure (1)..(277): unsure at all n locations
cttacacttgnactattcatgaatacgctaatttaacactcaggtcatctcccatataaatatagctaattaaccagattgttgagggattctttaggtggtaaaaccaaaactatcattattgccacaatatccccttccattcactgtctggaataaacccttagtaccttggattatgcacaccgtgcctaaaatatcaagaacaaaccatagattaatcacaaaatgatgaaatctgcaatgattaatgatttgtattcagaaattgacagac

SEQ ID NO: 37983 - DNA, 341 bp, Glycine max
aagaccaaaaactgatacgtttcgtacagtttttaatatcagttcactttaagaatacatctatctctgcttctgcaagagaaacaattggaagggttgcttctggtgctgttgctaagaaaatccttaaagaattttctggaactgagattctggcctatgtctctcaagttcataagattgttcttccagaggacctgattgatcatgacactctgactcttgatcagattgagagtaacattgttcgatgtccagacccggagtatgcagagaagatgatatctgcaattgatgctgtgcgagtgagaggtgattctggtggtggtgttgtgacatgc

SEQ ID NO: 37984 - DNA, 357 bp, Glycine max
attgatatattttaattacttgctgtggggttataatttttccacatctgtattatttcctgtttataattatttgcttcttttatccacgaaaggcaaaagagttagcatttaggatgggaaaaacaattgagttgtatggattccctacatctgtgaatgtgtctgatgtaaagacatttgtagagcagtatactggtgaatgaactgtgttcgccattaaattaagacatggaaaaggtcatgttccaagagcatttgcaattattcaattcaccaccgcaaattctgctacatctatgatgtccatagctaacagcattttgagaacattgcggtatggaacctcctatttaa

SEQ ID NO: 37985 - DNA, 441 bp, Glycine max
  unsure (1)..(441): unsure at all n locations
cacacttcctcccactcttccgcctatacttatacccataccttaaaaacctaaagctaagtgttttccatcatccccacattcctcacttcttactcgttaaccttctaaactaaccttatatcctttaccaacaaatgggtttcaaagggtctttcaaagtcaagaactttcaacctttagacgtaattttccttaaagcaactaatcttatactgcatataactcttgtatatttccaccttccacttattatcaaaacattcatctttctacctcaataaggtatgggtcacacatctggatgtcaatggtaatgcattaaccaacatatccagatctactttcnatcttttatcccactcaaatcattcatcccatccatcatttcttgatcaaaatggtcctttagctaaccttattacaaaacattttctggat

SEQ ID NO: 37986 - DNA, 277 bp, Glycine max
gactcgaacggtgaagaagcacagggagtagcggcattgaatatgcagatcttcgtgaaaactctggcagcgaagactataaccctggaggtcgcgagcagcgacaccatcgacaatgtcaaggccaaaattcaagacaaggaatgcattcctccggatcagcagagtttgattctcgccggaaagcagcttcaagatggaaggacccttgccaattacaacatccataatgaatcaacccttcatctcgtactcaggcttcgcggtaacatcattg

SEQ ID NO: 37987 - DNA, 405 bp, Glycine max
  unsure (1)..(405): unsure at all n locations
gcccacgcgtncgcagaagttgacttggagacaatagtcttgttcttcagatctctggtttttggtttcctggccatggcggaatcatttctcttcagcattgcagagtcactcctttcaaagcttgcttcgcaggcttatgaagaagcttctcttgtgctgggtttgtacgaccatctcaaaaaccttaaagacaccctatcattagtccaggctgtcctgttggacgctgatcaaaagcaggagaagaaccatgagctgcgggaatggctgaggcagctcaaacgtgtcttctttgatgccgaaaatgttctagatgaatttgaatgccaaacactgcaaaaccaagttatcaaagctcatggtaccaccaaagacaaggtaagtcacttcttatcaacttct

SEQ ID NO: 37988 - DNA, 417 bp, Glycine max
  unsure (1)..(417): unsure at all n locations
cgaccacgcgtggccacgcgtncgccacgcgtccggcacgcataggtcctctgttaccctattggatctggcttttcggaggatatggagtgttcctgaagctttgatcactgctgagatgggtaccatgttccctgaaaacagtggttatgtggtttgggtttcgtctgctttgggtccctattgggggtttcaacaaggttggatgaaatggctgagtggggtgatagacaatgcattatacccagttctatttcttgactatctgaagtcaggaatccctgctttaggtggtggattgccaagagttattgcaacatggggtcttactatagntctcacttacttgaactataggggtatgaccattgtgggatgggttgctgtttgtttaggggttttctcactcctcccttt

SEQ ID NO: 37989 - DNA, 419 bp, Glycine max
tccagtccaagtcttgggtcagtagagcacataagtgccactgaaaaactaaagaaagaagaagagaagaaaaggcgtcaactagaagcagagttgaaattaatagaagaagagactgcaaagagagttgaagaagcaatccgtaagagagttgaagaaagcttgaaatctgaggaggttcaggtggagattgaaaggcggttggaagagggacggaagagacttaatgatgaagttgcagctcaacttgaaaaagaaaaggaagctgctattattgaggctaaacagaaggaggagcaagcccgtaaagagaaagaagatcttgaaaggatgcttgaggagaaccggaggaaggttgaagacgctcagagaagggaagctttagagcagcaaagagggaggaagaaagattaaagagc

SEQ ID NO: 37990 - DNA, 429 bp, Glycine max
cccacgcgtccgcctcattccagccacacgcttcagaagacatggcctcattgggtgggttacaaaatgtgagcggcatcaattttcttatcaaagagggtccaaaagtcaatgcaaagttcgagctgaagccgccaccatatccactggtaataagacctagagtttgcatgtttacaagagaattcattgtgattttctagtggagctatatttctaatgcacattgaagaaagaatacttagcttttatagttttcaaatttacattctattgaaactttggttagtcttgctttaataaagaaacttaaaaatgaaacgatacatggacataggcatctcaatacatgcatggactaagtactttggttactcttattttctggtcatcatggatccgaagctataatctaacttaacacacaca

SEQ ID NO: 37991 - DNA, 313 bp, Glycine max
acgtttcactcctgattatgaacactggaaacgtttaatgtcccagtcttatctagaatctatggtaatttattaatcaaatgtgcgcaatgtcatcgatatgaagtctatctatcgagcatttgctgcagctttgatagatttcaacgtttgggtcataaatgtgcttacaatatactcccctcatacttcttcccattatattttaacgatgtctattcaatatatatcatcattcgtgtgaatcatttaccacctatcctactacctatgatctcctccatgcttatcaatctctttaaaacttaacaaa

SEQ ID NO: 37992 - DNA, 416 bp, Glycine max
cactgacctaaccatttcattatagtcttgaatcaaaggtgacggccttccatggcttccgggggtgcttcctctggaattacagctgctaccatctctacgccaaattccccgcagacgaatggatcatgacgttgtttacttagaggaaagaaattgacggtgaactaggctagagcacctgttgaaggacgatcgattgccactactgtgtcgcgcagttgctgcacctgacagacctctatgagctcccaagcagcacccctcctgcatggcttgatggcactgtaccatgagacttcagctctgaccctcttagtcttggatctgacccgcagagtatccgatggaatgttcacgcagagctagtgcactgcaaatgggccatgtttggtgctgctaacattttcattgca

SEQ ID NO: 37993 - DNA, 306 bp, Glycine max
tctacacttacaccatcaaatctaaatgccttctctctcacctacaatgacagaggataacatttcatgattgtttaaaaaataaactgatctaatctcttctgctaaactactctgcaaaattcaaactcataaaaccactgttgaaactgaatatatcgaagaaagttttactgccaaaataatccttgatgatgtcgcaaaagaaattaaagttattgaagtaattgctccaacttttgaaaattaatgtgatattgcaaaattcaaagattaccaaccttcaacatcttaaccaaattaacc

SEQ ID NO: 37994 - DNA, 250 bp, Glycine max
ttcacgcgtccggcatcctgatcggaaaccgtcttctgcggctactgtcgagcatgcatgaacgacgtctttcagggatgggatggtcagaggaagcggctgtgatatagttcaagttgaaggcggtcacattgtgcgctccacaaggcataaggaccgtcacatcaaagtgtgcactctcaaaggccctattgaccgacgagtgaggttatcggcccacaccgccatccaattttacgacgtccaggac

SEQ ID NO: 37995 - DNA, 446 bp, Glycine max
  unsure (1)..(446): unsure at all n locations
acggtgaactgtgaacatcatcatcacaattaatatgagtagtgcaacaagcaaggcttggatggtggcaactagtgttggagccgtggaggctttgaaggaccagctgggtgtgtgcaggtggaactatgttttgagatgtgctcagcagcacatgaaaaaccactttagatccttgtctcaagcaaaaaatgtttcttcttcatctgctcttgttgcaagcaaattaaagggtgatgagaaggctaaaaaggctgaaaagtccttgaggactgtcatgtacttaagctgctgtggtcctaactgatcttaaaggagagagattatcttacatgctggggattaattgtgatttgaaatgaatatngctttgtgtaaatagagatatgatagattgtatgaaaattgtaatgccaaacaatattaattaatatactattcaatga

SEQ ID NO: 37996 - DNA, 368 bp, Glycine max
cccacgcgtccgctgactcgtgggtccgctttatagagtataaaagatgtcgcgtttgatcgacagtttttagtgcgcggtggccgtgctactgtgcgccttagctgtctcttcttgggtggatgaggctgctaacccgatactaatggttgctactgtacaaactgatgttattctcatgatacgtcatttccagcactctctgaagtttgctatgttcatgatcaagttcttgaaaagttaccgaaacgaagaatatatgatgcacatgtactaaatattctcgcaaaaccttacgttcatacgctcccacaacaagaaccgtttgccctacactctctctgataatcattttgcttattgtactt

SEQ ID NO: 37997 - DNA, 391 bp, Glycine max
gcgtaggctacgtcatgctaatactgatctttttatggctgctgctactcctcctaccaatctgtcaatcattccgagagctctaccaagaggaagcttgtaccgaattcttcatcagcctaattgtcagattgatgagacacgaacaattgctatgcctctggatgtggctagccgcatgaattgcttacacaccagcacactctactattgttcatcgagatctaacgtctccaaatcttttaggtgataagaactggaatgataatgtatgtgactactggttgtcacatgtgaagcacagcactgattttgcatacatgtcaactgctggaacgccggaatgcatggctactgaagatctccgcaatgagccctcagatgagaaatg

SEQ ID NO: 37998 - DNA, 318 bp, Glycine max
gatacattgttcatgaacggacttatatactctataagaagtctttcaacgagcaggtcatacaaatgaggattataaacacacaagtagtgctcttgacacatgactcagaaaactcagctctgaagctgccattgaataaccaattaaaccaccacttaacgttgaacacacccacctcttaattgatggaaaaatcattcatgctactactggcaaaactataccaacgttgtaccccattacacgataagtgatttctcatgctgcttaaggtgaccattaatatgtcgatcgatcaatatcatcttctcgcaa

SEQ ID NO: 37999 - DNA, 257 bp, Glycine max
tcggtgattaccaacaaatacagttattgtgtccctggtgcaagatattattggggaaaggtttttatggacgtggcgtgagacactattccaaaagcgtgccctgtaagcgtttaaattggatcccgctaaatggcgaatgaacgtgcaacctcttgtcattgtcttctgcaatattccatgtctacactgcattgatttaacctcatgaaataatcatggtacttgatcttcctcatagaggccatatttcttat

SEQ ID NO: 38000 - DNA, 341 bp, Glycine max
acttactgtactcttgcaagccaccgtctctaagatcttgtttacaaacaaaggtagtagatcaaggccagtggcgagtggagtgatattcatggatgcattggggagagaacacagggtatacctgaagcagggtcccaagagcgagataattgtctcagctggtgcactgggaagcccacagcttctaatgttgagtggaataggagcagaacgtgagcttaggaaacacaacattgatgtggtgttgaatcagcccttggttggacagggaatgtcggataacccgatgaacgctatctttgtcccgtcccctgtccccgttgaggtatccctcatag

SEQ ID NO: 38001 - DNA, 271 bp, Glycine max
gtatacaatgtgcatgaaatgactgatggactgtataaaaggtagatgagcgagaactcatacaaatgaggattataaacacacaaaaagtgaacttgacacatgactaagaagactaagaactgatgctacaatggaagaaccaagcaaaccaccacttaaagttgaacacacacacctcttaattgacggaaaatttgttgatgctgctactggcaaaactttaccaacgttggaccccaagacaggagatgtgatttctcatgttgct

SEQ ID NO: 38002 - DNA, 457 bp, Glycine max
  unsure (1)..(457): unsure at all n locations
ccggnccggaccacgcgggccgacacacgcgtgcggttgaatacctatgggaacacacggcactggctgcattgctgtgaaggggaacactctgggtggttgtgtgcatacttgatgtgcttcccatactaatacctgagcgtacactggagtgcttaaaccacgtgatcggataatgggtctggactagcctcacggacgacatgtgactcatggcttcatgacacccactgctgcgtgcgtctggcccgtcaatttatcatgcagctatggctcatcgacttgatgaatcaacaagtcttattgattatgatatgcgggagaaaactgctactgtggttcattcaacactcattgctgccggtgctagtgcttatcctcgcgacatagactacactgctctgagataaattgcagctgaagtacgtgctcttcttatgatggatatggcttatat

SEQ ID NO: 38003 - DNA, 446 bp, Glycine max
  unsure (1)..(446): unsure at all n locations
cccacgcgtccggnggacatgcccgcgaaacagaagggcgaaggggcaaacacaactttgggggggcgaaggagagcgagagagaaaaaaacggcggggatcttcagcagttccgaggtgtcgccgccggaggagctggtggctgccggcagcagaacgccgtcgccgaagacgacggcggggaagctgctgaaccggttcgtggagaacaaggcgtcggcggtgtcgctgcaggtgggagaacacgtgcagttggcttacacgcaccacaacgagtcaccgtggcatcccagatcatttgctgttaaggatgagatattctgcttgtttgagggggctatagacaatttgggcagcctgagacaacagtatggactggccaagtcagccaatgaagtggttttggtgattgaagcttacaaagctttacgtgatcgagcaccata

SEQ ID NO: 38004 - DNA, 345 bp, Glycine max
ctctctatgttctatcataccttttctttgtggatacaaatgttcgcgaagaccatcacagatatgatcatcataatttaggtaaaaagctctggcaccatacaataaaccatggcaaagacccatgacatgaaaagaattaccaagaatcagcaattgtgaatcttaacggctagcattttaaatacactcagaccctcgacaactacctcatacagaacgattaaacgcttgaacttatgattcgcgtactacatagcatgcagatcatggtaaacactgtcactgcgacaaacattactctatatttccaaagctcagagactatagacaacctcaaggaca

SEQ ID NO: 38005 - DNA, 293 bp, Glycine max
ctcacgcgtgcgaacgaaaaaaaaaagaagagcaattttccctcaccaaagaagaagaagcgggctatggccgatcaacttaccgttgatcagatttacaaggtcaaggaagccttcggtttgttcgacaaggacggcgatggggcgttctatgtctctctctctcaagttatgcgtataagagctgatttgatttatagcgtcgaggtttttgcagatcggagatcctttttgtgataatggaataggaaaattagatgaattctgattctatatcacaatgctttttttgt

SEQ ID NO: 38006 - DNA, 330 bp, Glycine max
gacccagcgtccttgcaatcaaatattgtttctctttctcaaaccctaccctactggcaaagcaaatcttggtcggaccctcaccacaaaaccatcacccttgagtggaaagcttgacaccatcgacaacgtcaaggccaagatccatgacaaggaatgaattcccccggatcaacaacgtctcatctttgccggaaagcaactcgaggacggccgtaccctctccgactacaacatccagaaggagtcaaccctttaccttgtccttcgtcttcgaggtggccatgcaaatcttcgtcaagactctcactggcaaaaccataaccctat

SEQ ID NO: 38007 - DNA, 265 bp, Glycine max
gggcgacccacgcgtccgcgttcttctacagcaatttttaaattttttgaagaaagagaaaaaacaggggattgcacatgtgaaagcgtggctgcgcactcaactgacgttgctgaaactcctacaattgcagcaacagctgcggaggctgcaagatgtacccagacttgatctacaccgagtcaaccaccaccgacaccttggtcatgggaatggtaccaattaacgctcaattcgagagtgctgaaatgggtgttcccgccta

SEQ ID NO: 38008 - DNA, 373 bp, Glycine max
gtgagagtctgagatcgcttttctctctttcgatcttccttttccgcatttctcaacaatcgtttccaatcccacgctaatggcaaatagtgagacttgttgttcaactcagcttattgatggagatggtacattcaatgtttttggggttgaaaatttcatgaaggaggtgaagttggctgaatgtgggctttcatatgccgtagtttctataatgggtcctcaaagtagtggcaagagcacactgttaaatcatttgtttggtaccaacttcagagagatggatgctttttaaggaaagtctcaaacaaccaaaaggaatctggatggctagatgggctggcatagaaccttgtacacttgggatggattt

SEQ ID NO: 38009 - DNA, 386 bp, Glycine max
  unsure (1)..(386): unsure at all n locations
cccggggcgacccacgctccggaggagggtgnnctggnnnngttatttttcnccccacgaaaaacaagagcgcccaacgatagtgatcatgggaggaatttgaaaggtcgaaacttgagcatctgggatcgcgaaattggggattttggttaaaagggtataatcttcggaactgattgatggcaaaactgtacgtgaaggcggtgccaccggcggatctgaacaggaacacggattggttcacgtaccctggcgtttggaccagttacatcctcatccttttcttttcttggatcctcgtactctctgtctttcggtgttctcctggcatcgcttggaccaatcgtaatctcgcacactttgctggaacatatgactttttttac

SEQ ID NO: 38010 - DNA, 459 bp, Glycine max
  unsure (1)..(459): unsure at all n locations
cggaatcggcacgacccacgcgtcctgaagaagagaattgagagagagtttgaangttcttttctacacagctccnaaatacgagggggagtaattaggtgtgcgtgcgatcccatagatctgaataaatgacaaatgtatcattcaaagaatgttcctagtgcaagtttaattggtggtaattcattaagtcatggtcagcacatagattgtggtggcagcacaatggatcctggcagtggaggaaatggtcttagcaacaactctaatctcacctcaaaacaacgtttacggtggacacatgaattgcatgagcgctttgtgatgcctgggctcaacttggtgggccagaacgtgccccacccaaaaggctgctcaaaattattggtgtacaacgcttgaccatttaccattgtaaaaatcatttacagaaataccgacttgcaaaatatttacctg

SEQ ID NO: 38011 - DNA, 228 bp, Glycine max
  unsure (1)..(228): unsure at all n locations
gagagcagaaaacggaacgggcacttttacctggtatggcgccanctctaanacattggctgggccgagggtagaagatgggctgacataatcaagccaggctgtgtcaacactgaccccatctttcccaacaacaagctcaccggaaccgatgtgggttaccctggtggcctttggtttgacccccttggttggggaaccggttctcctcataagatcaaggacttg

SEQ ID NO: 38012 - DNA, 262 bp, Glycine max
cccacgcgtccgaacgattaaaaaagtattagcagttttccctcaccaaagaagaagaagcaaacaatgggcgatcagcttaccgatgaacagatctccgagttcaaggaagccttcagcttgttcgacaaggacggcgatggtttgttctctctctatctctctcacgttttgtgtatttgatttgatttgatttatgcgttcgcggtttttgcagatcggggttcctttttgtgataatggattacgaaaattagatgaa

SEQ ID NO: 38013 - DNA, 421 bp, Glycine max
gaaccaacacaaagatggaatggaagggaataccgttcttgtgcaggttgatggatagatagggatgttggggggaataatagagcgggaaaataaaaagacaacatacataacgctctctcacagcggttgctttataccattgtctatatcataagacgggagttcgtctacactgatcacttgttagagcatgaattcacaatgcccataatttgttcactaaaaaacgatgaacgtgtacgaaccgagccaccaaatcagtatgagggagagaacgcttttgaagtaatggtaatttaagtgcacccatgcctctaattgatgagacagacatgaagtgtgatagtcagccagaggatgcttgtcatgcgatactacgagaggcctagaattatgatcaagaagctaacaaacctac

SEQ ID NO: 38014 - DNA, 439 bp, Glycine max
atttgtattggtttagaggaacatagtccgaggaacagccaacacatgtatggtagggagttccaatcgatgttggacggactcgacgaggaagggtgtgttgaagaaccggggtatcaatctgagaagaagcgtcgtctaagtgtggatcaagtgaaggctttggagaagaactttgaggttgaaaacaagcttgaacctgagaggaaggtgaagcttgcccaagaacttgggttgcaacctagacaggtagccgtatggttccaaaaccgtcgagccagatggaaaaccaaacaattggagagagattatggtgtactcaaagccaattatgatgctcttaagcttaactttgacaccctcgatcaggacaacgaagccttacgaaagcaggtagaataatactccttccaaaatataaacaaatttcgattattta

SEQ ID NO: 38015 - DNA, 449 bp, Glycine max
gttactcaccaggaaactcttgagtcaaaggttaacgagtccaaggccatggttaaatttcaacttaagaaggtgctctgcatgggagtagctgtggggaatgttagtatggaggaaaagcaaatcttccaaaatgttcaactgagtgttaatttccttgtctctttgttgaaaaagaactggcaaaatgtgagtagtagtccactatcaatattttgttaagtcattgcttctggtgccttcttttttgatgtgattttcttaaagttatatgttcttgtttctgttttattattggtgtaattaaaaagctctgctactataagaatagtctttgatatcagatgtggcatggattgaatccatgcttatcacaggttttatcttctgcttatatggttatgtagatgatgacaagattcttttgtacatgtctcttctttctgttt

SEQ ID NO: 38016 - DNA, 462 bp, Glycine max
  unsure (1)..(462): unsure at all n locations
gcctacttcttttgagaaatttgccaatggggtcaagcagcaggcaaatatcaagggagtggacaggctaactgctaaggtgggagtggtggagataggaaagggtgtccgtggaactagtccaaccgggaagagaatttccgtgggaaacccgatcagaaatttggttcagggaattgagcttggagctaaggcgctgcgtaagagctgggaagggaatatggaagtcaagaagaaagatacatccaaattaagggccgccaagtgtgatcctaagccagagactcctaggagaagtacttcaagtgaaaagtttccctctaaagaagagagcaagatgcaaccgcagacaaagtcctccaaagaagagcacaagactcaaacatctataaagagagttattgtcagtggaacaatggangaacaagaataaccaagtaagcaaagagtttctgttggaaa

SEQ ID NO: 38017 - DNA, 379 bp, Glycine max
  unsure (1)..(379): unsure at all n locations
cccacgcgtccggntncgcttttttattattcttagaggccgnngatcgngtgcgggaaatgttctgcgggtgcacgggcacagcacgtgctcacaaagctggtgaattccactgggattccttttctcccaactccgatggggaaaggaattttacctgacacccacgcacttgcggctactgcagcaaggtcactagcgattgggaagtgtgatgtggcgcttgtggtgggagcgagactcaactggcttctacacttcggtgaaccaccgaaatggtctaaggacgtgaaattcatcttggtggatgtgagcgaagaggagattgagctgaggaagcctcacttaaggttaattggtgatgccaaacacgtgattg

SEQ ID NO: 38018 - DNA, 431 bp, Glycine max
  unsure (1)..(431): unsure at all n locations
gaaaacccggcggcgacccacgcgnccgggtacttaccaggaaacncnngtgggtagttttacgagaccaaggccanggggaagggncattttaagggggggctgtgcatgccgagtagctgtggggaatgttagtatggaggaaaagcaaatcttccaaaatgttcaactgagtgttaatttccttgtctctttgttgaaaaagaactggcaaaatgtgagtagtagtccactatcaatattttgttaagtcattgcttctggtgccttcttttttgatgtgattttcttaaaggtatatgttcttggttctgttttattattggggtaattaaaaaactctgctactataagaatagtctttgatatcagatgtggcatggattgaatccatgcttattacaggctttatcttttgcttatatggttat

SEQ ID NO: 38019 - DNA, 387 bp, Glycine max
cccacgcgtccgcggacgcgtgggctgcaccatcgtcctgcatgtcagaggtccagagggtgaggttatcacacacactttctctctctctctctctcacccagatcttgtagcaatggcgagcgctcccactccacgcgaagagttcgtgtacatggcgaagctggcggagcaggccgagcgctacgaggagatggtggagttcatggagaaggtctccgcctccgccgagagcgaggagctgaccgtggaggagcgtaacctcctctccgtcgcctacaagaacgtgatcggcgctcgccgcgcctcctggcgcatcatctcctcaatcgagcagaaagaggagagccgcggcaacgaggaccacgtcgccgtcatccgcgacta

SEQ ID NO: 38020 - DNA, 317 bp, Glycine max
  unsure (1)..(317): unsure at all n locations
cccacgcgttcaaccacgcttacagccacgcgtttgnataatttatcaatccaattattnctggtgcttcttttatggctgcgtgggctggccctaagacttgcttctattggacctggggttggtcaaagcactgcttgtctgaaacattggctaatggttcacccaccacatcaggctcctcgaaaaatacgacaagctacattgcgcaaatggcttttgacataagctatcacaatactttggctgggtgtctcattacacactgacatttcctaatcctttacattactcctaaagctatagaaattcatatc

SEQ ID NO: 38021 - DNA, 447 bp, Glycine max
atggcctcagccgcatcctccaccactttctctctcctcatactccacgcacacctacgggtccccctccccctcgcgcgtgcaactcacctcctccctccgcgcccgcccgctgcgccgactgggcttcgccgcggcggacccgctgctcgcgacgagtgtagcgtcgcgcgtggcagctgcgagaggaggaagaaagggcgcgaggggaatagcgtcgatggcgaagaagagcatgctatacctgatcgcggacgacctgaatgcgaagaaggacttcgtcaggaccgacctcaacgtcccgctcgacgacaaccagaacatcaccgacgacaccagaatccgcgccgccattcccaccatcaaacatctcatccaaaacggcgccaaagtcattctctccagccactagaagcggccgaagggtgtcactcccaaatacagctt

SEQ ID NO: 38022 - DNA, 256 bp, Glycine max
acgcccacgcgttcggtttcgaatagattatgctaagtctttgggaatagtgctgcaatggcttgcagtcaggaggaggtgacccttttgggagctactggaagcgcgtttgtgtgcagggttcatattgccctcaagttgaagggagttcaatacaaatatgtcggagaaaatttgaggatcaagagtgaactgcttctcaaatccaacccagttgacaatgaggttccagtgcttattcacaatgagaagccca

SEQ ID NO: 38023 - DNA, 459 bp, Glycine max
ttccactttccgggttttttattcgatatttcttgttccaatgatcgagcacttttttgggttccttgaccgtctcgcgcgccctgtccccgatgatccccttgctcacactgctcatttgccttccgaaccatctccacctccggcctccatggattccgacgcctcctacagctccttcacctcaccatccaatgattgctactactacgtcctcgactaagacgatccgctgatccatatagcatactgcctcatctgccactattaggatatcatttccaactttcataccccctgctcctttaactacattcttaactatgcttacaaaaagtgtgtccagcattgctgtcatgataaatgagacatatcttgtcatatatttcatcatccatatcaaccttcatatactgccctcccacctcattctaatcccttataaactaccattgatat

SEQ ID NO: 38024 - DNA, 147 bp, Glycine max
gtatgtcggaaaagcccagcaaaaatccgagcgtgaacaagaactgaaaggaccatctgagcacaacagaaaggaagctgctgacgaatatacaagtgagaacttgtatctcacgaactgggatgatacaatcagtaatgaacaact

SEQ ID NO: 38025 - DNA, 277 bp, Glycine max
gttattagtactgaaggcttttgcttgatagaactgagagggctaatcagagacatcctatgaagatacatgcactgcattattctgacatacttgcgccgcgtgatatgctcactccataggaaggatcaagggatcttatacaggaactgaacaatcatctgatacctctactatacaatattatagaatactattggattgatatgaaagaattatatgggattgaccggtacaagacaaatgagatctaatgtgacgcgactgatgagttcta

SEQ ID NO: 38026 - DNA, 439 bp, Glycine max
cccacgcgtccggaagaacgcagaagccacgatgagtggcagagccattatctcctgtttctctcctccttcaacaactccatgctctgcccccattccagtactctcgcgccgaaaccacctcctccatgcaactccaccttcgccacacctcctctcgcggcggagccacctcgttgttgccggcggcggcggcgggaagacgtgggcaaatgtgaagtccgagaagaacgtgtccgagtcccccaagtacgaggatgatgccgtggttcagaaggcacgtgatttggataacgtggaagaggaagccaggtggtggcaagtgttccccaagagatgggtcattgtggttctctgcttctcagcttttcttctatgtaacatggatagggtaaatatgagcattgctatacttcctatgtctgcagagtacaactgg

SEQ ID NO: 38027 - DNA, 366 bp, Glycine max
cacgaatatagtgttgtttggagcgatccgagaaaaactcggctaacatgtgggtataccaggacctacttacaggtgatgagcttctctctgactcctttggttacaaggaaattgagaatggaatgcttgaggaaagcgatgggaagcgtgttgttaaatgagcaactgatgtagacatcggtgcaaacccttctgctgagggtggaagttaagacgagggacttgatgacgcagctttcaaagtcacagacatctatgacacattaatacttcatgatcaaccgctattcaatatgaaacagattagaacctccctgaagaggagtatcaaaaacttgactcccaaactggatgcagaacaac

SEQ ID NO: 38028 - DNA, 308 bp, Glycine max
ccctcactcgcaagcaaatagattgaatccctggcgaggagaaagatggaggggatggaacaggatgtgtcgatgggagcgaacaagttccgacttagacagcccatggtgacggcggcgctgagcacaagacgtctgcagggactaccacgatccgtggcgggctccgctggttgacccaaccgagtttacggaacgggcgttttacacatcagggattgcatagtttgcggccacttttctgtttctctacatcaccgtctgaaccgtgatgggagtcgccggggctaagactatacagagtaccg

SEQ ID NO: 38029 - DNA, 231 bp, Glycine max
ccgggttggaattacgcgttcgaacattcgttcatttacacttatgtccacttatcatccacaatattgaggagaccctccatgggggatggcacgcgaaagaggatcaccaccgccctcaccatggttagctcataaatgatcacaaaagataacaccatggtgtgcacaaatgtgaacacataggagaacttcaccttttcgagcacaaggagggacttgtggattaca

SEQ ID NO: 38030 - DNA, 300 bp, Glycine max
gaaataatgtccgggatcatccacaagattgaggagaccctccatgtgggagggcacaagaaagaggagcacaaaggagaacaccatggtgagcacaaaggtgaacacaaaggagaacaccatggtgagcacaaaggtgaacacaaaggagaacaacaccatgtggagcacaaggagggacttgtggataagatcaaggacaagatccatggtgatggccatgacaagaatgaaaagaaaaaataaaaaccaataaatgctaaaacacaaaaagccatggccatggccaaaggagaatta

SEQ ID NO: 38031 - DNA, 227 bp, Glycine max
tcgaccatgcgtccgacgtatatctagtcgtttggagcgacccgagttacactctgtgtgacatgttggtttaccaggagctccttacaggtgatgagcctctatgcgactccttccgttacaaggaaattgagaatggaatgctgtgggaagttgatgggaagtgggtcgcctaaggagcaggtgatgtcaacattgtggcaaacccttctgctgagggtagacga

SEQ ID NO: 38032 - DNA, 227 bp, Glycine max
aataagcggggcgaccgacgcgtccgttcttctgtcctctccacatgagtttttttttctacttaaagatacttgtatacagggcattggtattcagtgcacgcacaggagctcccatatctcttctattctattacagttagacatcctcttatggttgttgtcactgctgatataaatcttattgtttacaacttgcaaaaccctcaatttgattttaagagtat

SEQ ID NO: 38033 - DNA, 397 bp, Glycine max
  unsure (1)..(397): unsure at all n locations
gcgctataattgaaatagataacccggccagtgtctaaaggttattggcgcagctgtttgacttggctctgagggcaactgtgccggatgagcgagatnttttgccgttaattgatgcttgtgctgttaaaggtggcgtataatttggtgattatcaatgtaataatgcaatgggtattttttctaagatgaagggaaagcatactggttttaggggttccccatcatttgttcatgctatcgttaacaatcttccttcatttgtaatgatttaattcttgctcttataattttcctgtatattttaattttttattgtgtcaataaattttttgcttgatttcttatatataattgcttatttaattgtattcaaatttttgtgcactttttattt

SEQ ID NO: 38034 - DNA, 315 bp, Glycine max
ggtcgaccacgcgtgcgccactcgttcgccacgcgttcggattctttatttttatttattaattgttactgtgttactgtacaggattggctacttatggagagaaagagtggtacttcttttcaccacgggaccggttttacccaaacggttcgaggccgaaccgggcggctggcaccggttacttggttgcaaccggcgcggattagcccattgtgtatcccaaaccggttgggattaaaaaagctttggtgttttacgcaaggaaagcttctatgggacaaatacattttgttcatgcacgtgtatcgtttt

SEQ ID NO: 38035 - DNA, 320 bp, Glycine max
cccacgcgtccgattttaacatatgagtaacatagcgggttcacaggccaccgacgaggatgttctccaccttcacttcaccgtcgctggcgtcaagatttccgcactagcgctccggcggcaccatcgacgtcactggcctgatgcatggcaagactgatgccaacgccatcatacgccttcgcccttcccgtcgaaggcaccaagattcgtgtcattgcccatttttttttcatatttctgaattccattcatgtgcttcaagtcctctcttgattcacacctgttggattttctgtggaacaagtatgggatgaata

SEQ ID NO: 38036 - DNA, 279 bp, Glycine max
ctcatgttgaattcttgagaggagttgctaatccacttggcatcaaggtgagtgataagatggttcccgatgaacttgttaagctgatagatattctgaaccctaaaaacaagcctgggaaaaatacagtcattggtaaaatggagctgagaatttgccaagggaactttcacattttaatcaggccattccgaaaacaagtcaaaatttcacttgggtttatgaccccattcattggaacaccattaaagctccatttggacttaaaacccgctcttt

SEQ ID NO: 38037 - DNA, 416 bp, Glycine max
  unsure (1)..(416): unsure at all n locations
cccacgcgtccgcgtttctggctttgcgggttgagcaatggccggaaaacaggtcggcgagggtttaccggcgaacctcgctggaatgtcaaagaatcagctctacgatatcatgtctcagatgaaggtacttacaatacttcttctttttcactcttcacgaagaacaacacgctaaccatttcgtttgttgtccctcagaatctgatcgaacagaaccagcaacaggccaggcagatcctcatccaaaatcctatgttaaccaaagcgcttttccaggcacaaattatgcttggaatggtgcaagcaccttaagtggtatgcttttttgctttcntttgatgtctttttaacaaccatccatcagtagaaatttggatgacaaaaaatatttgccttctaggttccaaaagttc

SEQ ID NO: 38038 - DNA, 297 bp, Glycine max
  unsure (1)..(297): unsure at all n locations
gcggggccgccctanaaatanaaaaaaaagttttaaatttttgnnnnngnnnnttnnggcggacctggtttcattggataggggttgggcaataaaactctccttaaactacaggtacattggcaattttttttgctcaaaaagtaattcacacacaacatataaaaaatggtaactgattatacatcaatattgtgcgagaaaaaaaataaaaattgtttttagaaagatttcataattacaagatttagaagccggctgttagcttttttaaataaaatggacagggttcaactt

SEQ ID NO: 38039 - DNA, 389 bp, Glycine max
  unsure (1)..(389): unsure at all n locations
ccggaaaanctgggaagacccacgcgtccgnntcaggctatggatactgataacatttcttttaaacttttaaangaacntaaanctagtggaaaaagatataggtgtaccgggaaggatataaaaatacgtgatcttatggaagcggctgatgtggacaaaagtggaaccatagactatggggagtttattgctgcaacagttcatttcaacaaactagagcgtgaagaacatcttattgcagcattccaatattttgacaaggatggtagtgggtacattacagttgatgaactttaacaagcttgtgcataacaaaacatgattgacgctttttttgaaaacatctttagagaaggtgatcaagataatgattgaaggattgatta

SEQ ID NO: 38040 - DNA, 397 bp, Glycine max
  unsure (1)..(397): unsure at all n locations
acgatatggacaccaaacatccaaggggggtttttggttatggaaaggngcacaaagcaaaggcgcacacacgtgaaattctagccgtgaagaaacaccaaaaaatccaaaaaggggaagcgcccaatattaaagctttcacaagtgaaaatcaagcgtggataaacattcgacatcgtaacattgtgaaagcatatgggtttagagccaactcacaatcctcatttgaggagtatgagttatcggaaaaggcaagcattgataggagtgtaaaagatgatgaacaagcaatatcattggattgggatccgaacactaaagccattaagggtggagcaaatgctgtatattatatgcatcaagactgaccacctacaaaagtgcattgagagatatc

SEQ ID NO: 38041 - DNA, 359 bp, Glycine max
  unsure (1)..(359): unsure at all n locations
cccactcgtccgcccacgtttccgagccctttgtatattctttgaggacaacaaggcggggctcaagttcgacgtcggagggggcggaggcaacaacaacagagggggngggggngaccgggatgcggagaaggaagaaggtcccttgtcggagtggttgaatttcacttttgatgacgcaaaaacggtgcttgcggctctcgcaatttcgcttgcgtttcgatcattcgtggcggagccgaggttcattccttcgctgtcaatgtatcctacattggatgttggagatcgaattattgttgagaaggtttcattactattttagaaaaccatgttcaagttacatattgatatttaaa

SEQ ID NO: 38042 - DNA, 454 bp, Glycine max
  unsure (1)..(454): unsure at all n locations
cccacgcgtcctgtgaagcagcagattgattttcggtttttataatgcagatctncganaaaaccctggctgatttgaccatggccctggaatactaaagcatcaacaccattgacaatgtcaaggctatgattcaagacaaggaatgcattcctccggatcagcaatgtatgatttttgccggaaagcaacttgtaaatggaaggaccttggcctattacaacatctataatgaattaaccctttattttgtcctcaagctttgttgttgtcattaaataacctttctctattgttttggctttgcaaattcaatcattacaagatgatttgccgaatatgcgtattctcctcttcacccaattgcttttaattgttttactaagaatttctgtaatattaattatttaaggtcttataattaatattatgtaaatttgtgtgttatattttt

SEQ ID NO: 38043 - DNA, 420 bp, Glycine max
cccacgcgtccgctcctccttccacctagctttggtgttatttaaaccaagtgacccctcctttctcttgttaacaggtaggggagttggtgagtaatggcaggaggacaactaggagtgcttaatgcactcgatgtggcaaaaacacaatggtaccacttcactgctattgtgatagctggaatgggattcttcactgatgcctatgatcttttctgcatttcccttgtgaccaagttgttggggaggttatattacacagacataacgaacccgaagcctggtgttcttcctcctaatgtgcaagctgctgtgactggtgttgctctatgtggcactttagccggccaacttttctttggatggcttggtgacaagttgggaaggaaaagggtttatggcttaacttctatgcttatg

SEQ ID NO: 38044 - DNA, 343 bp, Glycine max
  unsure (1)..(343): unsure at all n locations
aacgcacatcgctatttttcatcatgtcttgttaaccagcaaaccgggatagggtatttaaactcgtatggtcgcgaggtncacaggaaagacaacctttgtgaaaaggcattaccgggaattcgagaagaaatatgagccaaccatcggtgtggaggttcacccattggattttttcacaaactgtggaaagattcgattttactgctgggatactgctggacaggagaaatttggtggcctcagagatggatactatatcaggacaatgtgcttttcatgtttgatgttactgcccggcaacatacaaaaatgttccacctggcaccggatctttgcatgg

SEQ ID NO: 38045 - DNA, 245 bp, Glycine max
  unsure (1)..(245): unsure at all n locations
cccacacgtccgcacacattattttgngtccttcctcactctaaaaccgccattggcattgggatagcgaagaaggggaggtccgtaaccacgcgccttgacnaagtggatcgaaccatgtactcgactttctgcagcaccgtcaacttcttctctcatctttacacccactccatgaatcaacaaaaactcttatttcaggccggtgaacgacactcttttgaaaaattgtatcattggattct

SEQ ID NO: 38046 - DNA, 272 bp, Glycine max
cgacgcacgcgtgcgaaccggcccaatttagcataagcccagcatgttcaccttaacagcagcagccacctcctccgtcatggggacacgcctactggaggcccactccaaaacggaacggatgcaagcccggttcgggtttggcaagaagaaagccgccgccccgaagaaagtttccagggggtcgggctctagcttctataggcccctgtggtattcgggcgccaaggtgcccgaataccagtatgtgtgccttgtctgtgactacggat

SEQ ID NO: 38047 - DNA, 275 bp, Glycine max
acgcgtcacgctacgcgtacgtacatgcgttcgctgctacaacaaacaaacaaacaccaccaacaacaacgactggggtttattttcaccctcgaatccacactttctttacaccgcgtttggatctccgtaaacaataccatgcatttaccgagggaatatcgaatacgtatatccaaccatcggtgtggaggttcacccattggattttttcacaaactggggaaagattcgattttactgctgggatactgctggacaggagaaatttggtt

SEQ ID NO: 38048 - DNA, 392 bp, Glycine max
  unsure (1)..(392): unsure at all n locations
atctgaaacaagcatggagtntggaaatggtgaattcagctcataggagctaaagaaaatagaggagggcgataaacttgctgaaattgccatggccgatcctaagcgtgctaaaaggattttggctaatcgtctatcatctgctcgctcaaaagagaggaagatgcggttcatttctgaattagagctcaaagtacaaacacttcatacagagacaaccacatttgtctactcagtttaccaaattacaggtgtgtacggtctgagttgagccataattctcttttctttcaggttttaataatattttattgtgtggaataatgtttgctttctagcattcatttattcttttttttcctttcttttgatgtgcttgtctacagatggat

SEQ ID NO: 38049 - DNA, 363 bp, Glycine max
ttccggtaactttttaattcctaaattctctaaaattcgaaattctaatttcgttagggaaaagaaattggttgtttataagtgagtatttcttgaaaaagccagggtccttctatcggaatcgatttgggaacgacgtactctttcgtctgcgtgtggcaacacgatcgtttttaaatcatagccaacgatcaaggtaacaaaactaccccatcctactttgctttcaccgacacaaaacggttgatctgcgatgctgctaaaaaccaagttgctattaacccaaccaacaccgtttttgatgctaaacgttttatttgaaagcgttttttctattcatcaatacaaggttacattaaattt

SEQ ID NO: 38050 - DNA, 281 bp, Glycine max
  unsure (1)..(281): unsure at all n locations
tccttggtaaaagagtttaaaaaagcaacttttcaactgtacccctaanggatgaggtccgtgaaaatactaggctatttatcttcnanacatactctataatacaccaactcatttacatgggagttcttgcttagaagttaaattttaattatgaggaggcttagagatggattgttaatttcattctgagctcaaatctttgatccaaaattgatttctaatacttgatctattattattgaacctatttttcttaaatatttttatcatcttttttt

SEQ ID NO: 38051 - DNA, 248 bp, Glycine max
cactcatggaccccaaaaacgtgaaatcggacctggttctcattctcgattacggtgcccagtacacccaccttatcactcgccgcatacgcaacctctcggggatctacctaagcatctacggcaccatctgtctttcaaccatcaccgacctgaaccccttcgtcagcattctctccgggggccctcactccgttcacaccccagactccccccccccccctatgaatcaattttactaatattat

SEQ ID NO: 38052 - DNA, 361 bp, Glycine max
ttctttcttaatgcctcctggccaggggttaaaatggcccaagaaacttttctattcacatctgaatcaatgaacgaggggcccccttacaagctttgtgaccagatctcctatgctttgcctcaatcatgctttgagcaagacccttacagcaagggtggcttgttaaccttcaccaaaaccaacatggtgatgggtttcggagagatcacaaccaaagccaacgttgactattagaagattgtgcgtgacacatgcaggaacattggttttgtctctgatgatgttggtcttgatgctgacaactgcaaggtcctcgtcaacattgagcaacagagtcctgttattgctcaaggtgtgc

SEQ ID NO: 38053 - DNA, 374 bp, Glycine max
cggacgcgtgggtgaccaccgactttcacgggcaaagttcttctttattgcactagtgtggagtttttcgtggtatggtgtccctggatacttgttcacaacgctcacaaacatttcatgggtgtgttggatattctccaagtcagttacagctcagcagatagggtcaggcatgaggggccttggagtttgtgccctcacacttgattgggctgccgtggcatcattcttgttcagccctctaatctcacccttctttgccattgtcaatgtttttgtgggctatgcattaattgtctacgtggtcattcctgtatcatacttggtgcctaatgtgtacaatgcccataggtttcccattttctccttacact

SEQ ID NO: 38054 - DNA, 426 bp, Glycine max
cccacgcgtccgcccacgcgtccgtcttcattgtgatataaagccagataatatgttggtaaatgagtctaaaaatgttttgaagctttgtgactttggcaatgccatgtttgctggtaaaaatgaagttacaccatatcttgtgagtcgtttttatcgtgccccggaaataatacttggcttgccatatgatcatccattggatatttggtctgtaggttgttgtttgtatgagttgtatatagggaaggttcttttcccaggtcttacaaacaatgacatgctacggcttcacatggaactgaagggtccttttccaaagaagatgctgcgtaagggagcatttactgaacagcattttgatcaggatctgaattttcttgctactgaaggggatcctggtacaaaaaagaccataaagcggct

SEQ ID NO: 38055 - DNA, 351 bp, Glycine max
aacataggtaggggcaatttgaaaattgacatatcagatgagcttgcccggattgctgatatggtaaccaggtacgattgctcgaaacaggaagttgaaagagtgattgttagctatgagggtgatcttgatagggctgcagagaccttgagagagttgaaacttgatccaccatctgctccaccaaaaccagaaggaaaccggtgatcctcctattattaacaatgttaagcagtcaagagttgcaagtcagaagctaaggccacaaacaaaacccattcctttaccaaatcaacccaaaaaagatgacaaggattttaactatacaaaggctgcattgactattggagt

SEQ ID NO: 38056 - DNA, 302 bp, Glycine max
gcgatctttatataataatataaataagaataaaaaaataaaaaaaaaaaaagaatctatataaagataaagataatatatataaggtgcaaatagtaaatctaggtacccattttattataaactttccttccatttttgttcctctagtaagcctagtatttccggcaatttcaatggcttctttatttccttatgttcaaaaaaacaagattttttagatacagaaaacaaagtaaaattcttgggttttttattccccaattataatactaaattcaaaaaaaggatcaattaactta

SEQ ID NO: 38057 - DNA, 279 bp, Glycine max
gcgtccacgcgtccgtccacgcgttcgaaaaaaacaagattttttagatacagaaaacaaagttgggttcgggggttttttattccccaattattatactcattactctcagacgatgtactgatatattctatggcgggggttcgaagaacaagcaatttattttgggccgttttcacttttggtaggttctttgtgggttatgttctgtatcatattttcagatatttttggtatggattatgttccttatattttgtgaatatattttgttttttc

SEQ ID NO: 38058 - DNA, 412 bp, Glycine max
  unsure (1)..(412): unsure at all n locations
tcgcccactcgttttcccacgctntctgtttaaatgcaacnacancagnccanggcagccccctgtcctacgtgattctgccttgcgatgganagaaccgggcaatgggttttctccccagaaatcccaaccgatgttattgttgcagttggagaatccactttttttttctatatgtntattctggcggctaagagtaactacattagattagtgattatggtattataggagagtgacctatctagaattgtagttttccaacattccttgagggcattgagtctttttttattcctttttatatttctattgtttctttttgatatatctctttttttatctcttttgtttttttctttttttttttatttatcatttttttttctccttttttttttcttgttttttt

SEQ ID NO: 38059 - DNA, 371 bp, Glycine max
ctcgtgtcaaaagaagcatttcgtttatcgttttctaaaaaaaatggaattgatgtgtcattgttcgttctttccgcttccggcttataatactaacacgacctgttcgctttctctaaagtacgctctcgttgttctcaaccaaagcctcccgagatttgctcttcttctttgggaccacgctcaagtgcgagtttgtgctgattgaggtgcctttttgttgttatgatgaattgccttctttttctctctatctactacctttccatgttctgactaggtacttgccttatttatttttatgtcgaccatgcttttttcttccatctattttattttgtctttatacttcttattctgcttttatctta

SEQ ID NO: 38060 - DNA, 448 bp, Glycine max
  unsure (1)..(448): unsure at all n locations
tgataatgatgggttcaaacccaaaaccccttgngcacttttctcttctnctcccggncctggtttctgcctcaaccgaatcgctgagagttgaaatccaatccgggcacaccaaatgcatctccgaggatatcaagagcaattccatgaccgttggcaagtaccaaatcgttagccccaacgagggtcaacctctgccagatgcccacagattcaccgtcagggtgacttcgtcttatgggaacaactatcactacggggatcgcgttcagacggggcagtttgcgtttgctgcagtggaggctggagattacatgacttgcttctgggctgtggatcacaaccctgtggaaacgttgactgtggtttttgattggtatacttgtgtttgtgtctatgtaattgtactaattttgttataatggctatttttttctcttctattctt

SEQ ID NO: 38061 - DNA, 405 bp, Glycine max
  unsure (1)..(405): unsure at all n locations
tcgcggacgcgtttttgaccaccgacttttanggtcatagnncnncnnnanngcacgagngngtggnnatttttggtatgttgtcgctggatacttgnncacaacnctcacaaacatttcatgggtgtgttggatattctccaagtcagttacagctcaacatatttttttaggcatgaggggccttggagttggtgctctcacatttgatttgtctgtctttgcattatttttgttcaatcttttaatcttacccttttttgctattgcaaattttttttgtggttatgcatttattttctacttggtaatttctttcattattattttttttttaattgataaatatttccatatagttttattttttctttttataattttttatctccttatttctattat

SEQ ID NO: 38062 - DNA, 313 bp, Glycine max
  unsure (1)..(313): unsure at all n locations
tcggcacaatttctctctttcttttggtgnccaatatggctcctagttctactcacagtactgggttctatgtgcttaggctagttggaatagtgattagcactatggttgctacctgtgctggtagcttctaccaagactttgatctaacatggggtggtgacctgtgcttagatattcaatggtggccagcttctatctctttcccttgacaaattctctggctcttgctttctaattcaataatgtatacctattttggaggatttgatctgcctgttttgttcttttcttgttatcttttcttatttct

SEQ ID NO: 38063 - DNA, 468 bp, Glycine max
tcgccaagatccattacaaggaaggtatcttctctgaccagcaacgtctcattttcgccggaaagcaacttgtggacgggcgtacgctttcttactacaacattcagaaggagagtactcttcacctcgtcctccgtctccgtggtggcatgcagatcttcgttaagacactcaccggcaagaccataaccctagaggttgaaagctccgacaccatcgataacgtcaaggctaagattcaggacatggagggtattctcccttaccagcaacgtctcatctttgccgtaaagcatcttgaggactgactcactcttgcttacttcattattcagaacgatttaactttttcatcttttttttcttttttttttgtaatctattcattatcttttattttatactttttatctttataatctatttttctattttactttttattttttttatatactttttttattt

SEQ ID NO: 38064 - DNA, 420 bp, Glycine max
gttgaatacaaattttgggaaaaaaattgggccacaagaatgatttgcttcttaaatacacccctgttcacaaaaaaggtccagtgtttgttcacaatgagcaccccctatcacagtctcttgtgattgttgaatacattgatgagacatggaagaacaaccccatcttaccttctgatccttaccaaaaaaccttggctcgtttctggtccaaattcattgatgataagattgggggggctgcatcgaaatctgttttcacggctgatgaaaaaaaacgtgagaagaatgttgaagaaacatatgaagctcttcagtttcttgagaatgagctggaggacaagaagttttttggaagaaaagaatttgggttggtagatattgctgctgtcttcatagcattttggatcccaatttttc

SEQ ID NO: 38065 - DNA, 311 bp, Glycine max
gtctattcgttcttttgctgaggcctctatggcaactgctttagagaaaaagtggccactgtatcttagcaccaaaaatacaattctgaagaaatatgatggaaggtatacaattcattattagcttattcatttaatatttttcaaaaacttttactgcattgatcgctgtttaattatattcatttattggttgtagattcaaggacatatttcaagaagtttatgaggcaagctggaaatcaaagtttgaggctgctggtatatggtatgagcatcgactcattgatgatatggtggcgtatgcactt

SEQ ID NO: 38066 - DNA, 265 bp, Glycine max
aaatcccgggggggaccaacgcgtccgcccacgcgtccgcccacgcgtccgcccacgcgtccgattgttctcaaaacagctgaccaaacgccattatctgctttgaatgcatcaaaattgcttcatgaggctggacttcctcctggcgttctgaatgtaatatctggctttggtcctaccgctggtgctgccattgctagtcacatggacatagataagcttgctttcactggttcaaccgaaactggaaaagttgtccttgaat

SEQ ID NO: 38067 - DNA, 459 bp, Glycine max
gtaggttttgaggaccctcatgtattacttactgtcggacgatggactctcatttgtggagggttttccttaaggaacttaccatacaatcatagaggattcatctgaccctattggtcctgctcaagagctgtctgaaaaactctttattcgtccaattcaaatgctttcccacaagaagattgtttgtaactaaacagaaagtatatagtcttatatgcacatcattgaggacattgtgtctaattgtctctaaatattcaaatgttcatttcaactattcatgaaccacagtttctacatattactaatggaataaacgctttattacatttcttaactgatgatactctttttgttttcacaccttctagagaatactttaaacgacgaatttattgaacaatcaaaactttcgaaattttacaattcttaaaaacatacaccaatttttttttt

SEQ ID NO: 38068 - DNA, 451 bp, Glycine max
  unsure (1)..(451): unsure at all n locations
cgagtttcaacttgcgagactggttaaatgagtttaggaagaaagagctgaacctaaagcgtattacttatctaagtggatcttacactcacccttttgatgtgccccatggttatatatggagccctcacttagtccctaaaccaaaagactggggacctaagattgatgtggttggattttgtttccttgaccttgcttcaaattatgtaccaccaaaatcgctagtagattggcttgaagagggagaaaaacctatntatgttggatttggtagccttcctttacaacaaccagaggaaatgacgcanattataattcacgctctggaagaaacagggcagagaggtgtcatcaacaaaagctggggtggtcttgggtctttggcaaaacaaaaaaatctgtgtatttattggacaactgtccgcatgattggctgtttccccgatgc

SEQ ID NO: 38069 - DNA, 428 bp, Glycine max
aagggcacttttttccccttgtgattttggtgtccaccaggcactgttacctcacacatcaagaggcaatgcaattctcctcctacacttattgttattggtgctggaatatcaggaattgctgctgcgcgttgtctccatgatgcatcttttaaggtgattgtattggagtcaagggataggataggtggcaggatttatactgattactcatttggctgtccagtagatatgggagcctcatggctacatggtgcttgcaatgagaatcccttggcaccattgatacgcgcattaagacttacactctatcatacaagtggtgataactctgtcatatttgatcatgacttggaaagctgtatgctatttaacattgatggtcatcaagtccctcaacacattatgatggaagtggagacacttac

SEQ ID NO: 38070 - DNA, 445 bp, Glycine max
tctttttctcagaagcaaaggttttgaatttcagttatggccttttgctgtctttttgtttgtattgttttgaaaaaaattggatattttttcagggtattggagtggttaaacaacctactatggaaggaggttcaaagcctcctcctcctcctatgttggagagaagggcaaggcctcaaaaggatcaagctttgaactgtccaaggtgcaattcaaccaacaccaaattctgctactacaacaactatagcctatctcagccaaggtacttttgcaagacatgtataaggtattggactgagggtggttctctcagaaacgttcctgtcggtggtggctctagaaagaacaaaagatcaacctcatcagcgccaccaccatcatcagcatcagcacaagcaaagaagcttcctgatctcacaacacctaatttccctcaatc

SEQ ID NO: 38071 - DNA, 455 bp, Glycine max
catagtctttcggtccttccttccttcctccgctctagtgtatgccactctggttaattatcatacccccttctaggcatagttcttctccctctgttctctattctacactgtgaaaccaagatgaaggtagcatttgtagctgttctacttatttgccttgtcctaagctcctccttgttcgaggtgtcaatggccggttctgctttctgctcctccaagtgcgcgaagaggtgttctagggctgggatgaaggacaggtgcacgaggttctgcgggatttgctgcagcaagtgtaggtgtgtgccatctgggacttatgggaacaagcacgagtgcccttgctacagagacatgaagaactccaagggcaagcccaaatgcccttgattgttaatttcaccatgcatcaacttcaatctcaaacctttgaatccttcactcttgctagctga

SEQ ID NO: 38072 - DNA, 433 bp, Glycine max
tgggagtgggaagtgtttaaaaatttattctgggcatgtgaatagagtatactgcataactgccacattttctgtgactaatgggaaatatattgttggcggttctgaagatcactgtgtttatatatgggatcttcagcagaaattggttcagaaacttgaaggccatacagacactgtaatatctgttacttgtcacccaacagagaacaaaattgcttctgctggtctcgctggtgatagaactgtgagggtttgggtacaggattcctgaataatatcgaaactgtatggggatgttgtctttcttctagatttcaactacatgcctatgcatgtctgatttcaatattagacactattaaacatacaagttgatctcatgttggcactagttccgtttttggtattatttgtaaatatagtttttcat

SEQ ID NO: 38073 - DNA, 441 bp, Glycine max
tgacattttgcgtgaaatttgaatacatatcagattcaatttttatgcacagataaaatttggacagaccttcaaagcaagcttcttcatctggttcattgctctaaaccatttcatcctaattaaaacagcactgtctggatgcttgtctgatgcttcaccaccttccttcaaccaagggtgttcgaaaaatatggaatggggtgatgacagcatcaatcagtagttaaactatcagaatgcaaatgggtgaaaatagttaccaagggcatcagcagttgtaatgcattccttagggtcacaagtcagcatttttctaaccaaatcttttgcagattctgaaatagagggccatggctcgttgtccatatctaacattccttccaaaatagcatcaaacatgcctttttcggtttctgaagttgaccaattcattgatat

SEQ ID NO: 38074 - DNA, 439 bp, Glycine max
ggccgattgttctatgttgaaaagactgaccatcaatgatgctatacttggcaggggtattgaggagatatcagtcaatcacgacaggctgtgtcatctccaattgacaaagtgccgtgtgatgcgtatagcagtcaggtgcccacaacttgaaactatgtcattgaagcgcagtaacatggcacagactgcgctcaattgcccccttttgcaagagcttgatataggctcttgccacaaacttcctgattctgctattcgttcagctgttacatcatgctcgcaattagtttctttggacatgtctaattgttcgagtgttagtgatgaaacattacgagaaatatccatgaattgtgctaaccttagttttcttgatgcatcgtactgccccaacctattcttggagactgttagactgccaatgttaacagttctg

SEQ ID NO: 38075 - DNA, 442 bp, Glycine max
gtttctagttcaaaattcttattacaagcattcttgccctggtagtatgcgccttgttttatgaatttaggagaacactttgtggcaatacaaataaaatctgtaatgcacctcaagcaccacgtgcatggcctatcattggccatttgcaccttttgaatggtcatcaactcacacacaaaacactcggcatgatggctgagaaacatggtccaatcttcacaataaaacttgggtcatacaccgatctagtattgactaaatgggagatggccactgagtgtttcactgtacatgacaaagcattctccaccataccatgtgttgcagactcaaaactaatgggctacaactataccatgtttggcttcactccatatgagtcttactggcgtgaggtaaggaaattaactaccatataacttgttctaacaatcgtctt

SEQ ID NO: 38076 - DNA, 328 bp, Glycine max
cggacgcgtgggtccgtccaaggctaaatactggcgagagaccgatagcgatacagtgtttgagagggataggagaagggaaaaggaaagagatagaagtagggacagaacaataggtggcaagagagatagagacccggagaatgaaagggatgataagaatcgggaaaggcgagatgatagatatgggcacaaagacaggagacaagaaaaggaaagagataggagctgggatacagtgtttgagagggataggagaagggaaaaggaaagagattgagtgggaacacaaaaggggaaaggaacgtgaaaggagccgtgagaggta

SEQ ID NO: 38077 - DNA, 274 bp, Glycine max
atataattctgatactggagacttttagagaccgacatgggatgcaaagacgggggtgcgtggcaagtgttgagcaaactgggcacatattatgacccgacaagatatatgctcttctaggaatataagctgtcatgatcccagatgccgattggtttcagcctatgatccacctaagccttgcgctggatgagaataagaactgtccatactttaattggaacggtgactgatacaacacaactggggatttagcattgaaaactctgactga

SEQ ID NO: 38078 - DNA, 396 bp, Glycine max
cgatcttattacgtgaccttgcttttcccaatggtgttgccttaagcaaagacggctcatttgttctggtagcagaaaccgctacttgcaggatcttgcagctttggcttggtggacctaaggctggccaagtggatacatttgcggttctgcctggtttcccagacaatattagaagaaattcagaagggcatttctgggtggctctgcatgcaaagagaagccctttcgcgaagtgggtttcttccaatccttgggtgggaaaggcattgcttaagattggatttaatttcaagcagctgcacacatcatttgcagggtggaagcctcatgctgctgctgtaaagctgagtgataaaggagagatattagaagtcttggaagattgtgatggga

SEQ ID NO: 38079 - DNA, 412 bp, Glycine max
attcggacggaacctccgccggttcttccgacgaggacaccggcgggcagacttgtcacgagtgccggaggaatgaccgcgaccgagttacttggtgtcaacggtgtgataggaggggatattgtgatagctgtttatcaacatggtactcggacatttcattggatgaaattcagaggatatgtcctgcttgccggggtatatgtaattgcaagacttgtttgcgaagtgataattcaattaaggttcggatacgcgagatacctgttctagataagttacagtatctccatgtgctgctgtcgactgtgctacctgtggtaaagcagatccactgtgaacagagttttgaagttgaacttgaaaagaagttgcgtggtgctgaaatagatcttccaagataaaattgaac

SEQ ID NO: 38080 - DNA, 402 bp, Glycine max
ggcagtcatcgttctgcttaagttcatagagagtgtgtgtatgatgcagcagcagcagaacgtggcattgatttggaatgggtacgggtagtgttgtcagctgatcctggggctagattggaagatattgaggatcaagcaccacctctgaggaaggaacatcgccgtgttccaagtaccgtggcaatagaggaagtaaaggctgcggcagctaaaggggaagcacctcttgaactccctttgaaaggcgctggtcaagattcttccgatgcacaaccaagggttaatggacttaatcccaaagctagcgatgccttgtctggtgaactttgggaggcaaagaaggataggatatgcaaggcttccatatatggaaagttacatggttgggacttgcgatct

SEQ ID NO: 38081 - DNA, 404 bp, Glycine max
tccaatttaaattttaaaaatgacttttattaacttaagaattcaattatcgaaggtgaattatttaacaattcaattggattgttcaaattgtttcaaaaaaatggagtacttactcccatttcttatttattattgaattaaccgatcaactagctttgttatcgaacatttcttttctatttcaaaaattttccggaaaaaatttgaaatctattttatttgcgaatcaatcctacttcttctggtcccgaaatttttgctcttgataaaaaaaatctggtacttttcttccaaataattgggccggtactttattatactttttccccaagttatattcctaatatttacaatgctcttatttttaatggtttaaatacttgttgttaacaaaataattt

SEQ ID NO: 38082 - DNA, 416 bp, Glycine max
cttgcattcagttagactttgatagtttgattagctctaataaggttaaggaccagagagagaaagagaaataagaagaaaaacacaagatgggttattggaagtctaaggttcttcccaagatcaagaaggttttcgagaagaatagcaccaagaaagctgctgctgctgaggccaccaagtcctttgatgagtcaaaggaggaatacaacaaagcctttgaagaaaagaagactgaacttcaaaccaaagttgttgaaatatatgaggcttcatcaactgaaatcaagagtttggttaaagaacccaaggaagctggtttgaagaagaactccacagaagtccagaaattcctagaagagctggttaaaattggtaaagaatatttgtagcccttttataagtttttatttatc

SEQ ID NO: 38083 - DNA, 261 bp, Glycine max
cccacgcgtacgtgtagacatctattgcgactgctgttgcaaactcatcatcaccatcatacttgcgtgccgttggtactgatcatattcatacttgctctggagatggtgcataacttgcaagagaacatgtcataccctctagatgatctctcacgttctattgccatacttgctgaattagaatcaggtggctcacaaatgaatcatgctcactcaggaagggaacgcaaaattcaaaggaccctactggacttgctc

SEQ ID NO: 38084 - DNA, 269 bp, Glycine max
  unsure (1)..(269): unsure at all n locations
tcgcccacgcgtncgccactcgtacactcaattcaagatgtaccccctcaaaaaacctctggggacatggtgaaaggacttgcatctcataaaccttcctccagaaaatgcatctatcacgcattgagatgcacagtacctgctcgtctcgatcggttatcaccattgcagatactattcgaagcctgcccatgtcttaaaataggatacatccatgcaaatgacgctatacctgacgttgatcgagatgatatgaaagttcacataat

SEQ ID NO: 38085 - DNA, 248 bp, Glycine max
gaacacctgttgaagaaaaaaacgccctcgccctcggaacccatgaaataccctaaggagggggcattctatgaagatacgatccctaatttgcagaaatcctctcaaaagacgctttgaaattcaacgctgaactgcaaccagagttcaagagcgacatctaccatgcattacacagcacaagagatgcgaagactaatgcccatgcagggactcttccggtgtttgatccttccacccatcacatt

SEQ ID NO: 38086 - DNA, 276 bp, Glycine max
aaatcaacaagttgagatgcagagttaattatcatgcactgaaatttcttcctgaggtagagcagatggctaattcacttgcatcaagaatgagaaaccgtactggcagttcaaatccttacatggctctgcatcttacatttgagaaaggaatggtgggactatcattctgcgattttgtggggacaagagaggagaaagccaatatggctgagtatataaaaaaggagtggcctctacggtacaagaatggttcccatctgtggcaattagctc

SEQ ID NO: 38087 - DNA, 478 bp, Glycine max
  unsure (1)..(478): unsure at all n locations
gcctcctgcagatgctctgtttgaacacccaaggctattcagagcttgtgttcccccaggaatgcatcggtttaggggcaatatatgggattatgatacaagaccccatgttatgaaaacacttggatatccattggaaatggcagacagaatcccagaaattactgaagccaggaacatagagcttggacttggattgcagctttgtttcatgcatccatcgaagtacaaatttgagcatcctcgattttgctatgagagattagaatacgttggccaaaagatacaggatttggtgatggctgaaagattattgatgaagcatttagatgctccggggttatggctacaagagaggcaccgtcatcttcttatgaacaagtattgtggaagatatttgagggccaaacatctncaccgggttattatatttgatgataaggttcaagacacttatgagcataacccgagaaagaga

SEQ ID NO: 38088 - DNA, 457 bp, Glycine max
gttttccaaaaggagaactgggctgcgcaagaaagccaacgaaatctgtgtgctctgtgatgctcaagtagcactgattgtgttcaatgctaaagggaagctttttgagtattcttctgaatccagcttgcttcaaagtcaaactgaaatagtactcgggaaggtttttaaattgtgcggccgtgattacaatttcgttgcaatctttggtattgtggaaaattaagaaaaatgcagctgatgttgtaacaattgcgattatgacgcggttgtgatgagttgaaaaacttgatgctgccactcatggtcacagacggtgtttccaaaccttggtgcagtaaaaagaaatgaaatagtagtaatatacatttccatacaatttcctagctaatttgttattgtgttttcattacctttttttatttattttttcctattttgggtttaatgcattcta

SEQ ID NO: 38089 - DNA, 359 bp, Glycine max
cccacgcgtccgctctagcatcttccttttatgttgggacaaccagggttcgtatactgccgcatgcatatgatctttatagagcgcacagttctgcatggtaccttgatttatcatatatatatgcaaatcatagaatggatttttattccacagcctgggacatcataatccctagtggtggtattaagtttgctctccttgtatactttcagcagagattaggcagtcggtgcattcttccaaagaggttcagagaaagtactgcttatgagaaagtaccggttattggcaatgacgatttatgatgcattgactgcactttgtaaaatgatttttatccccggacattttttatt

SEQ ID NO: 38090 - DNA, 324 bp, Glycine max
gctgagagagcgcgctgcggcagcaagtcctatcagtgtaagacagatgctcgtaatgaagacgatcttgaacaatgagacaatgaatattcccgacagcatgagcataacggatcacgctacagttatcgaggtagcgggaactcgtgtaaaactcgtgctagacttacaccgtctgaacctggacttgcaacttattaccgacgatggccgccaaaggaagctcaagagtgacacttggcaaggatctcgtaaaagctccatcgtcattcgaaccgcactcaggcacgtttagaatctgaacaccctaataaccaatggata

SEQ ID NO: 38091 - DNA, 395 bp, Glycine max
gcagcatgtatgtagatgtctaatgggcttgtttctttcgctgaggaatcggattgatcatgattcattgatgtattgctcggtttgttatgaaaatttatcttaaggggggtctattattctcctaactcaaaaaaaaaaaacaaaaaataacaatgacaaaaaaaataaaaacactaaaactataccccaagaagatcagaaaaaacaatccactaagaaaccgacaaagactgaaagggcctgcgcgtcaccttcaagctcaccgatcataatcgtcaagccaatgtcactgtaatcccctacgtcgtcgacctcgttatcaaggcctttaaagagcccatacgcgaccgcaagatgaccactatcatctatctcaactgcaacatctcgct

SEQ ID NO: 38092 - DNA, 261 bp, Glycine max
agaagcgggaggactgcttacgttgcgcggacacgaagcattgacaccgggaccgtccaggagaacattatggaaccctgaccagtgaacagacataggcacatttaagttgtcagagagtgccacatgaagagcgtcttggacatgatggcacatgacgaccatactgagattgtagagcacggcatgaacctacccgagggtcagaagcagaacatacacatggtctacgctgtcgatgacgactataatctatatgtt

SEQ ID NO: 38093 - DNA, 277 bp, Glycine max
acgcatatgctgaatatgtgtatagaacaagggattacttttcgtggctattgaccataatagggctatgtcacatcaaggcccttatgatatcagactcgcataagttataaggcctagagtggcgccaggttcttgaggattataggctatcacatccagatattacctgacttgatccttcagatgccatacaacatttactcagccggcagaacatgcttcacgctagacctgatatgaacctatctgagtcccatggcatcattggtgcacc

SEQ ID NO: 38094 - DNA, 336 bp, Glycine max
aaaagaatggcgtccatgtttggcacatcttcgatggccttcctctcttcacgatgccactgtgcccaatcccttgccaccaattctccctctctaaccacagtgcaggtatatgggcgcatgttttgcataggaaatggatttcacggcgtcaaggctacaagtgttgctgccactcaacgtaactctgctcaacaggctcaaaagatcgcttctaaccagagcctatggctcctgtacccattatctactataacgggacaggatgagatgtagctctgccatgctctaaatgacaatgatcccaagattggctgtgtaatgatcatggtggac

SEQ ID NO: 38095 - DNA, 277 bp, Glycine max
gtgagacaacatgactgagaggtccacataccttgcctggctcaaggttacaactctgattggtgcacttgaccagattagtgagcccaagaggccctgtgacatgcaacatatgctgcaactatatgaagtgtatcattaaaggacgcttcggatctgtaacagggtgatgtgttcacatacgggataggaagcttggcatggaattcacagacgcacgaactagtctgactactgaagattgggaatgccttttacaacatgatcgtctcacaga

SEQ ID NO: 38096 - DNA, 349 bp, Glycine max
cattattgaaccaccggtgggaacgagatggattacatagctggatctgactatccacagaggaaagggaaagggattgtcaattcacggatggaagtacgctcgctacaacgtcttacgcaaccatactcaagtctatgtgaagtacgctgccactatccatcacgatgctctgagctcatactgcatcgttcgctatgcaacgaattcggagactaaagattgactgaccataaatgaagattgggaatgactatgacaacaagatcgacgacgagacgacactcatggaaatcaagcttgtctgtcacatggaacatgataacataattaaaaataatgacataat

SEQ ID NO: 38097 - DNA, 358 bp, Glycine max
cgcgtcgttccgtactagtgtcaccgctcgaatatcttgttgtttggagcgatccgagataaactgtgtaaacatgtggagctaccagtacctctgtacaggtgatgagcttgtgtttgactcgattcggaacacggctactgagattggaatgctgcgggatgatgttgtgacgcgacacagaacaggtgctgctgctgtacacctggaaaaccccctgcatattttggccttcatggactatggccttattacaaacatggtttatacctatgtaactgtgattcaaacaatcgttctcaggcatctcagatttttcacctcacttttagcttgcagaggaactggcccacacttt

SEQ ID NO: 38098 - DNA, 292 bp, Glycine max
atcaatcttaccacatcttgctgagactacttagtctaatagaggctctacatggcagctagagagttcatctttgtggagcttctgctggttctgaatatggccgctgtattggtgttaaactatttcgaggtttaatacttagcttagcagtcggctgtatcatattgcgacacgacagaggacaattgatgttaccctacaacttgaaaacccgctgcatattttggacttcatgggctttggcctaattacaaatatggttcatacccatctaactgtgattcaaaca

SEQ ID NO: 38099 - DNA, 360 bp, Glycine max
tggactcatcaatttggattccagacctcatcgaaatacagatagcaaatggtacatcagcccagaggaatggagcgaaggaacttatcctacttgggcacatggtcccggctatgtggtctcacatgatatcgctaggacggtgtccaagaaattcagagagaaccatttgaagatgtttaaactagaagacgttgcaatgggaatctggatcgctgacatgaagaaggaaggtctagaagttcgctatgagaatgaggtcagagtgtaccctgaaggttgtaaggatggttatgtggttgcccattaccaaggccctagggagatgctctgtttgtggcagaagcttcaggtagataa

SEQ ID NO: 38100 - DNA, 285 bp, Glycine max
  unsure (1)..(285): unsure at all n locations
ncncgcntgcaggttcttatggctgctatacatgctacggtacatactctggcagatactcaggttgatggtattgtggggagcctatttggaagcccatttcagatcgcccttcagattgaccgtaaggtgtacaaatttttatacaaaaatttgggcgacaagagggacttgctgattgaattccttcttgaatacaacaatgttcccaagattgttcccaatgttcatcacattgcacagtctatagcgaatgctgtatacattgatgaaaacattgataac

SEQ ID NO: 38101 - DNA, 324 bp, Glycine max
  unsure (1)..(324): unsure at all n locations
gcggacaaagtacgacttncaacccatatcataatcttttaaaaactcttccatgacttgcaaccggccgccatctttaccgacatgtgccacccttggagtgtcnatgctgctgctaaactcggcattccgaggatcatgttccacggcgcaagttatctcgctcgctccgctgcgcactccgttgaacagtacgcaccccacttggaagcaaaattcgacaccgacaagttcgtgttacctgggttacccgataacttggagatgacgcgcttgcaattgccggattggcttaagtctccgaatcagtacactgaactgatg

SEQ ID NO: 38102 - DNA, 235 bp, Glycine max
cccactcatacgtatcttaccactttctattctaaattcactctcagaaattataatcgcgcggctatctaacactgaatcagctcactattttacagataaagatgccacccgaaatgatgttaatctctccgattacaaaagaaaagtccttcttcttgtcaatgttaccttacaatgcagcttgactaattcaaactacacatagcttaatcaattgtattgaaaatacaaa

SEQ ID NO: 38103 - DNA, 450 bp, Glycine max
acgaccacgcgtccgattaactgtttccattcacctgaaaaagaacaccgtaaccctcttcaccggtgtggctttttatacacgcctgatctctctttcttcttcaatccatcgtttctcttcaatcgatcccactcaagcttttgcaagagtctccagcgtgtcgttctcaaagctggaacagctgtggttactcctactgatagcatactatcattgggaaaacttagaactctctcctatcaccttaaatagctaaataacacctattatgatgttatattagagacttcaggagcatatcctcttggccggcaaagactaagatatcgaacattggtcaataccaccttttcagatcttcaaaatccacaaagagatctttatcggaaagcatttgcagctctaccacaaagtactctcatcgctctctatgatatcatgtttagt

SEQ ID NO: 38104 - DNA, 456 bp, Glycine max
atcggctcccagaatatttggaatgttacaaactgatctgtgaaagaaaggtcaaacccttggatttggttgcccttttgaaatccctaggagaagaaaaatgcatagtttttacaagatctgtggaatcaacacatcatctctgcaaattgctaaattgttttggtgatctgaaaattggtatcaaggagttttctggtctaaaacatcaacgggtaagaagcaagacagtgggtgaatttcggagaggggagtttcaagtgcttgtatcttctgatgcaatgactcgtggaatggatgttgaaggggtaagaaatgtcattaattatgacatgcccaaatacacaaagacgtatgttcatcgagctggtagaactgcaagagctggccagactgggcgttgcttcacattgatgtcaaaagatgaggttggaggatttaagaagttgatgaaaa

SEQ ID NO: 38105 - DNA, 406 bp, Glycine max
gcataggttgcgttatatattgtactaattagcacaacaccatgaggatgaagattgttgtgatgctattgctacctttgatgtttgcactgttttcatgcacgagttctgcaaatacaactacatgccccatggacttgaattatgtgctgagaatcccatggaacacttctgcttgccacaacttccaacaaactttggcggctaaaaatggaaccgatgcaaacacttgttgcatatctctcttgtccctcttcggcataggacttgcacagcatctcaaggagacttctaaagtccaactcaaacttgcactgcttctcatcaaattcaataagttttctttttccacaactgtaactgttgacattagtggactccacattggtgaataacatctgtgaca

SEQ ID NO: 38106 - DNA, 374 bp, Glycine max
tctctctctattctcatttcaatccccttcttcaacccctctctctctctccaaaacgccgggccaaaaaatggctcagaaggccgagaaaaacgacaccgactttaaggtccccgaaaccatcatcaccccctgcaccaccaccaccgccacctcgattaccgaaccttctagattcttcgacgcaaccacccccgccacgtcatcgcgctcccccaagcgatccctccccctcgacgacgaatctcagacggaccaaacggcgtcgtcggagcccaaacgcgtcgtgagccgctgctactgctgtcggggcggggctatgattcggcgtgggacttttggcacacgtctcacgcacatgtctacatcagcga

SEQ ID NO: 38107 - DNA, 458 bp, Glycine max
  unsure (1)..(458): unsure at all n locations
gacgccgtcacgcttgtctacccatggttcnngtgatgganntttggcatcaacctataccccatacgagnngcaattggatatgttgttcgactggcaaacaggaaattggggtctcaccataccttcctcttgggtcntgtttagaaattttggagaatcagacgggtcanagcaataccttcacaaggcgttgagaaagacatcaggttcagctatttctgggtccgatgtgctaggcttctttctgtaacacttttttcaattcattgtgctggttgtctctattacatgctagctgatcgttacccccaccaaggaaagacatggatatgagctgtgaccaaacttcgaaacagctcgataatcattggcatactggcctactccatacactgagtatggactcacccgcacacctaaaagacttatattttactgctttaccttcctacagt

SEQ ID NO: 38108 - DNA, 276 bp, Glycine max
taattcctgataagggaaattctctgactgcggcatctgataatcttcgtcgttggtgtaaaaataaaggtcgcgctcaaccaaattgcccaacttccataaccacattttaaacttattacccttttccccccaacaattatggatgccatccaatcttttcaacaccacacactttgcaaaaacttcacaacacaaccttttgttctctcttgtccgcactcatacaacactttgatccccaaaaaaaatctttttcttttataaattcctttc

SEQ ID NO: 38109 - DNA, 408 bp, Glycine max
ggaagtttaagcaaacaaaaccctttctgctcctgctttctttgttcaaattttgtgtcaggatggaaactcgggtgaagcacacacttattgtcaaagttatggttcgtactggatccatatgacaagtgacccatgttatagtgaagtttttggatgatcataactcccacatcatgacgaatgtgaaaagacctgtgatagaaggacacattctcaccttacttcactctgaaaggtaagcaagaatattgcgctatatggtctcttatttttgactttcctccaaattcaaactaaaaaatttttctttattataaataataaactaagcgtatgacctattatgttgatcatatattcaatattctgattttatttaacttcaataacatcttgttattatat

SEQ ID NO: 38110 - DNA, 311 bp, Glycine max
  unsure (1)..(311): unsure at all n locations
gcgagattatgtaccgtgttactgaaganagtttgatggaccgcctatctactataacccatctggcctgcttattgattccgcaagagggcactgtgttgacaattcatggatccatggatgaaattgtacctgcagaagatgctttagagttcgctaagttcatatctaatcatgaattgtgcttcatagaaggagctgatcatgaatatacttatcatcaagatgagttgaccagcttagttttggaattcatcaagattcatattgacaaagacaaagatacatcgaagcaggcacgaattggaaga

SEQ ID NO: 38111 - DNA, 410 bp, Glycine max
  unsure (1)..(410): unsure at all n locations
acgaatccactgatgggctggacatccactngggacccctactctcatgttggtgattctgccgtgactggggatagcgaacaagcagcaaaagcatttgcagagaaacatggttgggagtattcggtcaagaagccccacacaccattgctgaaggttaaatcatacgcggacaattttaaatggaagggcccccccaaatctggtgaagagtgatttgttggtttgtattcatgttaatgtattccgtcttccggagtttcaacgtgcagcagtttttctctgcatattttcttggaaaaacaaaagttaagaatactgtgaaaaaagatgatgctggtaaaaaaaaaaaaaagcgcgttaagacaactagacctgctgcagatattaatagactaaatatatgcgcg

SEQ ID NO: 38112 - DNA, 267 bp, Glycine max
cgcacttatacctctaagattatggaattcgtgactgatcacctgaagacggaaatggggtggggtggttgactggtcggatatgcaaaacatatcacgatgcggcgcttaaagggacttaagcctttatttgcttccatattacgatgatgtgacctgcgtatatataaccagccaagaggccttgaatatcctgaacttcttgctagagagactgtgtttcagcgtagcgaaatagaagcactttaccagctcttcaaaaagatt

SEQ ID NO: 38113 - DNA, 402 bp, Glycine max
  unsure (1)..(402): unsure at all n locations
aacatgttttgtccaatgctctacaagaaatgttacttgctagatgcggtgtacggacagattatttctttcccggacgcacacaaggncaaggaatatctgaacgaccacaagtaatttctcttttccttcgctcctgctcctgctgctacatctggtgctccagcaactgcagccaaggaggacgaaaataatgaagaaccagctgaagagtctgactatgacatgggtttcagtctgtttgactaaattaactaatacttttgttgagtttgctttgatagaatacgtgaaaatgttacctatttagtctatttattctgctttaatcatgtacatcaacagtttaatccaagtataaacttacatttgctcttatgttaatcaaaaccatgctctttt

SEQ ID NO: 38114 - DNA, 393 bp, Glycine max
ccgggcgccacgcgccgctcttactttcaaacccactctttccccataaccctacccactccccctcgcgccgccgcgaaacggcctcttctcgtgttctccaaaaacccaatttccgacatcgtctcctccaccttctcacgcgccgaagaaggcgcgtgggacgacgagaagccgcgcgaggagtgcggcgtggtcggcatatacggcgaccctgaggcctcgcgcctctgctaccttgccctccacgcgctccagcatcgcggccaagaaggcgccggaatcgtcaccgtcaacaacaacgtcctccaatcaatcaccggcgtgctcgttcgagtttaacataaaatgacagtcccgagcttcatgcactcgtatcatgcgcatcatgta

SEQ ID NO: 38115 - DNA, 408 bp, Glycine max
aacaaaacctacgaggaagaagaaagcacggttctattttcccattcccaaacacgggcagggttgttacccttcaacgagaacgacccgcaggacatggtcatataccaagtcctcaacgaagccaatgctctcaccaacacatttctccctcagaggcttcaccaacctcagttgtgcctcgagcccaccagaaacataacaaagaagcactacagaggagttcggcgccgcccctggggaaaatacgccgctgagattcgcgactctgcccgccacggcgccagaatatggttaggcaccttcaacgtgaaagtgcatggtataccaccggtaaatgaggtcaggttgtaattcactaatgtgtgacgatatttcaatataagacatacatctgtttatcatgtg

SEQ ID NO: 38116 - DNA, 401 bp, Glycine max
cccacgcgtccggtactttggactcatgggtgatggccaacctattggacgatacgatgatatgtgggctggatggtgtgttaaggttatatgtgaccatttgggcttgggagtgaagactggccttccatacatctggcacagcaaagcaagcaacccttttgtcaatctcaaaaaggagtacaagggcatcttctggcaagaagaaatcattccattcttccaaagtgccactctttcaaaagagtgcacgtctgtccaaaaatgttacattgaactctccaagcaagtcaaagagaagcttggtgtgtcctattatagtacaatgcaggactgatgactggatactacaacacacattaaaagtctcaagcaacaagtgtgtgtgcagtgacttatgt

SEQ ID NO: 38117 - DNA, 397 bp, Glycine max
agctttcgcagaaaaaggaatcaaatatgagtacatggaacaagatctcaccaacgggagtgctttgcttcaagaaatgaacccaattcacaagaagattccagttctcatacatcatggaagacctatctgtgagtccctcataattgttgagtatattgatatggtttgggacaacaattgtcctttgcttccctctgatccctaccacaaagctcaagccaggttctgggctgattttgtagatcagaaagtgtatcatgcttctaagagagtttggatttcaaagggagaagagaaagaaggcaaaagcttctaaagctaacaatggagattttgaacacctatttggggaccattggtagtgagtgcttatactctatgtgttatactataa

SEQ ID NO: 38118 - DNA, 364 bp, Glycine max
  unsure (1)..(364): unsure at all n locations
acgcccacgcgtncgnccacgcgtncgaggaaaacgagtcaattcatcatttgctctctgctctgcttgtgcaaattttaggagcggagaatccagagaaagagagatgtctggtatcgcccgtggacgtcttgccgaggagcgaaagtcatggcgcaaaaaccaccctcatggtttcgttgccaagcccgagactctccctgatgccaccgttaatttgatggtctggcattgcactattcctggcaaggctgggactgattgggagggtggatatttcccactgacaatgcacttcagtgaagattacctacagctccaggcnatcctaggttttaccatggatcttaactgtgtgttctat

SEQ ID NO: 38119 - DNA, 408 bp, Glycine max
catgtgtcgtggaacttttgtggttgcaaccactgttggagtggtggaggcgttgaaggatgaagggtattgcaaaatgaacagcacaatgatgaagttggtggctcaacatgccaagaaccacatagggtcagtaactgaggccaagaagctggcttctccttctccttctccttctacttcttcttcttcagtaacttcaaataacctgagagatgatgagaagagaaggatggcagaggagtctctcagaacagttatgtatttgagcacatggggtcctaattcttagatgtagaaaacattataaatataatttacatattacaggacaaaattgatgcgacagtagcataatttaaatgaaggtatacattacacttgtcatatgcacgttatctatatgtg

SEQ ID NO: 38120 - DNA, 373 bp, Glycine max
  unsure (1)..(373): unsure at all n locations
taatttctcaacttctctgtcccttgttttttttccccctcatcttaattaattctgattcgtaagaggaactgaaactccttcaatctcttttttttcttttttctcggacaccatgattttcgatcaagggtcaatgcaatctaagtccaaccttgactgcttcctccggcgtacgacacctgttgtgccgtctcagtttcttcccaagcacgagattcgaaaccttaaccgtttgtggcacccgtgggagagagaagcggttgagtacttcactttgggtgatctatgggatcggntcccatgatctatgactgattcatacttgcaatggaacatgtagacttttctacctttcattaatttacacaca

SEQ ID NO: 38121 - DNA, 459 bp, Glycine max
catattcaccaacatctccatcttattctccatcaagcccaacatacagtcccagcagcccgtagaattctggtgtgagcccagactatagccccagttcgccccaatttagtcccagtacgggttactcaccaagtcaacctggttactcgccatcgtcgaccagccagtacactccacaaactagtgacaaggatgatagaggcactcgctgaggtaaactaacagctctgctgaagcgcaaattcatgacttaaaagtttttatcttattggatggacagcatttacgatgtaaatagtgaagaatttcttccctggagaaatgttgactgtaaaaaattcctgattctgccatctttttctcctattggttttaaattgtgaaaagaaggtctatttggccaaagttcttgtagtggccggaaactatcagatttctagaaatccctatatttta

SEQ ID NO: 38122 - DNA, 396 bp, Glycine max
  unsure (1)..(396): unsure at all n locations
gccacgcgtacgatgaattcaaaaactaagactaatttgtagagcttcgcttgattcctgaggagcaggcatgtcgaacacatgcggaaactgtgactgcgctgacaagactaactgcaccaagggaaacagctatggtgttatagtagagactgagaagagctacatcgagactgttgacatggatgttccagcagctgagcatgatgggaagtgcaagtgtggcactaactgcacttgcacggactgcacttgtggccattaaggaatatgtctgaaaatgtaattgacatgtgttaggcaatacatatctncaaataatgtaatcttcgtatgaataaatgtgtgcctgtatcctacttcatgatctgtgtagtcatgcagtctgaatcatgt

SEQ ID NO: 38123 - DNA, 346 bp, Glycine max
ctcaaacctaccacctgtctttaggattcttgtacttattaaccaccctgtgatcgcagacgcaacactctcgctggacacttcctttcacatatggcttctcacgacagcatctacgctcttccaaccttcgcttatgatctcgactacaatcacctcaatcgcactcccgatgatcctatcctcggagtaactgtcgcttatgacaaagatccaagtccatttaatctcaacttgtgatctgacgcttaccgaactgatgaacgaaaacctaccgttgtgaatgtacagaggccagttgaacagcaactcataaatgacgtttcaatgcacagggaatatattc

SEQ ID NO: 38124 - DNA, 456 bp, Glycine max
aatacacatcacggcaactcatgtctaatggtgcactaatcactctctgacaccatcttcatgatagggattccagttcagaacgactcaggcactagttccactctttaatcctacacactcctacctgcttatcctgcgcatcttacacctagatccttcccatcactccttcactatcctattccagtggcaaagaaccatgacttgcaacagctaacgcgaacaggatgacctccataacgctgctgaaagtgcacgaccctatgttgtaaaaaatccatcatggaatgatgccaattatcatgcttctcatactgcaaaccaaggcactcagcctgttaaacctcagcccatcgcagtttctaatatatcatcagatgaactgaaagcagttacggataactctagtcaagattctctgattgtacagggatcctatggaagagtatatta

SEQ ID NO: 38125 - DNA, 313 bp, Glycine max
tcgaattgacagagagtcagaagaaaaagtggaacgggtgtgtgctcctcaaacagatgatattgccaaaaccgctagcggcgaagctggctcaaatgatactgcaaatggatgatacaagctgttcccgcatacaagtcatgctgctgaagatcttctgcacaattatggtataaccgtcctcgaattactcgtgaacgctctcgccaaagctctcggtcatactgaatgcaacctgataccactgctaacttccatggagaactatgttacattacactactgagactggcataccaatctacacccaatc

SEQ ID NO: 38126 - DNA, 327 bp, Glycine max
taatcttccgatccgcgcgtacgatgcgttatgcatgatattaccctttcagctttaaattacaccagcctccattcaagacttgtccgggttttttctgcccactgttatccacttgactcttatcttaatcaactcacaccttcagtccatcctgctcttgaataccttccatctttacaacatcacaataacactgataccctgtctgcccaagcaccagtatatgcagtacttaccaatgtacctatcatattgcctcttgattgtgatcactacatatacatcatctctgccttgagaacagctataaactccatgatatat

SEQ ID NO: 38127 - DNA, 315 bp, Glycine max
cccacgcgtccgggttgtaacagtgatgaggtggacgaattgacaagaatgagatatgcttgtcctgggtggaaggaaaaaataattaattctgatttgaaaagaaaagatggtttatgccctctaacacctgaggagactgcccttacgcttaaggctcttgacattgatcagaacattcaaatctacattgcagctggggaaatatatggaggggaaaggagaatggcaagtctagcgaaggagtacccaaaattggtcacgaaggaaacgctgttggagccatccgaccttcagttcttccaaaatcattca

SEQ ID NO: 38128 - DNA, 260 bp, Glycine max
gaaaagggtaaggagatgaaagaaaaagctttgcagtggaaggaattggcaaaaagtgctggttttggccctgacggatcttcatttgctaattcggataacatggttcgagatgttcttctgcgcaaaaatgttaaatattcgcattagaagaactcaaatattttaacttactccattgacgtgtgaagactctatatgttaataaccttatctacatgggaaatgaaatgtaccaagtaccaactgatgaattggat

SEQ ID NO: 38129 - DNA, 378 bp, Glycine max
cccacgcgtccgtctgaatctgaaacctccgtgttggtgttgcatatccaaaccggaattgggaaattgaattgttgaagggaagaagatcaagatggttctggcggagttaggtgggagcatttcgcgtgctctccagctgatgagcaatgcgacagtaatcgacgagaaggtgctcaacgattgcctcaacgacatcactcgcgctcttcttcaatccgatgttcaattcaagcttgtccgcgacatgcagaccaacatcaagaacattgtcaacctcgacgatctcgctgccggtcacaacaaacgcaggatcatccaacaagctgtgtttaacgaactctgcaaaattctggaccctgggaagccctctttcac

SEQ ID NO: 38130 - DNA, 376 bp, Glycine max
tccgacccagagcgtccggtgcgactctgtgcttagctaacgttaacagtgacttaagatggcggattctgcagatgtcgcccacgatgttgtgtccctcctgtcttctcctcaaagggactttcttcttcgcaacaacggccatcaggttaaaattgacagcttgaagggtaagaaactcggattggatatttcggcattctggtgcgggccatcgtatacatttacgccgactatggtggatgtgtacaatgaagctgcaaaaaaaggtgacttccagatcgttttcattacggctgatgaatatgatgagtccttttacggttactgtcacaagatgccatggcttgcaatgccattttctgatttagacaca

SEQ ID NO: 38131 - DNA, 408 bp, Glycine max
agcttctattctattctatacctctctttctcattgttattagttgtatagctttaaatttgctgtgcgatttacattgcatctaataaagtaaagtggttactgacacagagaagcatatatagagaaagaaagaaggccctgccctatatagctgaagcaagatgatggaaaacggtggcaaacagacatttgaagtctccaatgacacgcttcaacgagtaggttccaagagctttgatgatgatggccgtctcaaaagaactggaactatttggactgcaagtgcccacataataacagctgttattggttctggggtgctatctttggcttgggctattgctcagctaggttggattgctcgtcctgtggtgatgattctattctctattgtgacttattata

SEQ ID NO: 38132 - DNA, 393 bp, Glycine max
gaacgttcaagacctcatgagcgtgttgctttccttgcttgaaggaaaaactattgagggcgatgaatgttgatattgtcatcaaatcctttgtattgacagtaattcaagcaggaactgaggcaagcattactactcttatatgggcaacaagtttgatattgaataatcctagtgtactagaaaaacttaaagcagaactagacatccaagttggaaaagagagatacatatgtgagtctgatttaagtaagttaacatatcttcaagctgtagtcaaagaaactttaagattgtaccctccagctcctctctcaagacctcgtgagtttgaagaggattgcactataggtggctacactgtcaaaaagggaactcgtctaattacaaatc

SEQ ID NO: 38133 - DNA, 390 bp, Glycine max
cgtccggcgagcttgagaaaaaggttagtggaaatgatgtaatcttgattgccaccagcaggataggagggccaccaaataaaggttctgctgttcagcgccatagtaccagaacactcactgatgcacatgacgcaatgctggatgatattgcattgcctgctgagattgttggaaagcgagttaggtatataattgatggttccaagcattataaaagcctctttgtaccccaatgagcgaaacaataccgagtacacatggaagacttgtgctgcatgatacaggacactttcatgcataggtgtctggtgtgagtattctactaccgaggcttatgtgctatttactagctttgaattgcatcctgaattacatatggtggatgct

SEQ ID NO: 38134 - DNA, 374 bp, Glycine max
tttgtttctatggcttctgcagaagtagagttccgatgctttgttggtgggcttgcttgggccaccgaccacgatgctctcgagaaagccttctctcaatttggcgaaatcgtcgaatcgaaggtcatcaacgatcgtgaaactggaagatccagagggtttggatttgtgaccttcgccacagagcaggcgatgagagacgcaattgaaggaatgaacggccagaacctcgacggtcgtaatataaccgtgaacgaggctcaatcccgccgccgccaaaaacaaaaccgtcatccccgaccttcaggacatcctccaacgcttcacgtttgacaacatctgcaagatcgcgttcggcttcgacccggagtatc

SEQ ID NO: 38135 - DNA, 385 bp, Glycine max
cctcggttacaagacaaccccaaatctcatatacctctacttcgtgctcggacatgtaccacttaccttggctatacctactaacagctatccatgcatatcattaagaacctcaaaattctcttaccagactggggtagggtctatatgcttatgggggaactccgataaaccaacatcttccagaacttgatagaagcctggatatacttgttgcaactcctggaagactgctagatttactggagagagctatagtttcattgccaatgattaggtatacatccttatacgaggcaaatataatgctggatattgattttgagccacaaataaagaagattgttgaacaaatggacatgccttcaacatctgccagacatac

SEQ ID NO: 38136 - DNA, 354 bp, Glycine max
attgacctcactcatgcatggatcactcgtcgatgctcaaaacaccaaggacatgagcctgcgctagtgccataggtctctgatcctatttgtgccttggtgaccacagccactggaaagtcataagtactgtgccatttacacaacccacgaagcccaaagcctgagattaagttgataggacacgttcatccctgaaaagacaaacttttggactacgcactcattgaacggtcctaaaaacatgggcccttatcctctatgtactgtggcttcatgccaaccgttattgccttcacacgagaattgttcaagctcttcctacaaacgcacaacgcaacttgatttaacaca

SEQ ID NO: 38137 - DNA, 338 bp, Glycine max
aaattttaaaattgattattcatcatcacattataacactatatcaagttctagaaacatcaacagacatatatatctttataaactatttaaaatctatacaactctttcattacataatattataataatcttctgcaacattattaatcccatcatttttttcatcatataatccctaatttggagtactctcacaggaatattctcttcatacatacctctatcctcataatttactcttttactcaaaatttaacatcaatacttcttattcaactttcatcaacatcattcattattttcaccttcttaaaacaaatttttgtaaccctaat

SEQ ID NO: 38138 - DNA, 276 bp, Glycine max
attttaagattggttatgcatcatcacattatacgactatatgaagttctggaaaccccatccgacatatatgttgttatagagtatgtgaaatctggatagctcttttattacataatagaaaatggtctgctgcaataagattaaacccgtcatttttttcagcagataatttctggtgtggagtactgtcacaggaatatggtggttcattgagacctgaagcctgaaaatttactcttggactcaaaatttaacatcaatattgcttatttt

SEQ ID NO: 38139 - DNA, 363 bp, Glycine max
acgcttatgctcttgttactgcttacaagaagtgcaaattcaatatggcccatatagacgtcttggcaccgctgaccacacaaaggtcttactacaacgacacagaaccgcatgctaaacactaatactaccagagaacttataacggaagccttctgattactgaaaccactgacgcctgtcacacggctctatgatatactcgaacccctggcatattgactaagaaccatgttgaagcttgagaacacatagtcgaacccgtatatgccaaatgcagatgtttcttctgccaaatttggcaccaagcatatgggtaaacttacatattcattgtatcacactaatggacaagcacacata

SEQ ID NO: 38140 - DNA, 366 bp, Glycine max
ggaacgtggaactgcggcaaccggaatatctcacttctcagatcatatcaatccgacggggttgcagttataatggctccattcagcggcgatgagacggcaccgattttcggcttccttggagccgcagctgccctcgtcttctcctgtatgggagctgtctatggcacagccaagagtggcatgggcgtatcttcgatgggtgtgacgagaccggagctggtgatgaagtctattgtccctgtcgttatggctggagttctcggtatacatgggcttattatggctggaattatcaattgtttttttctggcctttagtcccagggccaaatcttattacctctctgatggatatgcacatatc

SEQ ID NO: 38141 - DNA, 380 bp, Glycine max
tagagctaaatgacttgaagatacgatacaggctcgatggaccacttatactccatggaggcacatgcacattcaaagcaggacacaagattggaattgttggaaggacaggcagtggaaagtccactcttatcagtgctttatttcgtctagtggagccggcaggtggaaaaattgtagtcgatggcgtagacatatcttctatcggccttcatgatttgaggtcacgttttggtgttatacctcaggatcctaccctttttaatgggactgttaggtataatttggaccctttagctcaacactctgatcacgagatatgggaagttcttgggaagtgtcagttgcgagaaaccgtccaagagaaacaagaaggcctg

SEQ ID NO: 38142 - DNA, 286 bp, Glycine max
acgcagacgcgtggacccaaccacacgcttcatatgacatgagctcattgggtgggatacaagaggcgcacggcctttatttacttatctaggaaggtgcagcagtccatgcacagtccgagctgaagccgccaacatattcactgcatgcattggagccggtgatgtgcctagagacactcgcgtcatactggaggaagacccccctgacttatgtactatatccgaacaaacaagttgttggtacagatcacgacggcaaggcactacaagagatcattgtcac

SEQ ID NO: 38143 - DNA, 420 bp, Glycine max
cccacgcgtccgcccacgcgtccgcccacgcgtccggaagaagaacctgttgttgtgggtgtattacagctgccacttatggataggagcgggcaaataccagcgtttgggaattgggattacgcaaacgagttgccaatcactcagtacttcgagagtgcgagacaagctggtttagttcgttacagttcctcctccggcgaaagtgacccttacgtgcgtgcagaccgtgacctttacgccgttgattttaagaaacccattcgcaacatcccaacttctactctgaaaaaggccactcttaaaggtggacaaggtggttaaaggaagggaaaagggtaatgtgaagattaatattagaaaacaggggaaagggtgccacgtgacggaacaagcaatgaagccagtggcagcgatgca

SEQ ID NO: 38144 - DNA, 274 bp, Glycine max
ggatgccattaccaatggtcatggccgtaccgtttctggttggagcatactttgcaatcgatatgttcataggtactgtggttgtgtttgcttggcagaagcttgactccaagaaggcagagttgatggttccagcagctgcctctggactaatttgtggggaaggactatggactctaccagctgcgattctagctcttgcaagaattaaacctcctatctgcatgaaattcgttcctacctagagcttcacccacaatagaacaaacaattc

SEQ ID NO: 38145 - DNA, 382 bp, Glycine max
gggacacgcaaagggcgtcacagttgtcaccgacaacaccttcgctcccatggtcatctgggccgctcgtggcggctctgacgtcgtcgttcacagcatctccaagtctatcagtgggggtgctgatattattgcaggggctgtgtgcgggcctgcgagcctagtgaatgcgatgatggaccttcacgacgggtccctgatgctgctgggtccaacaatgaatgcgaaggtggcgtatgaactgtcagaaagaatccgacacttgagccttaggatgaacgagcattgtcaccgtgcgttggtgttcggttcatccttcatggctcaagaaattaaggttgcaagtgatctacccaggccttgaataccacccacagcacga

SEQ ID NO: 38146 - DNA, 275 bp, Glycine max
gatgagccaacgatgacacgaaggtgaaccagttcaggaggtctacatatgtgctacatgggctagttgataggctgctggatttgtaacagatgctataggaatacatgccatgtttgatgctattgcagaccgaattaaggacccaagtgatggacacgcatgccaatgcttttgtggtgaaagtagatgatctagggcctggactatttgtaacacttgatttagggacaagtggatcgaagactaatgtaaccaccatcaagcaagcacag

SEQ ID NO: 38147 - DNA, 331 bp, Glycine max
tgcccttctcgttagcttgatatgataatctaaatgtttcaacactttgtttaacctgagggttttgaatttgggttctctttgttgcacattaaatcttagctgtttcataatagtgcaagggctttggaagagaaaagagctcgtttgggtttagtggaatgtgtgaatcatgagctcctgcaaccttatcctgttctgcatgaaaagcctggtgattatgttgcacatatcaaattcactgtcttgctaatgcccaatggatcagatcgtgttacgtcttactcactccaagagtttttgggtctcacccaacaaaacaattgatgat

SEQ ID NO: 38148 - DNA, 448 bp, Glycine max
tgccgttcttgatgattttggcatggaatccatgctcgagagattgatgaatgatttcataagtcgcatatctcgagttttctacactgaaattggtggaacctcgctggactcccatcacgggtttgttgttgaatatggaatcaatcgggatgtggaacttggcttccatgtggatgatgcagaagtcaccttaaatatttgcttgggaaacgaattttctggtggagaactgttcttcaggggtgttcgatgtgatgaacatgtaaattcagatatccaaccaggggagatctttgattatccccatgttccaggacatgcaattcttcatcctggtcgtcaccggcatggcgctagacctactacatctgggaatcggatgaatttaattatctggtgtacaagttccgcttttaaagagttgaagaaatatcggaaagatttt

SEQ ID NO: 38149 - DNA, 392 bp, Glycine max
cccacgcgtccgagatgttagagcaaaattagcaaaagatttaccctcaatatcaggggtggagtcacatgacgctaatgtagctgaaaggcaggaaggcacagaggtagtgcaaccttctatgtctgttatggcaggtcctctgctttcaatgcaggactctatgaagtctgatgaaatccttcgctctccaaacaaagatggtttggacattgtggacattgattcagtggagttaaaggatcctcaagtttggagttcatatgcccctgatatatacaatagtatatttgtcaaggagtttgaaaggagaccgtcaagtgattacatggatatgttgcagcaagatatcactccaagcatgcgtaggattctgattgattggcttgtgg

SEQ ID NO: 38150 - DNA, 337 bp, Glycine max
aattcgcggacgactcacgcctctcttcatgcgtccatgtgagtctaatatttgcaatgcccaaaatgtaaccattcctgcacaaagccaaaaactatgatctggataaagtcactaacatgcccaatcctgatgctagtgtaacccaccatgattttaatcgcgtcaacccccacagtgatgactactctattcatggctgtgtttccaacccttattctaatcgcattgctatttgctaaatcaaatactcctgtaacagtgctgtctacgacatagcatgatgcacaataccttacccacagacacttagtgcaagtgacacatcaattctata

SEQ ID NO: 38151 - DNA, 383 bp, Glycine max
gattaaagctcatcctaggcacaaggttttccacaagcaaatgcctcctgaaccgggttagcttgcatcaaggcttctccaatattcacctaatctacgctgcactgcgctggaagcatgtgcacatcctcattacaatgaactttgaccaccaaatgcccgtgacaactaatgacacatccaaatgcctccacttaaaaaatctaaacctaggatagctcaaacttacactcaaccaatcaatactctcacatccacagcatgtattccaagttcaagccaattaactctcctcattctgtcgcttcatagacacaaacggataatgaaaccatcagtcaacctatatagagatcaaactgaatcaacacacacgctgtttt

SEQ ID NO: 38152 - DNA, 360 bp, Glycine max
ttcctccttgccccttctcatatctccgattccgttaactcccaaaactcgaacgctagccctaaccctaaccataaccctaaccccaactattacaattaccatcctatataagcaatcatttcgactctctttctcagctccacggctgctattctgcctatgcttaatgaaccacatctttcgctaaaacttcaccctctttacaaccttaacaacttagtcaacaccttctagccacagatcttcactaatcttccatagataaagagttctcatgaaaatcatgactttgatcaacattaaaggcaacttcctgcaactcttatatcaaatgtctattattacctaactgaactt

SEQ ID NO: 38153 - DNA, 313 bp, Glycine max
acgcgacagacaaacaaacaatttaccagctatacttgttccttttgaaggttagaagtgctaggatacggacaatggcagctactcacgaagatgtgaagcttttgggtattgtgggaagcccatttgtgtgcagggtccaaattgcccttaagttgaagggagttgaataaaaatttttggaaaaaaatttggccacaagagtgatttgcttcttcaatacaaccctgttcacaagaacgttccagtgtttgttcacaatgagaagcccataacaaagtctcttgtgattgttgaatacattgattagaca

SEQ ID NO: 38154 - DNA, 341 bp, Glycine max
cccactcgtccgctcaaacgtcccatgcattcatgttatttgaaccttgtgactgttagggctacattgtatctctggcacatactatcaaatccctactgcctacgatccttattctgatgcaaatgctgatgactcacttgctgagtcaataggagtatgtgcatattcgtgattctcagctaaatcttaattttagcctgacaaccgttcttgaatccaaatacaaattcatttctaacaccatacttatagacacatataatgagttctgaacaaatggtacagttattcacttcccataactatctcatgctattcaacttctatgttatcatgac

SEQ ID NO: 38155 - DNA, 400 bp, Glycine max
  unsure (1)..(400): unsure at all n locations
ggtccggaannttcccggtgtcgatcccagcgcgtgccagtaattgtttttttaatttgaaataaaatgtccgggaatcaatccacatagaattgagtgagacccctccatgggtgggagggcacatagaaatgaggagcacaatatgataacatccatggtgatgcacaaaggtgaacacaaaggagaacaccatggtgagcacaaaggtgaacacaaaggagaacaacaccatggggagcacaaggagggacttgtggataagatcaaggacaagatccatggtgatggccatgacaagggtgagaaaaagaagaagaaggacaagaagaagaaggagcatggacatgaccatcatggtcatagcagcagcagtgacagtgattagatcttatatgtt

SEQ ID NO: 38156 - DNA, 378 bp, Glycine max
ttgaattctcgacccgagcgtccgcatgctctaattgagatgtactatgatctggtttctgggggaactgagaatcacccggttggggagagtctgaagaataaggagaccgatggctccagagttgagaaggtgttgtaagcagttcatattgcatctaataaaaacactgttcctggagatatgtctgccatgcttcctgttctcatcactgactggaacccctgctcttactcctataggatctgttgaggaggattttgttaaggtagcacatgctcttagatgcatcagtgcagttggctgtgaagattaagggtcagagcacaagaacaaagctctaggacttcttgaccgcaattcaatcatcttctacct

SEQ ID NO: 38157 - DNA, 385 bp, Glycine max
  unsure (1)..(385): unsure at all n locations
ctgactcgtccttcctccctttctttttgtccccttcaaccaatctacagccagaagctagtactcctctattcgttacaganaacntttatagagagtatcttgaatactattatcctaaaacggtatttcgaggagaggcttgtgatgatcttggaagaactttctgtgagaccgagtatcagaatggtttctactatagaaatgtgaaaaccctttttattgccatgactactgcgttttcaatgtcaaccagtactaattgtagtgttgaatgtacataggtataatgctattgatctcattttatattgattttcagtatcactataaaactttacaataattatacancttttttaaattcatttttttgttattcatt

SEQ ID NO: 38158 - DNA, 418 bp, Glycine max
attgaaagttcttcctggtgcaaaggttcctgctgatggtattgttacttggggatcgggtgatgtaaatgagagcatggtaactggtgaatctgtacctattatgaaggaggtgaatgcttccgttattggaggcacaataaatttgcatggcgtccttcacgtataagctaccaaagtaggatctgatacagttttgagtcagattattagtttggttgagatggcccagatgtccaaagctcccatccagaagtttgctgattatgtagcaagcatatttgttcctacggttgtttctttagcattattgacactattgggttggtatgttgctgggtctattggagcttacccagaataatggctgccagaaaatggaaatcactttgttcttgccctaatgttcgcaatatct

SEQ ID NO: 38159 - DNA, 351 bp, Glycine max
cccactcttcctcccacgcgtccgggaaagaataaattggagagagcaagagaactagttgaaaatgcagttgaatcggccccagctgatcaagtgaaaccactttacctgcaatatgccaagctggaggaggactatggactagcgaagcgagctatgaaggtttatgatcaagcaactaaggctgttcctaacaatgagaagttaagcatgtatgaaatatatattgctcgtgcagctgagatatttggtgtacccaaaacatgggagatctatgaacaagcaattgaatctggtcttccagacaaggatgtcaaaaccatgtgtttgaagtatgctgagttggaaaaa

SEQ ID NO: 38160 - DNA, 426 bp, Glycine max
cttaactagcataaaaatcacgtttgcaattctgcgtgttctttccccacccttcattatacgtacgagattcatccacccaccctctagctaccaataaaattgttcactttcactaattaattttatagtatggaaattgaagagcaaacgatgaaaatgatgatgaagtcgtcgtctaggttcagacgtatctgtgttttctgtggcaccagccctggcaagaaccccagctaccaactcgctgccatccaactcgccaaacaacttgtggagaggaacatcgacttggtttatggaagagggagcattgggttgatgggtttaatctcacaagttgtgtttgatggtggacgccacgtgttaggggtgattccaacaactcttatgccaagaaaggtatttttattttattctatttttcat

SEQ ID NO: 38161 - DNA, 418 bp, Glycine max
cccactcgtcctcccacgcgtccgaccttctatacttgttccttttgaaggttagaaggggcggaatacaaacaatggcagctactcatgaagatgtgaagcttttgggtattgtgggaagcccatttgtgtgcatggtccagattgcccttaagttgaagggagttgaatacaaatttttggaagaaaatttgggcaacaagagtgatttgcttctcaaatacaaccctgttcacaagaaggttccagtgtttgttcacaatgagcatcccatagcagagtctcttgtgattgctgaatacattgatgagacatggaagaacaaccccatcttaccttctgatccttaccaaagaaccttggctcgtttctggtccaaattcattgatgataagattgtgggtgctgtatcgaaatc

SEQ ID NO: 38162 - DNA, 369 bp, Glycine max
tccactcgttcggtgtatttacctacctataccttcaagatgcagatcttagtcaagacccttaggggcaagaccatcacccttgaggtggaaagctctgacaccatcaacaacgtcaaggccaagatccaggacatggaaggaatccccccggaccagcaacgtctcattttcgccggaaagcaacttgaggacagtcgtacccttgctgactacaacattcataaggagagtactcttcactctcgtctccgactgcgaagtggcatgcagatcttcgctaagacactcaccggcaagaccataaccctagagggtgaaagcttcgactccatcgataacgtcaaggccaagattcaggacaaggaa

SEQ ID NO: 38163 - DNA, 357 bp, Glycine max
acatggcgtaggtcgagttccaagatcagacgcctggtgtgatggtactcaatctccgatggacacacgcactcgaagcatgtgggtgatgcgcataggctctggctgcactctgctgtgcaaaggcacatgttgttagagaaagaatactaaaatgagtcgcggaagaagaaaacgagctcgctaagggaagagtgcaagcagtaatcttagacatgagcaaccgtgatgaatggtgatacttctgggattctaatactggaggaactgcacatgaggtagctgtcgcgtggcatacaattggctatggtgaaccctaggtagctagtgattcacaagcttcaagtggcacatttt

SEQ ID NO: 38164 - DNA, 386 bp, Glycine max
gctatacttgttccttttgaaggttagaagtgctacaatacaaacaatggcagctactcaggaagatgtgaagcttttgggtattgtgggaagcccatttgtgtgcaaggtccagattgcccttaagttgaagggagttgaatacaaatttttggaagaaaatttgggcaacaagagtgatttgcttctcaaatacaaccctgttcacaagaaggttccagtgtttgttcacaatgagcagcccataccaaagtcttttgggattgttgaatacattgataagacatggaagaccaaccctattttactttctgatccttaccaaagagctttggttcgtttttggtccaaattcattgatgataagggaactcaacatttcaaaa

SEQ ID NO: 38165 - DNA, 442 bp, Glycine max
cccacgcgtccgattctatgtatgtagattgattgctaagtacagaccaattatgcctgtgatatccgttgtcattcctcaactgaagacaaatcaacttcgatggacattcaccggtgcttttgaggctaggcaatctcttattgtgaggggtctttttcctatgctggcaaatccactacacccggtaagaattgctcaacatggattgatataatgatggatccaaataacatcacaaaaattcattatataaaaatcacagaacatataacgtacgtaaggtgtattaggcaaatcaaataaacataattttactagcataatgctaattcaaccagaaataatatattccaaggcccaagacaattacattttaagccctaattaacattaaaatccctatttcccggattgaaacctgccataaaatcaattaaat

SEQ ID NO: 38166 - DNA, 413 bp, Glycine max
  unsure (1)..(413): unsure at all n locations
ctttgggtggatacatttcttccaatagaaagcagattgaagctgcttcagccgaagccactattgaagctacggcccaaggcattgcctcagtgctttgcgctcatggtccagaggtagagtggagaatttgtaccatttgggaagctgcttatgggttgattccattaaattcctcagctgttgatcttccagaaattgttgttgcaacaccacttcaacctcccatactctcatggaatttgtacatacccctactcaaggttctggaatatcttcctcgtggtagtccgtctgaagcatgtctcatgaaaatatntgttgctacagtggaagctattcttcagaggacatttccagctgagtccactagtgatcacaagaatanaaacaggatactattgtgtggggtc

SEQ ID NO: 38167 - DNA, 295 bp, Glycine max
ctttcaagatgcagatcttcgtcaagacccttaccggaaagaccatcacccttgatgtgggaagctcttacaccatcgacaacgttaaggccaagatccatgacatggaaggaattcccccagatcagcaacgttttatatttgccagaaagcctctcgaggactgtcgtactctctcctactacaacatccagaaggagtcaacccttcaccttgtacttcgtattccgagctgcatgcagatcattatcaagactctcactggcaaaaccataacactagaagtcgaaagctc

SEQ ID NO: 38168 - DNA, 443 bp, Glycine max
ataagcacaagagtagctgggacttatggatatatggctccagaatatgcaatgcatggggatttgacagacaaagctgatgtctatagttttggagttgttgccttggaaattgtatctggaaagagcaataccatccaccgatccaagcaagaagcattgcatcttctagattgggcacatttattgaaagagaagggtaacctaatggagctagttgatagaaggttaggttcagatttcaatgaaaatgaggtaatgatgatgatcaaagtggcgctcctatgcaccaataccacttcaaaccttaggcccaccatgtcatcggtgcttagtatgctagaaggaaaaactatgattccagaatttgtttcagatccatctgagataatggatgaaatgaagttagaggcaatgcgacaacattactttcaaaaagaaaa

SEQ ID NO: 38169 - DNA, 415 bp, Glycine max
gtgatacttgctattaacgatttcttggccctgatattttctttaatcctgatatatagggcatgtgactttaccacccctttgtcagttgtaataaacaagtgcattcagtctgcgccaattgacacatggagatcattatacaataatgtactgtagtctggaggttcaaccatgttcaaggatattcacaggaagttgcaacgttatctaaaaaaaatagagaatgctcgtgtccttttatctgaagcgcgcttgaatggtgagataaaatctcagccagcatatgtcaatgtactcatcaatccaatccagagatattcagtttggcttggaagatcagtacttgcgtcaacacctgatttttttactgcttgtcatacaaaggcagaatattaagagtatggagcaagca

SEQ ID NO: 38170 - DNA, 357 bp, Glycine max
aagccccataacattctactagatgaaaacttcaccccaaaggtctctgactttggattggcaaaattatatccaatagataatagcattgtcccaaggacagcagcatgaggaacaattggatatatggctccagaattgttttataataatattgggggaatatcccataaggctgatgtttatagctatggaatgttgttgatggagatggcaagcaagaggaaaaatctaaatccccatgcagagcgttcaagtcaacttttctttcccttacggatttataatcatattggagatgaggaaagatatagaaatggaagatgtcacagatgatggaaaagaaaatgattatag

SEQ ID NO: 38171 - DNA, 353 bp, Glycine max
agccccgctacgttggacgtgcgcgattcttcgtcaactttaacacaccgtttacagtctcaacggatacgatcaggattcgggaccgtgccgacgtgcaacgggtccgtcatatgcgaagatctacaagaacaagtcatgctcttcgaatcgttcgcatacaacattaatcactgcatactcctgcaacttacagcagatggtgcagcatgtaaccggcctgcggctcgtaagcacaccagaaataccggaccctgaggttgaacatcgagacatactcctgaggctcacaatcgttgtactcgtaaaacaaggatcatcgatcttacgtacaatgcatctaataacgagct

SEQ ID NO: 38172 - DNA, 263 bp, Glycine max
cacaaagtcacaatggacctcctatatctcttctgcaccggagccctgctcgcccgccgcccgtactggttcgaaggcggtataggccccatccaaccaaaaggccaaccccccaaccatcttttcggcgggttcattttcggccagaaaagtcaagaccacttccaacaagaccggtccttctttcggcgcccaaaagagatccagaccgccgacaaaattcccgactttttcgacaccttctacaaactagtcacagacat

SEQ ID NO: 38173 - DNA, 237 bp, Glycine max
cttgcggctagggttatagcgcagcttcttatatgtttaaggaagatgggtaaggaaaaggttcacatcagtattgcggtcattaggacatgtcgaagatgggatatccactaccactggtcacctgatttacaagcttggaggcattggacaagcgtgtaattgaaaggtttgagaaggaacctgctcagatgaacaagaggcctttcaaggatgcctgggtcctgaacaaactta

SEQ ID NO: 38174 - DNA, 313 bp, Glycine max
actctcgtataaccgcttgataatcgcatagatgtcttcttacttcgaatccacaatacggcggattgatgaaaccatcgtggggttctgtgcatacacagtaacctagataggaactcttcgtatagtatcagtatatcattggatgtgctaattgctcttgcctattattctataaccacgctgctgatgaattttaagcatatggctgctcgctttccatatagatggatgcttattcagtttgttgctatgattgctctgtctagagcaactcatttcataaacctgagtacattctagatacactcta

SEQ ID NO: 38175 - DNA, 345 bp, Glycine max
cccacgcgtccgcccacgcgtccgcccacgcgtccgggcggtgatgcatgagatgataaggaaggaggtgaggagttacatggaatggaatgatggaaagtgatatttcattcaattttttaaatcctaccctttcctttttctccatctaacccctcatttttatgtcttttccaaactaaatagaccctgaagcacaggataatccaaagaggttcagaacacaagccaaagaaatttcaaatttgccatgaaatttcactttccatcattccattccatgctactactcttgtcttctctcgtctcgttcccactgtacactatccaatattattattacct

SEQ ID NO: 38176 - DNA, 412 bp, Glycine max
cccggctgtatttctgctattgggggaaggaatcagaatgagtggcaccaacttagtcttaaactttagctgaatctcagttggtgaggcttaagactaattgtgattgattggtgtgaaaaggaggaaaggaaagagtgactttttttttaatattttggatcctaaattttagaagctgcatttgatctttgtatttcggagctatcaagatgggagggcaatccatcaagatgtttagtgttgaatccccaacaccaattaaaatgggtactcattctctgtatgctgctgacttgagctcctatgaagctgcatgtgttaacgatccaaacttgcaatcctttgatgtgagcattcaggagcataccaataaggtgattagttccctacctcatggggttgaggttag

SEQ ID NO: 38177 - DNA, 332 bp, Glycine max
aagaattttgtcaatcttattggatactgtgaagaagaggatcctttcaccagagtgttgggtgttgaatatgccccaaacggaacactatttgagcatttacacataaaagaggctgagcacttggattggggaacaagacttagagttgcaacgggtatggcttattgcctgcaacatatgcaccagttggaccctcctatgacccttatcaagctgaattcttcagccgtttacctcaccaatgactacgctgccaagctttcagatttaagtttctccaatgacataacctcagctgaggcaagagccattgacatgccaatagcaac

SEQ ID NO: 38178 - DNA, 264 bp, Glycine max
cccacgcgtccggtttaccgagtcttttcgaacgtgtgacacggtttatttggtggtactgcagcttgaccagtgtgggcgctgtttgcctgattatgtagtagtttctactttggcacagtcgccaaggcatttatctagtttatctactctatccctcagtggtgcatgccgactttcagatggaggtttgcgtgcacttgtttcttctgctccggcacttagatccataaatctcagccagtgttccctttttacatcttc

SEQ ID NO: 38179 - DNA, 464 bp, Glycine max
aacaacaatggacctccgtgaatcgataagcaaccaaaccgacgtggccctgagcatctcagagctcctgttgtcgagagaagctcgggacaagaacctcgtgtattcgccgctgtcgttgcacgttgttctgagcatcatcgccgctggctccaagggccccacactcgatcagcttctctccttcctccgatccaaatccaccgatcatctcaactccttcgcctctcagctcttcgccgtcgtgctctccgacgcctctcccgccggcgggcctcgcctctacttcgccgacggcgtgtgggttgagcaatccctctcgcttctcccttccttcaaacaacttgtcagtgctgattacaaggccactttggcttcagttgatttccagaccaagccttgctgctgaccacaaaatatggaaaacattcaagtgtcatctttgtagtcattaccaatttaaa

SEQ ID NO: 38180 - DNA, 453 bp, Glycine max
tgtgcctgaagtttcattctttcaacaacagcaagttcagaaatcattggagcgtattctgtgcacatgggcaattcgacatcctgcaagtggatatgttcaggggataaatgatcttgttacgccatttttagttgttttcctatcagaatacttggaagggggcatagataattggtcaatgtctgatttatcttcagatgaaatctctaatgtagaggctgactgctattggtgcttgtcaaagttgcttgacagtatgcaagaccattatacatttgctcaaccaggaattcaaaggcttgtttttaagttgaaggaattggtcaggaggattgacggtaacttttttctcaggcctgttgtttttcttcaagtatatctataattgcatgaatttaaagaccccacttttgaatatggatttggatatgcattaattttaccgaacct

SEQ ID NO: 38181 - DNA, 413 bp, Glycine max
ctcgacaacttggtgctcaccgacgccgatggccagggggtactttacatgaacagggagcagctcgaggagctgagggtgaagccgctctcggcctcgtcggcgtcgaagaggactctcgttccggcgcttaacatgaggctgtggtacgcgccgcacttggaattaccaactggggttgtgttgaagggtgccactcttgttgctattaggcccagcgagctatcccccaatactgcgaagaaggaggcgtcggatttgtcgtcggtttcgacggcgtttgaggagccgtataggacggctgctacaatgcttgtcaagaggaggacttattgccttgagatgaactcattctgatgcgtttgtgaggtatatacaaattgaaccctcattgtttgaatgtatgccatttt

SEQ ID NO: 38182 - DNA, 441 bp, Glycine max
cacaccatcacttccttcccgctttccacgaaccttcttcttcttctctctgtcacattttgaatctcttattttcatgcctcacaatcattcacctcttcttcacgctctctgcttccttactcctcttccggagtaggctgtgagattttgaggttcatgaagaagctatttactgtcctgtgacggttgcgcgacactgatttgttgaattctaccttgcttttgaactaggctacaatcatgaattttcagcaagacaaatttgttagatttcgggattggagttcagacaggggctccgagaccaactctcctgcaattcacgtgacacgctcgggaagagttaagaatacactaaattcagtttccgagaagtttcaaaggggtttggaatctagttcggaggggataaagagatttagaaaatcattcaagtct

SEQ ID NO: 38183 - DNA, 271 bp, Glycine max
ttttaatataaggattgatagtttatagtatatgatgtgattcaaaaaaaaaaaggattgccttatgtagcaggcgaagacaaatggtagattatacaatgtgcatggaagggcttatatacttcatataacgtagataaatgagaccttattgaaatgatgattatcaacacacataaagaaacttataatatgagttctagttaccacattgtaatgtttatagaatgagatgagaattccattattatgatgatctattttgttactt

SEQ ID NO: 38184 - DNA, 399 bp, Glycine max
gctggtttcaaaccagatgatcccacgtacaccatggttattgattgcttttgtaagaagggtgatgttaagatggggttcaagttactcaaggagatgcaaagcgatggacatgtaccgggagttgtcacgtataatgcactaatgaatggactgtgcaagcaaggtcagatgaaaaatgctaaaatgctgttagatgcaatgcttaatgtgggggtggctccaaatgatattacatataacattttactagacggtcatagcaagcatggaagctctgttgatgttgacatatttaattctgagaaaggacttgttacagattatgcttcatatacagcacttgttaatgaatcaagtaaaacttcaaaagatcacctaaagagatgattgctactg

SEQ ID NO: 38185 - DNA, 375 bp, Glycine max
ccactcgttcgcccacgcgttcgcccacgcgtccgcccacgcgtccgattcaggcgtgagtgctttccctagttgtcttagattccctccactgatcgcaatttcaacaacaccctcttcgatccgctttctaaattctccacccctccgttccactgcttcgtcgcaacacgttacaataatggcttcgaagaattctcaacaagacacgcgcttagcgagaatcgcctctgcaatccgagtcatccccgacttttctaagccaggaattttgttttaagacataaccactctgcttcttgatacaaagggcttcaaagacaccattgacttgtttgttgagaggtacaaagatcaaaacatcaatgttgtctc

SEQ ID NO: 38186 - DNA, 395 bp, Glycine max
aacgggtcaaattaagactggagctccatgcaggtcagagcgtcttgctaaatacaaaagcttcattgtctggactactttctcgattccctttgtccccaatttcagcaatggacgacattctccccgacgaagaatagttcggttgattcttcaaccttctcgaactagaaaattttgcatcttcgatactgttattaacagcccccaaagtccccatgcctctcacaccagcatacactgccaattaagctttcataacatcattatggcaacccatacataaacccattcacgccctaaacaaacatgaagcctaatagtaacccccaaaataattagtctttttttttttatctctaagttgacaacataattgtactaccctacagctc

SEQ ID NO: 38187 - DNA, 418 bp, Glycine max
cccacgcgtccgggagggtgtaggtttggttgatttgattgttgtgcatccatcgttaagctagtggcgatcggatccagctacagcatagagatcaaggaaggaaggaaggaagatgttgggtgttataaggcacaaggtactgtctcaagtctctagtctgattcctattccatatgatttattttattttatttgcagagtattcgccctgccttctccgcaatcagacacttgtcttctgcagctaaagagattactgtcagggaggctctgaactccgcactcgatgaggaaatgtcagctgatcctaaagtgttcttgatgggtgaagaggttggggaatatcagggtgcatacaagatatccaaggggctgctcgacaagtatggccccgagagggttctcgatacttcaa

SEQ ID NO: 38188 - DNA, 406 bp, Glycine max
  unsure (1)..(406): unsure at all n locations
nccacgcgtccataagtctttggttggtacatcttcaatggctgaatcaaactcggagccttgtattctggaccagccagctagacctgccaatgaatgtctttcaaagttatactgtcctgctacaaaattccccgcattatgtgaaaatgataatctgtatgatgatttcaacatggatgaagtggatctaaatcttgtgaactatgaagaactttttggtatggccctcagtcattctgaagagctatttgaaaatggtggaattgatagcttgtttgggacaaaagacatgtctgctggagatttcagttgtgaggatgctattgctgctgaggctgtttgcattggaatgtgattcctgggctacactgctgtaatatgaatgcattgcgttattcatata

SEQ ID NO: 38189 - DNA, 351 bp, Glycine max
gtcgggataaggaggttgacggagggggagtggatcgatacgatgccgtgttggtcgccgaaaggggatttgatagcgtggtgatcgaacaggcatgaccctaagaatagtgaggtgtttgggatatatttggtggggccaaatgggagtgggttgaggagggttgaggtggcaaagggggtcgaaggaatgaaagagaggttgaaccacgtgtgcttcagccgcgacggagagtggttgctgttcacggagaacttggttggcgtgagtgcggagccggtggtgctgccgaaccagtttcagccgtatggtgatttgtatgtggtgaggttggatgggagtgggttgagg

SEQ ID NO: 38190 - DNA, 375 bp, Glycine max
ctgcagtttcgactcagagcgtccctttcacttctcagcagcttctgctcaggctcagaaacgaaaaagggttcggtgttctgttcgcgaggagaccaaagtcgaggggaagccttttaagaagtttgaaaagaaatccccaaagaataaaccgaaattcaagttattcggttaaactaagttggatctggtggttttaacatttgttaatgtggccaattggacccccagattgttatggcacttggttctcctttttgatggtttggacattttggtggattcaagttatttaaggtcgtcttatgttattatcttaaaaccatgtgtggaatggttttggtattaacattatctcctattttgcgtttcttg

SEQ ID NO: 38191 - DNA, 469 bp, Glycine max
cccacgcgtccgacaagatgcagtttatataggtgagatactcaagtctgttcagatggtcacgggggtgatggaagcccttgtcaaaagagttttattggcagaatcagaaactacttttgagaaggaaaaagtgagtttaggtcaggaagaaattatgcgaaagtctgctcagttagagaatatgtccatgaaattggaggagatggagcgttttgctttgggtacaaatggtattttgaatgacatgcggcaaaaagttgcagatttggtggaagaaacaactagacagagacagcgtgctgctgaaaatgaagaagagctttctagagtgaaacgggagtttgagtctctaaagtcatatgttagtagtctaatcacagttagagaaaccttactttcttcagagaagcaattccaaactattgagaagcttgttgagcggttagttggaaagactacccaattg

SEQ ID NO: 38192 - DNA, 449 bp, Glycine max
gctcgtataggccattcatctcacataggaccactagacaatctttagatcaaagcgctattgaacatgcatgtgggaacaacaacatactgcagggtgtgacatacatatgttccatgaaaagaataaacgtcgcaagaactgaccactaggaatcttatctatgtgcataggtactggaaagagtacagctgactgatttgagagtactgattgcactgatgaactatgcaatgcccctaaagtgtataaccttaatttatccaatgacgctcgcttgaaatagatacttcatactcactatatatggtcatcaaattagaaatcacaataaaatctttctctatggaagtgacaatggcaaccactactcaagcgattaatcctttctacacattagacttgcattcatttctgatatatccatgacaattgcaaacatacactta

SEQ ID NO: 38193 - DNA, 432 bp, Glycine max
attagatgtaaccattttgctccctctttactttgtagctgctgaaatgttctcagggtgatataagactaatgggttctggtcatgcatatgaagtatgttggagtcagaagttaaagctagttgctgttgttgtttagttctccactagtcctggttactattataacttttggggaggtttggcaaaatttgaaatttgaggtacaaagcttctggactggacacgaatgtgctggctggagctagatgtgtctctggagtttgggctgcacagggtccaatgcgattggtagtcaataccgtgatggctagaagttttgagagaagtatggaagctggcacattgggaatgattggtcataaacgttttatgagtgacatcccaagtaaaaccagtgagacaaacctatctggttttcgttcgctatc

SEQ ID NO: 38194 - DNA, 302 bp, Glycine max
cggacgcatgctctatctaaaatgactcaatgtttcactccggacttaattacgttattagggtatggtgaccagttggagatattctatacttgtactgaaaaatatggcaggaaaagaagatgacgttagacttagagccaacaggtaccgtgagaggcagccaatatggaccgttgttcaagctaaagacttcatagtgccaccgttggagcctctcttcaaaccgggagagttgtcatcgtggtctttctattagactggcatagcacagtttgtggccactttcttgtatctctaca

SEQ ID NO: 38195 - DNA, 472 bp, Glycine max
  unsure (1)..(472): unsure at all n locations
cttgttggtattgatcgtaagaagcgagagctcacaaattggctaacagaaaaggagggtccagtgaaggtggtggttggcccaggagggataggtaaaacggcaattgtgaagaatgtgtacaacatgcaagagcaggtaagccttcagaagaagggaacaagctatttcgagttttgtgcatggataaccatgtctgggcctcaagttgatgatcataatatgctgataataaggcagattatagaaaatatactcgagaaggaccccggtgcatcagctacattgcagaaggaaacaacagctatacactctcttataagaaaagtaagagaatacttaaaagataagaggtacctcattgtgtttgatgatgtgcatagttcaaaattttggaatgttatcaagcatgccctaactccanacagaagcaaaagcagtaaggttattatcactacacgagatgaaaatg

SEQ ID NO: 38196 - DNA, 366 bp, Glycine max
acacgaccatgctcagatttcatacactcatgcttggaatgccatggatagtaccaaatttgagaatgttagtgcccctgccattgatatcgactactggaggcttgacaaggatgcaactctcaaggatgatggcactgtgattagcgctgatgaggctcatcacagggatgttaaccactatgcttctgacattcatcatcaagggaaggaattaaaagaggctcctgctactattggttatcactgagtcattgttgtaaattttttaacaaatctaaaatctaacctttgctggctcatagaccttctagctatttagaccataatgattcaataaaatttatttctattgagcactttaaa

SEQ ID NO: 38197 - DNA, 470 bp, Glycine max
attgactcttctgttcgggaactcttttttctctcaacctcactcttcgggatagatgaatggaagaacactcttgagaaccgtcatccccaaaccacaacaacaccaccaccattgtcgtggtttctcaacatacgacataggaacatgcatttccaccctccaatcatgtgcgcacaatgcaaacctctccaaaggcaaggaacttcacacccacttgctcaaaaacgcgttcttcaaatcccccatcgccatcaccaacctcatcaacatgtactccaagtgctccctcatcaaccattccctcagagtcttcaacttccccacccatcacaacaaaaacatctttgcctacaacgcgctcatcgctggcttccttgcaaacgcgtttccccaacgtgcccttgctcttgataaccaaatgaggcatctaggtattgctcttgacaagttcactttcccgtgtgtca

SEQ ID NO: 38198 - DNA, 399 bp, Glycine max
cggacgcgtgggcggacgcttgggccaagtgctacagacaccaacaacgctgtagctctctcggctctgtgtcaccggcaccggggatctacatctgaacccgatccagccaatagatctcagaaatccaaatggagaacctaatctctttggtcaacaaaatccagagagcttgcaccgccttatgcgaccacggagaaaacagtgcactccccacactatgggactctcttcccgccatcgccgtcgtcggaggccaggtctcacctccgatccctctctcttactctcttctcttttcatctcataacgattcatatcgaaatctgtatgtctcactgtcagagctcaagaaagtccttcgtcttggaaagcgttgtctgcaaagatttcttaacc

SEQ ID NO: 38199 - DNA, 457 bp, Glycine max
tccacgcgtccgatcacgcgtccgagcagcttgcgcccatgcgtccggtggaatacaacatatcagatgctggtggcagcttgtgaactacgggaagtgttttcttgtttggacacttatgatcctgattacaagggtgccccatctatgcaggattggaagctggttgagaccctgtgcacatacttgaagcccctttttgatgcagcaaacattctgaccacagcaactcatcccactgttattaccttctttcatgaaatttggaaattgcagttggatctgtctcgtgctgttgtgagtgaggatcctatgatcagcaaccttactaaacccatgcgacataagattgataagtactggagagattgcaggtttggtttggctattgcaactagttaatggatcccctttttgtttcaagatgaagcttggtgagtttaagttcactaaaatc

SEQ ID NO: 38200 - DNA, 439 bp, Glycine max
gaaatcatacattcaggaaggttatcttcactccaccaaagaagaattagcaagaagggtaggaattacagtataggagttgggcaatttgctatttgcttcaagaaatccaatttcgatgcagcaaactttgtgggtggaccaagatacaactttccaggagattactgcagactcagcaattgagatcccaggtgtgactgtctcaaaacagctaatgaggaggcacgtgcacaacctcctaaatatcttaagcccaaaagaaaagggcataatcaggctaagatttggtattgaggatggcaaggagaaaacattgtcagatattggcaaggtgtttggtttgaccaaggatagagtcctacagttggagtgccgagctttgtctaagcttcaagcagtggtttccctcgaaagtcaaggacttgatgcatacata

SEQ ID NO: 38201 - DNA, 360 bp, Glycine max
tccactcgtccgatcagagcctacagacacgttaaccctttcaatcccttgcacaaagggacggtaactgggcccttgcatacgggtacttcagtggaaaactttcagagaggaacttcaatcataaaatctcacggagggaatatcctaacaagtgtatctggattatagccaacatgaaaattcttacaaccaacaattgtcgatatttctgccgatgctcctgtagataaccaataattgtttactccagttctgaatgttatgaaattacagactctatactaagcatatgcctttaacaattctgtacctcatggattacataagtcacatctttacccaaatacctggaactat

SEQ ID NO: 38202 - DNA, 376 bp, Glycine max
cttacgcaccattgcctgaatgttgatgatttcgaatagatgctggaaactaacagattgtgggtgaccattcagggggatctggagaggatcattctattcggcctagaataaaggtgattgtatattcgatgccataaggtgagatacttactgctgttgccaatttaacagatgcacaaactgaactcatagatgcctaataggacgacgattctgaactatcagtaggacctgcaccaccagctatagactctgatgcagaattatctaatgaatctcaacgccttgaagatgcaaccagtatcatagaagctgaggcaaacagacaccatgatgttcttggagctaaccataatatgaccaatgacaacat

SEQ ID NO: 38203 - DNA, 267 bp, Glycine max
gttacacccagtcgcctgcatcttggtggttagagttcgtgtattggtaccctgctaactggtaggggatatagacgctggactgaactatctgttaaagctcattctttgaatggtcaacagtgtatacattgtatgttaattgtacgagatggttgtgttacaatcacaaaatgggaaagtatcacaatgtcgtttgatcatgcttaaaatgccgaggaagaataggatgattattcaattgactacgatggaaatgatcttgat

SEQ ID NO: 38204 - DNA, 401 bp, Glycine max
gcggccgagagctctttgagaaaatctgcagtgctgggcgttctacctaggatgaggctccatggttctgggatcatctcatatctggggtcagctattgacatgctatgcacggatgtcatcaggacttcaagcttgaaaacactttgctggatggaatcccggcacctagtttaaagatatgctattatacgtactcccagtcttcactgcttcattcacaaccaaagtcaactgtgggaactactgcatatattgctccagaacaattgctgatacaagagtatgatggccagcttgcaaatgtctggtcatgcagggtaaccatatatgtgatgctagagggatcatatcctttttcagatcctaatgaacccacagactttctcaagacaattcat

SEQ ID NO: 38205 - DNA, 411 bp, Glycine max
gttgttgttggatatgaatgaattctgagttcaagagactcacaacatgaagcatatacggtcgaaattggaagagatgagggtatgaatgattacaaaggacgagaaggagaacgtagcgttgctgttgatcggaagcgattcactgaaaagcaataaccttgttctttcacaaggaccataatataccaacatcatcgtcgatctgcttccctcgctaacactgactactaggaatctgaaacagatgtaaaattatctgatgttagtgttcaataatgtgatgacacatattggatcatatgggtttgcaatttgagaggtaatgaatggttttgcgtaattaatgatgatgtcatgcaagtatgatttcaacctctgtggattaagtagtcaagtgccttactatga

SEQ ID NO: 38206 - DNA, 232 bp, Glycine max
ctgctattatcactgtggctataacttacttacaacttgcagctgaggatcatgaatagtggtcggggtcttttctttgtggaggatcaactggcttggtcatctactgctattgctagtaatactactattcacaatcagatatgcatgatattaattcaaacttcgttcttctacaggtacattgtcattatctgctatagtttctttattatgctttgttaattatgtt

SEQ ID NO: 38207 - DNA, 345 bp, Glycine max
cgtcacgcctcccgtcctgcatgcatgcgctctattttgcagcttcttaaaaatgcgttatggaactatgggtgtgcatatcatgaatgcttttatgtaacagccaaatgtgtttctcaactcgtagtaaactgataatggaaagagacccgggtatgggtgtgaacactcttatggaaatccactgggcttggctttaatacttccagggaagccatccaatgaacctacattgactagatgtgtcatttaagtgtctatgataccattcgtggccgcatcttggctataacatttcacagtgctaagatgaacatgactattattggtaggaagaattatctt

SEQ ID NO: 38208 - DNA, 482 bp, Glycine max
caactgagttgagaggtccggttaactacaagtatacagatttgaaagctgcaacaaaaaatttcagtgttgaaaataaacttggagaaggaggatttggtgctgtatacaaggggatacacagcacctgagtatgcaatgcaaggccaattgtcagagaaggctgatacctacagttatggtattgtggtcctagaaatcataagtggtcaaaagagtaccaatgttaagattgatgatgagggtcgtgagtaccttcttcaacgagcatggaaactgtacgagagaggcatgcaattggagcttgtggacaaggacatagaccctaatgaatatgatgctgaagaagtgaagaaaatcatagaaattgctttattgtgcactcaagcatctgctgcaacaggccaacaatgtcagaattagtagtgctactcaaaagcaagagcttagtggagcaactgcgaccaactatgcctgtgttt

SEQ ID NO: 38209 - DNA, 388 bp, Glycine max
accacgcgtgcgagatgctcaagctctattcttaaccattggcaaactgctgatcagtgggcgatagattcttagccacgctgcgcttgcaattcattatgatactgggatcaactgcgcactgtctcaggaccagatattaatccagtccgtgcaaggatgactgaatgttattacatgtgtggacgcgacttctgtgaagatgacagagagttcagacagactgaaccttgatatgcacatctgactcatttctgcatgagaactgctcattgtaatgtcccgtacatggaattagactgatatttaggaaccccatttcgtattaaaactctggtggatgtgccgagactctagctggatgtacattctatggttatgcgaggca

SEQ ID NO: 38210 - DNA, 272 bp, Glycine max
ggcacgcgtacgaaagttaatcattctggttctactagtcttatctcttctagttgtgaactggggagaactatagcgcccgcgtgacaaacatgccctactgcaaatcttgatagatcttggaaactcgaccactcttttctcatggcttctaaccacttattgctgcaacatatcatggctaggtgtttcatgctactctggcacccatacatattgagtcaacgactactaccttgactagcataaccttctctaaccccactctattt

SEQ ID NO: 38211 - DNA, 386 bp, Glycine max
gataatcctacgtatttgtgaatagtgctgtactggctcgaagtcaggaggaggtgacccggattgtagctactggaaggccatttgagtgcatggatcatattgcccttaagggaaagggaggtcaatacagatatgcataataatatcctgacgtacaactagcacctgctcttcaaatgctacccatttcacaagaaggatacacagtttattcacaatgagaagcccataaagaactttgttttaatgggtcaatacaatgatatatcatgtaatatcaaccccattttgaattgtgatacttaccccataggctaaaattttttctgggccaaattcattgttcataaggaatttggtgctccatttaaattcgtttttac

SEQ ID NO: 38212 - DNA, 391 bp, Glycine max
acgcagacgaaagagaccgaaggctacagcgagtttaaagctacagacggtgcgtccgcggccactgccaacgcaattaacatgatgtagtatgtgcaccggatgtcacctggttcgttgtgggcccacagaggacactctcccggtcaaacacttgactctatcgaggttcatgacgtgcatcatgacttgtgctaatactcattacatagcacccttggacgtgatcgacaacattcacatggagacacctcttccgtacttcttgcactcgtaagctggtactacaaagatgtccatctacgaggtctcaaatgcatgttgaacaatataatgaacagactttcagacatacgttacattgactcaagttcaagataccgatactcat

SEQ ID NO: 38213 - DNA, 377 bp, Glycine max
ttcagttcagccctgtttagagctgtctgctaagtagcgaaggctatcgactctttgatgggcgcgctcatacaaatgaattgggaaagtgtatacatttgtttcaaggacattgagctgtaatattatgatctgcaattatcaagtacgatctatcactatttgtggatgactacatatactgtttgtccgagactaccgaacttctgctgggaatccagaagcaaccatgttttgaaaaagcatccttgatgtcattcttaaacaatttagacatatgttataataagatactgaagctaccacttaatgtattcgactgtttcggataatacctaccattttcaacagggaaacgtgacaatttatcattctta

SEQ ID NO: 38214 - DNA, 282 bp, Glycine max
acgcttccgtatcgttgagaaatatagggaaaaattggattcgctgaaactgcacaagctgctgggcacaaacgttctcaagtgtggcacatgaaatgtgttgcttgaccccaatgaagtctacgaaatctccatggccatatctcggccaaacattcggaaattcgttaaggatgggtttatcatcatgaagccttccactatttacttacgctcgcgtgctagtacgatgaaagacgcacctaacaaaggtcggcactctggttatggttagataaatgg

SEQ ID NO: 38215 - DNA, 347 bp, Glycine max
gtgcagcttcattgagaaatcaggggaaaatatgctgtttcagaaactgcagaagctgctggccgcaagcgtgctcaagcgtggcacaggaaaggcgtggcattgaccccaatgaaatcaacgaaacctccatggccaattctacactaaacattaagaagtctgttaacgatgggtttatcatcaggaatccaaccaagattgactcacgctcgcgtgctcatacgatgaaggaggcaaagaagaagggccaacactctggttatggttcgagaaagggtacaagggaagcgagcattcccaccataatactgtggatgagaacgatgcatctgctcatgcggttg

SEQ ID NO: 38216 - DNA, 400 bp, Glycine max
cccacgcgttcggtccaataatactgaaattatgctcacaaaggttaagatgccacttcctgatattaaggctgcagtactggctatggatgattcagtgttagatgttgatcatgtggaaaatctcattaaattttgtcctaccaaagaggaaatagagcttttaaagggatacaccggtgataaggagaatttggggaagtgtgaaaagtattttttggaggtgatgaaagtgccaatagtggagtcaaaattcagatgtttctctttcaagattcactttaggactcacaattcagagttttaagaagagcttaaacacagtgaactctgcctgtgaagaagtcccaaacttattcaaactgaatgagattttaatgaaattctttatttgtgtata

SEQ ID NO: 38217 - DNA, 439 bp, Glycine max
accacgcgttcgcccacgcgtacgaccacgctttcgctcacgcgttcgaccacgcgtccgttgtttgttgttgatactcgttcttcttcttttgttgttctgtgtttgtgtttgtttttcatctcacctgacaatgtcttgctgctgtggttactgtggttgctgaagctcctgcaagtgcggtaacagctgccgaggctgcaagatgtacccagacttgagctacactgagtcaaccaccacctggaccttggtcatgggagtggcacctgttaaggctcaatttgagggtgctgaaatgggtgtgcccgctgagaacgattgctgcaaatgtggaccaaactgctactgcaacccttgcacttgcaagtgacgtattgtgagatcaagctatacgcatagatagcccttaattaggaataatgagtatctattaatg

SEQ ID NO: 38218 - DNA, 390 bp, Glycine max
gcgtggatcacgcgaccacccttcagaggaagagtaccgtggatcttgactcatcatgcgggctcgcggtggcaccaaccgccgggtcagcactccaccggcgcatccgactccagatgcttccaccaagctcagttacaaatgctccgtttgcaacaagaagcttgccctctgtaccaagcgctcggtggacacaaggccagtcaccatagactcgctgactccggcgaccaagaccaacccaccatgacctacttcggcggcagcttcatcaacaccgactccagaggtaggacccacgaatgctacatctgccacaagtcctttctcaccagacaggccctctgcggacacagacgacgtcactacgaaggtaacagtaatggaaat

SEQ ID NO: 38219 - DNA, 384 bp, Glycine max
accgcataagagagaaacacataaatgctgataatcgatgctagcgcgaagacaattgctcgaacagtgtcgttggaggcgccaccattggggattagggttctgcctcggctctaccacgagagggtggtggaccactacgataacccccgcaacgttggatccttcgacaagaacgaccccaccgtcggaacgggtcttgtctgagcacccgcgtgtggtgacgtcatgaaactccagatttaagttgatgacaaaacggtgaagatcgtcaatgcttgctttataaccttcgggagtggatccgctatatgttgcttcttctaaactactgaatgggttaatgaaaagcaaatttatgaagtttttgaccattaaaaacac

SEQ ID NO: 38220 - DNA, 337 bp, Glycine max
gtaaacaaaatacgtttgaccggtggggaaccaactattagaaaagatattgaagacatatgtttggaactgtcgaccttgaagggactgaagacattgtcaatgacagtccaagtgatattgccctgagagagagaactttcaaagctgaaagaatgtgggcttaattctgtaaacattagtttagacactctagtaccagcaaagtttgagttgatgacaagacgcaaagggcatgaaaaagtaatggattcaattaatgcaaccatagaccttggatttaagccagttaagggcaatcgtgttgtaatgcgtggatttaatgatgatgaaatct

SEQ ID NO: 38221 - DNA, 422 bp, Glycine max
  unsure (1)..(422): unsure at all n locations
gatgaattgaacccaaatactaacgtggtttctcttcaccgattccctttatatacactttttcaattacagttacaggtaatggattaaacaattattagtcggttaataaacacactctctctctactaattctcatcgcattccttttcctctttctccttccaattgagaattcgtttctctaattgacgcanagttcacagtgaaattagtgcaatggaagcggatttcgtcaccagtgacatgctcacactcacgcaggacgctttttacgccaacgataatgatgatgtagctgttgaaggggaaagatgtggaatatgtatggatatggttattgacaggggacttctggattgctgtcagcactggttctgctttgtatgcattgacaactgggctactatcactaatctttg

SEQ ID NO: 38222 - DNA, 477 bp, Glycine max
cctttgatcactcttcttctcttgcggctagggttatagcgcagcttcttctagatttaaggaagatgggtaaggaaaaggttcacatcagtattgtggtcattggccatgtcgactctgggaaatccactaccactggtcacctgatttacaagcttggaggcattgacaagcgtgttattgagaggtttgagaaggaagctgctgagatgaacaagacgtctttcaagtatgcctgggtgctggacaaacttaaggctgagcgtgaaagaggaatcaccattgatattgctttgtggaagtttgaaacaacatagtattattgcacagttattgatgcgcctggacatagggatttcattaagaatatgattactgggacataccaagctgactgtgctgttcttatcattgattctaccactggtggctttgaagctggtatttccaaggattgacagactcttgaacatgctc

SEQ ID NO: 38223 - DNA, 301 bp, Glycine max
tttgctctctctctagaattattgaacactgtgtttatggcccatatttaggaagacatgagcgtgatatttactgcctatagaacatttatgtacctggtcatatagacctcaagttggcagatgatagtacacatatgttctagaaaattagacgaacataagtgacatgcttctgataagcaactcatttcacactaccgttacagagatgattcacaatgtgcaatccatagcatacatcatttgtgattgttgaatacattgatgatacatgggagaacaaacccattttggcttc

SEQ ID NO: 38224 - DNA, 447 bp, Glycine max
cttattctagggacaggaggagcagatgaactggcacccggttaccttaaactagcctatgacattatacacaaagctggaggagtctgcatagctgatgaagtgcaatgtgggtttgcgcgcacaggaagccatttttgcagattggagacacagggtgtgattcctgatatagttaccatggcaaaaggtcttggcaatggtttgccattagcagctgtacttacaactccagaaatagcaagcgtgatggcccaaaaccattaatataatacttttggagagaaccctgtatgttttgctgggggacttgctgagctcagagttcttgacaacgagaggcgtcaatgtcattgtgctgatgtagggtctcactcgattcagcgtctaaaatctatgatgcatgtacatgacattattggatatgtaagaggaagaagcttaatg

SEQ ID NO: 38225 - DNA, 447 bp, Glycine max
attgaaaggtgtgaagtaagggcgatgcgttcattgcggcacaatggtcaaagcataaaggggactatggaggctctgcagaagaatgtgatggatatgaccacgcatacctgagttcacggtatcgtacgatccagcttaaactgctcacgctgtgcactatattcagcatgtagctgagcatagaccatattgattcaactgatcaatgctaccaaggttattggtgggaatgcaaaagtattaaaggatacacaccaataggaaagataacattacgcaaccatatgagctaatgaagaatcatactatagctaatactatagcagacagaaaactgccaatgacgcgtacatgttatattaagatctggacgcttgacgtactgtacataaagtctgtaatgctcgacgacattctaaaccatgtaaccattcacttcatatg

SEQ ID NO: 38226 - DNA, 461 bp, Glycine max
  unsure (1)..(461): unsure at all n locations
tccagttcagccctgttggggaaagtaagaaaagtggtgaagtctatagactctttgatggtggcggccagagaaatgagaggagaaaatggatccatttgtttgaaggagtttcagctgtaatattctgtgctgcaattagcgagtatgatcagacactttttgaggatgaaaacagaaacagaatgaccgagactaaggaacttttcgagtggatcctgaagcaaccatgttttgagaaaacatccttcatgttattcttaaacaagtttgacatatttgagaagaagatcctgaaagtcccacttaatgtatgcgagtggttcaaagattaccaaccagtttcaacagggaaacaagaaattgagcatgcttatgagtttgtgaagaaaaaatntgaggagtcatnatttcagagcactgctcctgatcgtgttgatcgcgtctttaggatctaccgg

SEQ ID NO: 38227 - DNA, 232 bp, Glycine max
cgtcaggcttattccccaatcaatgaatggccttgcatatttagatgaagaaaaggccatgttctaggtgtccatccctctgctactgtgtagagtattattcctacctaccgtcatctcccttactacacaccttcaactatcctattcatattaacaatctctctgccaaggagcttaaacaactctctgatgaactgcgttcttactttatttttagtgtttctagaac

SEQ ID NO: 38228 - DNA, 246 bp, Glycine max
ctcttcctacttgaagaaagtagtatacatccctgacaagattccttttgatccgatctcttgttttgagggagacaacatgattgataggtccacaaaccttgactggtacaagggtccaactctgcttgatgcacttgaccagattattgagccctagatgccctttgacaagcccctcatgcttacccttcatgatgtgtacatgattgtaggtattggaacttgtgccagtgtgacgtgttt

SEQ ID NO: 38229 - DNA, 307 bp, Glycine max
acgataagtctcttcctacttgaagaaagtaggtttcaaccctgacaagattccttttgggccggtctctggctttgagggagacaacatgactgagaggtccacatacctttactggtacaagggtccaactctgcttgatgcacttgaccagtttagtgtgcccaagaggttctttgtctagtcccttatgctttccctacaagatctgtacaagattggaggtattggaactgtgccaatgtgacgtgttgagacctgcgtcttgaaacctgcaatggtggagacttttgtaccaacttgactg

SEQ ID NO: 38230 - DNA, 201 bp, Glycine max
gtgattgttgtgactcgatcttcttcgtagttatctagctcataatgtcgaatgagtgaggggggcttttttcacgtgaaaatgtcatgctgcggtggtcacatatggctgcggaagcgcctgcaagtgctgcaacggctgcggatgctgctagatgtacccagagttgatctacaccaaatcaaccaccaactagacctt

SEQ ID NO: 38231 - DNA, 349 bp, Glycine max
acaggttcctatgttttgtggatcttactctctagagaaagcagtatctcgcgttgcacgaggggttggtaaaacgggaaaacatctatttttaactgatattgacaatggaaaaccccctcttcttcttcagatggttcgtgattcctaagatattaaattcctgtctgctttacgctccttcaaacaccgtgttgcctatgcaaatgttcgatatgaccaacttgttggatggagtacgttatctatcatgcgtataaaggagctccctaagcgccggcatctttcaagacatgagaagtacccgcatattggtaatgtagaaacagaaaaatctacttttgttgtt

SEQ ID NO: 38232 - DNA, 343 bp, Glycine max
cccacgcgtccgcccacgcgttcgcccacgcgtccgcccacgcgtccgcccacgcgtccggaacaagttccgcatgtcactgggtctgccggtggcggcgacggtgaactgcgccgacaacaccggcgcgaagaatctctacatcatatcagtgaaggggatcaagggaaggctgaaccggttgccgtcagcttgcgtgggtgacatggttatggccaccgtcaagaagggaaagcctgatctccgtaaaaaggtgctccccgccgtcatcgtccggtagcgcaagccgtggcgccgaaaggacggtgtttacatggacttcgaagataatgctggggtcata

SEQ ID NO: 38233 - DNA, 317 bp, Glycine max
acgaaatgttatggaggacaactaccggtcctatttgcgctaagacactgagaagaacaccagggggagatatggtgccggtccaaattacgacgttgtcaacaagctatatgaagaatgcataaccaaagtttggccttagggttcacttgaagagcatgtgcattctctattgaataattgggagatggaaatgtttcacaatgtggacctgcatgatttcagagtaatatgatcctaagaaatacacttttagtctgaacgtgaggaatcctatgactttgtaagagttgattaaatttggttgtatggtatat

SEQ ID NO: 38234 - DNA, 390 bp, Glycine max
caaatattatccattacatttacatctgataatttcctcacaaaaatggacggacagagtttgtactcactagtgtttcttgtgcttgctctggccattgtgaacacagtgcatgggcaagggacgcgtgtaggggtctattcgagcacatgcccacgggctgagttcattgttaggtccacaggtcaatcccacgttaggtctgatcctaccttgggtgctgggacgcttccgatgcacttacatgattgctatgtgcaaggttgcgatgcttattgtctcattgtcggtgatggaactgatagaacagcatttgcaaaccttgctttacgaggatttgatgttactgataatgcatagacacagctagaggcttcgtgcccacgaggt

SEQ ID NO: 38235 - DNA, 431 bp, Glycine max
cattactccagtatgctgctacagcatcctttctcagtaaattgtacagtgattaccttgatcatctcaaaatgtctggtgcaagttgcaagactgatgcattctcggtggaaatgcttcacgattttgctacttctcaggttagctacatcttggggcaaaaccctatgaaaatgagttatttggtgggctatggtgacaggtttcctctccaggttcatcacagaagtgcatcaatcccttggaataaccaaccctaccgttgtgaagatggtaagaaatggctaaactctaaagatccaaatccacaggttcttttgggagccatggtgggaggaccagacactaatgacaatttcgtggatcataggaccaaccaaaagttcactgagccaaacataacaagcaatgctggcttaattgcaacactt

SEQ ID NO: 38236 - DNA, 101 bp, Glycine max
gcgtgtatgaggaatcaccattgatatagctttgaggaagcttgaaacaacaaagtattatggcacaggtattgatgcgccatggacatactggattttca

SEQ ID NO: 38237 - DNA, 432 bp, Glycine max
ggtagagagaacaaaagggcaaggaagaaaacaagaaaaaggagaagagaagagactagatggctggctcagctattggtttcgaaggctatgaaaaaagacttgagatatcattttttgaacatggtgtgtttgctgaccctgaaggaataggcctccgagcattgtccaaagaccaattggacgagattcttaaaccagcagagtgcagtattgttgcatcactttcaaacgattatgttgactcttatgttctgtcagagtcaagcctgttcatctatccttataaaattatcatcaaaacttgtgggactaccaaattgcttctgtccatccctgtcatcctcaagttggctgatgctcttgacattgctgtgaaatctgtgaggtacactcgtggaagtttcatttttcctggggcacagtcttttc

SEQ ID NO: 38238 - DNA, 288 bp, Glycine max
cggacgcgtgggcggacgcgtgggcggacgcgtgggcagccgcgttgactccaacatatgggctggtgcgggaccatcataacttggtgctgagagcagttgtcaggcttcaccagctccgataattccccggcgggggagctatcgaaaattcaagtctggtgaccaccgtaggcggtgagcaaagccttgtgtttggactagaacatggtgatggcgttttggaaggagcatctcaaggcagaccaccagtggatcaatcacagatgggtatcccccaattaaaga

SEQ ID NO: 38239 - DNA, 343 bp, Glycine max
ccggacctgccgtcccggaacgaccgcacgcgtccgaagcattcggaatttaataaagacccatgagaagaagcctcgcgagtccatacttcgtcaggagtttgctaatgccatagatttcattaataaagatttatccgaggagaacaggcttaggttgcttcattgggatctgcacaaacattttcagagctgcgctcgctaacgtcgttgagctcacttggcaaagtggctgcatatgcattgacattaacacggtgtatctattgtcaaacgaccccaaccttgataccatatgaaagcttgaagtggcgaagtacagatgttgatgatggtacctttt

SEQ ID NO: 38240 - DNA, 323 bp, Glycine max
cttctcaccccagtttcactttctcattattttctctcctattgataaagaaacagagagagagagaaaaaaatgcctgcggtaggaggtattagcaacggagggggcaaggagtaccctggaagcctcactccttttgtgacggtaacatgtatagttgcagccatgggtgggttaatcttcggttacgatatcggaatttcaggtactaacatttacacacatgtgtatacgtatgttagtgttttattttgatttaacctatgatcttatgtttttaatgtgtgtgggggttatgatcaggtggggtgacatccatggat

SEQ ID NO: 38241 - DNA, 308 bp, Glycine max
aaccaggaagagccacgcggacgaaaacggccaaagcaaccaaaaactaagagaagaacacaggggccaagaaacccgcacaagggagaaggacaaggcaagcagaaccagaagaaggagctgaagcacaaaccacagccaaacaggagggatacaggcatcaagacagcgctagagcgaataagaaccaagcagagaaaggaacggcacgtaagaagctttttgatgatggtgtggtgaagcgtgaggacttatggatcactaacaaactctggatgtcaaatcatgcaccagaagatgtgccaaaa

SEQ ID NO: 38242 - DNA, 378 bp, Glycine max
ctcacgcgtacgtataggacaggcccaacacctgtctaaagccgcgtctgtcgcgtcctgacggtccaagacaagcccctatacccaacctaagagcaatgagtgtaaaacatgagtacgtggcacgcaacacgggctgaactaggtcttctcgcattatattcgggcaaggctgcttcatggtacataatacgcagggcattacagtatgggtccaaatatacgagtatcatgaaaacctgtactgctcataatgccgagctaacaaccagcttggcacgaagagtcttccggctttctaagtcactcaatgacctacatgctttgatcagtccaacgcctcagggcactaacttaccgctatctctgttggtaaag

SEQ ID NO: 38243 - DNA, 273 bp, Glycine max
gaaagacttacgaatgcgcaaaaactggagctgcttttgactgctggcattggttctgatggggtagatctcaaagctgcagctgctgctggtctaactgtggcaaaggtcacggcaagcaatgccacatcggctgctgtggatgaactcatgagaattcttattctaattaagaatttcttgcctgtgtgccatccagctcaatagggtgaatggaatgttactggcattgcacatagagcttatgatcatgacggcaagacaatcagaacc

SEQ ID NO: 38244 - DNA, 420 bp, Glycine max
gccacgcgtacgactgcgattgctataacggtgaaggttactacgatgggagtattgaagagcgccgtcaggaactgctattgcgatgaatagactagacaccagcggcagatgtgcaaacatgaggctggggaatacatgaggaccatgttaaaggttctgagccacatgcacaacagctggtgcgttcactgcgacataaaactgcagaacatactcatattcggtgacggaggcttcaaacttgcggaaagtggacttgcgagggaggcagagcataaacaggagaagagtgaatgcatgacgactacaaaggttatggctgcctatcaagccaccgcgaaatagtgcaaatcgcctaacgatatatgccctaagggatgtaaaattgtgaatatggtgaccaggataccgatgtgg

SEQ ID NO: 38245 - DNA, 346 bp, Glycine max
cccacgcgtacgacacagatggctcgaacgaagcataccgctcgtatgtccacatgatgtgaggctcctaggaagcatcttgcaaccaatgctgcacgtaagtctgcaccaactactggtggtgtgaataagccctacattaatccgactggtaccgttgctcttcatgagatcaggaaataccatattagttccgagctattgatccggaagctcctcttacagaggctgggtcgtgaaattgctcatgacttcaagactgatctgcagttacagagtcacgccgtgcttagcattgcacgaagctactgatgcattcattgtcgggctcaatgaggacactaac

SEQ ID NO: 38246 - DNA, 294 bp, Glycine max
tccgagacttaagccgggatttgggtatagggtattcgcgtggcataaggaagacgtgggtcaacgatcgattgggaacaaggtttcgtgaagtgaacgacaatgattccatctgtatccttaagaagcttgtggcagcttagactgtcacatgatccttcaagatccacatctagaagtggttcaccatctacattgaacacattactctcaatgattactagatccatgacggtctgggtcttgaactctactacaactatacacatatatggtgtgattaatgcgtaatat

SEQ ID NO: 38247 - DNA, 305 bp, Glycine max
agctactcatcataccggcgcactcaaggcgctggcttcggccctttctttcatcttcccgagagggagcattcagggggagctaacatgccgaacaatgtgtctgacaaagctgacaagggaccacgcatctgacgacgaagcatcagggcaactgtgctcatagaaacacttactgcactgtttcaactgaatgaaattttgtatgaactgaatgaccattcattgcgtttgaactgttagcgttgagattacagtcgcagtcatgttaataccttccaagctcatccagagcgcctcttacc

SEQ ID NO: 38248 - DNA, 476 bp, Glycine max
cgcaaatgtgatgcacgcatcgcatcaggaatgcctaaagcgccatctgggtcgacacgagggaacactaatcgcagacgaacacttctcaacacactcactaactcactcactccaagccctagatgactgctccattctttcacatgccacagaagtctgtgatctacgcttatgtcgctcgaggaaccgacattctcactgaatacaccgagtacagtagcaatttcaatactatcgcttttcaatgcctccagaaattgcctactgccattatcacattcacctacaattgccatggccacaccttcaattatctcgatgacaacggttacacatactgtgtacttgctactgaatcagcaggaagacaagtgcctattgcatttttggagcgtattaacgatgattttgtgtcgaaatatgcagggggaaaggctttcacggatcctgccaatagacttaacaaggaattt

SEQ ID NO: 38249 - DNA, 373 bp, Glycine max
tcgcccacgcgtccgcccacgcatccgaggacattgtcttccacgggagtcacaatccatattggatatgatgaggagagtggagccttttattgtgtattccaacagtggaagaatgaagtcaatgctcaatatggaaatgtactaaatggaactattacaacttccaaaagcaaatttgatgaatagatagagtcatcatctgcaaaaatgtattttcattattattgacaacttctgcatcagcaaaatatgctgtacgactatgtgctgacatggacctatcatgctgctattgttgagatccgtccttatttcattggccgacttctaactgatgctgattcttgatgatgaattttgtcattatttg

SEQ ID NO: 38250 - DNA, 443 bp, Glycine max
tcgtcgacgcgtgctgcaaaggatgcaagatgactgtcacgagcgcgctacaaggaatatatggggtgacgtaagttaacttggaccgaatagccaacaaatcaacacttgtagactacgtaaagccctccaaagccgaacttcgtgtaccataccgaacatcgaagaatgccaagctgtcgccctaccttccatactacgtgcttgcacatttatacacactatcagtgtacgactggaaaacttcactcacgtacttgcgactcatcaaccacgccaacttgtactaactcgcacttactaactcaactgatgttcattatactacagcattaatatacgaatatccctcatctttttctctcatctaacggacattcttcacttgattgtaaatacactgtactaattaggcattctaattatagtcctttaccatttta

SEQ ID NO: 38251 - DNA, 453 bp, Glycine max
tctgacttgggtataggggctaaagactaatcgaaccgtctagtatctgtttccttccgaggcttccctcacgataggtggagcccgtaggcgagttctatcgggtacagccaatgattataggcatcgcgtggcgcaacgcccatcacctattcgcaaactttaagtaagcaggacggcgtgcatgctatgatgagccgagccacgaaatcgagagctccaagtggaccatctttggtcagcggaactgccgatgctggatgcaccgaaagtcgggctacagagcctaactgtgcgctatcctagatcccacacagggtgttgtgcgattagagacagcacgacactggtcatggaagtcgaactccggtaagcagagggtaacagctaacctgccgaatcacctagccacgaaactggatggccctgatgcgcgctacctatacccggcct

SEQ ID NO: 38252 - DNA, 172 bp, Glycine max
cccacgcgtccgctaccatgcttccttgcagtacaccctctcatgcttctgcgctttttatagcccctattttaaatatagcccttgactgtcttttttccatacttcctccacgaataatcatcattatttatatttgcatgtttcttgcatatatcattcaccataattt

SEQ ID NO: 38253 - DNA, 323 bp, Glycine max
aacagccttaaccttcgctgcccccaacgttgtgccattgtcacccacaaatgctgtcttcgagattaccgtctttcctaccaaattgaaagccccgcgctcctcacctcgttactctccgattagggttgcaaccgtggagcccgacacttcaactgtctactacaactctgcgttctcagtgtttcctgcataatcatgctaaactgtattatgggaatcctgcattgcttatatttacctcttaacttatctacattctgtagcttatactttatgagtcttttcttaaatctatttatagagtatttttattctatttt

SEQ ID NO: 38254 - DNA, 234 bp, Glycine max
taagttcaagagaagtatattagggaataaccgattaccgtgccatgattctgttgatttatcatgacaagaacaaatataacactttgtaataccgattatgtgaatgctatagcaacaatgactttgctgttcaatttatttctgctatcattgctggtgacatagatgttgctgctgtatatgcacatgatctggcacattttggtcttgaagtaaggcttacttattatt

SEQ ID NO: 38255 - DNA, 319 bp, Glycine max
gacagacgtagaaaatccaattaagattgaccatggattattcattgacgaactcatggctgctatctccatcattaccttcagcttgcactactactccttagatggctaaaggcggaagtggagctcttggtgcagagctcactacactcaacactgctgctgacatatgaagaaccaatcgacccaccactcaccgttgaacacacccagctcttaatcgatggacaattcggtgatgctgatactggcataacttttccacagttggaccccaagacaggcgatgtgattacccatgttgctgacgatgaccatg

SEQ ID NO: 38256 - DNA, 244 bp, Glycine max
cccacgcgtccgatctaatctgctgcctgggtcttcttcagcttctgatgctcctaaagctgacgttgctagcaagaaccttcgatcgctgctatgtcatgcagaatctctgattcactaacttcttaaatgtgcacgatgtgcaacttttaagagtgtttcttggcgaattacaatcactatgtacatctactgcattcgctgaaaatgaagttcaagatagcagatgtgatgagtcattatc

SEQ ID NO: 38257 - DNA, 438 bp, Glycine max
  unsure (1)..(438): unsure at all n locations
catcctgcggccagtggcacttttttcactcttatgcttctagggctcaagtactgctcttgccagtttcagggcaatctgcaaaaatttcagatggggcttcagctgctggaagatcggatatatagggcatctttgggttggttttcttttgagccagaatggtatgacacaaactatacaaactttgctcagtgtgaggctcaatctgtttctctatttgttcaataccttacaaatatgaaaggagatactgtccaagttggttcaaaaggaaatggacaagaaaatgggaatcctttggctgatgtgagtgatcaccatcatcctgtttggggtcaaatggagaactatgctgcangaagagaaaaacggaggcagctacttttaatgctttgccagcatgaggctgataggcttgatgtttgggcacagccg

SEQ ID NO: 38258 - DNA, 422 bp, Glycine max
cccacgcgtccgttttcgatatcaatagcgaaaatgtcatcagctggtgtctctacacttactgtggttcccactgagccattgttgtcaccaaaggcattcccttttccaattccatcacacttgtctttggaagataaatccattttcatatacctctccttttccgggctcattgactcccatccgtgttatggagtgggataccattgaatctgtcaaattcaaaatccaaaggtgtgaaagccttccatttttaacaaacaagcagaagttggtttatgctggccgagagcttgcgcgaagtgatacgccgctcaaggactatggagtaacggatggaaatgttttgcatttggtaatcaaactgtcagaacttcaagtcatcaatgtgaaaacttcttgtgggaaagagttcacgt

SEQ ID NO: 38259 - DNA, 378 bp, Glycine max
cgcctcttttcctctccgtctccgacctccgatcctccctcgccgagacatcctccgacggtggcagaatcgtaattttccgcggcaccgtcgacacacctcgaaaaccttgagacccggtgtcttggtttctcgcaagtccagcgataacagcgtcgttcttcaaagaactcaaacgagtttttatctgatctctggagaaatatggctgccaatttctggacatcatctcattacaagcatcttctggatcaggaagatgtggatgtggtgaatacactcgacaaggaaaagggtattacactgggagggatttaagcttattaaagatgcacatggctaattatattttgaaattggctcaacaagtaaaagtga

SEQ ID NO: 38260 - DNA, 408 bp, Glycine max
  unsure (1)..(408): unsure at all n locations
gcaaaagtaaaaatgtggtttcttggttggaaaggggcatcagggttctcagcctcttccacagccgaacaagtcactcaagggattgatggaaccgccctcaccgccatcgtcacaggagcaacaagtggccttggtctggagaccacccgggttcttgcattgcgcggtgtccatgttgttatggcagtaaggagtctggacagtggtaagaatgtcaaagaaacaatacttaaggaaatcccctcggctaaaattgatgtcatggagttagatctaagctctatggcatcggtaaggaaatttgcagcagattttaattcttctggtcttccactcaatatcctaattaacaatgcangggtgatggcgaactcattcacactttcccaagacaatattgaattg

SEQ ID NO: 38261 - DNA, 331 bp, Glycine max
gccatcatcacagacccaccctggaccgagagggaatggatatgcccctagcctcgactgcgcacttgtcacattgatgccaagattgctgaactcatgaccgacattgacaggcgatgcggctaagagcttgagaaggagcccaagattctgacgaacggtgatgctggctaagctaacacgatgccataccaaacccatgggtgctgcaactttttccgagtattcttcacttggacagtacgctgatagggacacgcgtccaactgttgccgatggagtcatgaggaacgttgctaagaaggatcctaccggagccaaggttaccaag

SEQ ID NO: 38262 - DNA, 377 bp, Glycine max
  unsure (1)..(377): unsure at all n locations
acccacgcgtacggcccagtccgattccaactaatcctcttcaacttacttgttatcactatcttgctttgtctggcttgaagagtaaacaatgacggtagtagaaaggttgataataataataataacaaaaatatggcacaggtgaagaggaacgggaacattgatcgtggagggttctacctcaaaatggggctttcttttccttttggatctaaggacaagaagaagaagattaagaagaaaaatgaacccttggggaatagttgtagttcgagagttacacctaaaccttctgatggatcagcanagggtggtgttgttgataaggagtggtggaagaagagtcctttaacgtgtaaaagagagtgatagtg

SEQ ID NO: 38263 - DNA, 426 bp, Glycine max
cccacgcgtccgcttcgatcttgcggatatgtttccttctttcaaacctatgcatgtcataaccgggttgaaagccaaattggataagatgcataacaaggttgacaagatcttagataagatcataaaggagaatcaagcaaataaaggcatgggagaagaaaagaacgaaaatcttgttgaatccacatgtattattcaaacaagtatgctaatggatcaatgtcatttttctgtccttgttataatgtgaaatatatatgaaactacattcaacattaattatgcaggacatatttgcagctggaaccgatacttcagcaaaagtaatagagtgggcaatgtcagaaatgatgagaaatccaggaggaagggagaaggcacaagctgagatcagacaaacgttctgaggaaaagaagcaatca

SEQ ID NO: 38264 - DNA, 282 bp, Glycine max
cggacgcgtgggtgacagacgaagatgcaccaaattatcgttcaattatacatggctcaatggacaatgcaatcactctgtgctcaacttaagttgccttacaatgcatccagactttcctttcttatatccttttccaatataatcgtgagacttatgacatatctgtgtctcacttcatcaataataaattatagtcaagaagagcaatcattacaaaaaaaatgagccccttggacaataattgtaattataaagttaccccttaaaccttataatgga

SEQ ID NO: 38265 - DNA, 459 bp, Glycine max
tggatatctgcagaattcggcttaagcagtggtaacaacgcattttacgcggtgacgttattccgttgcctgcggccatcccggattcgtttcagtgatcaagatttgtcttactgatcatatcatgggaaacttactttgtttagctcaagtggatcaatcaactgttgctattaaggagacttttggtaagtttgatgatgttctggagccaggttgtcattgtgtgccttggatatttggaagtcagattgctggacatcttactcttagggttcaacagttagatgtcaagtgtgagaccaaaactaaggacaatgtctttgtcaatgttgtagcatcgatacaatatcgtgctctatctgaaaaggctagtgatgcatattacaaactcagcaatacaagggcccaaatccaggcctatgtttttgatgttattagagccagtgtcccaaagct

SEQ ID NO: 38266 - DNA, 362 bp, Glycine max
acgaacactcgtatcctgcgttataagatctacaactggctcagaaatgggccatctggggatacctgaaacctacgcttgttacacaactcacacgcaatggaataggccaactatagcaacccatcccatatcgatttcaattgctgaatggcaaatcatcacatgctcatcaagattatttacgaccagaatttacgcaagaattggactgaaaagtaggctacgtttcaatatttaatggccacttatgccatgatttatcaagctctttgcataactatctttatgaaaacatcttgcaacagcatgacttttggactgaatacagaaagcgccgtggaatacgcttaccttgacac

SEQ ID NO: 38267 - DNA, 299 bp, Glycine max
cgggcgcactcaatctgcgacatgatgagctctatctgggggtaccctggctatttgcataaactgcaatcgctgatcacttatggttgcaaagacgtcatcgcaccgctgaccatacagaggtcttacgacaacgatccacatcctcatgccatcctctactactactagagaacttccaactgaggccttctcattactgaagcctctggcgtctgtgacacggatcaaggctatccggacaccactggcatatggactaaaaaccatgatcaagcctggaaacccattgtcgatgc

SEQ ID NO: 38268 - DNA, 399 bp, Glycine max
atggatatctgcagaattcggcttaagcagtggtaacaacgcatagtactttttttttttttttttttttttttgtgcaatttggaaagatttcagaaaagattctctattcagcagttaaatacaaagttaagcaaactgcacacgtgtttagttttatcttgtctaatacccaatgatcagcaactcagtcattacgaattcacagtacattaaaacgaacatagcttgatgttttccttcctttcttccattaacttccaactttactaatgaccatacttctggaactcccactcactgttgtcaagagggcacacttgacgagtcttcagccagcgactgatgcagtgaaagtgaaaagcatggtttcagacaccccaagcaacagttcacttc

SEQ ID NO: 38269 - DNA, 391 bp, Glycine max
cccagcgtgcgcccaccgttcggcccgcatccgtcactcttgctaaattggctatctctatctattctctctgtctgccatggggctctccaaaaccacctccgaatacgacgactctgtccactcaaccttcgcttctcgatatgacagaacttcgcttcccaggtttaagatgccggacgagtcgataccaaaggaggcagcgtatcaaataataaacgatgagttgatgtcggatgggaacccaaggtagaactcggcatcatttgtgacaacctgtataggagccagagagtgataaactcatcaaggctgccattaatcagaactatgttgacatggacgagtatcctgtcaccactgagttacagaatcgatgtgttaacatgat

SEQ ID NO: 38270 - DNA, 370 bp, Glycine max
cccacgcgttcgaccacgcgtccgaccacgcgtgcgctctcttaatttttttcttggatctctgcggtttgactgaattcttaggattgctctgaatcggtttagtcttcttcgttattcttcaaattcctcgtgacagatctaatctaatcaggcttttgggggtgtttcagacattgcatgcatatgggagcagtggttgtgttggatgctataaaaggcctacactgagagctactgtggatgtgccatcaaaagggttggctacacaaggtaacggattgaggaaaccaagttcatcataggatttttggaccactagcacgcatgatatggacaacagcgctgtccagtcgcaggggagcatcta

SEQ ID NO: 38271 - DNA, 316 bp, Glycine max
cccacgcgtccgcagaacgtaggtccacacataagtaccacaatcgcaatacggactcacaggtgtacagaacgatttagaagaacgattagaccaaatattctgaaaagcgctttagcttggataagaccatggaatacataaacttataactgaacacattatccgcaggggacatcaagaacgtagaccttttcttcaaaatggacatattccctatcattacaatgtaccacaacactatatatgctgacggctctaacacccacgtacacatagactccggcagcaacgagacgtggtactaccccgtgaa

SEQ ID NO: 38272 - DNA, 453 bp, Glycine max
atatctacagaattgggcttaagcagtggtaacaactcattttacgcggttattgacattaaacatttttagctaatctgaaattccaccatgaaacctaacacgttcatcatcttcatcatcttcttcttcacaatcaccacttgttcatcatcaactgattcagttgagatcattccttttaaagaagcgtataaagttcaagtaacagtttactatgaatcactctgtccatactgttaaaacttcatcgtcaattacctgatcgatgtgttcaatgaatgtatccattcaatcgcttatgtaaaactgtttccttatggcaactctaaagtcaactccaactgcaacatcacttgccagcatttttaacaaaattgtttgcttaacactttttaagcttgttcaatcaatacttgccctgatgttcatgatcactttcctttcatcttt

SEQ ID NO: 38273 - DNA, 416 bp, Glycine max
tgcagtaccgtccggaatcccgggcaaaattctggttcaaactgcaagcaagtttgtggtgtatatggctctctaaagtgagagagatgcgttgcggataaaagggtattgcaaccattgattagaaaaccaataattaaaattggtacaacttctaagtttgacgtacttgaattatgtcatattctcaaccgttgattttctaatcaatggttataactgcacctactgtactgtagaggagctatatttgtgatccttaatacaccaaatcaattttctttaatacaatgttcacatgcttatattgtgatgacagatatgttgttgacagaatggatggtgatttgtgcgctaaaggtcttgatcctgataatgaatatacaaggcaacttattgatcatgttgtatctact

SEQ ID NO: 38274 - DNA, 340 bp, Glycine max
acgatcaccggtcgcaagatcatcatcgatacttacagccgatggcttgctcatggtgggggtgccttctgcggggaggatcctaccaatgttgatagtagtggtgctcacattgtgagacactctgctaagagcattgaggcaagtatactacccacaaggtgcattacgcaagtgtcttatgccattgctgggcccgagcctttgtctgtctgtgctgacacctatagcacctgcaagatccatgatgagtagattctcaacattgggaagctgaactatgatttcaagcccggtgtgatcttcatcaacccttatctcaacaggggtgggaattaca

SEQ ID NO: 38275 - DNA, 374 bp, Glycine max
ccacgcgtccgccagcgtccgccacctccggaagtcttttgcatccattgggaatgcactgaagaaaatgctgctcccttcatgtgagggtttcccccgtgaaacttgttgaacacccgtgtttctagcatacctgcaccagaagcaccagctcctacattgaaagtccaccagaaaagaataatgagaatggagcaaggcttatgcaatatttgttgcaaatttgcccatgaatgcaacagtggaacagctggaacgtgctttcaagaaatttgggcccattaaacaggatggtattcaagttagaagtaataagcaacagcaatcttgttttggtttgtggatttgaatcggctacttcatgcaaagtgcac

SEQ ID NO: 38276 - DNA, 394 bp, Glycine max
attgcagctggaggaattgtggatgctcggggttatgttgctgctctagcacttggtgctcaaggggtctgtctaggcactaggttttgaaatattacttttacattaatcatatttgaggaaattgttctcatattgctgcagtaatttcttagcatatgcagtttttgtgttcaacttaagaatagttgttgcctacgtagaagcctctcatcaggctaataaattgcacagtttattcctcatgagactataattgtattcacttggttgtgaacagatgtacacagttcccccaacatcatcaccatgtccaacctaataatctcaatttatattcgacattttttctggaactattacaccttttcgtatatgtgtttcatgccaagat

SEQ ID NO: 38277 - DNA, 334 bp, Glycine max
acgatcgttttcaatatgcagatcttcgactaaaccctaaccggcaaaacgattacacgggaggtcgagtcctccgacacaatcgattacgtgaaagctaaaatccacgacaaggaaagcattccaccgtatcagcagcatttgaacttcgacggtaaacaactcgaagacggcagaactctcgcagattacaatattcagaatgaatcgacgctgcatctcgttatacgccttaactgaggcatgcaaatcttcgataaaaccctaaccggtaaaacgattactctagatgtcaagtcctctgacaccatcagtaacgtgaaagctgagatcc

SEQ ID NO: 38278 - DNA, 356 bp, Glycine max
cccacgcgtccggtcttcttcatcaacggtggcgtatggatcaatccgtttgataggaaaaccaggggcatttccaatggctaacgaaatccctcacgatgaggtagtgtgcgttaccggcgccaacggtttcatcggttcgtggctggtccgaaccctcttggagaaggagaacccacgctacaccatccacgccaccatcttccccggctccgacgccttccacctgttcaacctacacccctccgtcgtcagccgactcaccctctttcccgacgacctcctcgacgccgacgtcctctgccgcgccattaccgtctgctacggcgactttcacgtggcctccccctgcaccc

SEQ ID NO: 38279 - DNA, 431 bp, Glycine max
tgtgatggatatctgcagaatcctgcttacgcactggcaacaacgcagagtactcctagatttcacattgaactacagattaatgggtactatgggactactatctgctatgcatacgttggagataccagtatggtcaacggatgaatgtgacttgggaagtacagctgacatcatgaactatacctatatcaacgcgtactttgactactacataaggactatatgactggaatgtaagcgattgacacatgagctatcctaagtgtaccagaacatggcgcagctgctatacaaacagctaacgtactagcagagcccattactaatggacgtgctgtatatactcgcacatcatctgctattcatagatcttggcctgactttatacaatgagatacaaaaggatccatctttgaaacatcaattaa

SEQ ID NO: 38280 - DNA, 490 bp, Glycine max
  unsure (1)..(490): unsure at all n locations
ccacctccgatcgaagactagtacatggtgagccaagtaggaaagaggaggcgtcactcgagaggtcaccatgcaacctcacaaacgcttgcatggctgcacattcaagaagaaggctcctaaagcaattaaggagataaggaagtttgctcagaaagcgatggngacgaatgatgtgagagtggatgtgaagctgaacaaggctgtgtggagccagtggattcggagcgtcccgaggaggattagggttcgcattgcccgaaagaggaacgacgattaggatgcaaaggaagagctatattcccttgntactgttgtcgaaatcccccaagatgagctcanaggtttgggaaccaangttattgatgatgaagattgattatgtattgcttacatatctngtntattttatagttgatgcagaattgcgaatatcttttaattttgtgagacattggagatatttaagttgataatatcgattgctttc

SEQ ID NO: 38281 - DNA, 368 bp, Glycine max
cccacgcgttcgcaaaggtgctcagatttttgaagctctgggtctttcatcagaagtgattgaaaggtgctttgctggaaccccaagtcgagttgagggtgcaacatttgagatgcttgctcgtgatgctcttaaattgcatgagttagcatttccttctcgggttttctctgctggaagtgctgaagcaaatgcattaccaaatcctggggattatcattggagaaaaggcggtgaaattcacttgaatgatccacttgccatatcaaagcttcaagaggctgccagaactaacagcatagatgcatatgaacagtactctaagctcattcacgagttaaataaagcctgtaatttgcggggacttc

SEQ ID NO: 38282 - DNA, 411 bp, Glycine max
  unsure (1)..(411): unsure at all n locations
taacttccagccaaatatggagggaaaccgcaactgctatgctgatgagcattacctgccaaccttggttactatgcttgatcctggtggaatcgcaaattggtcggtaacatatgttgattggtctgaaggaaaatggcatccaagatcattcagagctcgggatattacttatcaagtcatgaaaaacatagcatatattgacgaaagtccacattttacaagtgatgcatagagaacagtggtgattacaccttgcatgttgaacggctcgaaacgatcatgttatctatttgccaggaagtttttgccagaaactcangatagattgatccaactctactctaattctacaatattctaaagtattaatgattctcatcattctttggtgatccaacaccatgtgat

SEQ ID NO: 38283 - DNA, 291 bp, Glycine max
gaagattaaaaattcagattagcgttagttttggacctgaggatgagtggatgaactgagatttggatttggatcatgttgagattgcgtttgcttgctctgattttccggcatgaatttcaagagctttggaaacgagaccggcggcggcagagggaggccggcggtgaacttctgcctgacgcggcatccgtcggtgtacttactgacgttcgacgagttcatgaacagcatgggaggttcggagaaagatattgggttcatgaacatggacgagttgctgaagaacat

SEQ ID NO: 38284 - DNA, 367 bp, Glycine max
cgtcacgtgtgatggatatctgcagaatcctgcttaagcagtggtaacaacgcatagtacgaagatcacacacaacattcatgcactcacaggccactcgggaaaaactacatcacatatcaacgaaattaatcaattcttaactctttaaaacaacgctcgagccgacctgcctgtgccaccactactatgggacgcaggactgtcaaagtacgctgacatgtatgcacgacaaaggcgacaggatcgcttgttaaagcattcaaacgggccgtatggggaaaatatcttctggcgtagaggtgatcggtggacgccagcacaagccgtaatggcgtgggtgacggagcaacgatggtataactat

SEQ ID NO: 38285 - DNA, 411 bp, Glycine max
acgactcctactgcaccaatgcatgaatcctgacggtatttggatcccatgtgtacctaagcgtcaggaggcattacaaacctcactgtaagagctcgctgctaagggactagctcatatgattctaacggcccatatccagaggacagaatttgcgatcgtactgactggacgatggcctacagtaagctaagccgaccttgatgttcacgagagattcacgaaggaatttggagaggaaggttaatactgttggaactctcactcttaaggtccacactgagtctcaaatatattgctataatttgaaatctattatcctttggatccaaattaaatgcatctttgtcatatttggggatgaacaggcccctttaggaccgagatttatttataaaggtcgatactcat

SEQ ID NO: 38286 - DNA, 250 bp, Glycine max
cgacccactcgtccgagcccgtcaagcatggctattggtgcatgagaaaaccacgaggggtctcgagtacgaactcagggacactgttcaggccgactttcaacggtctcgagatctatctggccgacgttgagactccctggctaaacgtctgtctgaccgagctcttaccgttccagagcttcaagggggcccgcatcacctgctgcctccacatgaccatatataccgggcgtctcattgagaccct

SEQ ID NO: 38287 - DNA, 324 bp, Glycine max
atttgcgcgaggatttatttgcagggaagcttaaataagggaatgtgataaaggaagcactgaataggcatgacgcggaattattaacctcctcggggagttatgctgaccatcaacttggatacaggaagccagctctaatattgatagttggtgttaactgtcgaaggatgactacatatccggcaaatgctgtcctatagattgaagaatgagcgtgctaagatatcgcaggctgctgatgatgcatgtagagcagctgctagcggtcaggttgaaatatcctccgaacggactggctgcgatattgatgtggctgagatc

SEQ ID NO: 38288 - DNA, 416 bp, Glycine max
  unsure (1)..(416): unsure at all n locations
ctttcatttacacaaaatcatcaatggcaatggcctctcttgcatcctcaagtgttcttttgaacctcttgttcatcgtttctgcgctccattcgggagcagcagcagcaagaattctgagtgaaaaggaggaccaacaacagttgcagttccaataccacaaaggccctcttctcagcggcaatatctctgtcaatctcatatggtacggtagcttcaagccttcccagcgagccatcatctccgatttcatcacctncctttcctcttctccataatccacagcccaaaccatncgtcgccacgtggtggaaaggcactgaaaaatactaccaactcatcaagtcggaactcaaacccagccttacccttgctctcggtgcccaaatcctcgacgagaactactcccttggaaa

SEQ ID NO: 38289 - DNA, 450 bp, Glycine max
gcacaaagcacttgttactagactggttgaggttaaaactggctctacagctctagcaaccggtgatggagcaaacgatgcgggaatgcttgaacaatgccacttcgctgtatgtatcaccgaattagatttgatacactatctacgaccacatcgcgagagaaaaaaacccttacttcttcgaatggggtcggtgccgtcaacgccgcgcaagggtggcgcatactctccggagacggcggagtatctgatcggaactttcgtcggcgacacgcccttccccctctcatcggagttctggcagaaattgctggagcttcctctcaatgttcaatggtccactcagcgtgttcaacaagcttgcgagctattagccaaaaacaattgtcacaccaggcatcttgcgaagattttgttccatctagcgtgctgcttgcaagagtacatgtc

SEQ ID NO: 38290 - DNA, 302 bp, Glycine max
gatctcgaagccaccgtcatcgacgaagtccgctgctgctcccgccgtcaactcttgcatgccgaacaaggaagatgccgccaacaacttcgccagagatcactacaccggcaactatctaccgggaggagcataatgtagttgacttgtacatcattctccttagatttttaagagatcacgagctgtgttggatgagcttgaatctttgaagcccaaatttaaacatcgggtggaaaaaatgaatgactagcatgtaaaagctccattgcctgaagaaaatgggttcaataaagctttgc

SEQ ID NO: 38291 - DNA, 419 bp, Glycine max
gggttttcgctcaccggtgtgcagtcgagcccccgaagaaaaagcgaaaatgccgtcgcacgggacattcagaatcaagaagaagttggcgaagaagatgaggcagaacaggcctatcccctactggatccgcatgaggaccgacaacaccatcaggtacaacgcgaagcgccgtcactggcgtcgcaccaagcttggattctgaggtgcttgctttgcctcggttctgtttatccaattaattagtgttttattttcttgagccaaaaacaatgctttggagattttaatattttgcattttgttccaagactatattgtgtaaggaacttattgtagttcagactaatggtggtgttggtcacctttttttaaaagtattttggaaaaaaaaaaaatacaaataaaattatcaatga

SEQ ID NO: 38292 - DNA, 463 bp, Glycine max
  unsure (1)..(463): unsure at all n locations
aaacaaaacaacaacaacaatgggagcacgaaagagactctcttcttccgagcctcatgcttcgtctcctgcaacaaaggaaaacaccacaaccaccaaacccgaacaaaaaccaaccacaacagaccctccaattgcgcctcctaaatggggtcttcttctgaagctctctctcttcttcttgctcccttactcgtatctcctcttccgctactatcccatcgagccggagctccgaagatcgatcctcatcaacgctggaatgagcctcgcgggtctcttcgtcacggtcaagatgaaccccgtcgcgtcccgctacgtccagaagcggaacctctttgggtatgacatcaacaagaagggcacccctcagggaactgtcaaagtgcctgaatcattaggtatagnntgtggtattgtgttcttggttgtggcaatcttgtttcagtattttaacttcaca

SEQ ID NO: 38293 - DNA, 364 bp, Glycine max
  unsure (1)..(364): unsure at all n locations
cttttctactttgagtcttcttgatccttctttttctccttgaactcaaacatggcagatgaggtgggttctgctagatttctggccaagtccatttgggatgagggtcaggattgcacttgctgaaaagggtatcaaatatgagtacaaagaagaggacttgaggaacaagagtcctcttctcctccaaatgaacccggttcacaagaagattccggttctcatccacaatggcaaacccatttgtgaatccctcattgctgttcagtacattgaggaggtttggaatgacagaaatcccttgttgccttctgacccttaccagagagctcangctagattcntggctgattatgttgataag

SEQ ID NO: 38294 - DNA, 316 bp, Glycine max
acggccacgcgtccgtttcgataagacaatactacttaatggtacttcttctataatactagacaggtttacaacttaaacagttaataaacattagtttgaataacaacatgttatttctaaaggtatatttgtttcttcttttccttttattggttacaacttcacgcatttaactgatcttcttcaaaagttatcaatcatcaatttatgattattattaatattcaaaaccattctaatatctcttcattttcacactctcaattccttcttaattcaacttttaaaattttaaacttaaatcattccactt

SEQ ID NO: 38295 - DNA, 304 bp, Glycine max
  unsure (1)..(304): unsure at all n locations
ctttctcttcttcctcctctcttcgttttccctcncgtaaatctacaatagcggactgacaaacttttactttccacgcgcctatcaaccatctcctcattctcatcatcaacaccttctactccaacacagagattttccttcttgaactcatcatcaacacctcctatactctttacaacattctattttataattttacacataatatcacactctatactcatccacagctgttcattcatattatttcacacaacactaacactacacttaccataccttacaccactattttcattac

SEQ ID NO: 38296 - DNA, 278 bp, Glycine max
cctaaacaactctttctcttcttccttctctcttcgttctccctcacgtagatctacaatatcgcatgcttagactataactttccacgctcatatcaaccatctcctcattctcatcatcaacaccttctactccaacaacgagattttccttcctgaactcatcatcaacacctcctatactttttacaaaattctattttaaaattttacacataataacaaactccatactcatccccaatttttcaatccatatatttccaaacaaaactatc

SEQ ID NO: 38297 - DNA, 200 bp, Glycine max
tctctaccgttgtttcattatcttttttgttggaatcatccattatcgtgatctggtctaattattgtatgagtctgttaaaccaattttcctcacatggtcatttcatcataacttttttgccatctttgccctttgattgctcatcaccaattactcatgtctttcatcatacccaatatacactgttataataaaaa

SEQ ID NO: 38298 - DNA, 422 bp, Glycine max
ggctgctctgtgtctgacgcgccggctttggttgatgagaagacatagttcgacgtggtgatctatgaggtgcctagcaactcttgaatcgctgtgattaatgcagcaagctcattcacgaacctagcgctgaaagacgccaacgagtatatctaatggttgccgaagaagttcaagtaacggatttcaaaggacgaatctgtagatgcgaaaaagcatctctaagaaactggagccaatgtcaccattgcttaaacactgtatatctgcaacatatatctgctgcttctgcttttgttcgttgtagctgagttcaccactacactgatatctcattatcattatgtctggattccaatcctctatttgtcatgaagaaatatgacttcttatatgaatattatcattcttaatgcgtatga

SEQ ID NO: 38299 - DNA, 306 bp, Glycine max
tgtgtgtgtcctaaacacaagctaagatctcttctgctattatcttggcactcattgccatttccatgcttcaaacactggttatggctgctaatgagcaatgatgccacttgtattacaacacgagcaaatatacaattgtgagtgtcaagagataccaattcccatcacaatgctctacgagatgtatccagacccaataccacaagccctgcatatttttctgtcagaagttctccatgaaatacctgtttgtgccccccatgtattatggtaataaaacattgtgcccttgctacaacaact

SEQ ID NO: 38300 - DNA, 287 bp, Glycine max
gttgcgtgcaacccattgacaaagtctggatgtcccctcatccatcaatcaatgagattgacttttgggtcactagctaattcaaccccatacttgtaacgattgcttctgctaatcaattctgcctatctagcatcttcaaaatccttgaatacccaatttactgcattgcgtaaagaggactaactctagaaagatattgaactagcaatcgactacaagataccaatgattgctgagacttagaagtgaaattgtactcttgcatctgattcaccactgaattc

SEQ ID NO: 38301 - DNA, 233 bp, Glycine max
tgtgatttcagtgatttatcgctgtgcacttgatctcatcatcatgcgcagctttaaacgaagaagatgccgatcctaaacatcgccgtcagaatgcctgaacaggcgactcaccccgacacgttgaaggcagctcttgcttaattcatctcaaccttcatcttcatgttcttctgctcacgcttcggcatcgcctacaacaagctcacccacaacaagtctgacacccctgc

SEQ ID NO: 38302 - DNA, 398 bp, Glycine max
attcccgccgcgacccactcctacgtccacgcttccttttccttatcgttatctgctccctcaaatcaatatttgttttcgacatcatattatgtgtgtgtgtgttaaacaatggctaatttctttgctgctatgatcttgtcactcattgccatttccatgcttcaaacagtggttatggctgctaatgagcaatgatgccacttgtatgacaacaagagcaaatatcgaagtggcagtgtcaagagataccaatgcccatcacaatgctcgaagaaatgtaaccagacccaataccacaagcccttcatgtttttctgtcaaaagtgctgcaagaaatgcctgtgtgtgccccccttgtattatggtaataaatctgtgtgcccttgctacaacaa

SEQ ID NO: 38303 - DNA, 376 bp, Glycine max
ggcggcgctgtggctgactctccggctaggttgaggagaagactgagttcgacttgttgatttataaaggtgccgagcgagcgctcgaatcgctgtgattaaggctgtgagggcattgactaacctagctctgaaggatgctaaggattttatcgaaggttttccgaataagttcaaggaatggatttcaaaggactaatcttaagattctaataatcaactctaataatctggttccaaggttaccattgcttaaacactgtttagctgcatcatatatgttcttcttcttcttttgttggttgtatcttaattcaccagttcactgtaatttcattttcattttgtcttgatttcaatcttttattttttaata

SEQ ID NO: 38304 - DNA, 268 bp, Glycine max
ctttcacacaaccaaagcaaacaacaattctttcaagactctaatttccgcacattacaattccatccaactataattctcccctaatttccaaattattctctctaatacaactcctcaattccttaaaataaatcccataagaaacgttcctttcattgaaactcccaattttccagtcttttataccaattccattgctcgttacgattctcgactcaagatttacaactctttggtctcatcttcttccattgataattcccac

SEQ ID NO: 38305 - DNA, 362 bp, Glycine max
gggactcattgttctactcccaggttttttacaaaagcaaaatggtcaatattgtgtgcattgttgctggatatgtggggggtcctactatggcagtcattgcacttaagtgcccatccattgaagttgctgatgttgatatctctaaatcccgtattgcagcctgtaacagtgaccaccttcctatctatgaacctgtctcttgatggtgtagtgaagcaataccgaggcaagaactctatacttcagcactgatgttgaaaatcatgtcttggaggctgacataatgtttgtctctgtcaacaccccaaccaaaactcacgatcttggagctgttaaagcagcacatttgacatattggg

SEQ ID NO: 38306 - DNA, 283 bp, Glycine max
tcgataggattccggtcctattgtgttggtcttcgggatcggagaagctgctacggcgggggcttgtgcagacccgcagagactatgtcagctgggacgggatacatgccactgaagctgcaaatagtatgatagcgtatgctgtgatcagcggctcctattcgtacccacctttcgatctttcaaagctatgtagcccttaagcatcatcagtcgtgaaagggagtacagtatcaccatacaccgcattttctctgaaacaagcaggcacatttttttcaaa

SEQ ID NO: 38307 - DNA, 385 bp, Glycine max
  unsure (1)..(385): unsure at all n locations
ctgggattcatgaccacttcatcttatgcgcactgcagatcgtgtccttatcacatctggggacctcggctatcctcgtatttcctaagttatctccttgtgttgataggcggaatcccgcactcggatgttgtgtgtgcactgctgtagctagaagaacattgnatagtgactatcatgcactaccttcttggagctttcaagcctgcatgtaatgtcttcttctcattttttgatgggcagaaccggacgcatgttccgttttaacacgaacttggtcaatagttcccagtgccacttttgcacagttgagaacacattggcgagaagattaccctttaatcaaagcacgggaagaagactgatcacaatggtgttaaacttg

SEQ ID NO: 38308 - DNA, 325 bp, Glycine max
cccacgcgtcaggactgcccaagatgtatagacagtgatacggcgcaggcggggaaccagcatatttctgatcaacagtagtggatacaccatctgggtcgaaattcatgatgggccgtacaatgtgattaagaactgagattacactgggaggattgattgaatccatagtggtgaagggaaatgctggaatgccaaggtgctctgttaagaggagctagtagaagcagttgccacagtcacaggacccaagtgtgactccttatgcttcattgatgtgatagttcataaggacgacaccagtaaagaattgctggaatggggc

SEQ ID NO: 38309 - DNA, 315 bp, Glycine max
cagacgcgtgagtagtcctaagtctctggagaataaggctaaagatgactacagggcacggggagagtttcccgtaaaggagagactggaagcccaagcgagtgaagggatcatattgccatcaagtcagaagggagctcaaaacaaacactagcaggaaagtttgaggaaaaagagtgaacctgcttaacaaatccaacccagttcacaagaaggttccagcgaggattaacaaagagaagcccatagcagagtctattgtgacagttgaacacattgataggacatagaagaacaaccccatcttgcctactg

SEQ ID NO: 38310 - DNA, 317 bp, Glycine max
aagactgaaagaatggggtggaggctgcttcgaagcttgatgtcagatatgacagacatcatagttttggaacaacatactaacgaattactcatatgatataatgggatggacccggctatctcgcacgctaaacgtattggcggccttgatgctctgtctatatccctaattaccggtcatgggccaggatactcattggcatgcgatgaatctctaagagatggagtgcgtaatactgggcgaatgaatggaatccaggtaggtgtataagagaagcctgataccagagcaggtgctgaaggcttctcaactga

SEQ ID NO: 38311 - DNA, 413 bp, Glycine max
  unsure (1)..(413): unsure at all n locations
ctcgcgcgtccgtcaagcattgcatccctctttattcgtagcttgntttgtgctttagataaaacgtctaccaaatcaagaggggttgtacgatcatagtgtgtgttttgcaacaatggctaagttctctgctactatgatcttgacactctttgtcattttcatacttcatacagtgataatggctgctaatgaactatgactccacttgtttgacatcaagatcaaatacttaagattaagtgtcaagactgtccaatgcccatcactatgctcgactagatgtaaccataccctttaccacaagatctgcatgtttttctgtcataagtgctacaagacttgcctgttcattcttgccgtttattatagtcataaagctctattcccttgcttcaacaacttagaatacc

SEQ ID NO: 38312 - DNA, 356 bp, Glycine max
gttgtccaaaccaatcttgaacccttatgtccgcgagcatacagctgctcaggctggtgtcaaggccacgcgggagcaagcctgacacagttaccgttcacctcaacatctatgatctcacccgaatcaacggctatgcctattggcttggccttggagtctaccattctggggttcaagttcatggattggaatatggttcacgagcgcacgagcacgacacaacggggattttcggagtccaacccatacactgccctgggttcactttcagaaagtcaatgttcatcgtaacaacatatctgtgtccgaaggatgttcgagcatttatggataagctggctcatgattacttc

SEQ ID NO: 38313 - DNA, 416 bp, Glycine max
ctcactcgtccgtacacatatgcatacgcgctctcactccatgccatttccgcgattagcattagcatacgtgcacttacctatctggtatctagctatggcacatgatatgggtagcagtgactttggagaacctaacttaggaaatgaaagagcaagttgtacttctacgcccagaatgaggaagaagagctcacagctagacaagccacagcaaccacagagaggtcttggagctgctcaatcggagaaaattagattacatggatatcacccttatgtgcaagctacttacacttctaatatttccaacgaggatccaagagtgcagatagcgtattcatcggtgccatcatgtgctgtatcttactcatcatcatacgcagcttactatggattccaacgcagcatcatga

SEQ ID NO: 38314 - DNA, 402 bp, Glycine max
cccacgcgtccgtcaagcattgcatccctattgatttgtaactcggttcgcgctttaaataaaaggtctgggaaatcaagatgggttttaagatcatagtgtgtgttttgcaacaatggctaagtcctttgctgctatgatctaggcactctttgccatttccatacttcaaacagtggtaatggctgctaatgaacaaggaggccacttgtatgacaacaatagctaatatgcacgtggaagtgtccatagttaccaatgcccattacaatgctcgacgagatctagcctgacccattaccacatgctctgcatgtttttctgtcagaagtgctctaagacatgcctgtgtgtgccctcggagtatgatggtaatatagctgtgtgctcttgctacaacaa

SEQ ID NO: 38315 - DNA, 255 bp, Glycine max
agcacgcgtacgtctaagcactggccaacacattcaaggactgttgttcttcaagcctcatgttattatgagtccttgagttctaaggagacaggaacctacgtctggtggatgaatcatgaccgtgtgatcagagcgtgaggcacggccctctatgagttcctatctggagtactcttatatgcgactgtataggatcgttcttaggacactaacatgagcctagtgatggtcatactagaagtctgacacagc

SEQ ID NO: 38316 - DNA, 225 bp, Glycine max
gaccaacgccaaagccgtccactatctctcttctgcatgatctgaatcctgaatgcatgagcgagatcttgcacggtcatacccgtcaatgcagttaccagccgggcctcatgcactgggaggtgatctgcgacgagcacggcatcgatcccacgggcgagcgcatctagggatgcaacattacgatcccactcgtgcggatcaatgtgtattacatcgaggcct

SEQ ID NO: 38317 - DNA, 390 bp, Glycine max
cgcaatgctgctcctggcgctgcaaactttttgactgatatgatatttactggacaccatgataatgctgaatttgctctagcgatgttcccaactgaaccctatgttcttatcagaggataggacatatcattctagtagcgtagcattgtagaccatataacttctgctgtcacagacattaaatgttgatgatcaattatgacacttgtctctcaatctgtagaaagctgtgatcgaactgctgatgagcctactgttcgaccaccatggatttattgcacgcatgaagatacagttgcagatgcgacttattgcccatttagtgcacaggagttctagattgctgtatatgattcttgggttatattatggtatgcacgtgttggc

SEQ ID NO: 38318 - DNA, 315 bp, Glycine max
ctcttctactttgagtcttcttgatccttcttatgctccttgaactcaaacatgtctgatgacgcgggtctactataattctggccaagatcatttgggatgacgtgtatgattgcacttgctgaaaagggtatcacatatgagttcaaagatataggacttgatgaacaagagtcctcttctcctacaaatgaacccggtacacaacaagatttacaatctcatccacaatggcaaacccattagagaatccctcattgctgctctttacatcgatgaagttctgaattgactgatatgtcttgttgccttttg

SEQ ID NO: 38319 - DNA, 377 bp, Glycine max
tcccgaatcgaccgacgcatccacgcgtccgcgcaccagtttcatcgcactaatatcttgctgtttggagcgatccgagaaaaactctgcaggcatgttggtttaccaggacctccatacaggtgatgagctaatgtctgactccttccgttacaaggaaattgagaatggaatgctgtggcaagttgaggggaaacgcgcagttaaaggaacagttgctgtatacattggtgcaaacccttatgctgagggtggatgagaacatgaaggagttgatgatgcatatgttcaggttgatgacattgttgacacatttagacttcatgagcaacccggattctataagaaacagtttgttaccttcatgaagaggttta

SEQ ID NO: 38320 - DNA, 455 bp, Glycine max
ctcactcgtccggactgctcatgatgtatcgacaatgttacggtgcggtcaggaaaccatgatctgtctgatgaacaatggtggatacaccatcgaggttgaaactcatgatgtgccgtacaatgtgattaacaactgcaattactctgggttgattgatgcaatccacaatggtgaacggaaatactggactgccaaagcgcactgtgaaaaggagctagttgaagcaattgccacagtcacaggacccaagacagactgcttatgcttcattgatgtgattgttcataacgatgacaccagtaatgaagtgctagaatggggctacagggtttctgctgtcaatatccgtgcgtcaaatcctgagtgatcatgagaatatattctatgactaagttgctgcagatgcccattagctctatgaaagggagaatcatgttgaatgatgcccttgt

SEQ ID NO: 38321 - DNA, 276 bp, Glycine max
gtctgacatactgtgccgaaactgacagttctttatgaataccatgttgcccatggatgagagatggtgccaaccattgcatggagcatgcccatcgaatacattgactgactgatgtacacaatcttaacatgaagaaagaatgctaccctgatgcatagggctcatatgaaccagctaatcctcaatggaaacgactctgtacaaattgttgataagatggccactgtagctgctgctctgctggcacgcagaactgctttcattgatgcattc

SEQ ID NO: 38322 - DNA, 271 bp, Glycine max
tccacacgttcgggctaagctcattctacatcagtgcaaacactctctctcatggcatgagataagaagattaggagcggcatcaacggatttgaaaggattgagcgctgggtggccactggtgcccttcaaaggaatgacgatgaacttgatgctgacaacaatcctttcatcaccactgattacatgacatacatgctcaagatcgacaccggtcatggccaggggaagcatttggatgggaatgtgaaggactctgagacccttctct

SEQ ID NO: 38323 - DNA, 344 bp, Glycine max
agaaaacctaagcttataattagaaacaaagaacagaagaaaggaaagaattggtcggtgaaaatgcagggaggaaagaaagcgggagagtccattaaggaaacagctacaaacattggtgcttctgccaaggctggcatggtgaagaccaaggccactgtccaagagaaggcagaaagaatgacagcacgtgatccggtgcaaaaggagttggcaacccaaaagaaagaggcaaagatgaaccaggcggagctggacaagcatgcggcgcgtcagcataacacggcggtcaaacagtccgtcaccacggctgggcacatgggacatggccaccacaccaccgg

SEQ ID NO: 38324 - DNA, 282 bp, Glycine max
  unsure (1)..(282): unsure at all n locations
cgcaccagnnacaccgcacgaatatcttgttgtttggagcgatccgagaaaaactctgtgaacaggttgttttaccatgacctccttacaggtgatgagcttctctctgactgctgttgttacaaggaaattgagaatggaatgctgtgttaagttgatgggaagtgggttgttaatggagcagttgatgtagacattggtgcaaacccttctgcatagggtggaggagaagaagagggagttgatgattgcactgttaaggttggtgacattgttgacaca

SEQ ID NO: 38325 - DNA, 403 bp, Glycine max
gcaaatacctagaatccttttataccttacgcaagcctgtggcatccactatagatacggtggcatgagcactttacaaggttttttgcgcatcacctgatccagcaatgaaggatatgcgccaagcttgcttcgattatcttagtcttggaggtctattctcggaagggccaatctctttgctttcaggattaaaccctcggcccttgagcctggttctccatttctttgctgttgcaatatatggggttggccgtttactgctaccatttccttcacctaaacggatgtggattggagttcgattgatttctagtgcatctggaatcatcttgccaataattaaggcagaaggagtccgtcagatgttcttccctgcaactgttccaacttactatagaaa

SEQ ID NO: 38326 - DNA, 365 bp, Glycine max
tgcaaacatcacaatgaggctctctaattaagactcttacgaacaaattagagcgccgtttaaaccgaacacagggggcatctaatcggaaattattaacaccactgaagatacaatggtctccaccacctttaaggtcgatactataccaaatgcatttacctcatacgctagaaatacccagaatattaacatgcagacacttgtctctcagtattacaacacgtggtgatacatcacaactaccaataacctgattacactcacagaccagatacataaaatactctggactgttatactataaactacattacacatgctaagctaccttgcatctgccctcaaacaaagaatgtcatact

SEQ ID NO: 38327 - DNA, 269 bp, Glycine max
gcgtccggtctcatacgctgaactgaaaaggaccgtcttttatgacttgcacgcagacaatggagaggagatggttccgttagatggatggagaatgccattccaatacgaggactcagattagagactgctgcccttagctgtaggagagaatggcagcacaatatgacgttgacgatatgagcggtctaatcctccaagggaacgactctgacacgatgattgcgaagctcagtatcgctgacgatgctagtcttgactctgtaact

SEQ ID NO: 38328 - DNA, 391 bp, Glycine max
gcgtccggctgcctcctcttacgagcctttccttgcattttattgattcggtgggtgcgggtgcaagtaggcttttctagaccctgagcggcgtcggcacaccgccggagaacacgatgatcgtctgcgtcgtcgacgtcggtcaccagaacaatccgctgaacatacagagcttcacggaggccgatgatgctctcaagctccaccacatcgttcattgctcgctcgatgtggtcgacgagcgagtgaacaatcctaaaaagcctgggccgatgcttaatgagacgtttttgggactgctttatcctattgaaaactacaaagtatatggatatctgactaatacgaaagtgaaatttatcttggtgaccacggatctggatgttaaaga

SEQ ID NO: 38329 - DNA, 345 bp, Glycine max
cggaggcgtgcgcccgcgcgtccggtgatttcagtgagtgattggtgttcacttgatctcatcataatcgtgagggtgtattgaagaagatgccgatcagaaacatctacgtcggaaggcctgaagaggcgactcaccccaacacgttgaaggcggctttgactgagttcatctgaaccttcatcttcgcgttctgcgtctcatgctcccgcatctcctacaacaagctcaccgacaacggcgctgacacccctgccggactcatctcctgcttcatcgtccatgcattacgcctcttcgtcgccgtctacgtcagcgccaacatctccggcggccacgtcaacc

SEQ ID NO: 38330 - DNA, 205 bp, Glycine max
cgcgtccggctaggtctagctagcagtctcagtccaggatagagagaaaaaatggcagagggtctaatgcgtcggattttccatgcgcgcatagaccgacgtcgagacggcgattgccactcccatcgacaactacgacatgatcgtgacggcatcacgcgacagatccatcatactatggcacctgaccaggaagacaagacct

SEQ ID NO: 38331 - DNA, 339 bp, Glycine max
cgtccgcccggacggactccctcacccatttacacatcatatccatggacttaaccaacgctctctgtaggtcctacatgctacgctctgccaaccgccagtctctgacccgacgagcgaaccataacgctagagttaataaccggaaaccgactaactcggctctccgcgaaagactacgccaaagagattgccatgagccagcatagccgctctgctatgcaagccggcattgacaatctcgccgacgctgctgggatcactcttgggctcagaggtaggaacgatgcgatggatgagtttggaagtactaaagtgagcaacgatggtgtcaccatt

SEQ ID NO: 38332 - DNA, 279 bp, Glycine max
gccacgcatacgggaggtctctggaaggatattaatggaattgatgataagacggatgccagcatggtttgagaagaccaagaagagataacggtagaacttacggaacatactgactgcaataaattgcgaatgatggcatgtcgacctgcaccgagtcaggtgacttggatggggtatgccactgcatcatgatagactacaagtgattatagaatcactgattcactggcagaccctactgaatcatatcacaagcatgtagaggagttcgctaga

SEQ ID NO: 38333 - DNA, 447 bp, Glycine max
cacgcgtccgaccaatccttcgtaaacataccaatcctaattttatcttaatgcctttttcccatttcagtgcaaacttcaaccatggcttcaataataaccttggtgacatccaccttgctctttctttctttcactttgtcatgtgctattgacacctccaccatcaccaactacaccgacaatgaggtcatgaccatgtacgaggagtggttggtgaagcaccaaaaggtgtacaatgggttgagagagaaggacaagaggttccaagttttcaaagacaacttgtggttcatacaagagcacaacaacaaccagaacaacacttacaaacttgggttgaaccagtttgctgacatgacaaatgaggaataccgtgtcatgtattttggcaccaagagtgatgccaaacgcatgctcatgaaaaccaagagcaccggtcacccg

SEQ ID NO: 38334 - DNA, 306 bp, Glycine max
gcatgggttatcctaagtctctgggaatagcgctgcaatggcttcaagttaggaggaggtgacccttttgggagctactggaagcccatttgtgtgcagggttcatattgtcctcaagttgaacggagttcaatacaaatatgtcgaagaaaattcgacgaacatgagtgaactgattctcaaatccaacccagttcacaagaaggttccagtgtttattcacaatgagacgcccatagcagagtctcttgtgattgctgaatacattgatgagacatggaagaacaaccctatcttgccttctga

SEQ ID NO: 38335 - DNA, 132 bp, Glycine max
cgtaggctactctgagtattacggatccgtctgaacctgcatggactcacacatggcacatcgtgcgcttcatgtagatatctggccaagtacattcggcatgagggtcaggatcgcactcgctgaaaaggg

SEQ ID NO: 38336 - DNA, 369 bp, Glycine max
acgcgtccgcgggggcgtgggttatcctaagtctttgggtatagtgctgcaatggcttcaagtcatgaggaggttaccattttgggagctactggaagcccatttgtgtgcagggttcatattgccctcaagttgaagggagttcaatacaaatatgtcgaagaaaatttgaggaacaagagtgaactgcttctcaaatccaacccagttcacaagaaggttccagtgtttattcacaatgagaagcccatagcatagtcctcttgtgattgttgaatacattgatgagacatggaataacaaccccatcttgtcttgggaaccttaccaaatagccttggcttctttctgggaccaattcattgatga

SEQ ID NO: 38337 - DNA, 309 bp, Glycine max
cccgggcgttcgggtggagacatgacaaattctattcccagagacactgtcatcccaacggagatatcttaggagttcaccacctttcaagacctgcagactaccttcttcattcgagttttcgattgctaacggatgctcacaatgcatagccggcttctgtgcaaattggctcctcctgaactttttacacttcaagggcgtacgcctcatattgtagggaccttcgaagctgatctcaactgcattctggatgcgactgcagacgacatggtctctgggaaatcacactagatcaccattacatac

SEQ ID NO: 38338 - DNA, 396 bp, Glycine max
ccggccggacgcacgcgtccggccgcgcgttcgcgcgtcgctgctccttattagattcactgcataaatttgagagggaacgtctgcttacatgttggtttatcaggacctccttacaggtgatgagcttctctcggactccttccgttacaatgaaattgagaatggaatgctgtgggaagctgacgggaagtgggttgttaaaggagctgttgatgttgacattggtgcatacccttctgctgatggtggagaacatgacggagtcgatgactcagctgttaatgatgctgacattgctgatacatgcagacttcatgatcaacccgcttttgataacaaacagcatgttaccttcatgaagaggtttatcaagaatttgactcccaagctcga

SEQ ID NO: 38339 - DNA, 410 bp, Glycine max
acgccacgcgtccgcccacgcgtgcggagattgcagtgagtgatcggtgtgcacttgatctgatcataatcgtggaggtcaattgaagaagatgccgatcagaaacatcgccgtcggaaggcctgaagaggcgactcaccccgacacgttgaaggcggcttaggctgagttcatctcaaccttcatctacgtgttcgccggctcacgctccggcatcggctacaacaagctcaccgacaacggcgctgccacccatgccggcctcatctgcgactacatcggccatgcatacgccctctacgtcgccgtctccgtcggcgccaacatctccggcggccacgtcaaccccgacgacaccttcggcgccttcgtcggcggcaacatcaccttactccgcggcatcgtctacg

SEQ ID NO: 38340 - DNA, 390 bp, Glycine max
  unsure (1)..(390): unsure at all n locations
cccacgcgtccgtcaagccttgcgtccattttgacgcggactcgggtgggtgcattaggtgagacctctgccaactcgagaggtgttgtaacatcatcctgcgtgtggtgcatcaatggctaccgtctgagctgatctgatcttgccactctgtgccgtttccatacttagtacagtgatcatggctgctaatgaacaaggatgccgatagtatgacgtccctagcaatgatcgtactggaagcggacagagctaccaatgcccatcgccatgctcgaggtgatgtagccagacccaataccacaagccctgcatgtttttctgtcagaagtgctgcaggacatgcctgtgtgtgcccncggngtattatggtaataaagctgtgtgccc

SEQ ID NO: 38341 - DNA, 394 bp, Glycine max
tcgaccggcgcgtccgctttttactttgagtctactcgatccgtctttttctccttgtactcatacattgcatatgaggtggttctgctagatggctggccaattccatttttgatgatggtcacgattgcacttgctgaaaagggtatcaaatatgtacacaatgaagaggacttgatgaacatgattcctcttctcctccaaattaacccttttcacatgaaaattcctattctcatccacaattgcaaacccatttttgaatccctcattgcatgcccactacattatactagtttttggattgacataaacttccttgttgccttgtgacccttaccagagatctcattctttattctggtctgattatttttatattaatatatattat

SEQ ID NO: 38342 - DNA, 369 bp, Glycine max
ctgtccaatatgtatcttctctgttacggtgcggtctaaaaaccatcggctggtctgatcaacagtggtggatacaccatctatgtttaaattcataataggccgtacaatgtgattaaaaactgcaattacacttaatcgattgattcaatccacactcgtgaatggaattgctcaactgccaatgttttctgttaagagtagctatatcaatcaattgccacatccacatttcccaaaataaactccttatccttcattgaagttattgttcataaagattacaccactcaagattttgcttgaatagtgctcatagatttcttcttccaatatccaaccctccaatccctcataatcttcaaaatt

SEQ ID NO: 38343 - DNA, 353 bp, Glycine max
gaaattccagggaaaacaattttctctttttgatgctgaatactttgtatttcactctcctgataacaagcttgtacagaagagttttgctcggttgtttttcaatgacttcttgatgaattccagctcttgcgattaaggtggccaagaaaaaactgggaccttttgcaactttatctggtgatgagagctaccaaagtcgggatcttgaaaaggcatcccagctacttgcaaagcctctatatgatcagaaggtccaaccaactactttgattccaaagcaggttggaaacatgtccactgggtctttttatgcagcattggcctccttcattcacaacaaacatagcaca

SEQ ID NO: 38344 - DNA, 410 bp, Glycine max
cgcgtccgcttttctactttgagtcttcttgatccttctttatctccttgaactcaaacatggcatatgaggtggttctgctagagttggggccaagtccatttgggatgagggtcatgattgcacttgctgaaaagggtatcaaatatgagtacaaagaataggacttgatgaacaagagtcctcttcttctacaaatgaacccggttcacaagaagattcctgttctcatccacaatggcttacccatttgtgaattcctcattgctgttcagtacattgatgatgtttggaatgacagaaattccttgttgtcttctgacccttaccagatagctcatgcttgattctgggctgattattgttataataatatttatgattttggaatgaagatttggacattaata

SEQ ID NO: 38345 - DNA, 234 bp, Glycine max
cgtacctcacgcgttccgttgagtcattcatatttgtttctagaacactgtttcccaactgggaaggctcatgtttcaccacgtaggagaccagcatactacagtcttcattcatgttttcgaatgctataggagattcacaaaggattgcctccttcttgtcaaatttgatctgtctggaatttcttcatccctaatgtgtactccttatatttaagttaccttctaatttta

SEQ ID NO: 38346 - DNA, 428 bp, Glycine max
ctttgaaaccctccaaccttagtttcaattttaaacttgttcaccctttattctctcctggtccaaacagcaaccatggcttcaataataaccttggtgacatccaccttgctctttctttctttcactttgtcatgtgctattgacacctccaccatcaccaactacaccgacaatgaggtcatgaccatgtacgaggagtggttggtgaagcaccaaaaggtgtacaatgggttgagagagaaggacaagaggttccaagttttcaaagacaacttggggttcatacaagagcacaacaacaaccagaacaacacttacaaacttgggttgaaccagtttgctgacatgacaaatgaggaataccgttgggtgttttcccaaatttttggggttttaaaattttttttttttggcaccaagagtga

SEQ ID NO: 38347 - DNA, 369 bp, Glycine max
gggatgcaaatgcttccacacaggggttttctgctgggtgacttctagatcaacatgtctaatcatgagttcaagtccaagtacggcgagcacatgaagcgcgaggacctggtcatcaacaagtccaagaaggacaactcctgcgaccagatctacgtcttctttcccgactagcccaatgtcggcgtcaagaccatgaagacctacaccaaccgtatgaactccgaaaacgtctatagagccattcttctcacccataccaaccttaccctcttcgtccgcacctgcatcagctaaaatcttcttcccctcaaaaaaaaaaaattttttttttcctccccaaaaaactcctcccttcgagggtctttc

SEQ ID NO: 38348 - DNA, 369 bp, Glycine max
ttctagattgttttgttctgtatatttgtgaactttcaaatgaataagggttttaagatcatattgtgtgttttgcaacaatggctaatttctttgctgctatgatcttgtcactctatgccatttccatacttcaaacaattgtaatggcttctaatgaacaaagatgccacttgtatgacaacaatatcaaatatctaagttcaactgtcaagaattaccaatgcccatcacaatactctacgagatgtatccagacccaataccacaatccctgcatgcttttctgtcataaattcttcattacatgcctatatcttccccacctgtattattgccataaaacttttttccctttttacaacaact

SEQ ID NO: 38349 - DNA, 220 bp, Glycine max
atgtctagcacggagggccagaccatcaggagcgaggagtgagattgcatgagggggggggaagccgctggtggttgaagaagtggaggttgcgccaccgcaagcaggtgaagtgcgtttgaagatcctctacacctgtctttgccagactagtgtgtacttctggagtgcgaaaggccaagctccatagtagcctcgcatagtttggccatagaagctt

SEQ ID NO: 38350 - DNA, 211 bp, Glycine max
cccacgcgtcctgtgaagctgggtcattcctccgcggtatggatgtgaaccgggtaccttctgtggttgggggcgatgagtaagcaggtggttcatcgtcaaacagcacggattctatcgtcagtggaaggcgcagcgagagggaaaccactggagaagaaaacgacacagacagagcttgtgccatgtgcatcatcagcgacgaagaaga

SEQ ID NO: 38351 - DNA, 299 bp, Glycine max
  unsure (1)..(299): unsure at all n locations
accaagaggatgctgatggctcacaggaagttcgatcacctcacgcacgggtcactgggatggcttcccaggaagcgtgctgctcgtcacaggggaaaagtgaaggcattgcccatggatgacccatgcaaggcacccaggctcactgcattcttgagttacaaggctgctatgactcacatagttcgagaggtcgataacccaggatcacagcttaacaagaaggaaacatgtcagcctgttccaattatagagacccgtacaatggctataggtgccgncgtggctcatgtgaaaac

SEQ ID NO: 38352 - DNA, 303 bp, Glycine max
agccacgcgttcgtccacgcgtcctctccatttagaagatgaaacttaatcgatcatcactgggacttactaatacatgagggcatacgagacccagaacaagtatgagagctctgaggttgaggtccaggatcgtggtgtttttgactttctcggtaagataaaggatgaagaagacaagcctcatcctcaggaggaggtcattgccaccgagttttaaaaagtcactgtctcagaccaatgagagaacatgcacatgccttttagaaaagcttcaccgatcttacagcttctttagctctt

SEQ ID NO: 38353 - DNA, 381 bp, Glycine max
acgcttcttctctggttgattccgatctttagtcttcaggttctcctcgttgttcttggcttggctgttttcaatgtcgagtctttcgttaatataattagatgtttgggagggcacccaataagaacgataattctatgtactactaaatccttggcgtcttcaataacgcttcgcaggatgatctgaagaaggcttacaagatagccgccattaagaatcacccctacaagggcggtgatccccacaagtttaaagagcttgcgcaagcttattatgttcttagtgacccttataagcgtgagaaatattatcagtattgggtatatgccctttatgtatgaaatggttttggccttttgcattatccatttttatatc

SEQ ID NO: 38354 - DNA, 388 bp, Glycine max
  unsure (1)..(388): unsure at all n locations
cacacgtcctcccactcttccggtgatataagctagttataacaagatgttacanctactggacactgcgattttctgcgaagatgctttttattctcacactcatcttcaaaaccccactgagaaaactcttcatcgtttccctctatagtgttaatcgcggtcgcggtcccttggtggtttctaccgtgtgcgccacattgatggttgttctcgcttctagcctctacagcatgtccaatatccatcaactcacccctgatgccttcataattcaacctcaccttaccaattctctcatttttcaaactcatgcttgaagctttttttcattgtagtttcctgcatgtttcctctttcttgattattgatttatttgcaccctttc

SEQ ID NO: 38355 - DNA, 128 bp, Glycine max
cggacgcgtgggggagtcttacatgtgtgccagtcaaccggcgaataaacccctaaagggcaaggaagcttattggtgggatccccctgtgggttggacccgccaccgacccttatcttttgtgaaag

SEQ ID NO: 38356 - DNA, 195 bp, Glycine max
ctcgatggctcccaaaccgcctaatacgggtctgcttgctggaccgaacaacggtcacggttttggctagaaggaattggcttcacaccccttacatcgtatggggaaaacaagcactagggagcactttgcgaggaaccacataagagaggttgccggcattgcaccctatgaaaagcgtataactgagtttgc

SEQ ID NO: 38357 - DNA, 383 bp, Glycine max
  unsure (1)..(383): unsure at all n locations
gcgtccngaggagatatatttacctaaactaagagatcttgaaagagaatccaaacatgtgggcttacgtggcaccttctttggatgctaagcaaaacattgtggtggtatatgtaccaaaactagggaaaaaagcttcatatatagccataaaagaattgggccagccaaaatcaaaaaatacccactttatccttttcaccaccaacggtgtttacattccttgtgcttattaccaacttaccaaacaaattgggctttttccctatttttaaaagtattttaatttcccaccaagtttctttttaagtggaccggtttttttttgcccaaaatttttttttaacaacaaaggggccccctttcctttttttttgttttta

SEQ ID NO: 38358 - DNA, 265 bp, Glycine max
ggaatgataaggtatatgaacaatttttaacttatacttctacaagatgttctatgttttcatgtaaattttatacactcaaaaggaacgctaaaatattttaatcgtaacttatatgatttgttacgtataaaaagaaatatagattcatattcccatacatataaattatatattaacaaaaaaaatcttggattactttttgaaaaaaaagtagaaatccatttttttgtagtaaaaatactattccaattataataataag

SEQ ID NO: 38359 - DNA, 320 bp, Glycine max
caacttcttctaaattgggggaatatgagttattaaaaggttcacatgactattgtagtcattggccatgtccactcttggaaatccactaccactggtcacctgatttacaagcttggatgcattgacaagcctgttattgaaaagtttgagaaggaagcttctgaaatgaacaagaagtctttcaagtattcctgggtgcttgacaaacttaaggcttaacgtgaaagacgaatcaccattgatattgctttgtggaaatttgaaacaacaaaatattattgcacatttattgatgcccctggacataaggatttcat

SEQ ID NO: 38360 - DNA, 406 bp, Glycine max
aacgattttacccacttttcccactcaaccccaatgtagcccttatgaactctttccagacattcaaatacttttctaatccgaagcagaatttacgtcctcaaattcataatcagcccatctctctgaaaccactgatgatcataattatgcgtatgtccaataccatctgctttctctactggtccatcaacaattatctacctcttactactcgcaacaagaagaataacgacaaacccaaaatcctaacaatgcagaactttaaattcttggaatcttcaaagtacattagatatcttgccactttactagttgcttatggaatcagcatcaatctttttgacgttacctttaagtctaagctcaaatctcaatttcctaaacccaacaaatactcttcttt

SEQ ID NO: 38361 - DNA, 226 bp, Glycine max
caagtgggggagaacaatagagggataaaccgattaccgagccaggattctcgttgattaatcaggacatgaacaaatgtatcactccgaaattccgatttgtggttcgctttagcaacaaggacattgatgtacaattaatatctgctaacattgcccgccatttagatcttgctactgcatattcacatgagctgtcacgatattgtcttgaagtaagactttc

SEQ ID NO: 38362 - DNA, 359 bp, Glycine max
tgcttgctcctcttactatcctttcctttcattctataaattccataaatgcaaatgcatctggaaccttttaaaccctaatcggcctacacacacacacgaataacaagataattgtctacgtctccttctactaacaccataacaatccactatacatacacatcttcacagattccgattatgctctcaaactccaccacatcttccattactctctctattttctctaccatcgatttaacaatcctaaaaagtcttttccaatacttaatcatacatttttttgactgctttatcctattgaaaactacaaaatatattcatatcttactaataccaacgttaaatctatcttc

SEQ ID NO: 38363 - DNA, 376 bp, Glycine max
cccaggcatcctcagggctcacatgaacttctatgcgactagggacctgtcgtttcctgtcgccgatgtgtaagttacgttcattgatgatactgccgcgttaccgataccttctaatcaaatccaagattcatctccatgcgcacatgacgcttttccagtttgcctcatcccaagaagactgcatatagcgcctattgaaacacgtcatcacctcggattctgataatgacacgcacatgatcaccacattaatcaacacagttattgatccaacgcgcagggaggatgtatcgctctgtatgccaatattgccgcttcataacgctgcttctcaatccgggtataacacgatcattctcttgtcatgcatatc

SEQ ID NO: 38364 - DNA, 407 bp, Glycine max
ctgcgcacgcgcgcggcctgattttctaatcaacttttcatgtcattccattaattgcgagtgtgcggcgtcaaggggacccctctagaccctgatcggcacctgctcaccgggttacaacaagatgattggctgctatgccagcgcctgtgaccataacaattcgatgctcatacacagctttacggaggccgatgatgctctcaagctctaccacatcgtccattgctcgctcgatcttgtctacgagcgactgaacacttctaaaacgtcctctccaatgcttaatgagactcttttgggactgctctatcctattgaaaactacaaagtatatggatatctgactaatacgaatgtgaactttatctaggtgaccaccgatctcgatgataaagatgctgatg

SEQ ID NO: 38365 - DNA, 284 bp, Glycine max
gaccgacgcgtacggaaaggctaccaaaccttcaactacaactcttatcctcaatcttcgtacaaagttgcactcggttgattttggtagatgtatagctcagacactctcgcttatcatcaagatgtcaactctagtttccgacctgcatctatataatattgctaatgtcaaggcacttgcatgctgatatcactcactgcatcacccactcacaagacatgaataacacttcatcttcttaattacctaattgtttgaatgatttaaatcttgttgacata

SEQ ID NO: 38366 - DNA, 244 bp, Glycine max
cgccgtgccgctactgatctcaatctctcgtctctccgcgtccaaacccttacttcctaccctatggggctttctctcatccatcatgaaaggaggaaagtccatgaccgcttctaaaacagccgatgcccaacatcgctagtgaataagaagggcaccgccccaacaccaggaaacccgtcggaaaggggcggccaccgatggacctaacaagccaaagaggcctccgaatgcctaatgcgac

SEQ ID NO: 38367 - DNA, 298 bp, Glycine max
  unsure (1)..(298): unsure at all n locations
acaatttgtcctaaactacnttcccacataaaccttatatcacatcaaatatttcaataattgttcttacattcagcttcatcttaacaaaaacacttttactttcttccattccaaaaattcttactttttttttcacttcatcatatacataaagatatttcctttatattcttcttacacaatcacttctttctattaatcttcccaaaactcttatcattattatatatactttctattctttttaaacataacaatacaaccttacattctacaaacaaattttttcacccaa

SEQ ID NO: 38368 - DNA, 374 bp, Glycine max
  unsure (1)..(374): unsure at all n locations
aaccaggacgcccccacanntnatnatcttctctctgactccttccgttacaaggaaattgagaatggaatgctgtgggaagttgaggggaagtgggttgttaaaggagcagttgatgtatacattggtgcaaacccttctgctgacggtggaggagaagataagggagctgatgatgcacctgttaaggtggttgacattgttgacacattcaaacttcatgagcaaccggggtgcgataagaagcaatttgttaccttcatgaagaggtttatcaagaatttgactcccaagctcgatgcagatcaacaggagttgtttaataagcacatctagggagcaactaattacctgctctctaatattaaagattt

SEQ ID NO: 38369 - DNA, 408 bp, Glycine max
  unsure (1)..(408): unsure at all n locations
ctttnantcttcttnatctccttttttctccttcaactcaaacattaaggaggggtgtttataatanatgtctccccaantccattnttnatntatctcaatattgcactttctnaaaatggtatcaaatatgagtacaaagaagaggacttgaggaacaagagtcctcttctcctccaaatgaacccggttcacaagaagattccggttctcatccacaatggcaaacccatttgtgaatccctcattgctgttcagtacattgaggaggtttggaatgacagaaatcccttgttgccttctgacccttaccagaaagctcatgctagattctgggctgattatgttgataagaagatatatgatcttggaaggaagatttggacatcaaaagggaataaaaaaaga

SEQ ID NO: 38370 - DNA, 187 bp, Glycine max
  unsure (1)..(187): unsure at all n locations
tctatgtgttgaacatcggatcggggggagcttgatagatgattctgtaaaaccaagtgtcctcacagggtcattgcaggatangcttttgccagcttgcccttggatggctcatcaccaatggtgcaggtcttgcatcatacccaatagacactgttaggaagaagaatgatgatgacctctggtg

SEQ ID NO: 38371 - DNA, 251 bp, Glycine max
  unsure (1)..(251): unsure at all n locations
taaaaatgtttgtttcattcctatttacctcaaaatctggggtgcttttttaccatgacgggctggtcnaccaaatctatgatgctgtcctcgacgcttgcctcgaacaggacccaaacagcaaggttgcctgcgaaacatgcaccaaaaccaacttggtcatggtcttcggagaaattaccaccaaagccaatgttgactacgaaaagatagtgcgtgacacctgcaagaacatcggctttgtcttaaac

SEQ ID NO: 38372 - DNA, 375 bp, Glycine max
  unsure (1)..(375): unsure at all n locations
cgaacaanccctaaataacacttttatttcttctacaacacanaaccataaggtacctgtttcattttaaaggaccccaccccacnaaccaaatcgattccaagttctgtaaagtgatctacgacgagcacatcatctatcccaccggaaagtacaactattaattcaacagcagcatccaactctaaaggatcaatgtttattacaactaatcctcttacaaaaggtacgttccccataccctgcttattcatctccaacctgcaaccatggacagcatcatatacttcccctactgcaagatcttcctccccgacaactttctcttcggccaatcctgccccattaacaattttaccaaaaatcattatactt

SEQ ID NO: 38373 - DNA, 299 bp, Glycine max
cccacgcgtgcgcccacccgtccgttccaaaaagaaaaaaaaactaaatcgatcatcactgggcttggctaatacataatggcagacgagacccaaaacaagtataagagctctgaggttgaggtccaggatcgtggtgtttttgactttctcggtaagaaaaaggatgaagaagacaagcctcatactcaggaggaggtcatcgccaccgagtttcaaaaagtcactgtctcagaccaaggagagaacaagcacagcctcttagaaaagcttcaccgatctgacagcagctctatctc

SEQ ID NO: 38374 - DNA, 313 bp, Glycine max
cccaaaacaaatatgagaactctgaggttgaagtccaaaatcgtggtgttttttactttctcggtaagaaaaaggatgaataatacaagcctcatcctcaagaggaggtcatcgccaccgagtttcaaaaagtcactgtctcataccaatgatagaacaagcacagcctcttagaaaaacttcacctatctgacagcagctctatctcttcaaattaggaggaatgataagattgatacaaaatgaataacaataataatgaaaagaaaagccttaaagacaacatcgatcagaaaataaaaggttatcatca

SEQ ID NO: 38375 - DNA, 310 bp, Glycine max
  unsure (1)..(310): unsure at all n locations
accacncatccgctttattttgaagaacaaacttaatcatcatggctgggntcattaatacagcggggcggccnanacccanaacaagtatgagagctctgaggttgaggtccaggatcgtggtgtttttgactttctcggtaagaaaaaggatgaagaagacaagcctcatcctcaggaggaggtcatcgccaccgagtttcaaaaagtcactgtctcagaccaaggagagaacaagcacagcctcttagaaaagcttcaccgatctgacagcagctctaactcttcaagtgaggaggaaggagaagat

SEQ ID NO: 38376 - DNA, 316 bp, Glycine max
  unsure (1)..(316): unsure at all n locations
aaaaaaaaaaaaacatttaattaacaacaaaaaacacaaaaacaactgaaccgtttttatatcaaaancgccccccccacaccaacnnacaacaaaataattttcttcgacaccttaaacaatcaccacaacaatcccctgcacatacaaaactttacataccccaataatgctttcaagctccaccacatcatccattactctctcgacctcatcgacgaccaacttaacaatcctaaaaaatcaaacccgattctctaataaacacactttttactcctttatcctattcaaaactacaaaccatatctatatc

SEQ ID NO: 38377 - DNA, 414 bp, Glycine max
cccacgcgtccgaaaaagtttatggaactgtctaaggtgtatgatggatttgttgactcttcagacaatctaataataaaagctcaagttcaagtcataagggaaaaatcagacaggcctttccgttgccttgattgccagtataggagggaacttgttagagtatatttgacaaatgtagagcaaatttgtcggcgttttgtggaggagagaagaagcaagcttggaaagttgatagaggataaagctaggtggtcaagcttctttactttctggcgagaagttgatcaaacttccaggcgccgcatgtctagggagaagacagatgtaattttgaaagtagttgtaaaacacttctttatagagaaagaagtcacttctactttggtaatggattccttgtatagtggattg

SEQ ID NO: 38378 - DNA, 294 bp, Glycine max
ccatcaaaaacatccccttccaaaaacctaaaaaagccactcacccctacaccttaaaagctgctttagcttaattcatctcaaccttcatcttcatattccccagctcaagctccagcatcgcctacaacaaactcaccaacaactgctcctccaccccttccaacctcatctcctcctccatcacccatacattctccctcttcatccccatctccctcagctccaacatcttcctcagccacctcaacccctccatcaccttcagcaccttcctccgcagcaacatcacct

SEQ ID NO: 38379 - DNA, 408 bp, Glycine max
gacccacgcgtccgctcgtccttctcaatcttgtttttctatttccttcaccataatgctgcacaggcttcttgaaagtctacccaagaacaagcctgtcacacataccgttcacctcaacacctatgatctcacccaaatcaactgctatacctattgactagaccacatagtctaccattctgaggttcaagttcatggattggactatgagccttgacgcgcacaagcacaactcaaccaagatttctcactttcaacacatacactgcacctgcatcacttatacaaactcaattttcatcgccacatcagatctcgataacaaagatgcttgaccattcatcgaaaaacttcctctaaattacttcatcaacacctatcatctcatttccaacaatttccacc

SEQ ID NO: 38380 - DNA, 249 bp, Glycine max
acaaaaacgtttgctttccaagctgatatcaaccaactttctcattctcatcatcaacaccttctactccaacaaggaaattttccttcaagaacttatcaacaacacctcctattctttgtacaatattcaattttatagtttgacatataataacaatcttttatcttaaccacatctgttcattcatataattccatacaagactaacaatacacttaccattgtttacagtaatattggcattac

SEQ ID NO: 38381 - DNA, 402 bp, Glycine max
cccacgcgtccggtgaagttggatcattcctccgcggaatcgatgtgggccgtttgccttctgtggttgattgcgaaaaggaagcaggtgtttaatttccaaccagcacggttcttaccttcagtgaaaaccccaccaggggggaacccatggaggaggaaaccgccccaaccgaacctggttcacaaggcttattcacggccaaaaaaatatcctgaaacctctagaaagaaccttacactctccaaagatcagtcaattgccctggaagagagcttcaaagaacacaacactcttaaccccgtaagtaaacgtacacatgccaattaattttttttgtcctgtatcagagacatagtatcctctgatctactggatcatatattaatctcactcacgatg

SEQ ID NO: 38382 - DNA, 416 bp, Glycine max
taaacaaccattcttaacacgtgttttttataccatttaaactccacctcacctctattctctttcatattttattatctcataaatctataaattctctatatctaaccatacattctctaaaccaaatccatttacaattttactcatacttcccacctcatcctcactaacatctttatattttttcaaccccttcaacccttattccaacccaatttatttatccatcacttttaatcaatcaaattccatattaatatacaatttcacgaaatttcatattaactccattctacaatttataccaatttattaaaaaacttctataataccttcaccatatttattataattcacaatatactataatctatatatccattttcaaaatatttcctacctttataaaacat

SEQ ID NO: 38383 - DNA, 358 bp, Glycine max
cgacgcacgcgtccgcccaggcctccggacttcccaagatgtatcttcaatgtttcagtgcgggcaaaaaacctgatctttgtgatcaacaatgggggatacaccatccatgtttaaactcatgatgatccgtacaatatgatttataactgcaattacactgcgttgattgatgcaatccacactggtgtagggaaatgctagactgccaagaagttcttttaagaggatctcattgaatcaattgccacatccacaggacccaatatagactccttatgcttcattgaggttattgttcataatgatgacacccagtaagaatttcttgaatggatctcaaggttttctgcttcca

SEQ ID NO: 38384 - DNA, 289 bp, Glycine max
  unsure (1)..(289): unsure at all n locations
acccacgcctccaatttaatcttctttatccttctttttttctcctataactcaaatattcactataacagaaaaccgacaatttttataaaatcttnccacccccatttatcatcattttcattattacactttcttaaaattctatcaaatattattccaaataacattacttccacaacaaaatcccttttctcctcaaaatcaaccctcttcacaataaaatcccatatctcatccacaatctcaaacccatttcttaatctctcttttcttttcacttcattca

SEQ ID NO: 38385 - DNA, 293 bp, Glycine max
caacggtaacgcgtgcatagcacagagagactcagccattgggcgaatacccagagccgggataggggattaagaacaaaccataccccaagtcacggttttgccgacgtgttcctgatcccaacatcaggatttacgatgttggcttgaagaataactgtgtcgatcaatttcctttcttgtccatctggtagtccgacaggaaacgttctagtaggccctgaaaactgctcgtattgcttgcaacaagtacatagccaaatttgctggaaaggatgctttacacttaatag

SEQ ID NO: 38386 - DNA, 226 bp, Glycine max
  unsure (1)..(226): unsure at all n locations
attactattcatgatatnttggactctttagaaactttttaaagccaaacaagacctaccattgaaatccatttttattgaccaattagaattccccaccattaccaatacttgtctcaaaaaatccaattttcatacattataaaaactttcaaataacattcaaaaacaccttctcaaaattgaacattttcgcgtagaatatgtcaaatatatattgtacttt

SEQ ID NO: 38387 - DNA, 281 bp, Glycine max
accaaccttttcactcctttttcttctcttcctcttccatgacactttagaataccttcaaaggtccacccctcccatatcgtccacctcttcgtacgcctcaccttctgttacttctactctgctagttccctcgcccctaacatcggtcccctcagtctctcccccaagaagatcagaaaatatatcaccaaggaaacccccaatgacttgaaacgcctccccgtcaccatcaaactcaccttgcagaaccttcaatccaaggtcactattgtcccatc

SEQ ID NO: 38388 - DNA, 238 bp, Glycine max
  unsure (1)..(238): unsure at all n locations
tcttcgcttctgtcttcatactctctgcttaccaacaaattaatgaatattgaatttatgggggaccttctacaaaaacactcaaacctaagtttgatgcctttacacatncggtgcattctcaaatgggctttccaattccaaaaattaatctgaaatttttaattgcttgggctatttctcttaaaggtcttggaagggttcttttcatattttgcaactctttttgaacttttct

SEQ ID NO: 38389 - DNA, 364 bp, Glycine max
cccacgcgtccgcccacgcgtcctttgtcgcgtgggcggacgcgtgggcaatcgggtaggctttattctaacataatggcggctgctctgacgtcgtgttcttccgcaatcgccgccgcgtccgaaaccctagccaaacctgcttccaccataaccttctccgccaccaacctcgctcttcaatcgtcaacttccaagctcggtttcaaatccctaagacttcgccgatgcgccgccgtcttcagctacacccttagcgcgcgcatagtgtctgtgccagctttcaaagcccccgcgctactcgatttcgacacgaatgttttcaagaaggagaaaattaacctagccagacactaccagtaca

SEQ ID NO: 38390 - DNA, 447 bp, Glycine max
  unsure (1)..(447): unsure at all n locations
ntccggtctcttaatttcactttctttgccttaggtcaccttccttcttttggaactctaagagggggggggtttaataataattcctaatcctctctaatcaggtccattgaatatgtctccgtcgttgaatcttcctcccaagggtggcttcagttttgatctatgccgaaaaaacgcaatgcttcaaaacaagggcctcaaagccccaacctttctcaaaactggcaccactattgtcggttagttttccaggatggtgtcattcttggtgctgatactanggcaactgaaggacctatagtggctgataaaaactgtgagaaaattcattatatggcacccaacatatattgctgtggagcangcacagctgctgatacagaggctgtaacagacatggttagctcacagcttgcattacatcgctaccatactggtcgagaa

SEQ ID NO: 38391 - DNA, 457 bp, Glycine max
  unsure (1)..(457): unsure at all n locations
gcggcaaatactaaaattcctttattacctacttcagttttgtgccatcaattataaatccgggggcgggaccacttaacaaggttttttgcccatcccctgatccagcagggaaggaaatgcgccaagcttgcttcgattatcttagtcttggaggtctattctcggaagggccagtctctttgctttcangattaaaccctcggcccttgagcctggttctacatttctttgctgttgcaatatatggtgttggccgtttactgctaccatttccttcacctaaacggatgtggattggagtccgattaatttctagtgcatctggaatcatcttgccaataattaaagcagaaggagtccgtcagatgttcttccctgcaactgttccagcttactataaaaatcccccggcccaataaatgtgagttccgtgaacccatcatgagtcattcaa

SEQ ID NO: 38392 - DNA, 299 bp, Glycine max
  unsure (1)..(299): unsure at all n locations
ctttcataaaattcaantttctgaccacctgttaaaaaacaaagttctttagattttcttcttcacaaagatataagtgagctgaatctaccaaaatcatttaccattcaattccccaattgcaaagatgatcttattaactttgaagtttcaattccacctcattattcatattacttaagtcccacattttttttttccttttaaagtgtcttccatctatccacacgaaacaccaaaagttaagtttaaaacaaaagtctatcattcaaatatttacttttaaccaaaattttttc

SEQ ID NO: 38393 - DNA, 330 bp, Glycine max
  unsure (1)..(330): unsure at all n locations
actgcataaatttaagagaaatgtcttaatacatattggcccacccacacccccttacannttattatcttctctcnaactccttccnttacaattaaatttataatgtaatgctctctcaattttacgagaattgtgttgttaaaggagcagttgatgttgacatttttgcaaacccttctgctgatggtggagaatattagggagtccatgacgcaactgttaagtttgtttacatttttgatacattcagacttcatgatcaacccgctttttataaaaaacattttgttaccttcattaagaagtttatcaaaaattttactccca

SEQ ID NO: 38394 - DNA, 348 bp, Glycine max
gacggccactcgtccgcccacgcatacgaaaaaaatgggttcttcatgttccataaggacagagtgtgtgattttggcataaatgacctctgaagcactctgtgccaaccttctgtagactaatgtatgtacaacatggcccaaaactacgtgcccacatggtcctgtgatcacatgacatacttaagtggacgttatcacattcagcttcatctggacaagtacactgctactggcttccaatccaaaggggaatacttgtctgatcacttcacacatgacataaatatggttcctgaaaattcacctggcacatgcactgctttgtattcatcttcccaaaatgcg

SEQ ID NO: 38395 - DNA, 421 bp, Glycine max
agccttcgcaacccttaacccttccaaaccaaaaaaagtctcacccttgggccaaaaacccgcaagggggggtaggcaaattaagaacaaaccataccccaagtcacggttttgccgtggtgttcctgatcccaagatcaggatttacgatgttggtatgaagaagaagggtgttgatgaatttcctttctgtgtccatctggttagttgggagaaggaaaacgtttctagtgaggccctggaagctgctcgtattgcttgcaacaagtacatggccaaatttgctggaaaggatgctttccacttgagagtcagggtgcacccattccatgttcttaggatcaacaagatgctttcgtgtgccggagctgataggctccaaactggaatgagaggtgcttttggaaagccacagggtact

SEQ ID NO: 38396 - DNA, 367 bp, Glycine max
  unsure (1)..(367): unsure at all n locations
aaaaccggccgacccacacgtccgcccatcattctttaaaacccccaattctaacctctgntcatcgnctaccncgcttgctttttaatcaaaactatgatcaaccctcccaaaccaaaagaaaatcataaagaactttcagaaaatgcaatttgcggaccacctgttaaaaatcaaagtgcttgaaagtttctttttcacaaatatataagttagcttaatctaccaaaatcattttccatgcaattccccaatgtcaaatataatctcataaactttgaaatttcaatttcaccctaataaggatattacttaaagtgcacattttttattttcctttcaaattttctttcaaactatttcacac

SEQ ID NO: 38397 - DNA, 333 bp, Glycine max
  unsure (1)..(333): unsure at all n locations
aaaacatcaacnttccagggctgcagttttcactatgatcgatagacccccaataccagagttggtgaaccatccaaccgtccaaagcaagattcgtgatgagatatcaaaagtgctaaaaggggagccagttacagaatccaacctacacgagctaccatacttacaagccacggtgaaagagacactgagacttcacaccccaattcctcttctggtgccccacatgaacctggaagaagcaaagctaggagggcacactgttccaaaagagtcaaaggtggtggtgaatgcttggtggcttgccaacaacccttcatggtggaagaaccc

SEQ ID NO: 38398 - DNA, 333 bp, Glycine max
  unsure (1)..(333): unsure at all n locations
cgacccaccccgtccgcctgcctcctctaacaaccctttcctttcagtccattaatccggnggntccggttccaccgaactctattctagaccctaatctgcctccccacaccgncggagaacaaaatgattgtctgcgtcgccgtcttcggtcaccagaacaatcccctgtacatacagagcttcacggaggccgattattctctcaagctccaccacatcttccattgctcactcgatattgtctaccagctactcaacaatcctaaaaagtcttttcccattcttaattaaactatcntttaacttcttttattcaattttaaactataa

SEQ ID NO: 38399 - DNA, 199 bp, Glycine max
accttcaacctcacccttctttcaagactctttgaaaaattctaatgccccttataaaccaaccactcactcttctcatcaatatatcacctctaatttccgacctacatctctattatatttcaaatctcattttacatactccttacatcaatcactacaacaccccctcacaactcacatatatcactacaacttc

SEQ ID NO: 38400 - DNA, 315 bp, Glycine max
taccgggtttcaacatcttttttattcgaatcatcctaaatacgactctaggctatttatgaaatgatttcaacaaaccacaaatcctcacatagtcattgcaacataactattttgccatctttgcccttgaatggctcatcaccaatcatgcaagactaacatcatacccaatagacactgctacaagaagaatgatgatgacctctggagaaactgtcaaatacaataactccttagatacattcacacagatcctcaaaaatgatggttccaagtccttattcaaagaagccaataccaacatcctacaaa

SEQ ID NO: 38401 - DNA, 326 bp, Glycine max
atgtggacattcatcgcaagaactacaaagcgattgcacgtctgaacttgatgggggtgattaccttataaatatatctaaggatctgggcatcacagacaccaatgagaacaattacttatcgccctacaatgcactggaggatcacaacgtatgaaagctgattatagctcataacatgtagtcacacctaggtgaatacatactcacagcggtgatcaactgtacacttcataataatgctgatctggacatctccattatgacgggaacatttatggagttccgcattgggatgcttaatgccttacctattggtcgaaact

SEQ ID NO: 38402 - DNA, 237 bp, Glycine max
tcaaattcctactgccttcaatccttttgcttattcaaatgctaatgactcctattctgtttcaaaagactattttcatattctcttacaacatctaaatgtaattaaaatccttacaacctttcatgtatttaaaaaataattcaactataacaagatacttaaatatgttaataaagacttctgttacaattcaacattttttcaagacccataactataacactttattcaact

SEQ ID NO: 38403 - DNA, 303 bp, Glycine max
aaaaaaagccctagcaccccattaaagaaacatctacaaacatttgtacttctgccaaggcttccatggataataccaaggccactgtccaagataatgcataaagaatgacatcactttatccgctgcaaaattatttaccaacccaaaataaatatgcatacatcaaccattcatatcattacaaacattctactcgtcatcataacacagttaccaaacaatccaccaccactgcttaacacattttacattgccaccacaccaccataacccttacttgaaaccacactaattccacca

SEQ ID NO: 38404 - DNA, 241 bp, Glycine max
  unsure (1)..(241): unsure at all n locations
ccatcaactcaaacatancaaagganggttttaatttaaatttttccccacatacatttaatataaatatcattatttcactttctcaaaatgttatcaaatattattacaaataataatactttattaacaaaattcctcttctcctccaaataaacccatttcacaataatattccatttctcatccacaatttcatacccatttataaatccctcattactattcattacatttatta

SEQ ID NO: 38405 - DNA, 369 bp, Glycine max
cactcttcttctcttgcggctagggttttagcgcagcttcttctagatttaaggaagatgggtaaggaaaaggttcacatcagtattgtggttattggccatgttgactctgggaagtccactaccactggccacctgatctacaagcttggaggcattgacaagcgtgttattgagagatttgagaaggaagctgctgagatgaacaagaggtctttcaagtatgcctgggtgcttgataagcttaaggctgagcgtgaaagaggaatcacaattgatattgccttgtggaagtttgaaaccaccaagtactattgcacagtcattgatgcccctggacacagggatttcatcaggaacatgatcact

SEQ ID NO: 38406 - DNA, 305 bp, Glycine max
tccaacttctactttaaggtttctaattccaacccttccatcaactgctccgcatgtttaaaaactaatatgaccctccctatcacacatcttttcccctccattattcatcacatccatcattcttacaataaattcaaccttactacaaaaaccatcaacgacatacaacactccccacaatacaaggaataaaatgttcttcacaataaaaaagtcctatcaattcattttaaaaactaaatccacaactttcataaaattacattccctaactaaactgattaatcaccatacacaactac

SEQ ID NO: 38407 - DNA, 331 bp, Glycine max
tcgcggacgcgtggggttctatagggtcgtacttctgtgtccttgagttctaaggaaacaggaacctacgtctggtggatgaatcatgaccgtgtgatcagagcgtgattaacggcccgggtgagtttctctttggagtagtctcatctttggctgtagaggatcgttcttaggacacttccatgtgcctgggaatggtcatacggttgtctgacagaccaaaaaagaaaaaaagacaaaaaagtaataaaaatgatgaaaacaaccaaagggggggggaaagtgattattttggacaacaatatttataaaaatataaaccggaataaat

SEQ ID NO: 38408 - DNA, 303 bp, Glycine max
  unsure (1)..(303): unsure at all n locations
ccggtgatttcagtgagtgattggtgttcactngatctcatcataaggggcggggttaattgaagaagatgccgatcagaaacatcgccgccggaaggcctgaaaaggcgactcaccccgacacgttgaaggcggctttggctgagttcatctcaaccttcatcttcgtgttcgccggctcaggctccggcatcgcctacaacaagctcaccgacaacggcgctgccacccctgccggcctcatctccgccttcatcgcccatgcattcgccctcttcgtcgccgtctccgtcggcgccaaca

SEQ ID NO: 38409 - DNA, 394 bp, Glycine max
acccacgcgtgcgcacggcacgaatatcttgttgtttggagctatccgagattaactctgtaaacatgttggggtaccatgagctccttacaggtgatgagcttctctctgactccttccgttacaaggaaattgagaatggaatgctgtgggaagttgaggggaagtgggttgttaaaggagcagttgatgtatacattggtgcaaacccttctgctgagggtggatgagaagatgagggagttgatgatgcagctgttaaggttgttgacattgttgacacattcagactttaggagcaacccgcattcgataagaagcagtttgataccttcatgaagaggtttatcaagaatttgactcccaaactcgatgcaaagcaacatgagttgtt

SEQ ID NO: 38410 - DNA, 179 bp, Glycine max
  unsure (1)..(179): unsure at all n locations
atggctcccaaaccgcctattacgggtcttttngnnggacngaacaaggggcacntctagaccaattttgaattgcctccaggcccctcagatcgtaaggggaaaacaagcatgagggtgcactttgtgaggaacctcatatgataggtagccggttttgcaccctattaaaagcgtat

SEQ ID NO: 38411 - DNA, 207 bp, Glycine max
  unsure (1)..(207): unsure at all n locations
tctccgtaccagtttcactgtttaaatntgttagaaaactctgcaaacatggtggtttatgataacctccttgcatgtgatgagcttctctcggactccttccgttacaatgaaattgagaatggaatgctgtgggaagtttgatgggaagtgtgttgttaaggtagcaggtgatgttgacattggtgcaaacccttcttctgaagg

SEQ ID NO: 38412 - DNA, 273 bp, Glycine max
  unsure (1)..(273): unsure at all n locations
acttccacacctnaaatcaaccatttcctaattctaataatcaacaccttctactccaacaagaaaattttccttcttaaactcatcaccaactcctccaatgcttttaacaaaattctatttaagagtttaacaaataagagcaagctctatgctcagccatattttttcattcatattattccatacaatactaacaatacacttaccattttttacaattttattttcatgaccaaatcttatttgttgaacaactttgttacaatttct

SEQ ID NO: 38413 - DNA, 339 bp, Glycine max
tcggtattgcatacttcttccctggctgaatgccttggttaccccaccgcctgtttaaaaaaaatgggtcctcatctggcatgacttgaatttgtcaagaaaggcagtgtccttcaaagctgttcgggagaaatacaagcaacacaagttcaaatatgtagctaatctgccttcccctccacatgtaccaagttattactttgaagaacagtgatgcactggaaatttcttaatagataaaattcatttgaaaaaatagaagactttttgaagtgatctactcttatggaacttggtatcttttaaatcatgcctgatcaagcatgtcatgtgttgaac

SEQ ID NO: 38414 - DNA, 412 bp, Glycine max
cccacgcttcctcgcgtccctgctcctttcttttttcactacataaatttgatagatgacgctgcactcatgttggttgatcaggaccaccttacaggtaactatcctctttcgaacaccgtgctcaacaatgaaatggagacagtaatgcagtaactagtagaggttatgacggttggaattgtagcaggttatgacctcataaagacataacatcaacttgacagcacagataccaatgaatatgattacgcattttctgagaatggtctcgtggctcacacggaaggaaagctcattggaactcagagcttgaagtcattccttggtgaagaaaagctcaaggagtttattaactttacacttcattatattgctgatttgcacattcccattaagaagggaacattta

SEQ ID NO: 38415 - DNA, 380 bp, Glycine max
aaaactaaatttttctttcaaaaaaacaaaaaaaaaaaaacgcctttttttaattataacaacgccccgccacccaaaacatctccaaacagcacggtttctatcgtcattggaaagctcatctagatttaaaccaatgtataataaaactacacatacagagcttgttccatatgcatcatcagcgacgaagaagattctgaaacctctagaaataaacttagactctccaaagatcagtcaattgtccttcaagagagcttcaaagaacacaacactcttaaccccttaatttaacgtacacattccaattaattttttttttcctgtatcaaaaacatagtatccttttatctacttcatcatatattaatctcact

SEQ ID NO: 38416 - DNA, 341 bp, Glycine max
  unsure (1)..(341): unsure at all n locations
cccacgcgtccgcccacgcgtccgcccacgtttccgttgacgcgtggggttctataggctcggacctgtgtgttcttgagttctaaggagacaggaacctacgtctggtggatgaatcatgaccgtgtgatcagagcgtgattaacggcccgggtgagtttctctttggagtagtctcatctttggctgtagaggatcgttcttaggacacttccatgtgcctgggaatggtcatacggttgtctgacagaccaaaaaagaaaaaaagacaaaaaagtaataaaanggaggaatnaaaaaaaaaaaaaaatttatagaatggatattggaaatattattat

SEQ ID NO: 38417 - DNA, 282 bp, Glycine max
  unsure (1)..(282): unsure at all n locations
caananctatcactnnaanatnaaaacatctnacttcattttcactcaaataacccaaaattttcccatcatncccttctctacaanttcttttaaaaataaaatacctcnttttcctttattctaatcttttaatcatnatctccttcaaccttatccttttctacattaaaatcctttttattatattncacatatcaaattcactgtcttnctaattcccaatcaatcaaatctttttacttctcactcactccattaattncaacccaccaaaacaat

SEQ ID NO: 38418 - DNA, 426 bp, Glycine max
cgggcgcgtgggttatcctaagtctttggttatagttctgcaatggcttcaagtcatgaggaggggtctccatttgggagctactggaagcccatttgtgtgcagggttcatattgccctcaagttgaagggagttcaatacaaatatgtcgaagaaaatttgaggaacaagagtgaactgcttctcaaatccaacccagttcatatgaaggttccagtgtttatttacaatgagaagcccatatcatagtctcttgtgattgttgaatacattgatgagacatggaagaacaaccccatcttgccttctgatccttaccaaagagccttggctcgtttctggtccaaattcattgatgataatgtttttggtgcctcatggaaattcggttttacagctgatgataaataacgtgagaagaatgt

SEQ ID NO: 38419 - DNA, 438 bp, Glycine max
  unsure (1)..(438): unsure at all n locations
gattcacttcaaattgggttttacttttatcgaatcctcatcacattaagctacttttttcattcaacggtggcncgtcaatatttccttttgctgatacgcggaatcgcgcacacggtgctggtgtgtgcactgatgtagaatgaataagattgaattgtaaacagcaatgaattaccttcttggagctttcaagcctgcatgtaatgtctagatcacgtttaatgatgggaagaaccttaagcatgttccgtttaaaaaagaaaatggtcaaatggtcacagtcccacttttttcaaaggcaagaaaacattgttgggatgattacaatagaaccaatgcaagggtagaatattgattacaatgggtgtaaaattttatctcccttgaccagatagaaaatgtattttgacacaatgatatttttattaactttac

SEQ ID NO: 38420 - DNA, 207 bp, Glycine max
atatatatcttcatctctcattttactattttattatcttaatacacttatttcacttgaaactttccttccattacatctcattatcttcataaacttccatctttcaacaacaaattcacttacaactgttaccaccacaccttcaatttcctattttaataattttattcttactttgatttttccaattaattttttatcaat

SEQ ID NO: 38421 - DNA, 438 bp, Glycine max
ctttcaagcacagctactacaccatcatcactttcctctcccactcaccaatcaatactataagccagggttattttctaactatcgcgggaatatcatccaactcactcttgtctctaccacctctacctacacaccatattcatctctttacttctctattatacctcttcttactatcttgttacaatttcaaccaccttttcatatctttattcaacccaaccaataaatttcatatatgctacagatcttcatcaatcctccagttcaaactctaactcttcttactatgattttcaacgtataaactaagaataaagataatgatatataaaataaaacaaaaactactcattatattaatatgcaataataataatgatcatgcacacacaacaacttctccaaccacctacactaaccacccttcttatc

SEQ ID NO: 38422 - DNA, 235 bp, Glycine max
tcgccgtgagccaagagccatactaattcagctacaaactgcaataacaggggcatggtggttatcgaaatgcgatcgcatcgtcgagaataatgggaattttgggagcgattcttatacatccagatgactcttaccctctgctgaaactcaaaatggcagctatgaacgcctagaagctgatcctgtctgagccgtactgggcgttctgctacacaatgctctacaaggtttc

SEQ ID NO: 38423 - DNA, 355 bp, Glycine max
tacggagctattgctcgtgcctatacggatatcatatttacatttccattttctatctataagtgttcgaataatcttatgctatgggaaagtctcacatatactggagcgctgattaccagaaagcctaatataaggcgaagaataagctcatagctctaattgctagtaatggatgcgctactctaatgctacgtttggcatggacatatgctggaacttacgacctgagctctaagacctgaggtaccttctgaaccataaagcacccctacgaactcgctcacggtacttaccacggtctttacaatccttgtaggcttttggaaccactcaaagcggagtttcctatttt

SEQ ID NO: 38424 - DNA, 295 bp, Glycine max
gcggtcacctctcaacattgaactgctttatggatttaaatgatgtccgtcgcttcatgaagcgagatgactttgaacaactaagtcttccaatattggacacttgtgaaccgacctttatacaacgcactcagctgaaccaggtcttaacgctgtaaatctacacacaccataagctactgattcaggttctcacatacctgccattaacaaaatattcacagaaattttcaacttggagccatagcggacaatgaatgctaatcagtctgatgatttcatctgctcgttaaaa

SEQ ID NO: 38425 - DNA, 418 bp, Glycine max
gctccgcgacgcgtcgctgaaaaccctccactctttatccaaactctctctacccaaaatgggggcggggcatcatctcttcagcttgctcattcttttccttgcagcaattgtagctgctcatatctattcatcagaagcagctgggtccaaaggatcttttgaggacaatctcagcatactgtggtctgaggaccattctactacctctaaagatggacagaaacggcatctctcacttgacacatacccaggatttggatttcaaaccaaacaacgcttccgatttaggtggatccatattaagctcaactttgtaaccggagactcctcttgtgttgcaacaacttattatatctgctcaaaaaattgttcgggaccataaagaaattagcttgatttttactttttggggaac

SEQ ID NO: 38426 - DNA, 387 bp, Glycine max
acgcgtacgacacgcgtccggtttctggttgaggaaccaacttcatatcaatgcatgaggccttcaaaaggtaacactttaagaaaatgtcctgcagttgtcacaaataaaaatgatttgatgaggtacagagtatccataaaataatggattccaagttatcctggcccatataccaaaggataaacttaatccaattaaccttgttaatcccttatgaaaatttaaggttaatttaatcttttagcttgataccctaaacctataccagatgaattgatcccagcctacaaaagatctatatttaacattcatacattactttttccaacttttggaagccaaggaatctattgcattaaagtgcacaaaacacttatttttttt

SEQ ID NO: 38427 - DNA, 293 bp, Glycine max
cacgcgtccggcgaaaacccccatctccattctctgttcatcgtctaccgttctatcttgtaaccggaacaatgattaagggccttaaaattaattaaaatctcagagaacttgcataaaattcaagttgctgaccacctgttaacaatcaaagttgcttaagattttcttcttcacaaagatataagtgaacttaatctaccaaaatcatgtaccatgcaatttcccaattgctaatattatctgatgaactttgaattttcaattctacctgatgatagatattacttatg

SEQ ID NO: 38428 - DNA, 286 bp, Glycine max
cacgcgtccggcgatctcagtgagatgatcgtgtgctcacttgatctcatcataatcgtcagcgtgaagtgaagattatgccgatcagctacatcaccgtcagaaggtctgaagaggctactcaccccgacccgttgaaggcggctctggctgatttcatctcaaccttcatcttcgtgttcgccggctcaggctccggcatcgtctacaacaagctcaccgacaacggcgctgacacccctgccggactcatctccgtctccatcgcccatgcattcgccctctt

SEQ ID NO: 38429 - DNA, 200 bp, Glycine max
taattctccaatctaatacccacatattcctccaattcctcaaccataccaactctaaactctcctcacaccacaagaatatcttcaaagtccacaatcacatctccatcgccatcgatgacctcacctactataaccatcatctctcccactacatgatatccgaatgcattaactataattacacctactactttccc

SEQ ID NO: 38430 - DNA, 319 bp, Glycine max
tctactttgagtcttcttgatccttctttttctccttgaactcaaacatttcacgtgaggtttttatgctagattggtcgccaaatccatttgggatgaaggtcaagatttcactttcttaaaaaggtatcaaatattaatacaaagaataggacttgaggaacaagagtcctcttctcctccaaatgaacccggttcacaagaagattccggttctcatccacaatggcaaacccatttgttaattccctcattgctgttcagtacattgaagaggtttggaatgacagaaatcccttgttgccttctgacccttacc

SEQ ID NO: 38431 - DNA, 347 bp, Glycine max
ccttaaatttcttatcatatctgactaattttacttttacaacctttcctcttatgaaggctttttaaatatctgaatcctactatcaaattcctactaccttctatcctttttctgattcaaattctcatgacttctttccttcatcaaaacattatctgcatattcgcttacatcatctaaatgtaatgaaaatccttacaacctttcattcattgaaaaaagaattcaactataacaatatacttaaacatgttaataaatactttcttttcaatgcaacattttttcatgacccataactattacattttattcaactttaaatttatcatacgaataatttt

SEQ ID NO: 38432 - DNA, 343 bp, Glycine max
cacgcgtccggcaccattttcaccgcacgaatatcttgttgtttggagctattcgagaaaaactctgtgggcatgttggggtaccatgacctccttacaggtgatgagcttctctctgactccttccgttacaaggaatttgataatggaatgctgtgggaagttgaggggaagcgggttgttaaaggagcaattgatgtttacattggtgcaaacccttctgctgatggtggaagacaagatgatggatttgatgatgcaactgttaaggttgttgacattggttacacattcagacttcaagagcaacccgcattttattataagcaaattgttaccttta

SEQ ID NO: 38433 - DNA, 193 bp, Glycine max
  unsure (1)..(193): unsure at all n locations
accggnccgacggacgcgtccgcccaggcatccntactgcccaagaattatctactatgttacggngcggacaaaaggggcatgtttgtttcttatcaacaattggtgcatacaccatctaggttgaaattcatgatgggccgtacaatgtgattaagaacttgaaatcacactgggttgattgatgcaatcc

SEQ ID NO: 38434 - DNA, 446 bp, Glycine max
ctcagattcagcaattttctattttcttctctcatggcttcagattccaaaaaggatttccctgctgaacaataagggggtaattgctttacacgttgtggttcctcctgattccttccatctcatttgcttctgggaaaaaagtttgcatttgtgtgtaggcatgacaaagaatgacaaagctggaacagcagagaataaagcatccaaagatgaaacgtcatctaaagattctccagcagcacaaagagctactacagctacttctggacctgcaactggttttccaggcaacccttttgatttctctgcaatgtctggcctgctcaatgatccaagtatcaaggaattggctgaacagatagcaaaagatccatcattcaaccagatggctgagcagcttcagaaaacttttcagggagctccacaggatgctatgcctagct

SEQ ID NO: 38435 - DNA, 443 bp, Glycine max
cgtcggcacgtgaaatcagtatagctctgggacagggggcacaacgatatctggcgtgttctggaaatcacatgtcacaaattgcgacaggttcaggggataagacagtgaaaaatctggccatagagagggagtctgtcaagcagcttatgtctttacctcaatttacgagtagtgtaacagcattatcttgggttggtctccatcatcggaagaataatggacttctagctgttggaatggaaaatggccaaatagagttgtggaatctgtcttataacagagcagatgatgggagcatagcaacaccaagtttggctgcttctcttgctgtacgtatagatccttttatatgccatgcgtctaccgtaaaccgtctagcatggaagaaaaatgaagatgatcaaacgagtatgcaacttgcttcatgtggagcttataat

SEQ ID NO: 38436 - DNA, 364 bp, Glycine max
  unsure (1)..(364): unsure at all n locations
cccacgcgtccgcccacgcgtccgcccacgcgtcttgtgacgcgttggggttctataaggctcntagcctctgtgttcttgaagttctaaagagacaaggaacctacgtctggtggattaatcatgaccgtgtgatcagagcgtgattaactgcccgggtgagtttctctttggagtattctcatctttggctgtagaggatcgttcttatgacacttttcatgtcctgggaatgattatactgttgtcttacttaccaatatataattacatacaaattcttttatatattttgttaaatccatttataatttctctttcatttttattttttagaatttcttctttaaattccttttttttt

SEQ ID NO: 38437 - DNA, 463 bp, Glycine max
cttcactttcattctttgcttcagaaaattatttagctagctatctaggatggtgagtgttgaagagatccgtcaggcacaacgtgcagaaggccctgccactgtcatggctattggcaccgccactcctcccaactgcgtcgatcagagtacctatcctgactattacttccgcatcaccaacagcgagcacatgactgagctcaaagaaaagttcaagcgcatgtgtgataagtcaatgattaagaagcgatacatgtacttaaatgaagagatcctgaaggagaatccgagtgtttgtgcatatatggcaccttcattggatgcaaggcaagacatggtggttgtggaggtaccaaagttgggaaaagaggctgcaactaaggcaatcaaggaatggggtcaacccaagtccaagattacccatctcattttttgcaccaccagcggtgtcgacatgcct

SEQ ID NO: 38438 - DNA, 439 bp, Glycine max
  unsure (1)..(439): unsure at all n locations
gggtcgaccacgcgtgcgcccacgcgtccggactgcccaagatgtatctttcttgtttctgngcgggcaaaaaaccatcgtctttcgtatcatctattttccatacaccatcntngttgaaattcatgatgtgccgtacaatgttattaaaaactggaattacactggttttattgatgcaatccacatttgttaatgtaaatgctttactgccaaggtgttctgttaaaaggaactagttgaatcaatttccacatccacagaacccaataaagactccttatacttcatttaggtgattgttcataatgatgacaccagttaataattgcttgaatggggctcaagggtttcttcttccaatatccgtcctcccaatccttagtaatcttcataattatttctatgactaaatttcttcagttgccctttacctcta

SEQ ID NO: 38439 - DNA, 339 bp, Glycine max
ggaactgcgggtgtgtatagcggaagcgtgactccaccaagaaccgggcggagcccagatgtctctataactcttccaacagacgaaatacaataccctaccgacaccacactcaatcgaaactcttcatgctattgtcatagatggggcaggagcatatgatctacgcgttcgtgtcggggagtacagtgattcttgcggaggacaccgaattcagcggaatcttgaacttcatcggctaccagtgccgtgacaagctccctgcctccgacaacatggtcagctacgattgcgacgcacgacgcctcaattacctagtcgacgatggctacacatatt

SEQ ID NO: 38440 - DNA, 363 bp, Glycine max
aactaatcgtttctccaccaatttttatcgaaaacccatttaaatggcctattccaaccttggaacctgcttccaaggccattcttgggattcgtaaggctgcttgcaccaagagaaatgctaagaatatcacctcctgtcccaacaaaattcttaatattttccttatacaacgagataccaaagggagattatgtgctagaagagctcgcggatagcctcaaaaagggcaataatggacagtcatgtagtgcaagttctatccttaggagtatgaacatttccaaaagtgtagattctgatataataatagatgaggcaagtcaagcagatggaagtgttaaatgtgtagacgatagtccc

SEQ ID NO: 38441 - DNA, 443 bp, Glycine max
ctgaaatcaatcatgctattggagctgaaggagttttaagtgtagaatgtaaggaagttgtttctgaatatggagaattgttatgggatctcttggtatctggggtaagttctctttgcccaaccttgaagttttctcttcacctcaatttgcagtctttgctctttcccttcatgtgttttcacccccccacccttaaatgagtttgatcttgatttgcaggtacgacccgatgatgtatgctcacaggttggcttatgtttcaaaaggactaaatcagagaggttaggatttgttcttttaaaatcgtaattagcatttttatatttcaatatttttgtatcccctttttatcatatttgattcagtacacttcaattgagtaatgatttgaagatgttggatgaatgcttaataattctggctgtgagcttaaagtcaag

SEQ ID NO: 38442 - DNA, 383 bp, Glycine max
gccacgcgtccgcccactcgaccaaattaattgggtactgcttcttccatatataccgggtgttttatataggcatcacggccctcttcagcactctaggccaaccctcatataccagcgaatgtacaatttggccgaaactacttgcccacatggtcatttgatcacatcaaatacttcaatggatgttctgacattcaccttcatcacgacaaatacactggtactttcttccagtccaaatggtcatacttgcatagtcacttcatcatgtacataaatatttttcctgaagactcacatggcacagttactgttatctatctatcttcctaaaatgctcaacacgactagatatactttgaattcatggtgaacaataa

SEQ ID NO: 38443 - DNA, 431 bp, Glycine max
ccgcctaatacggattctttcgacggactgaacaaggatcacttggacgcctttttttaattgcctgcacgcccctcatatcgtaacgcgaaaacatgcaatatgctgcactttgttaggaacctcatacaaaacgtatcctgttttgcaccctattaaaagcgtataactgaataactgaatgatgctaatgataatatgtcacttaaagttgcaaatataaagcacttatcacacaaacgcacaaagaataagcctgaggaaatttccaatgttctcatgaatattacggctggtggtgctagatacaacaataaatatgacttatttactagttctcatattcactatattgacctgtgtattgattaactaactttcatattaatctttttttcaatcatattacttcaatatttttttttacaaat

SEQ ID NO: 38444 - DNA, 249 bp, Glycine max
tgctagtctgagaatggattggcacaaggtcggtgctaatgaatggcttggttttcgcttggactatatgggagtgattttcctttgctttgccactatttttatgatctttctgccaagtgctattattaagccagaatatgttggtttgtctttgtcctatggcctggctctcagtagtctcttggcatttaccataagcatgacttgttctgttgagaacaaaatggtttcaattgagagaattaa

SEQ ID NO: 38445 - DNA, 405 bp, Glycine max
agaaaatgtaattttcagcactgtccaggaaatttaaggattgtaattctttatgcctgaggttattattaaaaaaaaaaaaaaaaaaaaaaaaaaaaaaaaaaaaaaaaaaaaaaaaaaaaaaaaaaaaaaaaaaaaaaaaaaaaaaaaaaaaaaaaaaaaaaaaaaaaaaaaaaaaaaaaaaagggggggccgttttaaaggatcaaagttaacgtacgcgggcatgcaacgtaaaagctttttaataggggaaccaaaattaaattaatgggccgccgtttaaaaaggtggggactggaaaaaccctggggttaccaaattaaatggcttggaagaaaatccccttttcgcaagctggggaaatagcaaaaaggcccgaaccgatggcctttccaaaaagtg

SEQ ID NO: 38446 - DNA, 401 bp, Glycine max
cacagacatccgttttctggatgtgttttttctcactctcaggattgaaactgtagggggggtcatgacaaagtcgctgcgcactaacactgctattctaaccaagagatgtcaggtgttacaccacctatcatgaccagcagactacattctcgattcatgctctcgaaggctagaggagtactacataggatcgaccacttcatggaatatgggatctgtctggaatcccgttaacaagcacgtgatccctaaatatgagacctgacacacataagtttgcaccctcaagagttctaaacgtaaaccgcagattacatgggcaactggtaaatcacagaagatcacgctttcaaacgaataggaacgtctcagccaatatgaaacagatagaatggatc

SEQ ID NO: 38447 - DNA, 273 bp, Glycine max
tgtcctcacacgggcattgctagataacctttctgccaactttgtcctttgatggcgcatcaccaatggtgcacgtcttgcatcatacccaatatacactgttttaagaagaatgattatgacctctggtgaagccgtcaagtacaagagctccttggatgcatttacacatatcctcaagaatgagggtgccaaaacccttttcaaaggtgccggtgccaaaatttttcttgccgttctcatgcttttgttctttctggttattaacaaatt

SEQ ID NO: 38448 - DNA, 292 bp, Glycine max
aacggggacgcgtgtgtctatgtctatcaaattctataacatccagagctcgggcaaaaagaagggcacgatgtcagagcgcgctccgactacactcgaacaggtcgtgtacatggcgaagctggctgagcatgccaagcgccacgaggagaaggtggagcatatggcgaatgactgcaactacagcgagagcgaggaactgacccgggaacaccacaaccgtgaatgggcctactacaagaacgtagtcctctctcaacgagcctacgagttcatcatgctctgaattgac

SEQ ID NO: 38449 - DNA, 333 bp, Glycine max
acccacgcgtccgcggacgcgtgggtctctctctttctctttctctctcatccagatcttgaaaaaaaaaaaaaagacaatggcagcgagcgctcccactccacgcgaatagttcgtgtacatggcgaagctggcggagcaggccgagcgctacgaggagatggtggagttcatggagaaggtctccgcctccgccgagagcgaggagctgaccgtggaggagcgcaacctcctctccgtcgcctacaagaacgtaatcggcgctcgccgcgcctactggcgcatcatctcctccattgagcagaaagaggagagccgcggcaacgaggacca

SEQ ID NO: 38450 - DNA, 405 bp, Glycine max
aacccacgcgtccgcgcgtcactgctacgtaccagattcactgcttatattagcgagacaactctgcctacatggtggtgtatcaggacctgcttacaggtgatgagcttgtgtcggactccttccgttacaatgaaatggagaatggaatgctgaggcaagttgaggggaagtgggttgttaagggagcaggtgctgttgacattggcgcagacccttatgctgagggtggagaagatgaaggagtcgatgacgcagctgataaagctgttgacattgttgatacattcagactttacgagctacccgattttgataagaaacagtttgataccttcatgaacaggattatcaagaatatgactaccaagctcgatgcacagaatccagagttgtttaagaagc

SEQ ID NO: 38451 - DNA, 320 bp, Glycine max
cttttctactttgagtcttcttgattcttctttttctccttgaactcaaacatggcagatgagggtgttctgctagatttctggccaagtccatttgggatgagggtcaggattgcacttgctgaaaagggtatcaaatatgagtacaaagaagaggacttgaggaacaagagtcctcttctccttcaaatgaacctcgttcacaggaagattccggttctcatccacaatggcaaacccatttgtgaatccctcattgctgttcaatacattgaagaggtttggaatgacagaaatccctttgtgccctttgaccctta

SEQ ID NO: 38452 - DNA, 188 bp, Glycine max
tgccgatgccattagacgatggcaagattgaaccacgggatgaccccaagattcgctccaagatctagtcagaagagtttggttagcacaatgatctcgacaaaaaaatctactgctctggccctgaaacccttgaacccaacatggtgggagatatatttcaaggaatacagtatctgaatcaaatc

SEQ ID NO: 38453 - DNA, 264 bp, Glycine max
cccacgcgtgctgacagacgagagcactctatacataaccctgataacacgaaccacatgtgcaagcgagtgacattcaccacccatgattagcatgcactaggcctggtaacggtatatcctattctgctttgccctacataaggacacccgctagctagctcaagatctcttcaccagatgtggaagacaatatctgcaactttgctaataagggtttgaccccatctcagattgatgacattattcgagattctcacggca

SEQ ID NO: 38454 - DNA, 207 bp, Glycine max
ggcgggcgtgctccgaaccaatcacactgctgaattttcagagacaactatgcacacatgggtaagagtctatacctccttacacgtgataagcttctctcgcactacatccgttacaatgaaattgatattgcaatgctgtgggaagttgagggcaagtgcgttgtctaggtagcagttgatgttgacattggttcaaacccttct

SEQ ID NO: 38455 - DNA, 275 bp, Glycine max
cacgtcgctgctccgtaccagtttcactgcatacatttgagagaaaactctgctaacatgtgagttagtatgaccttcttacaggtgatgagcttctctcggactccttccgttacactgaaattgacaatggaatgctgtgcgaagtttaggggaagcgtgctgttaaagcagcagttgatgttgacattggtgcaaacccttttgctgacggtgcagaagatgaaggaatctatgactcacctgctaaagttgttgacattgctgatacattc

SEQ ID NO: 38456 - DNA, 282 bp, Glycine max
gcaggctaccttactgtctatccctaatctttgatattcatctgtgcaccaagttccattgtattagagaaaacgctgactatatactccattgtggctggatataaggcgggtccaaccaatggcaacattacactggaaaacccctcaatggatattgctagtcttaacaatgctaaaaccagctatactgcctgggacaattaccagcaccatatctatgaaccaggccttaatgatatggtaaaacagtatcactgcatgaaccttttttatagcact

SEQ ID NO: 38457 - DNA, 220 bp, Glycine max
ggcgcatatcaacattgagtgcttgatggattatacggatgtccgtggctttatgaagcgagatgagtttgagcaactaatgctttcaattctggaacgtttgaagggacctatgcagaacgcacttgctgaagcaagtcttaccggtgaaaatgtacacacagttgatgcggttggttcacgttctcgtgtaccgtccattaacacaatattgacagag

SEQ ID NO: 38458 - DNA, 178 bp, Glycine max
gtcatatgctccaagtgctctggtttcggttttaactctgatgcttcgattacggtgactggctgtcatcgaactggcattaaggtgtctataagacatcttggcccgtccatgattcatcatatgcatcatgcttgcaatcaatgcattggtactgcagaaaccatcaacgacagat

SEQ ID NO: 38459 - DNA, 169 bp, Glycine max
gtcagtaaccatcgtcgtgagcgaagatccattataatacagttacaaattgcaataacacgcgtcttgggggtatcggaatttggtccgaacggccaaaaaaattggaaagttgggaaccgatcctgaaccatccaaatgactttaacctttggctgaagctgaaaat

SEQ ID NO: 38460 - DNA, 155 bp, Glycine max
  unsure (1)..(155): unsure at all n locations
gcgcccacgcgtccggtgattgcagngattgatcttggttgactagatcttgtcataatgatgagcgttaattgaagaatgggcctgtcagaaacatcgtgcgcggaaggcctgaagaggcgactgaccccgacacgttggaggcggatttggct

SEQ ID NO: 38461 - DNA, 230 bp, Glycine max
cccacgcgtccgcccacgcgtccgcccacgcgtccgcccacgcgtccgtctccctcggtctcggcactagctctgtgcattcttctctcgctctctgccttccatcacactcggcatttcctttcccaagatagtagaagatggcagacactgaggatattcaacctcttgtttgtgacaatggaacaggaatggttaaggctggatttgctggagatgatgccccacgt

SEQ ID NO: 38462 - DNA, 336 bp, Glycine max
  unsure (1)..(336): unsure at all n locations
tcctcttaccaaccttttctttcttttcattnanncnnnntntncgggtacatggaaacttatcataaaccctgatccccntcnncacancctcnnataacaagattattgtctgcttcgtcgtcgtcgttcaccataacaatccgctgtacatacaaatcttcactgatgccgatgattctctcaagctccaccacatcttccattgctctctcgatgtggtcgactagcgagttaacaatcctaaaaagtcttggcctattcttaatgagacctttttttgactgctttatcctatttaaaactacaaagtatttggatatcttactaatacta

SEQ ID NO: 38463 - DNA, 296 bp, Glycine max
ctcttcttctcttgcggctagggctttagcgcagctccttctagatttaaggaagatggggaaggaaaaggttcacatcaatattgtggacattgtccatgtcaactctggaaaatccactaccactgatcacctgatttacaagctcggacgcattcacaagcgtgttattgagaggtcagagaacgaagctgctgacatgaacaagaggtctttcaagtatgcctgggtgctggacaaacttaaggctgagcgtgaaagaggaatcaccattgatattgctttgtggaaatttg

SEQ ID NO: 38464 - DNA, 372 bp, Glycine max
  unsure (1)..(372): unsure at all n locations
gagagttntaacagacactgcagattttttttttctacttttcgccacctctttatcgggaaggacggaaaaaagcatcgaactgacctgattattatcttctaatgatacaacaaatcacacacacacagctgttgtctccactgatttatcaagataacgattgaaaacagaacatcactaataaccttcttggagctgtcaagccatcatgataatctcttgatcccgtttaatgattggaagaaccggaagcaggttccgtttaaaaaagaaaatggtcaaatggtcacaaacccacttttccaaagtcaagaaaacattggcgtgaatattacaatagaaccaatgcaacgcaagaagattgatcac

SEQ ID NO: 38465 - DNA, 409 bp, Glycine max
cccacgcgtcctcccacgcgtccgcccacgcttccgctcgtgaactcaaagccggacttgacgggctaaagcacaagtttgtcttctggtacactcgtcgaacacctggagttcgaaatcaaacatcatatgaggacaacataaagaaaattgttgaatttagtacggttgaaggattttgggtctgctactgccatcttgctcgtcctgcttctttacctagtccaacagatttgcaccttttcaaggaaggaatccgtcctctatgggaggactctgctaactgcaatggtggtatatggattatacgattcaaaaaggttgtcctctgcccgttttgggaggaccttgttcttgcctttgtgggtgaccaattggattattgggataacatatgtggtgcagtact

SEQ ID NO: 38466 - DNA, 336 bp, Glycine max
attaagggttatatattgagttattcgattggagattgttagctctgcagcaacctcccagatgtgtgggctggggaaccgtaattattgaggggggtcctccacccttggaattattaaaattcgcctgggagacctggggtttcttggagttggagaacaatgggatatccatagagttgatggacaccgtggagagattgacaaaggagccctacaaaaggtgtatggagcaaaggttcaaagaaatggtagcaggcaaaggtttggagtctgctcaatctgaaatcaatgatttggattgggaaagcactttctttttcagccaccttcctg

SEQ ID NO: 38467 - DNA, 163 bp, Glycine max
cccacgcgtccggtgatttcagtgagtgatcggtgttcacttgatctcatcataatcgtcagcgtggattgaagaagatgccgatcagaaacatctccgtccgaaggcctgaataggcgactcaccccgacacgtttaaaggcgcttttgctgagttcatctc

SEQ ID NO: 38468 - DNA, 249 bp, Glycine max
cccacgcgtccgcttctccgccacttctgaatctattgaatcaacaatcatgtcggacgaagggcaccatttcgagtccaaggccgacgccggagcctccaaaacctaccctcagcaagccggtaccatccgcaagaacggctacatcgtcatcaaaggccgcccctgcaaggttgtggaagtttcgacttccaaaactggaaaagaacggtcaccgctaagtgtcacttttgtggaattgatattttc

SEQ ID NO: 38469 - DNA, 434 bp, Glycine max
  unsure (1)..(434): unsure at all n locations
cggaanaacccgggcccgaccgcacgcgtggcgagaaggaacctaagcttannaattagtattctaaattatataagaagaaaggaaagaaattgagtgggttgggtaatgcatttggagagaaagaaaagnccnnanaantcccaattaaggaaacccagctaccaaacccattggtgctntctgcccaagnngctggcatggagaaagaacccccaggccactgtctcaagagaaaggcagaaagaatgaccagcacgtgatctcggtgcaaaanggagttggcaaccccaaaagaatagaaggcaaagatgaacccaggcggagcctggacccaagcaggcggcgccgtcaagcataacaacggcggcccaaacaaagtccgccactcaacggcttgggcaccatggggacatgggcccaccacaaaccac

SEQ ID NO: 38470 - DNA, 281 bp, Glycine max
aacccaactccctacctatgcgcggttataatacatcatgagcggaccaaagtccaagaccgaatctaatagagccgatgccaaacttgctgtgaataagaagggcgccgccaccaagactaggaaaccctccggaaaggggaaggcagcgaaagatcctaacaagccaaagaggcctccaagtgctttcttcgttttcatgtaattataatatattgttatctctacgattcatttgacttccgatgccctcttttatttttccttcgaataattttatc

SEQ ID NO: 38471 - DNA, 333 bp, Glycine max
gcgtccgccaggcctacgacagcttcatcaatggcgtacgtcaaggctcataaatcaaaatcctacggcaagatttatgaagtcatcatcactataagaagacaggtaaaaaccgattaccctgccaagattcggttgattaatcacgacaacaacacatataacactccgaaataccgatttgtggttcgctttaacaacaacgacattgatgcacaaataatatctgctagcattgccagcgatttagttcttgctacatcatattcacatgaactgccacgatattgtcttcaattaagacttacaaattatgcaacaacttattgcact

SEQ ID NO: 38472 - DNA, 320 bp, Glycine max
gcgctcacgcatcctgaaaaatttaatgaaccatttattgataacccaaatctcaagcataacgccgacctttgtgcacttcacaacttaaattacatctcgattgaattgtaacatgataaatatgctacttagatcgacaatgaattaattactgatgatccacattatgctaagcaacctgttgaagaaccatggaccaagcacaacgatgctgacaatgcatcatgagaggaggccgataacaacatggaaaatgaggaatcataggatgacccagttgactctgatgcacatgatgaacaggaagatgctgatga

SEQ ID NO: 38473 - DNA, 331 bp, Glycine max
gtccttaattcaccgatccagccacgcgtccgctctatcgctcacacacactatctctctgtctttctctcacccagatcttgtaacaagagctatgtctaccactccacgcgaaaaggtcacgtacatggccaagcataccgatcatgccaatcgctactaggagatgatgaaactcatggagaaggtatccgcctacaacgatagccatgagctcaccacggaggaacataaccttctctccgtaaactacaagaacgtgatcagcgctcgccacgcctactagcgcatcatctccataatcgagcacaaagaggataaacgcgtgaac

SEQ ID NO: 38474 - DNA, 417 bp, Glycine max
aattcccgactccggccgatcgcgtgcacatatcatcagtgtaaacaattgcgatcacgtttatcatgcaaactttgcctacttggctagtgacaatgttccactcacgggtcatgccaagcttatcaaggagtcaagcgaggaagaaaggtagcatgcttataaatcgatggcatatcatctcacgcgagatttagaggtgaagctacattctatagcgatgcctattactgaatttgaccatgaggaaaatgtagatgcgctatatgcaatgtaactagacctgtcaatggagacgctgacaaatgtaaagctgtttaactgcacaaggttccctcaatgaacattgatgtgcaattgtctcattttattgaaagcgagttttagggtgaccatttggactcaataaaaaaaaga

SEQ ID NO: 38475 - DNA, 257 bp, Glycine max
acgtttgaaggccactgtcagctatgtcacaatgtaattccagcttagcactgtcttttgacagttccttgtgtacaagagcacggtatgacggtctgacaatgctttatggtggagcaaggtatcaagcaactggccacgcgtttgctgaccgccatactaaatattcagagaactacatactctactctagtagtcattatcgttaaggggtgtaggatgcacttgctgtgacagtatatcttgcttatggctat

SEQ ID NO: 38476 - DNA, 337 bp, Glycine max
gcgcccacgcgtccaatgattccaaagtttgatcgtttttcacttgatctcatcataatggtcatctgcaatattttaaaatgcccatcagcaacatcgccgtcagaaggcctgaaaaggcgactcaccccgacacgtttaacgctgctttggctgatttcatctcaaccttcatcttcgtgttcgccggctcatgctccagcatcgcctacaacaagctcacctacaactgccctgccaccccttctctccttatctcctccttcatcgcccattcattccccctcttcgtctccatctccgtcggcgccaacatcttcggctgtcacattaaccc

SEQ ID NO: 38477 - DNA, 414 bp, Glycine max
cccacgcgtccggtgatttcagtgagtgatcggtgttcacttgatctcatcataatcgtcagcgtgaattgaagaagatgccgatcagaaacatcgccgtcggaaggcctgaagaggcgactcaccccgacacgttgaaggcggctttggctgagttcatctcaaccttcatcttcgtgttcgccggctcaggctccggcatcgcctacaacaagctcaccgacaacggcgctgccacccctgccggcctcatctccgccttcatcgcccatgcattcgccctcttcgtcgccgtctccgtcggcgccaacatctccggcggccacgtcaacccccgccgtcaccttcggcgccttcgtcggcggcaacatcaccttcctccgcggcatcgtctacgtcatcgcccagctcctc

SEQ ID NO: 38478 - DNA, 456 bp, Glycine max
gaacttcagggtcgggccacgcgtacgcgtgcggctgagcgcagatctagcggattctgttgctgtgaataccactggcacagagccaggatgcggagctgctgacacaacggcgagtctaaggaccagacccctgaacttgctcagctacagccgcacgggctggattggcaggctcctatggtacctgtgccgggccaagtgcatgtccttccatcacgggtcgaaccgccttaagaaccgggcctacctcgaaaccgtcataccactgctcaagccgttacacgactgtaacgctgccggatttacgggccgccccaacgttgactggtgcgagtcccacacagtcgagaccatgcgtaccaacgtcattggaacccgaactctagccgacatatgccgtgaccacagactcattctcatgagctacgccaccggttgcattttgagtacgac

SEQ ID NO: 38479 - DNA, 255 bp, Glycine max
  unsure (1)..(255): unsure at all n locations
attcccggtcgggcgcgcgtacggttgaaggccactgtcagctctgtcacattgttattccagctttgcactatctttttgacaagttccttttntacaacagcacgttattttggtcttacaattcttcatggctatccaaggtatcaagcaactgtccgcaaatttgttaatcgccatatcaaattttcagagaactacaaactttactttagtacccatttttccaaacggtttaaaattccactttcctta

SEQ ID NO: 38480 - DNA, 283 bp, Glycine max
acggtttatctctcacacacactttctctctctctctatctcacccagatcttatatcagtgacgagcgctatcactccacgctaagagttcatgtacatggcgaacctggcttactcaacctaacgctactagcatatgatgaaattcatttaaaaagtctccgactacttcgagtaccagaatctcaccgacaacgctcgtaacctcctttccctatcctaccaaaactgcatcaacgctaccctcgcctcaccactcatcatctgctcaatctatctaaa

SEQ ID NO: 38481 - DNA, 308 bp, Glycine max
attggactggaattctgacgtacatgtacgcgtgcggctgaggcggacacaccgtctgtggttgaggataagacggacatagacttgatgaatgggaaggcgccgagcaacgctcgaagcgcggtgattaatgcggtgagggcattgacgaacctagcgctgaaggaggctaatgagttgatcgaaggggtgcccaacaagttcaaggaagggatttcaaaggacgaagctcaagatgctactatgcaactctaagaaactggtgccaaggttacgatcgcttaaacactgcatagctgcatcatata

SEQ ID NO: 38482 - DNA, 342 bp, Glycine max
cgcctacgcgttcgtcctcttaccagccttacctttcattccattttttcaccagatgcctgtacagctgcacgggtctacaccctgatcggcctgggctcaccaactctaatcacgatgattgcatgaatgaccctcatcttgcaccagaacaatccgcattccatacagagcttaaccgatgcatagaatgctctcaagctccaccacattacatactgctctctcgatgtgctctactatcgagtcagctatactaaaaagactgtgccgctgcttaatgagactcaagtgggactggactatcctattgaaaactacacagcatatggatatctgact

SEQ ID NO: 38483 - DNA, 304 bp, Glycine max
  unsure (1)..(304): unsure at all n locations
cccacgcgtccgtcacgcgtccggattctggttgattatccaacttcatagcaattcatgcatcgatcgtnatttgatcacttgacggaaaccatcttgtcttgcccacaaataaaagtgattgtccagctcccaagtctccaagaattaatggtatcccaattttactgtaccatatatcaaaggttgaatctattccaagttaccttgttaatccactaaggaaattttaggttgatttcattcttttacctggatacctcaaactttttccattggaattgatcccagcttccaaaagatc

SEQ ID NO: 38484 - DNA, 369 bp, Glycine max
  unsure (1)..(369): unsure at all n locations
tacatatccaatcaactaccacatcgcaactgccatcgcctattcgcctggttgttgcttagagtgtgtccttgatctcatctccagcatcgtcctgaatattaaaggcaattcgagtaaaaaaattaataactaattattctcaaatcaatgtgcagctgagacagaaaagaatggaaaacattccactccaaaatactccatgtctaaaagctgtcaacagcaacataaagcatatgcagggtaatgcattagaaacagcttcagtaagtatgaggataaaactaaattagcanatgaagaaaagctcataagcctaactcctacactactacagcgcaccaacacaaacaagagagatgttaatta

SEQ ID NO: 38485 - DNA, 329 bp, Glycine max
taatatctggttttttggaaccatccgataggaactctttggacatttttatttaccaggacctgcttacacgtgatgagcttctttcttactccttccgttacaaggaaattgataatggaatgctgtgggaagttgatgggaagtgggttgttaaaggagcaattgatgtagacattgttgcaaacccttcttctgaaggtggatgataaaattacggatttcatgatgcaacttttaaagttgtttacatttgtgacacattcatacttcatgaacaacccgcatttgataataaacatttttgtaccctcattaatatgtttatc

SEQ ID NO: 38486 - DNA, 233 bp, Glycine max
cccacgcgtccgcgagcttcagcaatggtgtacgtcaaggctcagaaatcaaaagggtacgtcaagagatatcaagtcaagttcaagagaagaagagagggaaaaaccgattaccgtgccaggattcggttgattaatcaggacaagaacaaatataacactccgaaataccgatttgtggttcgctttagcaacaaggacattgttgcacaaataatatctgctagcattgc

SEQ ID NO: 38487 - DNA, 416 bp, Glycine max
  unsure (1)..(416): unsure at all n locations
cttttctactttgagtcttcttgatccttctttttctccttgaactcaaacatggcagatgaggtggttctgctagatttctggccaagtccatttgggatgagggtcaggattgcacttgctgaaaagggtatcaaatatgagtacaaagaagaggacttgaggaacaagagtcctcttctcctccaaatgaacccggttcacaagaagattccggttctcatccacaatggcaaacccatttgtgaatccctcattgctgntcaatacaatgtaggaaggttggaattgccagaaatccctggtggccttttgaccttaaccaaaaagttaagcttaaatcttggcctaatatggtgattagaagatatttgaacctggaaaggagaatttgaccttcaaaggagaagaaaaag

SEQ ID NO: 38488 - DNA, 274 bp, Glycine max
cacgctcggaatttcattgattatctttgttttttgatctatcataatcatcagaacagtttaattatataccgatcaggacatcacctcttaagtcctcaacatgctactcacccctacacttttaatgctactctatctcatttcatctcaaccttcatcttcatgttcaccctctcattctctctcatcaactacaacaatctcaccgacaacttctcatacaccccttccatcctaatcttcgactccatcacccatacattaaccctct

SEQ ID NO: 38489 - DNA, 332 bp, Glycine max
tgctcctattacgagcctttcctttcattccattgattcctatcatacacttgcaagggtaaccttctaaacccttatggacgtattcacaccttcagagaacaatatcaatttctacatcaccaatcatctttcaccataacaatccgatctacatacaaaactttacctacgcccaatatactctaaaacttcaccacaatactcattgctccctccatatatactaacaatctattgaacaatcctaaaaaaatcttgccctatactttaataaaagtttttctgacttctttatcccatctaaaacctacaaattatattcatatctt

SEQ ID NO: 38490 - DNA, 274 bp, Glycine max
atcgtgcgaggggcagtgaccgagattccgtttgttgtaaaaatgaagactatgctttccagcgagggtatgtacatccgggagggcgtgagcatcaaagtacatgccaaggtcatcgaagttgcaggcccccgcagaaaattggtgcgagacttcaagcatttgaatctcgattttcagctgattactgacgaatacggtaaaagacagcttcaaatcgacgcttggtttggatctcggaaatcatactgcatcattcgcaccgacttgagcc

SEQ ID NO: 38491 - DNA, 247 bp, Glycine max
aaaatgaatactatgctttccagccagggtattaacaaccaggacacagagatcatcacagatcatgccaaggtcaacaaagattaaggcccccgcataaaattgctgcgagacttaaagcatttgaatctcgattctcagctcattactgacaaaaactgtaaaacacagcttaaaatcgacgcttacccagtatctcggaaatcatactacatcattcgcaccgacttgagccaattggataata

SEQ ID NO: 38492 - DNA, 289 bp, Glycine max
atcgtgagagggtcagtatccgatattccgttagtttcaaaaatgaatacgattctttccagctaagtcatgtacatcccggacggcgtcagcatcaaagttcatgccaaggtcatcgaagtttatggccccctcagaaaattggtgctagacttcaagcatttgaatctcgattttcatctcattactgactaaaactgtaaaagaaagcttaaaatcgactcgttttttggttctctgataacatcctcctccattctcaccgccttgagccacttttagaatctta

SEQ ID NO: 38493 - DNA, 286 bp, Glycine max
aacgtgagaggggcagtgacccggattcggcttgtcgtacaaatgaagactatgcttagcagagacgcgattaacatccacggcggggtgagcatcagagagtatgccaaggtcatcaaagttgacgatacccgtataaaattggtgcgagacttcaagcatttgaatctggattctcagctgactactgacatatacggtagtacacagctgcttagcgacgcttggtttgtgtctcggaaatcatactacatcattcgcaccgatttgagccaactggagaata

SEQ ID NO: 38494 - DNA, 305 bp, Glycine max
atcatgagaacggcaatacccgctattacgttactttcaaaaattaagacaattctttccagcaacgccatattcatcccggacaccgtgagcatcaaagtctcattccaagatcatctaaattcaaggccccctctcaaaattgatgctagacttcaagcatttcaatctcgattttcatctcattactgacgaaaactctaaaaaaaaccttaaaatctacccatgaattgcatcacggaaaacatacaccaccattcacaccgtcttaaaccacattgataatcttatcaccggcatcacca

SEQ ID NO: 38495 - DNA, 341 bp, Glycine max
cgcgtccgttcaggaacaatttatggcacacatattgactagaagcttactcaagccgatgtcagacacgttttagtttctatttggggagggcttcaacggttgaagcctcttggagactaccattattcaactcgaattgcttttgttgagttcacagaggctgagagtgcaattgcagctctaagctcgtacggggtgattctgggctcactgcccataacggtaagtccatctcacacaccacttccatcacctgctcctcggcctactatgcactgaatcaacttttcatggttctgaccaagacgacggtgacataatttacatatatatatcta

SEQ ID NO: 38496 - DNA, 291 bp, Glycine max
ctcacgcgtccgaaaaggcctgtgctatagttgataagcataactgtgtgcggactagagagagagactgacgagaacggccttgagccaagcggtaccgacctgaacggctatgatcatgacgtacataacatacttaaacatatgctcgaatttgctcacgaatagtctcaaggaaccgtacatggactaatacatgtctcgtgagaagctgcattctgctctctgcaaatgggtcgacgccaagcctgaaaatcctactattcgacagacacccgatagcagtgatct

SEQ ID NO: 38497 - DNA, 310 bp, Glycine max
  unsure (1)..(310): unsure at all n locations
cattattatatacattcacttatccatattaattaatatcttcatcatatggtccttgtttatatttcaaanaaccaaggtccacctattaccacttatataaaatttttatacattactcatctaaaattattaacccttaatcatattaaatttctaactattatatcatccatttattatcttaactacccttaaaatacaaatacttattacatttttaaaacttcatacatattttcatactcttttaaatttatcaatcctatttttactaatatatacaatatataaaattacaatttattac

SEQ ID NO: 38498 - DNA, 330 bp, Glycine max
  unsure (1)..(330): unsure at all n locations
ccacccactcgtccggccaaagatgcnnagacgcctctcttctttattctctcattttcctgatataccactctttcagcctatctgaatatatatctcaatccagatcactaacactactctcgtaacactgttgtctccaacattgaacgtaactactatcccacatgcatctacctttcactcaaaaaatacccagatatttctaatacactcatttatctcacaatgttcaaaaaccctgtctttcattaccacgacccataatttgattactcttacaaatcattcacaaaaaatactcctgcttattatgctatacaattcatt

SEQ ID NO: 38499 - DNA, 332 bp, Glycine max
caccagcgccaaacaagccctaaatctctcttttttttcttcttcttcctttaacggtgatacagatctttttacaaacacccatggcactgccctaaccaaatcacttccaaattctccaacgtgatctgctactagcacatcatcgatcccaccggaaagtacaactaggaatgcaacatcatcatccaactcgaaaggatcaatgtatattacaacgatgcctctgaccaaaggtacattcccccttccatgcttatgtatctctaacctgcaaccatggacaccattaaatctggaccctaccgcaagatcttcctttccgacaactt

SEQ ID NO: 38500 - DNA, 447 bp, Glycine max
  unsure (1)..(447): unsure at all n locations
ctccatagaatatacgtccctcttactatcgagaacactacggggctctatcatgccattttcaaaccccatnacgaccagttattttctccaaatcatgcttattaatttcctccaatttttaatcatcaacaaactcccaatatattaatcaccacttgcctcttacattctactatgttaccttcttttatatcagatttactttcacttataccaaatgcacattacttcaatatatcaacatattatctgaaaaatattatagaatatgcaaataataactacttcacttctattataattgttcacaccaatcttatgtaaccatattctcttttaatcataagtctacctgattgtcctactcctcatttcaaactctctaaacttttttttcacaactaaatcaataataattaaattccaaccttcaccaaccccaac

SEQ ID NO: 38501 - DNA, 334 bp, Glycine max
cccacgcgtccgcccacgcgtccgcccacgcgtccgcggacgcgtggggttctataggctggtacctctgtgtccttgagttctaaggagacaggaacctacgtctggtggatgaatcatgaccgtgtgatcagagcgtgattaacggcccgggtgagtttctctttggagtagtctcatctttggctgtagaggatcgttcttaggacacttccatgtgcctgggaatgggcatacgggtgtctgacagaccaaaagagaaacaaagacctaacagtaattacactggaggaggcgaccgctatgtgggatctgtatgaattgctggagaacc

SEQ ID NO: 38502 - DNA, 277 bp, Glycine max
  unsure (1)..(277): unsure at all n locations
tcggcaagtgtaacccaaaaccctagcggcgcctgctttcttcgttcggcttttgcaggagccatcaagattgagtctcaagtgaagcatgctcttggtggcaaaggtatgggtcggactggatccaaaggacaagtgactcaggttagagtgaagttttggatgatcagaacctcatatcatgaggaatggtaaaggaccagtgagagaaagagacattctcaccctactcgagtctgaaagggaagcangaaggttgccctagagggtatttttt

SEQ ID NO: 38503 - DNA, 273 bp, Glycine max
ctcttcttctctcgcggctaggcttttagctcagcttcttctagatttaaggaagattgggcaggaaaaggttcacatcagcattgcggtcattggccatgtcaactctgggaaatccactaccactggtcacctgattacaagcttggacgcattgacacgcgagttattgcgaggttcgagaaggaagctgcttagatgaacaagaagtccaccaagtattcctgggtgctggacaaactcaaggctgctcgctaaagaggaaccaccatt

SEQ ID NO: 38504 - DNA, 399 bp, Glycine max
cccacgcgtccgcccacgcgtccgaaaaaaatgggttcttcttctttcatatggaccgtgtggttgattttgcaatacttggcctttgaagaactttgggcaaaccttggtaaacagtggatgtaccatttggcccgaactacctgcccacaatggcctttgatcacatcaaatacttcaatggaagttctgacattcaacttcatcttgacaagtacactggtactggctttcagtccaaagggtcatacttggttggtcacttcagcatgtacataaagatggttcctggagattcagctggcacagtcactgctttctatttatcttcccaaaatgcggagcacgacgagatagactttgagttctttgggaacagaacaggacacccttacattt

SEQ ID NO: 38505 - DNA, 283 bp, Glycine max
gctgaagcacagctactacacagcatggctaccctgtcccactcaccgatcaatacagtgatcccgttatcttaactgacgagcgcggaaaacccatccaactcactgatatcgataccaccaataccttcacatcacattctcaatatgctctcaatcataccgctacttacaacaatcatgcatgtacaaccaccgatccatatcttttgtcaacctaaccaaatattcacatagaaactagacagcttctttctatctacatactaagctctatctctat

SEQ ID NO: 38506 - DNA, 305 bp, Glycine max
gcggttgagtgcaacgccattgatgaagtctggattttccctttatccagcaatttatgatattgacgtctttgtcactttctaattcaaccccatacttgggaggagtgcttctgctgattgtttctgcctggctagcatctgcaaaatccttgtatacccaatttacttcattgcgtaaagagtaagaactctataaagagattgaacgagcatcctccgtcaagataccaattatttcttatactgatagtgtaaactgtttctttgcaactgtttcaccactgaatccattctcatgttac

SEQ ID NO: 38507 - DNA, 172 bp, Glycine max
gcggttgtgtgcaacccattgttgaagtctggattttccctcatccagcaatttatgatattgacgtttggttcactatctaattgaaccccatacttgtgaggagtgcttctgctgattgtttctgcctttctagcatcgtcaaaattcttggatacccaatttactgcat

SEQ ID NO: 38508 - DNA, 172 bp, Glycine max
gtcatatgctccaagtgcactggtaagggttttaaagctggtgcttcgatgaaatgggctgggtgtcaacgaactgctatgaaagtttctatcaaacatctttgcccgttcacatattcaagtgatgcttccatcatgcaacgtatgcaagggctctttagaaaccattaac

SEQ ID NO: 38509 - DNA, 284 bp, Glycine max
actttctcaaaagggtatcaaatattactacaaagaatagtactttagaaacaaaagtcctcttcttctccaaatgaaccccgttcacaaaaagattccttttctcatccacaatggcaaacccattttttaatccctcattgctgttcagtacatttatgatgtttggaatgacaaaaatcccctttttgccttctgacccttatccaaaaacttaaactaaaattcttaacttaatattcttcataaaaagataatatcatccttctaacgaaaaatttttt

SEQ ID NO: 38510 - DNA, 247 bp, Glycine max
ctgatcggggtcggcccaccgccaccgaacaagatcattgtgtgtgtctgcgtcgtcggtcaccagaacaataccctttgcatacacatcttcacggtagccgatgatgctcttaagctccaccacatcgcccattgctcgctcgatgtggtcgacgagcgagtgaacaatcctaaaaagtctgggcccgggctcaatgagacggttttgggactgcgttattctattggaaactacaaaggatatg

SEQ ID NO: 38511 - DNA, 187 bp, Glycine max
  unsure (1)..(187): unsure at all n locations
acaatttnttttgcaaatttaatctatctttcattcctcctgcacccannggtgggcctagtattacattttactttcacattcattccaatcntatcttgaatttctcttcccaaaataaaaccactttccacaaaaataaaatcactatcaccaattacaaaggtagattttcaaaagaaaatat

SEQ ID NO: 38512 - DNA, 238 bp, Glycine max
catctccaaacatcacaagattctagcatcagtaataaagcgcacccagagggaaaccaatcgacaagaaaacgacacatacataccttgttccataggcatcatccaccactaagaatattctcaaacctctacaaaaaaactcacactctccaaagatcaaccaattatcctggaagagagcttcaaataacacaacactcttaaccccccaagtcaacacacacaccccaattaa

SEQ ID NO: 38513 - DNA, 201 bp, Glycine max
acgcctgcggccacgccttcggacttgccaaaatgtatcgaccatggttccgggcgggcaaaaaaacatcgtgtttgtgatcaacaatggtggatacaccatcgaaggtgaaattcatgatgggcccgacaatgtgattaaaaactggaattacactgggttgattgatgcaatccacaatggtgaaaggaaatgctggac

SEQ ID NO: 38514 - DNA, 442 bp, Glycine max
cggggggggaggcgttctactgcccaattgtatcttcaatgtttctgcgcgggcaaaaaaccatcgtctttcgtatcatcaatggtggatacaccatccacgttgaaattcatgatgggccgtacaatgtgattaagaactggaattacactgggttgattgatgcaatccacaatggtgaagggaaatgctgtactgccaaggtgttctgtgaagaggagctagttgaagcaattgccacagccacaggacccaagaaagactccttatgcttcattgaggtgattgttcataaggatgacaccagtaaagaattgcttgaatggggctcaagggtttttgctgccaatatccgtcctcccaatcctcagtaatcttcagaatttatcctatgactaaatttctgcagttgccctttatctctatgaaagtgagaatcatt

SEQ ID NO: 38515 - DNA, 278 bp, Glycine max
cccttatctttctctcttctctctccccgctctaaccctaactccctaccctattccgctttcggtcatccatcatggaaagggggaaggtccagacccgattttaaaaaacccatgcccaacttgctgggaataaaaaaggcgcccgcacccagaactaggaacccccccgaaaggggaaagccagcaaagatcctaacaagccaaagaggcctccaagtgctttcttcggtttcatgtaattataatatattggtatctctacgaatcatttgact

SEQ ID NO: 38516 - DNA, 242 bp, Glycine max
tttcctttgtcttggctgtgactccaaagttcacgcagccaacaagcttgcctctcgccatgctcgtgtttgggtttgtgaagtctgtgagcaagctccggctcatgtaacctgtaaggctgacgctgccgctctctgcctcacttgcgaccacgatattcactctgctaatccgctcgcacgtcgtcatgaacgtgttccagttacgcctttctacgacacattcaactctgacaactcac

SEQ ID NO: 38517 - DNA, 356 bp, Glycine max
acactacgaagaaatgatctgcataaaattgaagtacacatcattaacaagattccaccggatcagcagcgtcttatcttcgcagggaagcagcttgaggatggacgcacgcttgcagattataatattcagaaggagtccacgcttcaccttgtcctcaggctccgtggtggtgatttctagttcagttgaatcttgctaatgagatgtttcagttctaataataatttctctttcctttttccaatttctcttgtcgccttacgctccgtggtgtccctgtctagtttcggtactggggaatttttgtaaagatgtgtacttccattttaattaatataattcttcggtttggt

SEQ ID NO: 38518 - DNA, 450 bp, Glycine max
ggccgaccacgcgtgcgtccaaaagcacgggcttttcgcttcagttcttgacaacccgtcctggacttcaaatggatgtgcttgtaaagttgctgctgctgttttggattgggccagagatcacaaggctgctgtgtgcacacactggttccaacctctcgctgcggctggtgtccgtgaaggtcagacaggacaggtccacacttgcatggtgaattttggcccagatggaacacccatctgggagcttgaagggaagactttgctgaaaggtgaaacagatggaagttccttccccaatggtggtcttcgtgccacccacactgctggaagatacacgattttggacccttcctctccaatttttctgcgtggtgacacaatttactttccttcaatttttgtcacatggaagggtcactttgtggatgaaaagacttcttttcttcg

SEQ ID NO: 38519 - DNA, 274 bp, Glycine max
tcccaaacctcctaataccgttctttttgtttgacttaacaaaggtcaccttgtcgggcttaaaaaattggctggacgccccttaaatcctaaagggaaaaccatccaaaaggttcacttttttaagaaccttattaaaaaagtaacccgtttttcaccctattaaaaacctattacttaatttcttaaagtttggaaagattaaaaggcacttaaagtttccaaaaaaaaacttcgaacacaccaaccccccaagaagaaaccttaagaaatt

SEQ ID NO: 38520 - DNA, 276 bp, Glycine max
cgtggggatcagcatggattgtacccggaagctcacccacctcaaccccgggcccagtgacattgccattggccaggccatcgagcccatccccatcagccgcatcgcatagggcgctggcatcctgccggaggagctgcgcctgtacggcaacacgaagggcaaggtggccctgacggtgctggaccgcctgcatgaccgacccaatgggcggtacgtcgtggtgacggggatcaacccgaccccgctgggcgagggcaagagcaccacctccgt

SEQ ID NO: 38521 - DNA, 369 bp, Glycine max
  unsure (1)..(369): unsure at all n locations
cggacgcgtgggtgcgattgctggacaagtccatgatgctgtgccggctggggggccgcgtcntggacagcacatgctccatgaaccccatcgaggacgaggccgtggtgctgcactgcctgctgcgggcccgtgggcggtacgagttgtgtgacacggcagggcaggcggccggcctccagtggagcgcggggctgacccgctggccggtgatgctgcaggacgggcagttggttgcttccttcgacgaagtgccagaggcagagaagaagcatgtctggaacacaatgttccccatccctgacgaggcagtggcgcgggcgttgcatctggaacgctgcatgcgcttnctgccccacgtacagaaca

SEQ ID NO: 38522 - DNA, 393 bp, Glycine max
aactcccacgcatcctacaaggcctgatcttagtttataagcataactacctcatgaagaaggagagatattttaaaagatggcgtcgaccctatcgataccgttttgtaggtcctcgctgatgacgtacataacatactcaaacatatgctcgaatcttctcacgaatttcctcaatgaaccctacaagtcctaatccctctctcgttaaaagctccattttgttctctccaaattgatcgacgcctatccttaaaaaactactattccttcaaaccccccaaaaccactatccttaattatttgtaacctttaattccttaattttttaaaaccttaactttcattgcaattttaaacttttctttatattttaattcctttttttttttc

SEQ ID NO: 38523 - DNA, 227 bp, Glycine max
atcagacctcacactttggctgcagaaggatgacttctacaattaaatacaaaatcctatagcggggtcatcaacatgcaagtcgaagggaatattagattacactccaaatgatttggtcttcaccgactttgtggaccattgctgatcaactataagcgatgcaaactctataatcacattaaatctgacctttacgaagcttgactcttggtatgacaaccaat

SEQ ID NO: 38524 - DNA, 389 bp, Glycine max
cgcatcccgagacatctaaagcgaaattccactacttttatcgctattctacttatttcaccaatggataggcttaatcactatctctgtttgtacacccacggtcatcttctgccactcaatcctgtcgctacacattgtcacgtcacaacattttctggttcggcacatatgttaccagatcactacaggtgtcctacaatgacctcaaccagaacagaaatctcgtgtaccacaccaaggtataagctcgattcattatgacttccattactaatacaaaccatcaaatccttgcctatcgatcctttactacttcggaatttgaagctagaagtgtcagataagttaccacagaaattactagcttttggcagacaaactttcat

SEQ ID NO: 38525 - DNA, 296 bp, Glycine max
  unsure (1)..(296): unsure at all n locations
cttgatgatcccaacactttcggtaacaggtttcacaggatgctgaagcttggactgagcgttgattaagatgctggtgaagcagatgctgacatgcctnctcttgacgactctgatgcatatgctgagggtagcaagatggaatacgttgattaaatctgacttaattgcctgttacgtttttaaaaacaatgatttgagaaacagtctttttactatgttttatgttttttgaattttcgaaattttggaaccttggctaattaagtgccctatgtaatactttctttatggta

SEQ ID NO: 38526 - DNA, 366 bp, Glycine max
tccctctggagccacacatcccgagacacctaatgtgaaataccactatttctttcattacattacttattccattaatgataggtttaatactagctatatctttatacccaacgtcacactctccccacatcaatcatcatcgtatgacattctccacattagtaactcagaataatccctctacacatacattaactataccgcagccgatcatacactaactctccaacacatcaaacattgctctctccatatggttaacaagctatttaacaatcataaacagtcttaatccaaacttaataatacctttctatcactgctttatcctattgaaaactacaaactatatgtatatctcac

SEQ ID NO: 38527 - DNA, 255 bp, Glycine max
ttaaacacttatcaaatatgagtacaaataagatgacttgacgaacaatactcctcttctacttcaaatgaacccgcttcacaataagattcaccatctcatacacaatggcaaacccatttccaaatccctcattcctgttcactacatttatgaagtttgcaatgacataaatcccttgttgccttcttacccttaccacatagctcacactaaaatcttggcttattatctttataataatatatatgatct

SEQ ID NO: 38528 - DNA, 429 bp, Glycine max
cgcgtccgagcggcggtgtagcgcacgctccaactttgtttgaggataacaccgaattcgacgtgggaagctaagttttaccgagcgacggtccaatcgcgctcattaatgctgtcagggcattgacgaacctatctcttaatgaagcaaaagagttgatctaatggttgccgtagaagttcaaggtaggtatttcaaaggacgaatctctagatgcgcagaagcaactctaagaagctgttgccaatgttaccattgcttaaacactggttagctgcagcatatatgttctgcttcttcttacgttggttgtagttgagttcaccaatacactgtaatttcatttccattttgtctggatttcaatcttttatttttaatgacgaaatatgagttcttattcttatattatcatatttaatgcatatg

SEQ ID NO: 38529 - DNA, 362 bp, Glycine max
  unsure (1)..(362): unsure at all n locations
tttcccacatcacattctacaaaatgtaccgtttcattcaacctatggcaaccatanaaaaattcttttcaatttcctacatctttcaaaccccctcacacatactattcaattcaacttactcactccacatcaaactttttcataatttaatctattaaatccacaaacacacctcattctcaaaaatttcctatataatctcatctacaattacaaacctactttttttttaacttcttataaaatatattattcaatttatctcttttaataattctatctttatcatgtctcctttaattttattttattcacaataaattatcaactttttatttacttttaataaataaaaattt

SEQ ID NO: 38530 - DNA, 223 bp, Glycine max
tcaaatatcattccaaatattatcactttattaacaatactcatctgcttctacttactaacccccctcacaatacgattccaattctcatccacattgtcaaacccatttatgaatccctcatttctcttcactacattcaataactctgtaattacacaaaatcccttctatccttcttacccttaccatataactcatactagattctagacttattatc

SEQ ID NO: 38531 - DNA, 399 bp, Glycine max
gccacgccctcggtcaattcctattatttaataatctggagagtattgatatatcacgacaggttaaaccattaggcaggcaagatatacatttaactattattctcattgttagcatcattatgctactttacactaacatcatttgccaaaactgctactccaccatctctgatcccaacttcagcaccaacccctacaccagacttcgctaacctcactgagttactaagtcatgctcatccataccacaccttccttggatacctatactccactaaattgattcacacttaccataaccaacatatcatcactgactaaggactcaccatctttgttcctaaagacagactcttcactgctctacagaaaactaccctatacaacatcacctct

SEQ ID NO: 38532 - DNA, 309 bp, Glycine max
gttgaatcgtgaaaatgttcaaaaccacatccaacacggccttaaccacatgaaccctggggggaagcctgttcaagggggagtcccctttgaagccggtgaaccaggcttcgccgccaataggcttccaaccgaaaaccaacgtggtcctcgcatccttcaacaaggccaactccgaactttcttcgcaccagaagaagatcttcaaggtcgccaatcacatcggcgtcgccatcgctggcctaaccgccgatggccgcgtcctctcccgctacatgagatccgaatgcatcaactataattacacct

SEQ ID NO: 38533 - DNA, 208 bp, Glycine max
cgcctacgctcatttcactcattcatctttgttcactcaatctcatcataatccttatggtcggtttaataagatgccgatcagaaacatcctcgtctcaaggcctgaaaaggccactcaccccaacacattgaaagcctctttggctgacttcatctcaaccttcatctatatattctccgactcacactcccgcatcgcctacaac

SEQ ID NO: 38534 - DNA, 311 bp, Glycine max
gttgaatcgttaaaatgttcataaaccagttctactcttacgttaccacatggatccctgggaagggttttaatccagatggagtacgctattgaagctgtgaatcatggctcttctgctatacggctccgatctaatacccacttggtcctcgcatgcttcaacaatgccaactcctaactctcctctcaccagaataagatcttcaaagtctacaatcacatcgtcgtctccatcgctgtcctcaccgccgattgccccgtcctctccccctacatgaaatccgaattcatcaactataattacaccta

SEQ ID NO: 38535 - DNA, 284 bp, Glycine max
ccaggcgtctcaccgcgattacctttttgtgacaatctcttggtaagggtcaaaaggagcaggtgttcattttccaaccactacggtttctaccgtcaggggaaaccccaccgagagggaacccatgggagagtaaaccgccccagcccaagcttgttccaaaggcttcatcaccgccaaagaagatgctgaaacctctagaaggaaccttaaactctccaaggatcagtcaatggtcctggaaaagagcttcaaggaccacaacattcttaaccccgtaggta

SEQ ID NO: 38536 - DNA, 238 bp, Glycine max
aatcgacccacgcgtgcgcccaggcgtccggggaagctcgatcattccttcgcggtttttatgtgaaccgtttaccttgggtatattggatactttgaattgtatgattctgttaaaccagtttttttcacatgttcattgcaggatatcttttttgccagctttgcccttgtatggctcatcaccaatggtgcaggtcttgcatcatacccaatagacactgatagaagaagaatga

SEQ ID NO: 38537 - DNA, 343 bp, Glycine max
ccgcttcaatcgtttctttattctctcatttattcatttcatttaaataatccatatctgttccttggaatctttctataacgctattcctgacccaatctctctgaaaacaatataattttatacgtcaacctcctctttcaccaaaacaatcctctatacatacacaacttcactcaaacctattatacttttaagcttcaccacatttaccattgctctctcaaatttgtccaccaacgagttaacaatcctaaaaaatcttgaccaattcttaatgaaacgttttttgtactgctttaacctatttaaaactacaaagtatattgatatctgactaata

SEQ ID NO: 38538 - DNA, 477 bp, Glycine max
  unsure (1)..(477): unsure at all n locations
ggaattcttcggggtcgatcccacgtcgtcgcgaaaataatggggttgcgttcnnttcttctaaatgtggatcgtgtgtgttgtgaaattttggcattcaaactggcctggtgcagnggggctctgttgccaactccaacgcagggctcatgtggatggtaccaatnnttggccgaatacttatcgtgtcccacattgtgtcctttgatcatcatcnnaaatatttcaatggggtggttcntttgacattcagcttcatncttgaccaagtacccactggtactgnngcttccagtccaaaaggggtcttaacttggtttggtcacttttcagcatgtacccataaagaaatggttcctggagaattcttgctggcacaagtcacttgctttctatttatcnttcccaaatacgcggagcatgatgaagatagaactttgagttctttggggaaacagatcaaggacaacccttaca

SEQ ID NO: 38539 - DNA, 384 bp, Glycine max
cgggccgacccacgcgtgcgcccaggcgttctgtgaagctggatcattccttcgcggaatcgatgtgaaccgttgacctttgatggtttattgcgaagaggaagcaggtgtttcatcttcaaacagcacggtttctagcgtcagtggaaagcgcatcgagagggaaaccaatggataagataacgacacagacagagcttgttccaaaagcatcaatagcgacgaagaagatgctgaaacctctataatgaaacttagactcttcaaagatcattcaattgtcctggaagagagcttcaaagaacacaacactcttaaccctcttagtaaaacttcacatgccaattaattttttctgtcctgtatcataaacatagtattctc

SEQ ID NO: 38540 - DNA, 390 bp, Glycine max
aaaaaaggttcatagttgatatctccagcttaacgatgaagtttgaagatctggcacaagggtgcatgtcttaaatactgtcctacaccactcgtgctgatgtatgcatgctctctctggcttccaaagcctttcattccgcggctgaagccaacactgcgtgcgattgcttcctaccctctgatatgtcctctatcatcttcccttcttcttccgttccttcctttcggtctattaaggatctctatctctatctatccgatctgcccaccatcatcaatcaaggtataaatagttatcaattggagaatctgactgggaacatgtgttacatgctctccggtagagatctgagcattatatggggcgacactactcattattgggagt

SEQ ID NO: 38541 - DNA, 319 bp, Glycine max
  unsure (1)..(319): unsure at all n locations
attcccgctggacgcacgcatccnctggatgatcccaacactttctctaactggattcacaggatgctgaaacttgtactggtcagttttgaatatgcgggtgaagcacatgctcacattcctcctcttgaagacgctgatgcatatgctgaaggtatcaagatcgaagaagttgattaaatctgacttaattgcctgttacttttttataaacaatgattgtagaaacaaactttttactatgttttatgttttttgaattttcgaaattttgcaacgctggctatttagatgccgcatgtattaattactttatcgt

SEQ ID NO: 38542 - DNA, 423 bp, Glycine max
ttctccttctcaatcttataattctatttccttcaccataatacttctcaatcttaagtcagtttcattcaaaagacaatcctaacacatttcccgttcacctcaacatctataatctcaccccaatcaacttctatacctatttacttatccttcaactctaccattctactgttcaacttcatctattttaatattcttttatatctcactatcactacacaactttcattttctaaatccaacccaaacactacccttttttcactttcacaaattcaattttcattctaacaacatatctatctcctatatatcttctatcattcatttataactttctcattatttactccttaacacctattatctcattttcaacaaattcaaccattttttctaaccatatttttttcaaattta

SEQ ID NO: 38543 - DNA, 212 bp, Glycine max
tccaacctaacttacttttccattctacctcatacctcttggataggttcatttaaattcaattcactccccatctttttacaacttctttactgttaaaaccctgacgttacccatcttaatcacctttccacacatccccctttcaccaacttgcgtaatatctaacattcccgcacctatctcccttcccaacatttgctcatccttaa

SEQ ID NO: 38544 - DNA, 215 bp, Glycine max
attcccttctggacccactcatcctaagaatcaaataaagtactcatttctgtttctaaagcttaataatttctttatgtccgtatcatctataatttcgcagcatcatactaacaaattactcatatcatataataacatttcccattctctctcacaagccaaacatattcttctccttattactcaatctatctccctaattccctttcatc

SEQ ID NO: 38545 - DNA, 274 bp, Glycine max
cccccaaaataaaaattacctttctttccatatttctccttcaaacgaatgatcttcaacttctcgctttcaacaatcctttcatcaccacttattacatgacatacatgttcaagtaccacacccttcattcccaatttaaacattttaatcttaaccctaacgactctaatacccttctctttcattaaaaccccctcacccttttttaaatcaataaccctcacgaaattccatttcattaaattcctcctcattattttcctccatcaac

SEQ ID NO: 38546 - DNA, 432 bp, Glycine max
  unsure (1)..(432): unsure at all n locations
ttaaccaaacaaatatcttgtttttttaaccaaaccaaaaaaaactctcttcgcttgtttttttaccaggacctccttacaaataatgagcttctctctgactccttcctttacaaagaaattgataatggaatgctgtaggaagttgacgggaagtcggttattaaactaacagtttatgtaaacattaatgcaaacccttctactaagcgtttaagaaaaaattaagcaattgatcattcatctagaaacgttgttgacattgttgacacattcacacttcantatcaacccccattcgataaaaaacaatttgctaccttcatgaaaaagattatcaaaaattttactccccatctttatgcaaaacaacaagaagtttttaaaaaacacantcacgtaacaactaaataccctctctctaagattaaa

SEQ ID NO: 38547 - DNA, 148 bp, Glycine max
gcgtccgctcaggaggagaataaggatgtctcacaggatgttctagcacccaaggcacgggtcacttgcatttcttcccaagaagcgggctgctcttacaagggaaaaagtaaagccattccccaaggataacccatccaaggcaccc

SEQ ID NO: 38548 - DNA, 273 bp, Glycine max
tcttacatcccaatatttaaaaatcttcttactaacatatgtaaaagcaaagaactatataaaaacatgaattctttagaagctccttttttccgtgcagcaatcaaaggagctattacttcatgcatacaatatccactatccaacttgaacttaataactatccaaactacaccttttcccattcacattcaacctcatcttaacaagtttgtccctgtaattcccatacatactacaataccagcactcaaagaactatctttcacaact

SEQ ID NO: 38549 - DNA, 358 bp, Glycine max
  unsure (1)..(358): unsure at all n locations
aaaaaaccgggtcggccgacgcgtacgcccacacctacctntgtactcataacaaattttattcccagaaacactgatatcccgccgctgatattttaaatgttcaccacctatcanaaccaccaaactacaatctccattcaacttttcgaaaacgaaatgaatctcacaaaagattacctccttcttatgaaatttgatctttcttgaatttctccaaccccaaagtatacgcctcaaattaaaaccacctttcaaattcattccaactgcattctaaatttgaaagcaaaaaacaatggcacttgttaatcaaaaaatatcaccattacaaacgaaaacctacttcttaaccaac

SEQ ID NO: 38550 - DNA, 378 bp, Glycine max
aaaaaccgggccgaccgcacgcgtccgtaaactcaaaaatgtaccttcatattctttttacacggaggataaacaaccattcatccgcactctttatatgattcctggcccacttcacgtcaccggtaacttctttcatatatactttagctcataaaactataaatacactagagctatccataaatgctctaaaagaaatccaaatgctattgtactcagacattccacctcatcctcaagaacaccttaattgcttaacaacccctctaaccacaaagccaacccaatgcatttatccaatatgtatcatcaaacaaatatcattgaaatatacaatttcaacatatttacgatttactacatactacaatataa

SEQ ID NO: 38551 - DNA, 272 bp, Glycine max
acactcattcgtgcaaattcaatggtaggatctctattgcgacttatgtatgcatgcgatatggcatctaagcgattgtggaacgagcttacagatcagtagacggatccttccacatcttgcactgccagaactgttgctgctgaagacatgatccattggcaagctacaattatggttcctgcagacagtccatatgcaagacgcgtactgatagtgaccattcatagccgtgcagactatacgtttaaggcaaccaacgctgcattcag

SEQ ID NO: 38552 - DNA, 325 bp, Glycine max
tcaagtggaacgacctcgcatgcttgcagagtgccatttacgccttgcccgaagctgtgaggctcccgtgtaagttccctcaggtctttactgggaaaacacgaccctgcagagctttcttgatgtatggaccttctggaacgggaaaatcatatttagccaaggcagtgtcaacggaagccaagtacacgttatgcactgtatcactatcagaacttggttcaaagtggacggcacaaagtgaaaagctggactcaaaccttttcgaaatgactcgagagagtgccccttctatcatacttactgacaaaattgattccctgtg

SEQ ID NO: 38553 - DNA, 312 bp, Glycine max
gttgtgtttcatgtttgctaagtataatggcaaaatgaacaggcctagcagtggaggggacctccaatcaatgggggctgaagcatcttgtaatcctccaatactccgtaggaatgcttcttcctcttcaaatattagtggccttgcttcgcaaacctatcctacaaattcagttcctctgaagcgcacaaccagctggtcttttgacgaaaagcttcttatacagtctctctataaaggtctggcttttgtgtcaaaaacctattccattgtgctatatttgcgggatgttgataggctcgtatataaatc

SEQ ID NO: 38554 - DNA, 249 bp, Glycine max
tccaataccaacataaacctatcaacagttatctcttgtcttaaccatacaaaaaaattttctattatttcactccaaccattaattattaaccagtaattgctcttttcataccaaacacttctaatgttatcatatacttccctactcatactctaaatttttcttttaacaattatttcaacatgcttttcaacttccaaattgataaacatttctactttaaatagcttgctcccaatttaccat

SEQ ID NO: 38555 - DNA, 340 bp, Glycine max
taattacataaaaaatcatactttcactaggagacgttccaaatcaaaaagggtcataatatcatcatatgtgcacaccaacaataactcagtccttccctgctattaactcttcactctctaccatcttcattcttcaaacaatcaacatccctgctaatcaacaaagaggccacttacctcacaacaataacaaatattgcactttaaatatcaaaaattaccaatgcccatcacaaatctccatgatatgtaaccagacccaataccacaagccctgcatcgttttctgtcaaaagtgctgcaacacattcctttcttttccctcagggtattatcc

SEQ ID NO: 38556 - DNA, 200 bp, Glycine max
acttcccaatatttatctttaattttactgtgcgggcaaaaaaccattggcttgtttatacatcaatggtgggtacaccatctatgtttaaattcattatttgccctacaatgttattaataactttaattacacttttttgattgattcaatccacaatttttaatgtaaattcttgactttcaaagtttttttttaat

SEQ ID NO: 38557 - DNA, 269 bp, Glycine max
acttagatgacttctgcggcctcggaacggctgctggaaaggctggaagttccaggatgtgggagcctctaaagcattcatctaagatgtctcgaagagataggagccttggaaaatcatctgtaaggtcctacacggatgaaactatggaacaacaaagctggataagattggctgatgatctatttgatcctgtgattgcacgacttcccattgccacatgtttctgcttgcgatctgtatgccaacgatggaactccttgctgact

SEQ ID NO: 38558 - DNA, 142 bp, Glycine max
atgaaatcgagtaggtttgacatgccgttcttttcaggaagatgttaagtatcaggggacggtgatattctagatataaaaggtgcccacaaaattgaacatgaacattttggatatgattcttggtcaatcaggacctata

SEQ ID NO: 38559 - DNA, 368 bp, Glycine max
cgacccacgcttacgtttggatactctcactgacccttatacagtttttcatcgattccatatcctattgcggacggtacctttataatctaacttcgtcatcactacactgacgtagcaactcaccaataccttaaattctacttatagttccacatatcaatcccgatcattcacatgcacaataacttgaccgatccttatgttctatcacggaatggtattcaacaaaggacaaattcttatcaagatggagtttatggcaccacatgccccatccctcctgtgaagaacttcacctacacacttcaagtcaaagatcaaattggaagtttcttctattttcccatctcttgctttcaacaagc

SEQ ID NO: 38560 - DNA, 364 bp, Glycine max
ggcggcactgtggcagacgcgccggcggcgtttgaggagaagacggacttcgacgtggtgagcgcagaagcaccgatcaacgctcgaatcgtcacgataacggctatgatctcaccgacaaacacagctctgcctaatgccaaggacttgaacgactccattccgaagaacatcatcgatggtattacaaaggactaaggctcactatgccaacaatcaactcgaaaaatctggagccaacgctaccattgcttatacactgactaactgcaagatatatgttctgcttcctctattgttggttgcaaatgagttcaccatttcactggaatatcattttcattttgtctggatttcaactttt

SEQ ID NO: 38561 - DNA, 409 bp, Glycine max
ctctctgggcctccacttacgaatccattgaatatacaatcatgccggacgaccatcaccgtgtagagtattaggccggcggcggagccttcaaaccctaccctcagcatgccggtcccatcccaaagaacggatacattgccatcaaacgccgaccctgcaatgttgtgcaaattgcaacttgcaaacctgcaaaccacggccaccctcaacgtcactatggagaaatcgatatacccactgccaagaatcttgaggatattgcacactcttctcacaactgtgacggtcctcacgataatcgtactgattaccagctcattcaccttgcttaagatggatgccagaatccactcactgaaaatggtcacactaaagatgaacctaagctttccactgataagagtct

SEQ ID NO: 38562 - DNA, 408 bp, Glycine max
ccctgtgttccgccacttatgaatctattgattttacaatcatgccggacgaacagcaccagatggagttaaggccgacggcggagcctccaaaccctaccctcagcatgccggtcccatccgcacgaacggctacatcgtcaccaaacgacgaccctgcaaggttgcggaggatgcaacttgcaaaccggcaaagcacggtcacgctcagcgtcactctggagaaatcgatatacctactgccacgaaacctgaggatattgggccctcttgtcacaactgtgacgttcctcatctgaatcgtactggttacaagctcattcatcttgctgaagatggatgtccgagtccgcttactgaaagtggtcacactaacgatgaccttatgctatccactgaagagagtct

SEQ ID NO: 38563 - DNA, 391 bp, Glycine max
  unsure (1)..(391): unsure at all n locations
tcttcttcttcaatattttcttttttcacaaancannacatcactgagaagaatgttttttataataggcagcccgccccctccattcttttttcaatttttcctatactactttcccacattttcctttgatcacatcaaatatgtcaatgctgtttcttacattcagcttcatctttacaattacacttttactgccttccatttcaataattcttacttttttttttcacttcatcatctacataatatattcttcctttaaatttttctttatacaatcacttctattttatttatttttcccaaaactctttatctattaatatatataacttttatttcttctttaacattaacaacacaaccttttcattctccaaaacaaatt

SEQ ID NO: 38564 - DNA, 361 bp, Glycine max
tgaatatggcatcactttccaagacggctttatattccaaccgacgcagcccactttatttctatttttccaaaactacttccccacatgttccttttttcacatcaaatatgtcaatattgaatctgacatttatcttcatcttaacaagtacacttttactttctttcattctcaaatttcttacttgtttagtcactacaacaattacataaaatatttcaatttatatatttctactacacattctcttgttattatttatcttcccaattcacattgcatttatatatagtacattttctattttgttaaacaaaacaaattcaacctttcataattttcaaaatattcttttcac

SEQ ID NO: 38565 - DNA, 307 bp, Glycine max
  unsure (1)..(307): unsure at all n locations
gcgtacgttttggtactttnaatcctcttgatccttttttttgtactaaaacacaaacatgtcagaagatgtgtttataatagatggaggcccaactccatttgttaatagggtcattattgaacttgctgaaaacggaatcaattacgattacaaagaacaggacactgaggaacaatacatctattgaactacaatgaacccactgtacatgaatattccggttctaataaacattattcaacctatctttaaatccactaatgctgctcatctcatttaagaggaccttaatgacagcaaatcc

SEQ ID NO: 38566 - DNA, 415 bp, Glycine max
cgcgtcgctgctccgtaccagtttcactgcataattttgagagaaaactctgcaaacatggtggtgtatcatgacctccttacaggtgatgagcttctctcggactccttccgttacaatgaaattgagaatggaatgctgtgggaagttgaggggaagtgggttgttaatggagcagttgatgttgacattggtgcatacccttctgctgagggtggagaagatgagggagtcgatgacgcatctgttaaggttgttgacattgttgatacattcagacttcaagagcaacccgcttttgataagaaacaagtttgtaccttcatgaagaggtttatcaagaatttgacttccaagctcgatgcaaagaaacaagagtttgttaagaagcacatttgtgggagctactaaatta

SEQ ID NO: 38567 - DNA, 366 bp, Glycine max
gctggctcttcttacaagccattccttgtaggacaatgcttgagagtgtacaggttcaggggaaccgagctataccctgatcggtcgtcacacactgcctgataacatgatgtattgacatgtgactccagcagtcggtcaccatagcaatacgctgtacatacagagcttcacggatgccgacgatagctctgaatgcttaccacatcatacattgctcgctagattgtgagcgataggcttgtgaacaatcctaaaacgtatgagacgatgcttaatgataagcttcatggactgctacatcctattgcaaactacattgcttatgggaatatgactcatactacgggggaatttaacgtggtg

SEQ ID NO: 38568 - DNA, 311 bp, Glycine max
ggatcgacccacgcgtacgctttttatggctcctctctcacgtatgcgttcattctggattcgaaactggtgatggcggtaccgagccattgtccaacgatcggaggaccacaatgaacagactgcgtgagaggctacattaaacaactacttggctcaggagagaaatctcgtcccttcagttaacgtactgaacacaaggctagggcatactgcagcaccaccaagtcattgctgagtttgaggaaatacctgtcgaaaatcaacagaacctcactgatagtgcccttggagaagccttgagatctaca

SEQ ID NO: 38569 - DNA, 340 bp, Glycine max
tgtggacctcacagtgaggctggattaatttgccttctacaatgaaattaacaatgctagcatgctttaatcacagggcaagttgactggaatacttcattacactgaagatgatgaggtctacaccgactttgaagaccatctcatatcaagtattactgatgcataggctataatagcattgaataacaactttgagaaacttgactatagttatgacatcgagtggcaatacagcttacttatccttaacctaacttgaaatctctgacaacaaatctttctatggttctactgaaacaaaagtcgcttctctaaacattgagacatggtgtctagc

SEQ ID NO: 38570 - DNA, 374 bp, Glycine max
gtggctcagggttcttgttccaggatacttacattcgcaaaatggtgaagattagctgggggggggctatatatgtactgggccctactatggcactcattgcacttaagagcccattcattgaacaagctgatgttgatatctctaaatcccgcattgcaacctggaacagtgaccaacttgctatctatgaacctggccttgaaagagttgtgaagcaatgccgggacaagaacctcttctttaacactgattttgaaacgcatgtctttgaggctcacatacagtttgactctgtcaacaccctaaccaaaactcacggtcttggagcttgtaaagcatcacatttgacatattgtgacagctcaactcgc

SEQ ID NO: 38571 - DNA, 390 bp, Glycine max
gggacacagggtgcttttacacgggtatttaaattcgcaacatgcagcatattacctgcgtggggactaagatacgtagggggcccaactatggcagtcattgaactaaaccgcccatccatggaacttgctgttgctgatatctctaaataccgcatcgcatatctggaacattgaccaacttgctatctatgaacctgaccttgatggtgtagcgaagcaatgccggggcaagaacctgttcttgagcactgatgtctaaaagcatgtctttgaggctcacatagtgtttggctctgtcaacacgcgaaccaaaactcatggtcttggagcttgtaaagcagcagacttgacatattgatagagcgcatctggcatgattgctgatgc

SEQ ID NO: 38572 - DNA, 256 bp, Glycine max
acgcgggctcagggttcttctacacactatttacatttccatactggcacagatccgctagctcggggctctatatgagtggcgtcctactattgcaggcattgcactcaagtacccatccatcgaatgtgctggtgtcgatatctgtaaatcccgcattgcactctggaacagggaccatcttcctatctatgaacctgtccttgatggtgatgagaagctacgccatggcatgaacctattcttcagcactgat

SEQ ID NO: 38573 - DNA, 441 bp, Glycine max
cacgcgttcggtcaagctaaatcattccttccagtttatcacgtgaaccgtcataccttgggccgtggattactaagaggaagcaggtgtttcatctccaaacagcacggtttctagcgtcagtggaaagcgcaccgagagggaaaccaatggacaagaaaacgacacagacagagcttgttccagaggcatcatcagcgacgaagaagatgctgaaacctctagaaagaaacttagactctccaaagatcagtcaattgtcctggaagagagcttcatagaacacaacactcttaaccccgtaagtaaacgtacacatgccaattaattatttttgtcctctatcagatacatagtatcctctgatctactggatcatatattaatctcactcaccatgtatatgtgcgattgatcatagaaaattttgttcacaatgtg

SEQ ID NO: 38574 - DNA, 343 bp, Glycine max
acccacgcgtgcgatagagacctaaactaagaataaatttcaatttatacgaagacaggaccaaattgagggcatggtgtacatttaagaaagaaagcgacacattccattaatgaaacacatacatacattgctacttctgtcaaatctaacatgcataagaccattgcctccgtccacgagaacgcctacagaatgacatcacatcatccgatgcacatggagttcgacactcacatcaaagacgccatcattaaccatactgagcttgacaagcatgcgtcgcgttaccttaacacctcattcatacactatcataacacttatgagcacatgttacatg

SEQ ID NO: 38575 - DNA, 386 bp, Glycine max
gcgtccgcccaggcgttcggtgaagctggatcattccttcgaggtattcatggcaaccatcatacctgcgccctggtgattagccaataggaggcagaggactcatttgcagacatcacgcattgtaccgtcagtataaagctcagatcgaggacccacattgtcctagaatgcgtcaacaacgccaactgctaactctgctatcaccacaagaagatcttcaacttcgaccattacatcgaaagtcaccattcttcagcctaaccgccaatggcctcgtactctgccgctacatgctaaccaattgcatcaactataattacacctaccattcgactctacctatcttcagactaatcatacacatagccgattatgctctactt

SEQ ID NO: 38576 - DNA, 279 bp, Glycine max
gcgtacgctttgctactttgagtcttcttgatccttcttattcttcttgaactcaaacatgtcagatggggtgggtcatatagatttctggccaagtccatttgggatgagggtcatgattgcacttgctgaaaagggtatcaaatatgagtacaaaaaataagacttgagtagcaatagtcctcttctacttcaaatgaacccggttcacaagaagattccggttctcatccacaatggcaaacccatttgtgaatccctcattgctgttcagtacat

SEQ ID NO: 38577 - DNA, 209 bp, Glycine max
aatttgctcttgcaatgttcccaacttaaccctatattctttcatgaagaaaatacaaaacaatgctacttttgaaaatttaagaccatataacatcttctgccacatactccaaatctagtggggcaatcattaaacaaaactctaaatcttaagaaagcaatgataaaactgcttatggccctactgttttaccactaagcatttat

SEQ ID NO: 38578 - DNA, 361 bp, Glycine max
cggacgcgtgggttatcctaagtctttgggaatagtgctgcaatggcttcaagtcaggaggaggtgacccttttgggagctactggaagcccatttgtgtgcagggctcatattgccctcaagttgaatggagttcaatacaaatatgtcgaagaaaatttgaggaacaagagtgaactgcttctcaaatccaacccagttcacaagaaggttccagtgtttattcacaatgagaagcccatagcagagactctcgagattgctgaatacattgatgagacatggaagaacaaccccatcttgccttctgatccttaccaaaaagccttggcttgtttctggtcccaattcattgatgata

SEQ ID NO: 38579 - DNA, 353 bp, Glycine max
  unsure (1)..(353): unsure at all n locations
aaattctccagccatgacagtttcttctttatctgcttcctccaaacttatactagtgncgccatgcttcatggtttggcctgatctccacaccctttcgttncttcaccaacacccacaaactatcccctctttcctccttcttcctccaccactaccaccaccttcccgtgccgtcccctcaccgtccgcgccgcccgcggcaagttcgagcgcaagaagccccacgtgaacatcggcaccatctgccacgtggaccactgcaagaccacccttaccgccgtcctcaccattgtccttgccgccctcggcaacaactcccccaaaaaatacgaacagatccaccccccccc

SEQ ID NO: 38580 - DNA, 214 bp, Glycine max
  unsure (1)..(214): unsure at all n locations
attgatcatctactangaangaatctcatttaaaatcttacagttttaaaggtttcaaatttatttttttagccactatgaaatcctacttacatagataatgtacacgtcattttatcggaagacttgactgtgcatccaagaaaatatttcatctgctacggaattatccctaatattgttcactgtcatttgctccaaacaatctcatttc

SEQ ID NO: 38581 - DNA, 444 bp, Glycine max
cactattatacaactataataataacggctgcatagatagcacacttagccattagtatgcaacgaaaaccgcaacactttgatttttctcttatctccttttctcttctataaatatggctcatctgagccacaagaccttggtttatcttccagaaatgaggcctgaacatgaagctgaggaaggccaacccagaaaaagtcttggttctttttcttcttggcctcatcgtttggagaatgttttccccgtttatgccatgggaacttccaaccctgcagtcttggattcttcacttcacacttctgattgtcttgatcctatttgggatgctgtcagagaagaagccaagttagaggcagaaaaggagccaattttgagtagcttcttctatgccactattctgtctcatgattgcttggagcaagcattggcttttgctc

SEQ ID NO: 38582 - DNA, 280 bp, Glycine max
tgctacaagatttacccatacttaaactacacctagtcaaccaccaccgataccttggtcatgggagtggcaccaattaaggctcaattcaagagtgcttaatatgatgttcccactcagaacgatcgctgctaattttgatctaactgcacctacaacccctgcacttgcaagtgaagtgttggaaagctaaatcttcaaacatatatcgcccttagaaataatgataaaaactatatgtaatttcaaaacttcaaaaatatgtaatatgtattatgtt

SEQ ID NO: 38583 - DNA, 319 bp, Glycine max
actcatacttttgtcctctttgatgctgcattagcgttgttagcatggccattccatgaccgatactgccaaaatttccctgctccaaatgaaaactggctattgtgacccttcttctcatgtaaaatgcacatgtcttacgcttgctgcgtaagcccacaacatcctatcctttaaaaccattccttgatagcgcttttaaccaacatattactacattaatctctaacaattaatatcacactcttaaacatttaaccaacaatctttcttttatgctacttaactcctaattcatcacatctacatatttatattc

SEQ ID NO: 38584 - DNA, 423 bp, Glycine max
cccacgcgtccgcccactcgtcctgatgtatctcgatcttcttcttttgttgtggtgcgcgtgtgcttgttttgggtctcacctgaaactgtcttgctgcggtggtcactgttgttgccgaagctcctgcccgtgccgcaacggctcctgaggctgcacgctgcacccacacttcagctaccctgaccgaaccaccaccgacacctcggtcatggtagtggcacctgttaacgctcaatttcacggcgctgaaacgggagtgcccgctgagaacgacggctgccactgtggaccatactgcatctgcaacacctgcactagcaactgaactgttaccagagcacagctacacgcatagctagccctaaattcgcaataatgatcaactcataatcgtgtaatcataacctatgcattatgtat

SEQ ID NO: 38585 - DNA, 351 bp, Glycine max
gcgcccacgcgtacggttaccacaggagaccaagaatggtatctaccacctagaaaaggattccgatctcctaatggcaacgtaaaaattatacagttgcgtacagacattaggataacgggaattccaaaccccactgcccaccccatgttatcttgaatatagacaacaacagttaaacctatcagtgatgacattgcaacaatagcatagtaccagctgaagtagctctctttgattcctgcatttttgtccctcttactcaactgatcaacaccaaaggccaaggaggatgatcttatgccttcagcttcaatggacatgagggcaaaaaaggaatgcagaatcaaa

SEQ ID NO: 38586 - DNA, 414 bp, Glycine max
aatcctgagagcatgccttgctctagctgaacatgcatcatcgatcttgcctgcgaataagaacatatcatttaggaataaggagagatgaggaaactcttcagccaactatatatttgaacaagttacccgagaaatttccagaaggatcgaaagtttttgtggttgatcctattctggcaacaggtggcactatagtggcagctgtaagcctcttaaaggaacgtggacttggcaacaagcagattaaagcgatatctgctgactctgaccctccagatcttcaaaagctgatcgaacagttccctgggcttcatgtgtataactggaataattgacccccaacttaatgaaatagggctcataattcctggccttggacatgctcaggaccgtagctttggtacatataca

SEQ ID NO: 38587 - DNA, 290 bp, Glycine max
gtaagactatattgtatatgctaactcagactgaatatccatatataggatgattactatcatctcttagctcatgttatctgacatctttctaccaatgaatgcatattatctaccatacattcactttaataatgccagaatacgcaagactgtcagaacaaaccaagccaaagttgggtacattgagcctgctactgatttcaactatgaccacaaacatcttggtactggccctcaaacacttctcgaaattgctgaaggtcgtcacccaattttcaagacactct

SEQ ID NO: 38588 - DNA, 339 bp, Glycine max
tctttatgtcctgctggatataacagggaccgagtgcttattcatccaccggacgtttactatatcagtcttgggctaattgatgaggatgcaatccccaaatatgaactcacaaaccatgatggtcggccacttgctaaataatacagcactgtactaatgctgcaacaccttgcaaagcaaacagcatactcaatgcttctaaccctaaaaaaagacgccgtttatgctctccctaataagctaccaactgctgctatagtacctgacatgacaccattccctgcaaacctttacatttctacactcacaccaccaatttaatgatatatttaaaaa

SEQ ID NO: 38589 - DNA, 300 bp, Glycine max
tccacctctacccagctcgtcctcccacacttccacccactcatccactaacacgtttacattactcaaccacctagccataaaaaaccgtaacgtttacaaacaacaactactgctggcatccaacccacttactcttacaaacttatttacacaccatcaacaacaacatcttcaacattttctaccatcactcattcaactatccattattaacccttcctcctacctacaacaacaacaactactatcatctaccccactcattcttaccaattcacctacataccatccacaaca

SEQ ID NO: 38590 - DNA, 337 bp, Glycine max
  unsure (1)..(337): unsure at all n locations
catttttgcccaggtctgaagatgaaagggagatgtgctcaagaacaatctattgcaganatatcgacgagaaagcttacttcaaccgaagtcaaacccttctttcaatctaattgccgaaaaggtcattggttgaagcttcttggggaataccattattcaacttcaattggatttggtgaagtcccacttgccgaaaatgccattgccacttttaacctgaaccgggtgaacctggggtcaactgccattaagggtaagtccttcaagacccccatgcgcccttgggcctcttggtcccccaatgccctgaataatccttcttcgggttcctgct

SEQ ID NO: 38591 - DNA, 434 bp, Glycine max
ggaaatggcttcctcaatgatctcctccccagctgttaccaccgtcaaccgtgccggtgccggcatggttgctccattcaccggcctcaaatccatggctggcttccccacgaggaagaccaacaatgacattacctccattgctagcaacggtggaagagtacaatgcatgcaggtgtggccaccaattggcaagaagaagttcgagactctttcctacttgccagacctcgatgatgcccaattggcaaaggaagtcgaataccttctaaggaaaggatggattccttgcttggaattcgagttggagcacggtttcgtgtaccgtgagcacaacaggtcacctggatactatgatggacgctactggaccatgtggaagctgcctatgtttggctgcactgatgcttctcaggtgttgaaggagcttcaag

SEQ ID NO: 38592 - DNA, 399 bp, Glycine max
cccacgcgtacgagtagttgagaactaagaaggagaagcaaatggcttcctcaatgatctgttccgcagctgttaccactgtcaaccgtgccggtgccggcatggttgctccattcactggcctcaagtccatggctggcttccccaccaggaagaccaacaatgacattacctccattgctagcaacggtggaagagtgcaatgcatgcaggtgtggccaccagttggcaagaagaagtttgagactctttcctacctgccagaccttgatgatgcacaattggcaaaggaagtagaataccttcttaggaagggatggattccttgcttggaattcgagttggagcacggtttcgtgtaccgtgagcacaacaggtcaccaagatactacgatggac

SEQ ID NO: 38593 - DNA, 429 bp, Glycine max
tccggtagttgagaactaagaagaaggaaatggcttcctcaatgatctcctccccagctgttaccgccgggaaccgtgccggtgccggcatggttgctccattcaccggcctcaaatccatggctggcttccccacgaggaagaccaacaatgacattacctccattgctagcaacggtggaagagtacaatgcatgcaggtgtggccaccaattggcaagaagaagttcgagactctttcctacttgccagacctcgatgatgcccaattggcaaaggaagtcgaataccttctaaggaaaggatggattccttgcttggaattcgagttggagcacggtttcgtgtaccgtgagcacaacatgtcacctggatactatgatggacgctactggaccatgtggaagctgcctatgtttggctgcactg

SEQ ID NO: 38594 - DNA, 411 bp, Glycine max
cccacgcttgcggttaggatagcggcgacttgagcggttcgctgcccgcgacgttgtgaggggtggactgaaccttatcatttaaaggaaggagagtggatcgattcctcaacagctccaaacatttataaaagctctttcccttccctcaaatcgctcatactcttccaatctttttttttctttttttttacctttctccctcgctcaataatacaaaacaaaaaagaataacaagaaggttttcgcgatggcatcgaaacggatcttgaaggaactcaaggatcttcataaggatcctcctaccttttgcagagccgagcctgttgctgaatacatgtctcactggcaagcaacaactatgggtccttcagacagaccttatgctggaggtgttttcctattcactat

SEQ ID NO: 38595 - DNA, 307 bp, Glycine max
tccactcacaaatacaagcgttcccacattacatggcctccttgcccttgaagcggggcggggatctccaaccggcggctgctactttactcccgtcgtatccgccccagcgtttgacgaatcccgaacttcctttccagagctccgacttggatgaccgataaagatttgtcatctactgtctttgatgggaatgatgcctatactcgcctcataatctccaccacaattgcaggcaaaaatggtgaacctatacaaaccatcacttacattgtaaaacttgttgtttggcacatggatcatttgg

SEQ ID NO: 38596 - DNA, 409 bp, Glycine max
ggacttaagctagtttatcggagagaatatgaagttgttgttttcttgggggggggagttttggtagcatgagcctgccatggcgcagctccaaatgtccctctccaatgaaaactgctatggtgagcgttcttcgtgaggtaaaatgcgcaagttttatgcttgctgtggaagcacacaacatccgagcctttaaaaccattcctgaaagtgcgttgaaccaacaaaggactacattaatggcgaacaatttagatcagactctaaaacagttaaccaacaagctttcttttatgctagtgaacgcgaagtccatcacaacgacatatttatattcggcatatataacaccggactctctaatatcccatactatgaaaaacatggatatggggtggaggaatttaat

SEQ ID NO: 38597 - DNA, 248 bp, Glycine max
cccacgcgtccggtcttatggtggttacctatgcacccagagacgaggaagggcagagtgggcgacgaaatgcttcggggagttcaaaataaacgtagatccggggattccctatatatgtcaacctttcgaactgctgctgaatccaccggcagtcaatatacaacctttcgaactgaaacatcttaatagccatatgaaaagaaagcaagcccatttagtttttcagtttttattagaatttccaa

SEQ ID NO: 38598 - DNA, 407 bp, Glycine max
ggaaatggcttcctcaatgatctcctccccagctgttaccaccggcaagggtgccggtgccggcatggttgctccattcaccggcctcaaatccatggctggcttccccacgaggaagaccaacaatgacattacctccattgctagcaacggtggaagagtacaatgcatgcaggtgtggccaccaattggcaagaagaagttcgagactctttcctacttgccagacctcgatgatgcccaattggcaaaggaagtcgaataccttctaaggaaaggatggattccttgcttggaattcgagttggagcacggtttcgtgtaccgtgagcacaacaggtcacctggatactatgatggacgctactggaccatgtggaagctgcctatgtttggctgcactgatg

SEQ ID NO: 38599 - DNA, 270 bp, Glycine max
cccacgcttgcggttcggattgcggcgacttgagcggttcgttgcccgcgacgtgggtgagaagtccactgaaccttattatttaaaggaaggagagtggatcgattcctcaacagcaccatacatttataaaagctctttcccttccctcatatcgctcttattcttccaatctttttttttttattttgttacctttcttcctctgtctataattcaacacaacaattaatattactaatgttttttcgatgccatttaatcgtattt

SEQ ID NO: 38600 - DNA, 271 bp, Glycine max
tatggatgggaaatgcctcactggcgcggtttgcatgcggaaaacccgacatctcagcgttttaatcaatcctgaagagtgcgttgaaacaccaaatgaatatatccctcgcgaacaatatttatcttactcacaagagacttaacacacatgattactcttatgccacagaccttgaaatacattccaaggacacatttctgttgagtatacatggcaccgaactatctaatatttcatactaccaaaaacatggatatggggtggagaa

SEQ ID NO: 38601 - DNA, 383 bp, Glycine max
  unsure (1)..(383): unsure at all n locations
cttncgaaagagacagaaagttgagagtagaaagttcacggtttttgggaatgggggctttggcatcgggcacagaaaaatacatccatgattccatggtgtaggatgctaagaggaaagacgggaacctcagcacctataaaggggaggatcttcttgtatgtaacgttgcttgaaaaagtgcatttacaaattgcatttgcaaccatttatctgaagtgtgcagcaaatataaagacataggtccttggatactggtatttatatgcctccagaatatgaaacaaagacccttaagtttctcacaagaacatgaatttgattgtacagagaacaaggcggagaatcccaattttggaaaggtctgtgttattggatcttat

SEQ ID NO: 38602 - DNA, 279 bp, Glycine max
  unsure (1)..(279): unsure at all n locations
cccacgcgtccgctttttcccattcattctctttcaactctctcttcaattccatcatggcgaaccaagccgagtcctctgatgctaagggaacgaanagagactttagcacggcgatcctggaacgcaagaaggcgccaaaccggcttgtcgtcgacgaggctgtgaatgatgacaattacgtcgtggtgcttcatcccgacactatggagaaactccagctcttacgtggtgacactattctgcttaagggaaagaaaaggaaggatacaatttgta

SEQ ID NO: 38603 - DNA, 301 bp, Glycine max
gcgctcaagcgttcgcttttacccattcattctctttcaactttatcttcaattccatcatgggggaccaagcccagtcatctgatgctaagggaaccaatagagactttaacacggcgatcctggaacgcaagaaggcgccaaacctgcttgtcgtcgacgaggctgataatgatgacacattacgcccggtgcataatccccacactatagagaaactacagctcttacagcgtgacactattctgctcaagggaaagaaaaagaaggatacaatttgtatcgcgcttgcggatgatac

SEQ ID NO: 38604 - DNA, 426 bp, Glycine max
accgcccggaatccggtcgccacgcgtcgaagaaaatctaattttctgagcagccaacactctcttctgtctctcgaaaattctggcttgagagaaaatctgatcatgtcgcggcagcgtatgtcgaccatcaccttctgtgtgacatcgaaggtaaccacctcactcacgctgctatcatcggccaagacggcagcgtttgggctcagagtaccgacttccctcagttcaaacctgaggagataactgccatcatgaatgactttaatgagcctggatcacttgctccaactggattgtatctcggtggcaccaaatatatggtcatccagggtgaacccggtgctgtcattcgagggaagaagggtcctggtggtgttactgtgaagaagaccggtgcggccttgatcattggcatttatgatg

SEQ ID NO: 38605 - DNA, 259 bp, Glycine max
ctcaattacatttgtttttgaagcaggtggtgggatttgatcttgcacatgatgaaagtcgaccaggaaggcgttcaactaagcacatgcctacttcagctgagtggacaaatgaattgaatccagcatactcttattacctttattactgctatgcaaacttgtatacactcaacatgctgcgatgaatctaaaggaatgaccacaataaagtttcggtcttattgtggagaggcacgtgatagtgatcatttggctg

SEQ ID NO: 38606 - DNA, 313 bp, Glycine max
catacatatacatggacaccgtcttttctttattcgttgctattccctcactcacgggcctgaaatcaagcgcaggcgaaatgaataccccacctaaagtctcagctccccaagccacattgttgggcatcaacgcttccctcaaagacattgtaatcgctgttgttgccactgtcgctagtgcaatgctttctaacaacgccatagccatttaaatgtttctgcgaggtgatgacagtttctattctttcgttcccaacaatatatacaatatctttgtgcagaagatcttttttacaaacaaaacatgttt

SEQ ID NO: 38607 - DNA, 412 bp, Glycine max
  unsure (1)..(412): unsure at all n locations
cccacgcgtccgaccacgcgtnnctttcacgcttncgcccacgcgtncggtttcaggcggagcgcgcattcacaaatgaggttgaaaagggccctgccggaagaagataaataccgtctttcattttccggcgatctctttttttcttccatcaccgttttgcggctatccctaatccttaacagaaatgacgacatcaaggcgccttgcggacaggaaggtggagaagtttgagaaaaacatcaccaaaagaggatttgtgccagacacaaccactaaaaaggggaaagactaccctgttggcccagtgctgctcggtttcttcgactttgttgacattggatcatcttctcttcagataatcaggacagcaacgagtggaggcatggcttaaatggaggcttattttgga

SEQ ID NO: 38608 - DNA, 331 bp, Glycine max
  unsure (1)..(331): unsure at all n locations
cttcttacagtatttggttgaaagtttcaattatgtttcctttcagacaaaacgggcaagggataaaaacgactatggtggttatacataacaatctntttaatatcaacagcatcaccaattttggatgcatcgttcactaaagcttatgctttatatgcaattcaatccatgcacttactttttcaaccaccaaaatctccatccaattgattaattctaccaaagcttatttttgtaaactaaaaattttaaatatttcaaatttaataagaaaaatcacattaccaacctttttaccttgctaacaagcataccatgttaattttta

SEQ ID NO: 38609 - DNA, 406 bp, Glycine max
agtttgttgtgagctataagctagcttatcgttaggtgaatatgaagttgaatgttttcttgtgggctgcaggagttttggtagcatggccatgccatggcgcacgctaccaaaggttccctctccgaatgaaaactggctatcgagagcgttcttccgaggtaaaatgcgcaagttctaggcttgctgtggaagcacacaacatacgagcctttaaaaccattcctgaagagtgcgttgaaccaacaaaggactacattaatggcgaacaatctagatcagactcttaaacagttaaccaacaagctttcttttatgctagggaacgcgacatccatcacaacgacatatttatattcggcatatataacacccgactctctaatattccatactatgaaaaaca

SEQ ID NO: 38610 - DNA, 401 bp, Glycine max
gcgcccacgcgtccgctccgaatagaggatgccattaatgcaactttcacttacattgatgacggtttcgcaacccttaacactccttcttctccttcctcttcatcttccttcccctctctcattcaagacaggcctgtttttgctgcccctgcccccatcatcaccccaactgtgagagaggatatggcaaaggaatacgagaaagctattgaagaacttcagaaattgttgagggagaagagtgaactcaaagcgacagctgctgaaaaagtggagcagataacagcttttctagggacatcatcatctgatggcatcccatcatcagaagcctcagacaggatcaaagctggtttcattcacttcaagaggagaaatacgacaagaattcaactttt

SEQ ID NO: 38611 - DNA, 358 bp, Glycine max
tgcttcattcattctggacaacgaaccaatctttcttagaaaatgagggggggcttgtggcaacttgggcaatcgatcactcgccgtcttgcccatggagataagaaggctgttgctcgtcgatgttttgcctcagaagctgagctgaaaaagacagtgtttcatgacttccatgttgctcatggtgggaagatggttccatttgctgggtggagcatgccaatccaatacaaggactcaatcatggactctaccatcaactgtagggagaatggtagcctctttgatgtttcccatatgtgtgggctgagcctcaaagggaggacgctgccccattccttgaaaagctggtcattgc

SEQ ID NO: 38612 - DNA, 222 bp, Glycine max
cattcctagtctttcgcttgcttacttaagaccagacatgtctaacacatgcggcagctgctactgcactgacaagactagctgcaccaagggaaacagctatagagctatagtatagactgagaagaggaacatcgagactgttcacatggatgtaccagcagctgagcatgatcataagtgcatatatgcccctaactgcacatgcactgactgaacatg

SEQ ID NO: 38613 - DNA, 250 bp, Glycine max
gtccgcccacgcgtccgggagcatcgtaaggcataattcaccgcgatgtaaagacaactaacatcctcttagatgataactttgttgctaaggttgcagactttggcctctccaaaactggtcctgctcttgatcagactcatgtgagcactgctgttaaaggtagtttcggttatcttgatcctgaatacttcagaaggcaacagcttacagagaaatcagatgtttattcatttggagtagttttgat

SEQ ID NO: 38614 - DNA, 244 bp, Glycine max
gacagattttagttatctgatgttgttagtcgtatggctttgactggtttctaatcaatggttccttttctcccacaaaaaaaaaaaaaaaaaaaaaaaaaaaaaaaaaaaaaaaaaaaaaaaaaaaaaaaaaaaaaaaaaaaaaaaaaaaaaaaaaaaagggcgaccattctaaaggatcaaagctaacgaacgcttacatgcaacgtcatagctcttcaatagggtcaccaaaattcaatta

SEQ ID NO: 38615 - DNA, 206 bp, Glycine max
actcttaaattctcagatatgtggagggaagcttttttagatgagcacctacttccttaaatccaaggtaaccacctcactcacaccactatcatctaccaatacagaatcttttgatctcatatcaccaatcttcctcacttcaaacctgatgaaataactaccatcaataattactctaatgagcacttatcactttctccaac

SEQ ID NO: 38616 - DNA, 379 bp, Glycine max
agcagagaaatgagaaaggtagaggtagacattgaagatggaagagattgttttcggcacagaccttacccttcttcttcttctaacctcagtttcatgcacagagttcatctacaacaccaacttcaactccaccaacacccttctacatggcaacgccaccatagaatcttccatcctcacccttactatcagttccaccttctctgtgggtcgtgctttctacccttttaagatccccacaaaaccttccaactcttcaacccctttaccattctcagcctcattcattttctccattgcaccattcaaagaccttctccctggccatggctttgtcttcatactgacaccttctgcaggcaccactggggtgaac

SEQ ID NO: 38617 - DNA, 375 bp, Glycine max
cccacacgtccggaaacagggaggtgaaagtgaacgtccttgcttcattcgttgctgcaaggttggtagcatggcactgccatgcctacgatatgatgaatattcgaatgaacactggctatggtgcccgtacttccgaagtgaaatgcgcaagttggaggcttgctgtggaagcacacaacatgactagctttgagaccattcctgaagagtgcgttgaatccacacatggatacatccatggcgaacaatatagatcagactaccaaacagcttacctacaagcttacttttatgccagagacctcgaagaccaatccaaggacacatttgagtgcagcatagatggctacgtactctactatattccatact

SEQ ID NO: 38618 - DNA, 349 bp, Glycine max
gggaatttagaatgcttagaataaatgaatgaataaagttgagttccctctaacagttatgttagagtttagttgagttatcatgaataatcatcagtgacactgtaggagcatggatcctctatgtgagttttgtcgggtggtgagagctgtggtttactgtaagtcagattctgctcgtctctgcttgcattgcgatggctgtgtacactctgcaaattctttgtctcgcaggcattcgcgttccctcctatgcgataagtgcaattcccagccggcaatgatccgctgcatgaatcataagttgtcattatgtcaaggttgtgactggaatccaaatgactgttct

SEQ ID NO: 38619 - DNA, 396 bp, Glycine max
cccacgcgtccgcttaaatttcccaatcaattccatccatcgggtctttactctcttaccgagcccacacacactctttctctctctctctttccctgatcatcaaaatcagaaaaaattgggggaatggagaccaacaaccagcaacaacaacaacaaggagctcaagcccaatcgggaccctaccccgtcgccggcgccggcggcagtgcaggtgcaggtgcaggcgctcctccccctttccagcaccttctccagcagcagcagcagcagctccagatgttctggtcttaccagcgtcaagaaatcgagcacgtgaacgactttaagaatcaccagctccctcttgcccgcatcaagaagatcatgaaggccgacgaggatgtccgcatgatc

SEQ ID NO: 38620 - DNA, 458 bp, Glycine max
cccacgcgtccgcccacgcgtccgggtgaaactgctattgttggaaacagagttggagtggggcatggtgtaacattaggaggcacggggaaggaaataggtgatcgccatcccaaagtaggtgaaggggcactaattcgagctagtgcaactatacttggaaatataaagattggtgaaggtgccatgattgctgcgggttccctggtgttaaaagatgtccctcctcactgcattgcggcaggaataccagctaaagtcattagtggtctacaggagcatgacccatctttaaccatgaagcatgatgctactaaagattttttcacacatgtagctactaacttcagagatgaaaaacccaatggagcgcagcatccagatagaaatggaatgaacatttgagaggttcggcaacgtagtctcgtttggcatgcattgtcctcaaaggagcatga

SEQ ID NO: 38621 - DNA, 284 bp, Glycine max
aaaaaaaaaaaaaaaaaaaaaaaaaaaaaaattaaaaaaaaaaaaaaaaaaaaaaaaaaaagagaaaagggcaaccaatataaaggaatcacaaacttacatacacatacatgcaacgtcgtcccttttatatagtccaacttaaattcacttcactgcccgtcattttacaacctcttgactcgcaaaaccctatctttacccaccttaatcacctcgcagcacatcccaaatttccccagcttgcctaatatagaagaggcccaaaccaatcgcctttccca

SEQ ID NO: 38622 - DNA, 366 bp, Glycine max
  unsure (1)..(366): unsure at all n locations
annnnnnnntnnnattanncataaggttcatccatatctccgaatcctttaatcatatggcatcgttgaccgggggtgtgtccaacgatcacaacaacatcgtcatcccatggcaaacgccgcatctggtatggcagtccatgatgactgcaagttaaggtttttggagctgaagacaaagaggacacaccgtttcatagtttttaagattgaggagcagcagaagcaggtcattgtggagaagcttggtgagccagcccaaggctatgaagatttcactgccagccttcctgctgatgagtgccgntatgctgtttaatgatttgagtatctgactgaaggaaatccccaaaaacaaaaattttt

SEQ ID NO: 38623 - DNA, 359 bp, Glycine max
  unsure (1)..(359): unsure at all n locations
gacaaaacanactaaacatgaatcccattggtttctctcttctctccctggtttctctagcacttgtctcaattgtcacagcccaagaaagagcccctcatgggcttgtttacgagaaccctgaagccttttcaccatcagcatataacttcttgcacccgaatgaacgaaagcccgagaccaaagacccttgtgctgcatccaaatgctcaccaatgcctttagcagcacaagtggaagctactgaaattcatgaaagccaaaccttaacaacttaagggagttaggaaccatttgttacctgttgcctaacctgccttaaccttgggggtgcctttggtgtgcctttaactattggg

SEQ ID NO: 38624 - DNA, 303 bp, Glycine max
cgtaaataccaaaaggaaacattgtctgaacaacgttacaaaaaaaaaaagggaaaaaaaaaaaaaaaaaaaaaaagggaaaaaaatataaaagataaaagaattaaatacaaatgggtgggacgttttagaggttctatgcttacgtacgcatgcattcgacgtgttagcttttctataacgtcacgtatgttaaattcattgggcttcgttttacaatgtctttactgggaatacccttttgttacccaatttaattatcttgcaggacatcccctttttgcctgttgacctattacgcaa

SEQ ID NO: 38625 - DNA, 466 bp, Glycine max
aaatgaaaaaaaatcattcacggtcacattttcatcctcgggttcgccacagcaaagagtgaacgcttttggaagggtagaatggtccgatgggaagcacgtggttggaaccccaatttcgattaattggggttgatgcaaggttcatcactcactcgaatagggggtgtgtcttgattggttagtgattatagtatttatatgttactattattattatttaactttttttgcaaacaaaaatgttgggtttatccaggttgacattgatgatagcggggacctcgtgcttgattggtgttggttctgtttgttccctgggagaaatgttgcaaaggggaaaaaatgtttggctcatgtgtttcttttcttcccggtgtacagcgttctaatcattgatgaatatttttcgtcgaccatcttgacattaaagtttatgttcaactactttaaagtgaattcattt

SEQ ID NO: 38626 - DNA, 345 bp, Glycine max
cccacgcgtccgcccacgcgtccgaccacgcgtccgcattcatagaaataccagcttgagaaccaccagcggtggagacaatgatgctgatggacagactcgtgagcatgctattcttgcttttaccctcgtggtgaagcagatgatctgctgctgtatcaagatggatgccactaccggcaagtactctaaagctacgtatgatgaaatcgcgaacgaagtatgttactacttgaagatggtgggatacaacctaaacaagatggcatttgtgccacactgtggttactggggtgacaacatgattgagaggttcaccaaccttgactggtacaagggaccaac

SEQ ID NO: 38627 - DNA, 274 bp, Glycine max
  unsure (1)..(274): unsure at all n locations
aacgcgcagaacgaaccccnatcaaagaggcacaatggctacaatggtggcaccaaggcaccagggggacgggctaaaaacggggccaagtgtagtgctggcgaatcatccactgaaccctatatcagaggacactactaagcacacgcacatgaatctgctgccacatcatacaagacaaaatagcaggcacgacaaaaaggacaaatagggagcactaatccaacacactacgagaagccaaaagctcaaagagcagcagaagacaaggcag

SEQ ID NO: 38628 - DNA, 242 bp, Glycine max
ctgactcatggcggacatcggactgaaaactggacctgctgaatctcgttttccgacaacggatcacaccagacgttgatccactcgctgcatagagattcacagatgcttgaacgcacagggtggacaactctctgaacgtgaaagattctgtaaatattacccctaactttgaccgattgaatggcttgatcggtggaatgaacagagagagagttggacttagacaagacctcgatgca

SEQ ID NO: 38629 - DNA, 380 bp, Glycine max
cccacgcgtccgacaagtagttgagaactaagaagaaggaaatggcttcctcaatgatctggtccgcagctgttaccaccgtcaaccgtgccggtgccggcatggttgctccattcaccgggcctaaaatcattgcttggtttcccaacagggaggcccaccattgcctttacttcaatggttggcaccgttggaggagtccattgcttgcaggtttggccaccaattgccaggaagaagttcgggactctttcctacttgccagacctggatgatgcccaattggcaaaggaggtcgaataccttctaaggaagggatggattcctcgcttggaattcgagttggagcacggtttcgtgtaccgtgagcacaacaggtc

SEQ ID NO: 38630 - DNA, 444 bp, Glycine max
cccacgcgtccgcccacgcgtccgcccacgcgtccggtgactcgttcttcttcgtggttatcttcttcttttgttgttcgcgtgtttgttttttctctcacctgaaaatgtcttgctgcagcggtaactgtggttgctgaagcgcctgcatgctcggcaacggctgcggaggctgcaagatgtacccagacttgatctacaccgagtcaaccaccaccgagaccttggtcatcttagtgtcaccagctaaggcttaattctcgagtgctgaaatgggtattcccgctgagaacgcttgcttcacatgtggagctaactgctcctgctaccactgctcttgcatgtgaggtgttagagagcttaatcttcaagcacagatggcccatatgaaccattgttacatctatatcttagccaaaacttcaaaattatgtaatatgcatt

SEQ ID NO: 38631 - DNA, 440 bp, Glycine max
catggtgcaaaactggtgggttaggagatgttcttggaggtctaccaccagcattggcaggtttcgggcatcgagtaatgactattgtgccacgctatgaccagtacaaagatgcatgggatacaggtgttgtaattgaggtgaaagtaggagatagaacagaaaaggttcgcttcttccattgctataagaggggagttgatcgtgtctttgtggatcacccttggtttcttgaaaaggtctggggcaaaactggacaaaaactttatggaccaactacaggagatgattacgaagacaaccaactgcgttttagcctcttttgccaggtgaagatgtcattttcgtcgccaatgattggcacactgcccttatcccctgctacttgaaaagtatgtaccagccaaagggcatctatatgaatgcccgggttggttttt

SEQ ID NO: 38632 - DNA, 355 bp, Glycine max
cccacgcgtccgcttccttcttctctcagaacccttttccacatctcatctcaacgttctgttcctaattcctttcacaactccatcactcttgcatcatctttcaatccactgactcattcaaagcagcacctgaaccacagaggctgcaactccaagctcttggctatttcttacaggtatttcattgaagaagaagaagaagatgatgaaaacaacaactttgatgaagcagtggctctcttcaatggaggagagtactacaaatgccatgactatcttgaagccctttggctcaatgctgaagagcccaccagaactctcattcatggaatactgcaatgtgccgtgggtt

SEQ ID NO: 38633 - DNA, 412 bp, Glycine max
acgcagctatacttgttccttttgaaggttagaagtgctacaatacaaacaatggcagctactgaggaagatgtgaagcttttgggtattgtgggaagcccatttgtgtgcagggtccagattgcccttaagttgaagggagttgaatacaaatttttggaagaaaatttgggcaacaagagtgatttgcttctcaaatacaaccctgttcacaagaaagttccagtgtttgttcaaaattagcagcccatagcagaatctcttgggaatggtgaaatccttgattagaccttggagaacaaccccatcttaacttctgaaccttaccaaagagccttggcttcgttctgggcccaattcattgattattagattgggggtgccttattgaaatctggttttaccggttatt

SEQ ID NO: 38634 - DNA, 207 bp, Glycine max
acacgtacaagtacttgtgcactaacaaggataagcaattggcttcctcaatgatctattcgccacctgttaccactgtcaagcgagccggtgcctgcatggttgctccattcactggcctcaagtacatggctggcttcactaccaggtacaccaacactgacattacctccatcgctagcaacagttgaagagtgcactgcatgc

SEQ ID NO: 38635 - DNA, 163 bp, Glycine max
tacacgctttctatcgatataactagaaacagtgttttgaaaatgaatgtccttgttttcggctaggctacaattatagtagcatggctatgccatacgtaccatatgttccctttcctaatgaacactgtctatagttcctctacttcatatgttaaattct

SEQ ID NO: 38636 - DNA, 407 bp, Glycine max
ttgctaattccatcgaagccgctccattaatggaaaggtagattacagcagaagcaacatccggtgagttaacagcatcttcatacacctcttacaactaccgaacaaactcgcctaaggcgtaaatgtcaagagaaaaaaaaatgaatgattcaaaggcacttatagttacatccccccaaaagttctcaatagcagatcagaataatcaatgtacccactaagaaaaacatagtgcaacagaacattcaataatatatccattagttggaccagacatgaactagtccatgcctgttgcctgtatagatttcattgcgctcttcatcatagaagagagcagtaatgtcttgcaaggcttctgcaacagtgctcctcggctggcatccatgttttcgcttttttga

SEQ ID NO: 38637 - DNA, 409 bp, Glycine max
cccacgcgtgcggttcttggcgggggagatatcactggacctcattagcatactaggtatgctgacgggttaacagacaccctaccatgagctacaatgggagcaggatcacttgctgcaaagtctgaattcgaggataagtacaaggaaagtgagagcatggatgaaggcattaagctagttggtgaggcgatatgtactgacatatgtaatgacctaagaagtggaagtaatgttaataccagtgtgaaaaccaaaggacataaggaatatcttatgaaccaccttctaccaaatgctcatacctatggcaatccaaaacgctatgatacccccaaaaagacaaaagacctttcaacaaagaatgcaccggtggaagagaatgtaggagagactgaaggagatgctc

SEQ ID NO: 38638 - DNA, 293 bp, Glycine max
  unsure (1)..(293): unsure at all n locations
ccacatggtttctttnttttaaatatacattttaatgtatctaattagcatactatntaagctgacggtttaacttacaccggcccattatctacaatactatcangaacacttgcttcaatgtctgaattcaagtctaattacaatgaaaattaaagtatgaatcaatgcattaagctaatttttgatgctatatgtactgacatattaaatgacctaaaaagtgaaagtaatgttaatacctacgtaataaccaattaacataacgaatatcttataaaccaccttctacc

SEQ ID NO: 38639 - DNA, 320 bp, Glycine max
atctcttccccaactattacgcgctgccgcccattctcaagccggcatgcgcactccattcactgtcctcaaatacatggctagcttccccaccataaaaaccaacaatgacattacctccattactaccaacggtggaagagtccaacccatgcacgtgatgacaccacttctcatgaataaatttaaaactacttttctacctgccaaaccttgatgatgcacaattggcaaaagaagtataataccttcttaagaaggtatgcattccttgcttggaattcgaattggatcaccgttttctgttccttgaacccaac

SEQ ID NO: 38640 - DNA, 427 bp, Glycine max
cccacgcgtccggcagttagatgcctcacacaataatgatagtgaagattcacatcgacaagcaataatattaacatcttgttagttattcatgttctcttattaagaaaataggaggtgatatggtttgagaaaatcagtgttttaaaacccagagatagcagcaggtgtagcagccgacccgaaaactgttatcacaggatagctgctactttgaagcagattaactagtaggttggtgattgattcttctagtgctgtgattttattgtatttttttttcagagagagtgtgtcccttcactggaaagaaatcaaacagggccaacaaagtatcattttcaaaccacaagacaaagaaactgcagtttgtgaaccttcagtacaagagaatttggtgggaagcagggaagcgctacgtaaagct

SEQ ID NO: 38641 - DNA, 373 bp, Glycine max
  unsure (1)..(373): unsure at all n locations
ctaaccaatcctgacactacttcttttacactttctctatcatcatcatttaagaatgccgccgaaattataaccattccagatcgtatacagtcttcttacacttaaacaataggtagagtgtatatggcggcgagataattcgcccctaacatccgatacataggtctctgccccaaaaacatccgagaaaatatcgtcaaagaaaccgtcatagactggaacggactacctattaccgtcaagatcaccgtgcataaccgtcaggccaaagtcactgtggttctatccgacagcgngctcgttataaaggccctaaatgaacccgagcgtgaccgctagaaatctaaaaacatcaagcacatcggctaca

SEQ ID NO: 38642 - DNA, 328 bp, Glycine max
  unsure (1)..(328): unsure at all n locations
gccttcancaacagtttttctgggtcattgtctgctgaattctctcanctagcatccctcggcgttcttaatctagctgggagctacttcaaaggttcaattccatctgaatatggttctttcaagagccttgagtttcttcatcttgcacgaaattctctttcaggaagcatacctccagaacttggtcatctcaacacagtgacccacatggaaattggctacaacctataccagggttttattccacctgaaatacgtaacatgagccagcttcagtatcttgacatagcaagagcaaatctttctggccttataccaaagcaac

SEQ ID NO: 38643 - DNA, 294 bp, Glycine max
gcggctataagctagtttatcgtgaggagaatatgaagttgtttgttttctttgttggtgcaggatttttggtagcatggccatgccatggcgcaggctactaaatgatccctctccgaatgaaaactggctatggtgagcgtgcttcgtaggttaaatgcgcaagttttatgcttgctttggaatcacacaacatccgagcctttaaaaccattcctgaagagtacgttgaaccaacataggacgacattaatggctaacaatttagatcagactctaaaacagttaaccaac

SEQ ID NO: 38644 - DNA, 318 bp, Glycine max
actcgtccgtcaatatagcccattccctatacaacttaaccctaacacacaccgatttgattcagtgtccatggctagcctcaaggttgcatttttggctgcagtgctctgcatggttgtggtgagtgcacccatggcacatgcagctatcacgtgcgggcaggtgacgagtagcctggccaattgcatcggttacctccagaagggaggaacgccgtcgtcgggatgctgcaacggagtgaagagcctcaatgccgccgtcaagaccaccgacgaccgacagacggcgtgcaactgacttaaatcctcttgcagcca

SEQ ID NO: 38645 - DNA, 408 bp, Glycine max
gaggtgtaacacccaaagtgttctctcattgcttaaaaggaggagagaacggaggaggcgtgctagttcttggtgaaattttggaaccaagtattgtttatagtccacttgtcccatcacagcctcattacaacttaaatcttcagagcattgctgtcaatggacaacttctcccaattgattcaaatgtatttgcaacaactaacaatcaaggaacaattgttgactctggcacaacattggcataccttgttcaagaagcttacaatccttttgtcaagctataactgctgctgtgtcacagttttcaaaacccattatttcaaaaggaaaccagtgttatctgctatcaaacagtttctgatgatctcaattgaatttatgcttattcaacgtaagtgatatatt

SEQ ID NO: 38646 - DNA, 286 bp, Glycine max
cacgcgtccgaggccgcaaatgtctgtcctcttctttttcttcattctatttcaaccatgaaagagagcctgctcttaaggggttgccaatgctgtaacgaaatcggatccaagttctgatacgtgatattctactagcacgtcattgatcctaccggaaagtacaactactaaagcaacagctacatacaactagagaggatcaatgtctattacaatgttgcctttgacataaggtacgtatcaagagccctgcttatggatcttgaaccttgtaaccatggac

SEQ ID NO: 38647 - DNA, 459 bp, Glycine max
  unsure (1)..(459): unsure at all n locations
ggcagctcctcgaagcagacatctagtatgagcatctccagcacgagcttcctgcgacaattctgcgatgccacagctttctgctacaccagaaagccgaggaatccgtcgccctaagttccctgcagccggagcagcaccttatgttcccattagacaaatgaggccttgtcaggggatggcacctccggtgacaataaggactgcaatacctgtattctccccaccgtcagcagcagctgcagtgtcccatcaagtactacgagctcctcatgtacgagttgcacctccggtcactattcggcaagctgttccagtatttgctactccacctncttcgattcgaaaagatgaacctgttcccatcccataagacgaaccaccaaccattagtgcccctagcccggaagacaaactgccagctaaaacgcccgaagcagagaccaagactgagaacat

SEQ ID NO: 38648 - DNA, 425 bp, Glycine max
aatgatgatgactctttgtaggtcagagcttttgcagaaaacacattgctcattatgggcaccacatggcctcctacgtcctacacctgcaccttctgcagaagggagtttcgctccgcccaagccctcggcggccacatgaacgtccaccgccgcgaccgcgctcgcctccaccaagctccagtaccctcctcctcctccaaccccatgacctcttctcttcccacttcacccttcatcaatatccctcctcaagaccttgttgcaaatgctggcttgtgcctcctctaccacttgcccaaaagccctagtagtactgcaccaccctttccaccttcccacactactccttcttcttccactcttctctctatctcttcttatcctacaaccaactttttgattcaaactttccttaatttttc

SEQ ID NO: 38649 - DNA, 329 bp, Glycine max
aaatgatttcaggtcaacaggtatctgttgcacatgatgcacctcctgcttcaactccgggagagcgaatggacatcatgactgctctacaacttgcgctgagaaaatctatggcctatggacgtctagcacgaggtcttcatgaaagtgctaaggtgatcgagaagtatgctttacagctgttcgttctatcacaagattgcgaccaacctgattatgtgaaactggtgaaggctctttgatcacagctcaatcttagcctttagacagttataagtgccaagacccttggagaatacgctcatttgtgccagatcgattgacaggga

SEQ ID NO: 38650 - DNA, 227 bp, Glycine max
tattgtaacacctaaattcaattcacaaaccatctttttacaacaactttactgataaaaccttaactttacccaacttaatacactttcattacatactcctatctccaattcacataatatcaaagactccctcacctatctttcttcccaacattttctcattcttaatggctaatttaactcaccctttacctactcattaaacacttaaaattttaatttac

SEQ ID NO: 38651 - DNA, 450 bp, Glycine max
  unsure (1)..(450): unsure at all n locations
gacgaattnnacagacacgctgacatttatagtacatttttcccttcacattaccattgtctatttggtgaaaacaaattcaccgcggacacactgcaaacgctgacaaacaatctatgctacacttatgctaggtgcacacgatctgtttcaattgtgccgcctgcttattatgctcatctagctgctttccgtgcacggttttatttggaacctgatacatcttacagcgggtctatggctggaaccggacggggaggtcctcttggaggccgtaacactcgggccccaaataatactgctgttaggcctgtccctgcattgaaagaaaatgtgaagagggttatgttttacttctgagtctcactaattgaaataatgttttaacttatattaatatccgttgccgttcgtttgaagattcttgcaaacaaagttattttttttttt

SEQ ID NO: 38652 - DNA, 397 bp, Glycine max
  unsure (1)..(397): unsure at all n locations
ctgacccttactctcagtccttctacattactacattttgtcgcacaaccaatccaccgtacaacttccagaacgacgagggacaaatcatcgatctctacatccccaagaactgttccgacacgaacaggctcatcaccgctaacgatcatgctgccgtccacatcaacatcgggcatttggatgagagcggagtttacaccgaccagatcactaccttcgccctttgcggcttcatccgtgctcanggtgatgctgatggtgctctggaccgtctttggcagaaaaagaaagtagaagctcgccagcagtaaaaagtagctgtagggcgttttgcagtggaagatctggttttagtttcaacatatgttactttgacctctactagttactctat

SEQ ID NO: 38653 - DNA, 474 bp, Glycine max
ccggggcgacccacgcatccgcccacgcatccgctttttttgattgtgtgtttgatttttctctcacctttaaatattgggctgctgtggtaactctcattgctaaagcgcctgcaagtgctgcaacagctgcagaggctgcaagatgtacccagacttgagctacaccgagtcaaccaccacctagacctttgtcatgggagtggcaccagttaaggctcaattctagagtgctgaaatgtgtgttccctctgataactatggcttcaaatgttgagctaactgcaccttgcaactcctgcacttgcaattgaggttggtgtagagctaaatcttcaaataaagatttacccttaaaatattattatatactacatcttctttttaaaactttaaaattattttatatattattatctttatactattccattttatcttttaatcaatattccttaaaaatatatttttatt

SEQ ID NO: 38654 - DNA, 340 bp, Glycine max
cccacgcgtccgaattctgaatttgcggtttttggatttggacttggtcgtcaacaccggctaattggtatcttttggctccttcgcttatgaatctttttcttcttcttcttcttgttcctgcaacgcacttaattcgatcaatcaatccatcttcaattcgcttcgtttcgatcggtggaaaatggcccatcagttatcgaagggagaggaattcgtgaaaaatgctgagatgaatctcagctgatggggctcgtttggctcctattatgcagatgccgccgatctcttcaataaaacctccaattgcttcaagctcgcctaatcatgggacaaggct

SEQ ID NO: 38655 - DNA, 350 bp, Glycine max
  unsure (1)..(350): unsure at all n locations
cacgcgtgacccacacatncnnctccatactacctagattagacaactttttgtggacangaagatactgtacttcttcaatcatttgaacgggctcgctttaaacgaataactgttaaagcaatggtgatcataaatcctggaaaccctactggtcaatgccttagtgaagctaatctaagagaggttttgcaatttctctatcaaaaaaatttatccttgctttgagatgatgtttaccataccaatatatatcacgatgaacgacccttcattatttctagaaatgattttattgaattggttccacctataagcaaagaaatttaacttatttctttttaattctt

SEQ ID NO: 38656 - DNA, 258 bp, Glycine max
cccactcgtccggttcctggggagaagaaagacctgtatgtgaagagtgttcaggggtgttcaatttggatggggaagaaatatcaaacagttgaggatgttccttgtggaaacacagttgccttggctggtttggaccatttcattaccaagaatgctactattacaaatgagacatacattgaagcacaccccattcgagctatgaagtcttctgcgtcaccattgctacgtgtagcttctaactgcactgctgca

SEQ ID NO: 38657 - DNA, 214 bp, Glycine max
ggaaaatcaagttccatttcgcctactatgatattttggaattgtaaaatcaaagagaacaccattatgaagtttgtaaaccattgtttattattggtacaaatttgcatttcaagaaaaaaaaaaaaaaaaaaaaaaaaaaaaaaaaaaaaaaaaaacttattaataaaagaatagatttattggtttgaaattcaaataggaagacgggttt

SEQ ID NO: 38658 - DNA, 317 bp, Glycine max
gccacgcgtacgccacgcgtaccgtcacgcgtacgttcatgcgttcgagggcagacaccatggacaatgtgaaagacaagattcaagattaggagaggatacccccagaccagcagaggcttatctatggtgggaaacagcttgaagagggacgaacccttgcagataataacatgcacaaggaatctaccctgcacttggttttgaggctatcgggaggcatgcaaatactggttaagactttgaccggaaaaacaatgactgtaaaagttgaaagttgtgataccaaccataacgtgaaggcaaagatacatgac

SEQ ID NO: 38659 - DNA, 446 bp, Glycine max
acccacccctcctacttttcacaccaccgacacaaaaggactctgctcatactgcccctgctttggcttctctgatccacgtgccatgccactggccaatacttctgtgttgacatacctcaaaggagcgaacaccactgcaagctacccctgcaagccacctgctaatgtcacttcagatgactttgtgtacactggcttaactgaagctgcaaatgtcacaaacataatcaatgctgctgtgaccccagcttttgttgctcaattcccaggtctcaatggccttgaactatctgcagcaaggttggaccttggtcctagtggtgttatcccactccacactcatcccggtgccaatgaactactcattgtgcttcaaggacacatccttgctggattcatatcttcaggtaacatagtttatcagaaggtgctgaaaaaaggag

SEQ ID NO: 38660 - DNA, 267 bp, Glycine max
cccacgcgtccgggagggttccgagaagtttaagaagagcaatgaagcaatgagtggcgaagaaaaaaaagaggatccaatggagcatgaaatggaatcactcacccctgccaccgtcttttgcattaggctcaagcaacccaagtccaatttgctctacaaaatgagtgtccctgaaatttgtcgcaatttcagtgctgtttcctggtgtggaaaactgaatgctatagcttgtgcttctgaaacgtgtgcaaggattccaagctc

SEQ ID NO: 38661 - DNA, 278 bp, Glycine max
cccacgcgtccgcccacgcgtccgcccacgcgtccgccttctcacatccaagatcttgtggcagcaaatcaaacatggcatccatgactatgcttcagaccatgattcctaagaatgcaccgaacctccctcctcgtgttggtgcttcttccaacaacactactaagatctcatttggtggctcaggtagggtactgtggaccgggattcagaggaacaggaataataggtcttcttcgattgtagttgctgcagttggagatgtttcatctgatggc

SEQ ID NO: 38662 - DNA, 184 bp, Glycine max
ggacagtactactatatgcttaatgcctcaatggtagccatctatttattactcaaaaaagaaaaaagagaaaaaaaaaaaaaggaggatggaaaaaacgggcggtctttctaaacgatccaagcttacttacgcgtgcgtgcgacgacatagattttatatagtgctacctaaatacaattca

SEQ ID NO: 38663 - DNA, 400 bp, Glycine max
cccacgcgtccgaaaaaaaaaaaaattttaaaaaaaaaaaaaaaaaaaaaaaaaaagggggaaaaaaaaaaaaaaaaaggaaaaaaaaaaaaaaaaaaaaaaaaaaaaaaaaaaaaaaaaaaaaaaaaaaaaaaaaaaaaaaaaaaaaaaaaggggcggcctttttaagggtcccaagtttacttccccgtgtttgcaacttattagtttttttttggggcccccaaatttaaattaattggccgtgtttttaaaacgtcgtgtctggaaaaaccttggctttcccaaatttaatccctttggagcaaatcccctttttgccagttggcgtattaccaaaagggcccgacccaatggcctttcccaaaagttgcccaccttgattgggaaatggaacccc

SEQ ID NO: 38664 - DNA, 424 bp, Glycine max
  unsure (1)..(424): unsure at all n locations
ctataagctagtttatcgtgaggagaatatgaagttgtttgttttctttgttgctgcagtagttttggtagcatggccatgccatggcgcaggctaccaaaggttccctctccgaatgaaaactggctatggtgagcgttcttcggaggtaaaatgcgcaagttttaggcttgctgtggaagcacacaacatccgagcctttaaaaccattcctgaagagtgcgttgaaccaacaaaggactacattaatggcgaacaatttagatcagactctaaaacagttaaccaacaagctttcttttatgctagtgaacgcgaagtccatcacaacgacatatntatattcggcatagataacaacgtactctctaatatnccatactattgaaaacatggttatggggtgggaggaattaaatgaaac

SEQ ID NO: 38665 - DNA, 366 bp, Glycine max
atccgaagcaggcccaatttccctctgcagctgttagagaaaaaggacgttgatgaggtcaccgaacaaccttgttccaccaccagcgtggtaactactgctgctgctactattacttctggtaacaacgacctccacgtggcggagcagtcgaagaagcctccgccaaagcggagttccacgaaagaccgccacacgaaggtcgatgggcgaggccgccggattcgcatgccagcggcctgcgccgcaagagtgttccaactcacgcgtgagctgggacataagtctgatggtgagaccatcgagtggctcctccagcaggcggagccggcggtcatcgctgccacaggcaccggcaccattccc

SEQ ID NO: 38666 - DNA, 415 bp, Glycine max
gcgtgcggaaactgtgtctctacttgatgtgatctttcctcaaaacatcaaggtctgggctaaaaaccagagatgggatgacaaaaattattcctgatcctgagatagaaaccagagggttgatgacatcccaaaagagctcccagaccccgaagccaagaagcctgaagattgggatgatgaggaagatggtgagtggacaccccctaccattgccaaccctgagtacaagggcccatggaaggcagagaaaatcaagaaccccaactataaaggaaaatggaaggcaccattgattgataacccagatttcaaggatgaccccgacctctatgttttccccaacttgaagtacgtggggattgaattgtggcaggtgaaatctggtactttgtttgacaatgtcttaattact

SEQ ID NO: 38667 - DNA, 333 bp, Glycine max
gagccacacatccggcagtgcatcagcttcatcgccttttttcccccaggcttctaagtgtgaaaaattgcaaattattagtagccgggagcccactttgtttgtttgtacttaaactacattcccatttgtttttgctttttgagatttcatcatcctgtatttttggtttttgttttcggacttcaatggaaattaatggatgagaactaatgaataaaaaatatatttaataattcatttaattaataattaagtaaatatatttacttacatatatttacttttacaacaataaaaaatataagtttacctgtctttttttttattttt

SEQ ID NO: 38668 - DNA, 381 bp, Glycine max
ggaattcccggcgggacgccacgcatccgcccacgcgtcctcatggcagcttcttttgcatctgcttcctccaaacttatactattcccccattctacatcttgttcccttatctccacacccttccgttcctccaccaacacccacaaactatcccctctctcctactccttcctccaccccaccaccttcctccgccgcaccccctactccaccactactcccacgttgactgccccggtcacgccgactacgtcaagaacatgatcaccttctcctcccatatggactgcgccatccttgtcttcttctgcgccaactgtcccatgccccaaaccaaataacacattctcttaaccaatcaagtcagtgtccccaaca

SEQ ID NO: 38669 - DNA, 394 bp, Glycine max
gctataacctgatttatcgccaggataatattaacttgtttcggcgctttttaaatacagtaggtttcttaacatgtccatgccatatctcatgctaccaaaccttccctctccgaatgaaaactcgctattgtgatccttcttcttttttaaaattctcaacttttaagtcttctttttaatcacacaacatcctatcctttaaaaccataccttaataatgcttataaccaacaaattactacattaatatctaacaatttacatcatactctaaaacagttaaccaacaatctttcctttattctattgaactcttaatccatcacaacgacttatttatattctgcatatattacaccctactctctaatatcccatactattaaaaaca

SEQ ID NO: 38670 - DNA, 394 bp, Glycine max
ctgctataacctagattatcgcgaggagtttataaacgcgatcgtctctcttccttgcttgaggcattttagtagcatgggcatgccatggcacatgctaccaaacgttacctatccgaatgaaaactggctatcgtgagcgttcttctgaagtaaaatgcgcatgtttaatgcttgctgtttaagcacacaacatcctaacctttaaaaccattcctgaatagttcgtttaaccaacaaaagactacattaatggctaacaacttacatcagactctaaaacacttaaccaacaagctatctatcatgctactgaacgcaatgtccatcacaactacatatttactttcggcataaatcacaccgtactttctaatatcccatacttattaaa

SEQ ID NO: 38671 - DNA, 162 bp, Glycine max
ctttttggcctattgcaaccagattcctccatgagggattctcactgctttgtatgcattttacaaacatgacatgtcaagaagaatattatccttaactttccttcttgctgtgcttaaactcttgaacatttttcacatgtgctcactgcctgcttttta

SEQ ID NO: 38672 - DNA, 397 bp, Glycine max
tttcagtctttcttggaactttgtttttctcacacatgtctcgctcctagccttggctttcaaccattgttgtcttgcttctgcttctgatgcctattaaaataattgtcccactattgttgccaataccaaaactctttaattctaaaagccaccttttttaagggtccattttttatttacaccaactgtgtttctgtttgccaaacctaacttttcacttgaggacactgccttggcttccttctcatatgcttcttcaccaaacattgttaattttaaaaaattaattaacagtgctttcatataatatgatagatctatcatccttctactcgtgttgttaaattacccacttttgttttgataattaaggttacccattctactaatgttt

SEQ ID NO: 38673 - DNA, 455 bp, Glycine max
  unsure (1)..(455): unsure at all n locations
ngcactaaactttccctcgcagcagccgcagcttcagaagccgccgcccacgcatgcggcgcagccgccaacccagccaagccgccaagccccaagccaatgatcacgcctttggtgctgcgcattcggttcagctggttcagcgccggctgcagaatgttgaacagaacccaccctattgctgctgggtgcatatttgagtatgacaaagctcatccagagggttctggcattggctttaaggaggaagacaaacccaacttcattggttctttctattccaaaactaaggctatggtcgaagagctcttgaaagaatatgacaatgtgtgcaccctcagggttcgcatgccaatttcatctgacttgagcaatccgcgcaatttcatcaccaagatttctcgttataacaaagtagtcaacatttcaaacagcatgaccattttggatgaact

SEQ ID NO: 38674 - DNA, 329 bp, Glycine max
ggcgagccacgcgtccgcccacgcgtccgataaaaaataagttatcccttttatcttcgcatcataacactctgggcatagcggactcataatgatgatttcacaaatttccacccacacccctcactgctttttcctttcccacaccccttcctatcgttgccaatagagtgagtcccttcactgtatagaaattaaacatggccaacaaagcttcattttcaaaccaccagacaataaaactgctttttgtgaaccttcaattcaagacaatttaatggtatgcagggaagcgctacttaaagcttctgttttcaactaatgcattc

SEQ ID NO: 38675 - DNA, 341 bp, Glycine max
gttgcattcacaagacaaatgggctgttacttttacggatgatgaaaatgacatgaggctcgtgggtgatgatccatggccggaggtcttcaacatggtgaagaggattttcatttgttcacgggaggacttgaagaagatgaaatgctgcaagctacctgcttcttcatcagacgttgaagaggttctattgagtccagattcacagaataaggatgagactcaacagtcttacatgccttagacaacttaaatttatttttttttttcctttttttttgggttctgggaatggaaatatatctcatggcataagttgcttcattttaatgaacttttac

SEQ ID NO: 38676 - DNA, 287 bp, Glycine max
  unsure (1)..(287): unsure at all n locations
cgtccgcccacgcgttcgacaagactttgtatagaatctctcgatttagcaaacagntgcgtctcaatgcacaatgataatatcctgggtcttctcaagctatcaattaaaagaggcgttaatctttcaattcgcgatgctcgtaccacccatccacatgtcgtctgcaacataggttatcaaaagctgaatactctcgtcgaaaaaaacaactgcaaccctttctggaatgaagaattgaccctttctttaaaggacgttaaaaccccactacatttgaccgttta

SEQ ID NO: 38677 - DNA, 440 bp, Glycine max
aaaatgcgagtgctattttcaagcatgagagtttttcttcttcttgtgtggttgttggagctggtttgtgtttcggtgaccgccgtgaacccttctctgaacgacgacgttttggggcttatagtgttcaaagctgacatacgagatccgaaggggaagctcgcttcttggaacgaggacgatgagagcgcgtgtggtggtagttgggttggggtgaagtgcaaccctagatccaatagagtggtggaggttaaccttgatgggttctcgctctctgggagaataggtagagggttgcaaaggttgcagtttctaagaaagctttcactggcgaataataacctcactggtgggataaaccccaacattgctcggattgataaccttagggtcattgacttgagtgggaatagtctctcaggggaggtttctgatgatgt

SEQ ID NO: 38678 - DNA, 444 bp, Glycine max
gcggccacgcgttctagcacatgaagcatactgagtttatactgtactctcgttaaggctacccttggctcacgattgatgcactgtagcttgtgaatcaaaatcaatcaataagagcatagaagaacttcttccagtctccatcccttgaaaagacatagactcagcctcaattataacaaaacatgcgctttcacaagtctcttcaggagctaagagaattgcagtctcagttgcaccatgctgcacattattgtgaaacaactttcttgaaaagtgaagctaagagagatgtgttggaaaatacaaaagaatacatatgcagggccatggttactgttgttgatcatcttgggaacgtctcggctaatcttgatgaccttatttctcaaacaaatgcattttctgaggctgagtctagaatccggtgcctcaaacaaagac

SEQ ID NO: 38679 - DNA, 460 bp, Glycine max
gtccgcagggaagattcctatgtccatggccgcccttgtttatatggaagccttggttttacgaaacaggggtggaatgggtgagttgccttcttctttgaagaattgcagcactttatttatgctggacctgagtgaaaatatgttgtcgggtccaataccatcatggattggagaaagtatgcagcaattgataatcttgaacatgcgaagaaatcacctctcaggaaatctacccattcctctctgttatttgaaccgtattcaattgttggatctttcaaggaataacttgtcaagtggaattccaacatgcttaaagaatttcactgcaatgtctgaacagagcatcgactcaagtgacactatatctaatatatattggaataatcagacttacttagaaatttatggtggttacagatatggaggttatacgcttgacataacatggatgtgg

SEQ ID NO: 38680 - DNA, 323 bp, Glycine max
  unsure (1)..(323): unsure at all n locations
agaatatgaatttgtttgtttcctttgtggctgcattagtgttggtggcatgaccatgccagggcgcaggctaccaaaggttccttctccgaatgaaaactggctatggtgagcgttcttcgaaggtaaaatgcgcacgttttaggcttgctgttgaagcacacaacatccgagcctttaaaaccattcctgaagagtgcgttgaaccaacaaaggactacattaaatgcgaacaatttacatcagactctataacagttaaccaacaagctttcttttatgctagttaacgcgaagtccatcacaacgacatantttatatt

SEQ ID NO: 38681 - DNA, 411 bp, Glycine max
ctctaaacaacttgataaaaatgattttcccttttatcttcgtggctacaacactggtagcatggcaataccatgcgggcgatatgtaccctctccgaatgaacactggctatactgcccgtactccgcacgtgaaatgcgcaagatgtacgcttgctgtggaatcacacaacatctatggctcatataccattcctaaacagtgcgttgaagcagcaaatgaatacatccatgatgcacaatatacatcatactttaaatcagttaaccaacaatcttacttttatgccacataccttaaagtttattccaaggtcacatgagtgatcaatatatattgcacccaactttctaatatttcatactacaaaaaacattcatattgcttggataaatttaactctacctttt

SEQ ID NO: 38682 - DNA, 323 bp, Glycine max
acactccctctgatgttcccaccggatttaacaagatcatcaatactgatatcactgcagcttctatctaacagggggaaaatgtccttgcctttagtgacatacatccacaagctcctacccatattctaatcattcctaaagttatggaattgcctaactggtctgtccaaggctgatgataggcactgtgagattctaggacgtcttttgtgcactgctaatctgcttgcaaagcaagaatgtcttgatgatggcttcatgattgtaattaatgatggactatacggttgccaatcattttaccacattcatgtgcacct

SEQ ID NO: 38683 - DNA, 451 bp, Glycine max
gttgagaactaagaaggagaagcaaatggtttcctcaatgatctcttccccagctgtacgactgtcaaccgtgccggtgccggcatggttgctccattcactggcctcaagtccatggctggcttccccaccaggaagaccaacaatgacattacctccattgctagcaacggtggaagagtgcaatgcatgcaggtgtggccaccagttggcaagaagaagtttgagactctttcctacctgccagaccttgatgatgcacaattggcaaaggaagtagaataccttcttaggaagggatggattccttgcttggaattcgagttggagcacggtttcgtgtaccgtgagcacaacaggtcaccaggatactacgatggacgctactggaccatgtggaagctgcctatgtttggttgcactgatgcttctcaggtgttgaaagagcttt

SEQ ID NO: 38684 - DNA, 443 bp, Glycine max
gttgagcactctaaaggaaaaccaaatggtttgaacaaaggtccatgtaaaataaaataggtgcaattaaaatagcatgggggagccttgctaactatatgtttcctctcctaatgaacactggatatggagcccgttctcttgtagtgaaatgcgcaagttgaaggcttgctgcggaagctcacaacatctttggctataaaaccattcctgaaccaagcgtaaaagcaacaaaggaatacatccttggctaacattatatatcagactacaaaacagttcaccaacaagcttacttttatgccatagacctaaaagtccattccaaggacacatttgtgatcaatataaatggcaccgtactctctaatattctctactatatatatcatttttattgtgtactaaatatcaactctatcttttatgatcaatgctttaac

SEQ ID NO: 38685 - DNA, 391 bp, Glycine max
cccgtctggacccacgcgtacagcagcttcggcttgggcacataaacttatagggtactgtgctggggacgctatggggagcccgtggaagaagaagcgtttgaggaggttgtagaggaaccgccgctagatgagacagagatccaagtaacgcgttaaacctagcgcgtgcctgacgcttttacaattgctgataggtgcgcatgggacacaccacacgttaatggcacatggcctctccatgaatgatggttgagacatgatggcggatacaggttcactatatgcggcatatgttattaacgtaactcatcgatatgactcgctactgtcatgagcaataagcatctatttgcgagaaattattggatgggagaacatataacttatc

SEQ ID NO: 38686 - DNA, 351 bp, Glycine max
cccacgcgtacgaggaagaccaataaagtttttacctacattgtttgcaacggtggacggggacaatgcatgcaggtgtgggctcaaattggcacgaagaaaagcgagactctatgctacttgccagacctagaagatgccaagttgtcaaaggaagtcgaataccttcaacggacaggatggacttcttgcttggaattcaagctggagcactgttacgtgcaccgggagtacaacaggtcacctggatactatgatggacgctactggaccatgtggaatctgtctatgtcgggctacactaatgcttcataagtgttgaaggaccttaaagaagctacgactgcatac

SEQ ID NO: 38687 - DNA, 414 bp, Glycine max
attccatccgaatttgaataaaaaacataagaaaagaaaggtgacggggcaaagtgagaataatagctttcttctccgtctcaattcatctcttctctgagtctcaacctaattccccaatcaatcatctttacgtgtttgttcgagaccatggccaaaagccccttcaagcttgaacatcccttggaaagaaggcaggctgagtctgctcgcattagagacaagtatcctgatagaatacctgtgattgttgagaaagctgaaagaagtgacatcccagacatcgataagaagaagtaccttgtcccagcagatttgactgttggccaatttgtttatgttgtccgtaaaaggattaagttctggctgtacttatgaaccgaatctcttgttgcagccgctttgatgtcttct

SEQ ID NO: 38688 - DNA, 467 bp, Glycine max
cccacgcgtccggcttgttgcggggcttctaggagtagagtctggacaagatgcagtttggagagaattgctgtatgaacgtaaagaacagttggtgccaccatatggcgtggccgtggaagagttcacaaaccgcatttctatacttaggagcaagttaggaaatagaggtttgaaagatgaaggcattgttgtgcctacagggctgggtgccgagggcaaagttagaggtaacattcttgctggtgacgtaaactcattggcatattcaaggactccagaagaaatattgaggatagtatatggaagtggtgatgaacatgttcgtggtggcttctatcctaaaggagcaagtggtcacatagctcaatcttacttaaagtaaactacatttattatggacttttatagattatatcacttgtctttaatccattgctaatttcctttgtggtaattaaatattg

SEQ ID NO: 38689 - DNA, 394 bp, Glycine max
cccacgcgttcgcccacgcgtacgcccacttgtccgcttacgtgttcacgcaattatcggggaaacttgcaaagtgtcacggggtcaaacctcatgaatggacagatcatgtacatgatgatgctactgcgcgcgactttgcatgtgttcttctgtattattgaccgtgtagtcgccaacatgaactctgagttgggtacaaagcgctactgtctaaaaggaacaatggcctgcgtcgtaatgccactagatctcagaatgggagatctacttgttcgcggaatgcataaactccggcctgaagcagggcgtcatattgctcgtcgggcaagagggcatgttcatggagcgcctagagagcgagtactccgttcagctgaggatcaaggtcttc

SEQ ID NO: 38690 - DNA, 430 bp, Glycine max
ctcggcacctagagacgacgcagggccttttaagcggcgaaatgcttaggcgagtacagggtaagcgtatatccggggattcctgatatacgtgaacctttcggactgctggtgaattcacgggcaggcaagagacaacctggtgaactgaagcatcttagtagccagaggaaaagaaagcaaaagcgattccgagtaatatcggcgagcgaaatgagagcagcctagaccgcgataacagagctagtgcagatctatacaagggtctagctgctagcgcgaagcagcagagaatgctgtgccctagatggcgagagtgcagttgccgaacgcattactagcttacgctctgactgctaatagcatgcatcacgtggaatgacgtgtgaatcagcaaggaccacgttgcaaggctaaagactgctggatg

SEQ ID NO: 38691 - DNA, 375 bp, Glycine max
tccaaacattctgatgaacatgaacgagcttgtactgttcattgatgcaattttggtaggatgtccatgccatgcgtgcgagatgaaacctttccgaatgaacactggctatcgtgcccgtactccggaggttaaatgcgcatgttggaggctggatgtggaagcacacaacatattgggctttgacaccattcctgtagagtgcgttgatgcaacaaaagaatacatccatggcgaacaatatatatcagactacaaaacagctaaccaacaagcttacttttatgccagagacctggaagtccataccaaggacacattagcgttcagtgtacatggcaccgtactgtctaatattccatactacaaacaaca

SEQ ID NO: 38692 - DNA, 467 bp, Glycine max
tagaaacagtgtgatgaacatgaaggtccttgctttcttcgttgctacaattttggtagcatggcaatgccatgcgtacgatatgttccctctccgaatgaacactggctatggtgcccgtactccggaggtgaaatgcgcaagttggaggcttgctgtggaagcacacaacatctttggctttgagaccattcctgaagagtgcgttgaagcaacaaaggaatacatccatggcgaacaatatagatcagactccaaaacagttaaccaacaagcttacttttatgccagagacctcgaagtccataccaaggacacatttgcgttcagtatacatggcaccgtactgtctaatattccatactacaaaaaacatggatatggggtggagaaatttaactcgaccttgtatgatgaatggggtaacaagggccatgcaccggcactgtccgagactcttaagaatt

SEQ ID NO: 38693 - DNA, 466 bp, Glycine max
tccacgcgtccgcttgtgcttttcctagccctcactgatcattcaagtgctctttattggttatgcaaagatggtgtgagtgatcaaacccttcagaaagcaatagattatgcttgtggaagtggagctgactgtacccctattctccaaaatggagcttgttaccaacccaacactgtgaaggatcactgtaactatgcagttaatagctattaccagagaaagggcaatgctccgggaacctgtgattttgcaggtgctgccacaaccaatgcaaatccacctactgcatcatctggatgcgtctacccctcaagtcctagcaatacaggaacaacaccatctattggttcaccaccaggcacaacaccatcaacaggtggtacaactccagggacaagtacaacacccaccacatttggaatgagtccaacatctacaactggtatcaacaatgacaatggag

SEQ ID NO: 38694 - DNA, 337 bp, Glycine max
cccacgcgtccggagaacgcatgcgtgcacaccacaattccacaacatgtttttcactgccgctacaggggtagcttcctagatttcttcttctattaacagtgtcaaatgtcttcgttcctccaagaactgctccattatatacccccttataaccacattgccctcaaaccgtggcatgtttgtgtcacacttagtggaacctttgtccattgggggtgccattaatacgcacaaaatgtgggggcctataatttctgctgctgtcgcacaagaagatgctcgttgcgtagctgatgatgaagtaaatgatggtgctgttttagctgaaaaatag

SEQ ID NO: 38695 - DNA, 271 bp, Glycine max
agagttcttttagtcaatgtatacggctcatgacacagcaaacataactcgaacaaatcacataatgtggacaatgggaaccgattttaagtatcaatatgcacatacatgggtccgacagctggacaagcttattcattatgtaaacatggatggacgcgtcaatgctctgtactctacaccatccatatatactgatgcaaaatatgcttcaaatgagtcctggcccatcaagactgatgattttttttcctatgcagatcgagcaaat

SEQ ID NO: 38696 - DNA, 375 bp, Glycine max
  unsure (1)..(375): unsure at all n locations
attctacaacaatcctcaatgtgaatttacctctaaggaccccactgggtttaagagtgcatggaatcagtggaccacatcaattaatgctggcaagttctttgttggacttccttcctcacatgcagcagctagaacaggttttgtgtcatcacatgctctcataaatcatttgctgcctatagttaggtcacctaaatatggtggtgttatgctttgggataggtatcacgatttgcaatctcgatatagtggtaaaattagtggaagcgtttaagtgctccacttattaaatagaagttttaaggattctaggaattatttcaaataactggtgtaaaatatccncaatttaaaatatagtaatttaatttc

SEQ ID NO: 38697 - DNA, 422 bp, Glycine max
tctgactctcactctttcgcaccatcattctatctgctttattacactacctatattggaaaagtgtacttaagaacccgcgacataacatagctgaatatgtagaactacgcatctatagaccaaatcattgtatgacactaacatgaaaaaatacctgattccattgatggatatatttttcttgatctattatacaaacccattgtgctatcttgtggtcacaatgttctgatactggtgtgtctataattcaatgaattgtctgctgtagtctcaatgtccattatgtataaatcaatactatcactttccaacaatttgctcaattgcttcactttttgcttcttaagatctataccgttgcttacaaatataaagtaaagccatttaaaaccctttttttctttttttttttgaaa

SEQ ID NO: 38698 - DNA, 459 bp, Glycine max
  unsure (1)..(459): unsure at all n locations
gattgagcangctctgggcggggatggaatcatatccactgaagatctgatccatgatatcatcactcttagacctcactttaagggggctatcaacttcgtgggggcatttaatcccaaagctccatattgtggcttaacaaaacttatagaccatgataaagcgggaagtgacactcgaaaccgggagacaacatctacatgcctaccaagaaaacagaagcgagcctatctaactgacaaagcagatgtttatagcttcaaggtggttgcactggaaactgtcagcggaaagagcctttctaattatatgccaaacgaagattatgactaccttcttgactgggcatatatcttgcaagagagaaggaatcttctgcagctggttgatccaaatttgggttcacaatatttaactgaggacgccatggggtgctaaatgtgctctcttattactaa

SEQ ID NO: 38699 - DNA, 348 bp, Glycine max
cccactcgtccgcccacgcgtccgggtttgtaagagaaagaaaaaagaggcgcaagatgagtggtagggtttctgggaaggtgaagtggttcaacgatcagaaggggtttggattcataacccctgacgatggcagcgaggaactcttcgttcaccaatctcagatcaaatctgacggtttccgaagcctagctgaaggagagtccgttgagttcgctattgaatctgaatctgacggacgcgccaaggcttgtgatgtcactggccccgacggcgccagcgttcgcgccgtccgcggcaagttcgagcgcatgaagccccacgtgaacatcggcaccatcggccacg

SEQ ID NO: 38700 - DNA, 411 bp, Glycine max
cccactcgtcctaatctcctaagaccaaatcccagtggattcgtattcctctccttcgaacggcacatttgccgcgaatggaacaatacccgctgattccacattcgccaaggccaccgcgccgtatggagaaccctccgtcggcgaacggctacagcagccggaaacccatctcattgcggccgtcgatgtaccattctgcggtgactacggctctgcgggaggctcggaccaagatttttgagcggcttctggaccctccgagggacgctcctccgcacagtgaattgctcaccagaaccccgtcgcagagcatgaccagcatcttgtacaacttctactctgatttcgtgctcaaggtacaggatacggatccctggaatgaaatccaaattgggaagccgctcaaga

SEQ ID NO: 38701 - DNA, 415 bp, Glycine max
cccacgcgtccgcccacgcgtgcgcccacgcgttcggccacgcgtacgggcggccgggcggattgaatgcatctacggcaacaactacactttctcaaactacttcgacgccctcaaatccctcatgcacctcactcaactccaactcaacaacctctccgtcgctaaagacggtggcaaagcctctgagcttctcgcgggcctggcctgcgaccgattccacacttgcgccattctcctcataggctccgacgaaggcctaattggctacggaacccaatggctcgatgttagccaaagaattcaacctctaccatactggcagatgtgtgagtttctgagcatgggagggaacagcacgacgtggatgaacactgacgttttgggggggtttttaaaaaaaaccccccatcca

SEQ ID NO: 38702 - DNA, 325 bp, Glycine max
catccacgcgttcgtccacgcgtccgcttgaaatgaattatgtgccacagaagtttaagctttgggcggctgggacagaagggcttgctattgaggttgatacccgcccgagaattgatgctgcaatctggcactatgtgaaggctaagaaatcgctaatcccaaatgacccttcctactttcactgtgagcagcctcttctgaaagtatttggagaagaaaagatgaaatttacaatgggttcacagaaaatatcatgatatttgttcccctcacagcctatacttttggagcataagatcaaggctttgggaaacaatcctgc

SEQ ID NO: 38703 - DNA, 283 bp, Glycine max
  unsure (1)..(283): unsure at all n locations
cgtacgcccacacntacatatcaacggttcatatatgctatgcatacaagtctctccaccgggtgctagtaaaaattttgaaactcgttcctaccttccacaccttgataatccacaattggcaaaagaagtagaattccttcatatgaagggatggattccttgcttgtaattcaagtaacagcactgtttcatgtaccatgatcacaacaattcaccaccatactacgatggacgctactgcaccatgtggaacctgcctatgtttggttgcactgatgct

SEQ ID NO: 38704 - DNA, 320 bp, Glycine max
  unsure (1)..(320): unsure at all n locations
accggnccggacgacccagcgcgaccgcacacgccgacgcactggaaagcctacagatgataagaaatcactcaaggaactcactggcaagctcttccaggatatcagcaatctggatcatgcagcananattaagagcagcccagaagcagagaagtactatgctgctactgtatcttctctgaacgatgtccttgccaaacttggttaatgtgattaatttcttgctttcttgtgtaagctttgtgcatcattttctcagacactttgttgactgatattttaagaaaatcaaatgatgagggaaaattttctataaa

SEQ ID NO: 38705 - DNA, 448 bp, Glycine max
cccacccgtccgtgattggaaagttcacatggaaaaaacagaattcaactatcatgaggatacttccgctgtagaatctgggaagaaagaccttgtagaggctcttcaaatctgcctcaacaaggcaaaagtaggttcacaacaatggagaaaagctcaagaatctttgcttagtttggagaagagaaatgctgcttctgtggatactattgttaggggaggaatggaagctaatcaagctctacgtgcccgattctcaagtgctgtatcaactacacttgaagatgcaggaatagcaaacaaggatattaactcatccattgatcattcgttgcaacttgatcatgaagcttgtgggaatctgaactctatgatcattccgtgctgtggtgatttgagagaacttgaaggtggtcatttccacagtattgtggagataacctgaaat

SEQ ID NO: 38706 - DNA, 228 bp, Glycine max
cgtacactaatcaatcatcccagatggtttatgggtttaaattgtcctattccggcagacttgttatgtttcattggatacaactcaaaccattatttgcaatgtaccaatgtgtgtttttgattttgataagtttgccacattaacagatgctatatccaataaactttcatagctgaatgtgaagtgagtgacaaccatcatctaatgagtcgactccattgcctc

SEQ ID NO: 38707 - DNA, 352 bp, Glycine max
  unsure (1)..(352): unsure at all n locations
tatatattgtaaatctcattctgttttttaattcatttcatanaaagggggacgaaggcttggattatattgcttatcaaacttctcaccgcaattttgctgttggcacttaacagttatttgtaactgtatttcttgcttcaggtaaaagagggtggttatgattacaatgtcaatgaaactgtcaatgttgtctctcagaaaacatcatatattggacaaaagacttgttgtataatgaaagggttcatgtcattgacttcacacaatgttgaggaattcgctataaataaccctaattgtatgtcttgataactttcaaccaaattaaaatgatagaaatggtttctac

SEQ ID NO: 38708 - DNA, 219 bp, Glycine max
cattccaatctttttcaacttttgaatcaatttacaactttcgttgactggtactatttttttctctcaaaatgatcccaacaatgtaagaagatactgcatgtaagaatgatgaataggagttcaacacctgaccactatctgtactcatgatgagtgttaaaaataatactcaggtactgataaattgtcagaacaacaaaaagcttctgggtcgag

SEQ ID NO: 38709 - DNA, 424 bp, Glycine max
  unsure (1)..(424): unsure at all n locations
aaactcaagcatngcatctttctngatttgtagtttgttttgtgctttcgataaattttctgccaaggcaagaggggttttaagatcatagtgtgtgttttgcaacaatggctaagttctttgctgctatgatcttggcactcaatgccacttacattctctgtaccacagaattaaacgatctcaaatccattttccctcgtgttaaggatggagacgttccttatatatgcttagatcttgtatacgaatatacattgctcgttgatggatttggcatagatccgcagcaagagattacgttggtgaggcaagttgagtatcaagattctctcgtggaagcagcatggccactaggcagtgccatagaagccatatcatcattacctaaatttgagaaattaatgtatttcatttaagcttt

SEQ ID NO: 38710 - DNA, 402 bp, Glycine max
taggggtggaataaccgggtcggcgcaagccttccgccaacccttccgttcgttcttcttcttttgttgttctgcgtttgcgtttgatttttctctcggctgaaaatgtcttgcggaagctcctgcaagtgcggcaacggctgcggaggctgcaagatgtacccagacttgagctacactgagtcaaccaccaccgagaccttggtcatgggagtggcacctgttaaggctcaatttgagggtgctgaaatgcgtgcgcccgctgagaacgatagctgcaaatgtggaccaaactgttgctgcaacccctgcacttgctagctaggtgttgggagagcacgctttacgcagatatagctcttaattacgaataatgataaactattaatgtgtagctaaaaa

SEQ ID NO: 38711 - DNA, 360 bp, Glycine max
cccacgcgtccgggggatcatgcaagcatgattcaatttggtggagaaatagtgaattgggggtcatcagggtctcagacttccacccaaatgggtagtggacattttgctgaagagggttttgcaaaagcttcatattttaggaacatgcaagttgtggattgggataacaacttgattcccttgtcaaatttaaaggttctagctgatcaccccaattgctatgacatacaaggaggggttaataatgcgtgggggaattatttttactatggtggacccggcagaaatgtaaagtgtccctaaaggaatcaatgatatagaatttataggttataaacacaccattaccacctggac

SEQ ID NO: 38712 - DNA, 323 bp, Glycine max
  unsure (1)..(323): unsure at all n locations
gagaaagattacactcctaccttaataggtgggagaagaaagaaagagaaggggccaaaggagaaggtgtatgatatttatatggtccaaagttgaatcttctgccacaacatacaccatcatcctcctccaatccatcatcaatggccgtgaccactccctgtatcaatgccacagaaaagaagcactggtggctcaccaaccgaaagatcgtaaagaaatacatgagagacgctcggagtctgatagcgacgcangaacagagcgagatcggttcggcgctgaaccttctcgacgcggctctggcgatctatccgcggctg

SEQ ID NO: 38713 - DNA, 165 bp, Glycine max
ccattttatgataaactttccttccatttttgttcctctagtaagcctattatttccggcaattgcaatgacttctatatttctttatgagcaaaaaaacaacaatttttagatacagaaaacaaaggaaaattctggggttttttattccccaattataatact

SEQ ID NO: 38714 - DNA, 395 bp, Glycine max
ggctaaccaacgctgacacttctgcttatgcgtttgctacgacatcatcgacgtcacaatgccgcaccatgcagaccactgccagatcgactacatcgacttacgcctcaccacaaatgaagactgatcgtcaaagcttcgtcgattaaacatcggaccattgtgtctgtggcggacgaagatctgactagatatcacctacgaaacctgcatggactggaaggacctgcgcgtcaccgtcaagctcaacgagcaaaaccacgcggcctacgtcacggtagtccgatcctgcgacgcgctcgtcatcaatgcccttaaggagccacagcgtgaccgcaagaaaacgaataacatcacgcacaactgctacatatcactagacgacgtcatcgaag

SEQ ID NO: 38715 - DNA, 349 bp, Glycine max
aaaaaagaaaaaaaaaaattaaaaaataaaaaaaaaaaaaaaaaaaaaagaaaaaaagggaaaaatataaaaaaaaaaaaaaaaaaaaaaaaaaaaaaaaaaaaaaaaaaaaataaaaaaaaaaaaaaaaagggggcggccgttttatagtatcaatgcttacttacccttgcttgcaaatcaatagctttttaatagggcaacctaattcaatttaactggccgccttttaaaaacgttgtaacttgaaaaaccctggctttaccaaatttaatcgctttgaaaaaaatcccctttttgcaagttggcttattaacaaaaagacccgaacctatcgcctttccaaaaa

SEQ ID NO: 38716 - DNA, 410 bp, Glycine max
  unsure (1)..(410): unsure at all n locations
atnccggagccactctctcttcttattccaacagtttatgtacctcaaattcccaaaactgggaccttagtagaattttaaataagcgcaagatcataaaattattgctggattattatcaatggaaaggtatatgatatcacaccatctttggattaccatccaccagtttatataacttttactgacatcaacattgaatgatcccaccattgattttgaagatgttttccacaatcattctgatatacaaatgatttataaatacttaattaacaaggtagacacttccactattatcacacaaaattaaccataaactgtcacaacctactcttacacatgtcgctggcaatcaatcttctcgattagttgtaaagatcttgaaattcctgattcacatttttata

SEQ ID NO: 38717 - DNA, 377 bp, Glycine max
agcaagctcattctaatttaaaaatggcacacctccggcatgcgctatcttccccatgcttgggggccaaggcccttaatcttttcccatcatccccctaagtcgggagggtcagcatgatgaagaccgtcaccaatcattccttcttcttaagcccatggtacttcccataccgcgtcaagtacttgtgcccattctctgtcgagcccccgtcctacctcactgtctagttcccatgtgactactgctgttacactgtttgtctttcttcctacccataaaccttctccataaaccgttatctcgaattgatccactccatgtgtgccattctctttgccttgggcttcgtcttcccccaactattgtccctcaac

SEQ ID NO: 38718 - DNA, 248 bp, Glycine max
ctatcgggaggagaatattacattgagcgtattgtttattgctccaggagttactggagcattgccataccatgtctcatgctaccaaaggaaccctatcctaatgaaaactgactatggtaagcgttcttcgtaggcaaaatgctcaagttttatacttgctgatcaatcacacaacatcctatcctttaaaaccattccttaatagtgctttaaaccaacaaatgactacattaatgtcgaacaat

SEQ ID NO: 38719 - DNA, 403 bp, Glycine max
cccacgcgtccgcccacgcgtccgatcccttcctatccacaggtaagtttggttgatgaatatgggttttttttttgctgggtagcagtgaggatcaaattcaaatggctatggccacagctgtcgtgtgtcctcagaacatcaccggagccatcgtgggctcacccaagaagagagtggtgcacgtgagagggttaaattcatttgggggactgaaggctagcaatggtgttgtctctttgggacttcctatgagcactgagaagtgctttgctaaagttgtgagttcagtgaaagcagcaacatcaaatggaaaaggaaagggtggaggggcactcttcttcacgtgcaacgccgcaggtgagatattcacgattgctgctttcatcaatggacttgttct

SEQ ID NO: 38720 - DNA, 425 bp, Glycine max
attcctcaaggtgtgacaaaggtaccctaatgagtccaggagagatagagaatgattgacattcgtctccaaaatcttgtgccacttcaattgtggatcaacaacaatgccattcttctaaattagaggtcagagatgtggaagttgacagccaagctacaattgtcaggtggtccaagaggcatgcaaccaaattggccaaaaaagacactctacacagcaaagatttaagagagattagtgcagaagcccaagcatcatgggatattgacgagtcaaacattgacacttccaagttacagagagaggaagccaaaatcattgcgtgggagaatttgcagaaagcaaaagctgaaactgcaatacggaaacttgagatgaaattggaaaagaagagatcatcatcaacggataaaattctaaac

SEQ ID NO: 38721 - DNA, 456 bp, Glycine max
tgacttttcattttgccatctccacgattttcggcaccttctccaccgccgctgcacccagagtgcgccttcgtcaatagcctttaccgctccagcttcagtttgttgattgaagacaacaacttccagcgaagcagcgtaagtgttagtaaaagattttatttttctctctctctcttccttctaaacgccgcttccgcatctctcttccttttctaactatagattttatttttccctctgattcttcctcttcctcttcctcttcctcttcctctccaccctccacatagcttccaccctctcaacccccaccaacttcatcaagtcctcctgcagcaccacccagtacccagccctctgcatccagtccctctccgtctacgccttcaccatccagcaagacccccacgagctcgtccagacagccctctccctctccctcaaccacaccga

SEQ ID NO: 38722 - DNA, 312 bp, Glycine max
gaccgacgcgtccggagatatatgatccgtctttagaccctaatttatctggagatccatacaagacactgttagttgcatttcttagggatgagaggactgatcaccgactcaaaagggagtttgaagcatatgggccaataaaacggttaaggatgattactgataaggagactaataaaccaagaggatatgccttcatagaatactttcatacactatacatgaaatctgcatacaagcaatctgattgacggaaaatggatatttaaatatttctttgagatatctacccgtgtcataactgttcct

SEQ ID NO: 38723 - DNA, 399 bp, Glycine max
  unsure (1)..(399): unsure at all n locations
cggcgattgggattaaaaatgaactnatgcttatatctgaacttcagcacacgaatcttgtacagcgactgggattctgcattcatgaagaaaaaagaattctaatttacgagtatatgccaaacaaaagctggatttctatctgttcgattgcactagaagcatgttactagactggaagaagcgcttcaacataatagaaaggatttctcaaggaatactctatcttcataagtactcaagactaaaaatcattcacagagacttgaaagctagtaacatactacttgatgagaatatgaacccaaaaatttctgattttggattggcaagaatgtttatgcaacaagagttcacaggaactactagtatgattgttgggacatatgggtacatgtc

SEQ ID NO: 38724 - DNA, 449 bp, Glycine max
  unsure (1)..(449): unsure at all n locations
gaannnccgggncgagcggggcgtacgaacacgcatccgatgaaaatgaacgtccttgttttcttctatgctacaattttggtagcatggcggtgccttgcgtacgagatgggccatcttctaatgaacactgactatggtgcccgtactcaaatgtgaaatgcacatgttggaggcttgctgtagaagcacacaacatctttggctttgagaccattcctgaagagtgcgttcaagcaacaaaggaatacatccatcgcgaacaatatatatcaaacttcaaaacactttaccaacaagcttacttttatgccagttacctcgaagtccatcccaaggacacatttgtgttcagtgtagatggcactcgactctctaatattccatactacaaaaaacatggatatggggtggagaaatttaacttaaccttgtatgatgaatgggtt

SEQ ID NO: 38725 - DNA, 293 bp, Glycine max
ctcttactcttcttcttgccgcagatattcatacgggagacgaagatttttaccatgctgtttggccaaacactcccattccacttcattgccaaatcttttaaaacctctccctacaactgttcatatcaatgatcaccctatgcaaaaccataaaacacagcacccaaaaaccttcttctataaataatacctttatccagacctaactttcaacgtacaattcaacaagccttcctttcaacatccatttcgacatcctacatggtttaaggcaatttaaaacactacta

SEQ ID NO: 38726 - DNA, 327 bp, Glycine max
  unsure (1)..(327): unsure at all n locations
atggcttcaaatcaaaaatacgcgacgcgcttttttaaactactggaagcccaattttttncaatattcatatttccctcaaattgaaacagttcaatacaaatatgtccaataaaatttgatgaacaagagttaactgcttctcaaatccaacccatttcacaagaaggttccaatttttatttacaattaaaatcccataacataatctcttgttattcttgaatacatttattaaacatttaataacaaccctatcttacctttttatccttaccaaaaaacctttactcgattctcttccaaattcattcattataatttttt

SEQ ID NO: 38727 - DNA, 356 bp, Glycine max
accactcgtcaaccggtgcgcggtgcaccccatgtgctgcctccattcacgtggcgctcacaggccatgcgctggcgttgcccaccagaagagaccacacaatgacacttacactgcattcgctagcaacgagcggaagaacagcacatgcatcgcaggtgtcggccacccagctggcatagaagaagtttgagacgtctttcctacctcgccagaccttgatgatgcacaattggcaaaagaagtacaataccttcttaggaagggatggattccttgcttggaacacgaaccagaccacggtttcgtctaccgtgggcacaacatggcaccaggatactaccatggacgctgct

SEQ ID NO: 38728 - DNA, 397 bp, Glycine max
aaaaaaaaaaaaaaaaaaaaaaaaaaaaaattaaaaaaaataaaaaaaaaaaaaaaaaaaaagaaaaaaagaaaaaaaaaaaaaaaaaaaaagaaaaaaaaaaaaaaaaaaaaaaaaaaaaaaaaaaaaaaaaaaaaaaaaaaaaaggggcgccctttttaaaggacccaattttacttccccttccttccaacttaatactttttttttagggccccctaatttaaattcattgcccgccttttaaaaacttcgaaattggaaaacccttggctttccccaatttaatccctttgcaaaaaatccccttttccccacttggcttaataccaaaaagccccgccccaatcgcctttccaaacagttgcccaccctaaattgcaattggaacccccct

SEQ ID NO: 38729 - DNA, 415 bp, Glycine max
  unsure (1)..(415): unsure at all n locations
gcttccaagagtcacagtgaagctgaaaggagacgcagggagagaatcaataaccatcttgctaagctgcgcagcttgttgcctagcacaaccaaaacagataaagcatcattgctagcagaagtgatccagcatgtgaaggagctgaagcgtcaaacctctctgatagcagaaacgagtccggttccaacagaagctgatgagttaacagtagtggacgaagctgatgaagatggaaactcagtgatcaaagcctctttgtgctgcgaagataggtcagatctgttccctgaactcatcaagaccttgaaagcgttgaggctaagaacgcttaaggctgagataacaacgcttggtgggcgcgtcaagaacgtatngttcatcactggagaagaaacagactcatcaagcagtg

SEQ ID NO: 38730 - DNA, 380 bp, Glycine max
ctcacgcgttcgcccacgcgtccgcccactcgtccgggaagagtagctgcaggattctgggaaattgaggattctgagtccctctggcgatgtctactggatgtgggccaggtagccctggtgccagggactgcatttggatatgacacttgcatccggatctcttatgcagaatcccttactaccctacaggcagctgtagaaagagttaagagagcacttatcccgctgagctctggtgcacttgtgtaatattgctgttttgatgtaatgggtgtattctatttttattgtaattatggcaatgtgtcctccgcctattctgaaaatattaggctgtagatattcatgcatataatgaagtgatacaactgtcttta

SEQ ID NO: 38731 - DNA, 406 bp, Glycine max
attgatgcaatttttgggactattcggcccgtgagtgttccaaggaagagtgccatttatgtgtgggggtacaatcaatcagggcagacaggtagaaaggggaaagaggatcagttgaggattcccaaacagcttcctcctgagctgtttggatgtccggctggcaccaatgcgtgttggttggatgttgcctgtggtcgggagcacacggctgcgatagcctctgatggctcactcttcacttggggggctaatgactttggtcaattgggtgatggaactgaagagcgaaggaaacatccagaaaaagtaaagcaattagagtcagagtttgtaaaatctgtatcctgtggagcacattgctctgcttgcattgctgaaccctctgaaaatgatggttccatct

SEQ ID NO: 38732 - DNA, 421 bp, Glycine max
aatttctctttctctctttttttgtgtgttcaaaatggctcctagttctactcacaacaagtggttcgatgtgcttatgctagttgggatagtggttagcgctatggttgctatttgtgctgctagcttctaccaagactttgatccaacatgggttggtgaccgtgctaagatattcaatggtggccagcttctatcactttccctagacaaagtctccggctctggcttcaaatcaaagaaagaatacctatttgggaagattgatatgcagctcaagctcattgccggcaactctgctggcacagtcactgcttactacgtgcgacaatcccttgtggatggcgtatagacccagaatcgatgccgctgtagccccagtgaataaagacagcgggggcgacattccttgtgtgggctc

SEQ ID NO: 38733 - DNA, 237 bp, Glycine max
acgatacattctggcgtatgcccgaatgctacattcacggtttttccatccagtaccttatgggtcctctggaacttattgacagagtccaggaagaaacaaagagccatactgatcgcaaaccccttgttgtgggactgtcgaacattacagaagtatcctatgatgcgtcctggttgaccttaaccaaaatgaattgttacctgccttaattaatgtgtacctaaagtacaagga

SEQ ID NO: 38734 - DNA, 392 bp, Glycine max
gaccactcgtccgaccacgcgtccggcagctcgagcttgtgctagaacaacttcatttctagctatgaagctgactttacttttctgcttgtgtcgtgggtgatattcatccgattcatttgcagcctctaaattgaacccgggcttggagacattgtaaactttagtttcattagattgatgaagtgtttgtgacgaggaatttgagcatgcaggtgtggccaccagttggcaagaagaagtttgagactctatcctacctgccagaccttgatgatgcacaattggcacatgaagtacaataccttcttaagaagggatggattccttgctaggaattctagtttgagcacggtttcgtgtaccgtgagcacaacaggtcaccaggatac

SEQ ID NO: 38735 - DNA, 415 bp, Glycine max
gatgaacccatcatcatcaatgcctattgctccacttactgccttgcaccctttctcaagggcctggaccacaaattcggcatgatcaacggtaccatcaccaccactcactcctacaccggtgaccaaaggctttttgatgcgatccaccgtgacctgaggcatgcaagggcaccaacactcaacattgtacccacttcaacatgagcaacaaaggcagagtgccttgttctaccaaccctcaaacgcacactcaatggcattgcactacgtgtgccaacaccgaacgtctcaatggtggacctagtcgatcaggtctcacagaagacctttgcagaaataattgaatgcatcattcagagagagtgcagacattgagctaaagggaatcctctctgagtgagatgagccactt

SEQ ID NO: 38736 - DNA, 345 bp, Glycine max
aggagatgagcgagcgtgatgtgccggtgtccgattctggtagtggagttcctaaaagtgcatccggaagccgagtttggaagaaattcttcacagattactcattttttgaagcctgagacttttcaaggggttgtaaaagccataaacgagaggattctttctgttttggatgagaatggttcaggcaggctggatctgggaatgttttttgctattcttgctcctatttgtggcggtcctccggatagactcaaaagggttgcctttgatgcacttttgtggcgtcctatgaacgaagatggtgctaatattaggaaatttgatgtcactttatacatcaag

SEQ ID NO: 38737 - DNA, 296 bp, Glycine max
acgcccacgcgtccggagaataacagatagagatccatccatcaattccaatggccgggcagcggtcctacttacagatcggcgagttcaaagaagccttcaccctcttctacaaggacggggatggttgtcttaccaccaacgaacttgggaccgtgatgcggtcacttggccagaacccaactgatgcagatctgcaagacatgataaatgaggttgatgctgatggcaatagtaccattgatttcccagaattcctgcatctcatggctcgcatgatgaaatacactgattca

SEQ ID NO: 38738 - DNA, 309 bp, Glycine max
ataaaagccattatatgtttggtattgtttggatcaattgaactgctttacatctcggcttctatctgcaaagttcctgaaggaggatggatcccccttgtgctatcttttatctttatgagtataatgttcacttggaactatggaacaatgaagaaacatgaatttgatgtggagaacaaggtttcaatgagcaagatactatccttgggaccttgcttaggcatggtccgtgtcccgggaataggggtcattttcagcaatctggcttcaggtgttccagctatttttggccattttgttacaaac

SEQ ID NO: 38739 - DNA, 416 bp, Glycine max
ctcatatgtctgtctacaaatcctactttctttatactcttcgctgctcactgttgacatggctgacatagtaggaggagcggtaagaggaaatgcatgttagggcatggctgttgctgagcatagcgtgaacaccttcctggattgttagtacgaaagttcatcgctatgtgattttaaaagacgatgataaaccgacagaggtcatcattcaagaaactaaactcgctgctgaaagctatgatgacttgaatgcatcgttccctgaaaatgattgccgatacgctgtctttgactatgagaaagggacatgagaaatctgcctagaaaagaaaattttttatagaataaggttttttttaggggcccgtattcccctttaaaagctatttgccatatttagggaccggtttaaa

SEQ ID NO: 38740 - DNA, 454 bp, Glycine max
gcagtatgggaatcaaggtttgaggtttatgagaggtgtggctggaaccgcgaaatagctcgtggagcagttcgaaagtttcccagtattgtgaagttgtcagaggaagtgtttataaaaaaaatgagtttcctagtgaaggatatgggttgttcatcagaagatattgctgaatatcctcaagttgtaacgtacaacttggagaagaggattatccctagattctcgataatcaaaatgttgaaatcaaaaggtctgctcaagaaaaatttgcacttcagtgccattatttgcataaccgaggcaaattttttggagaaatttgtcatcaattttcagaaagatttgcctttcttgccagattactacaacagtttggcaaatcaacagaatgtattataagctttgaaggcttttgctggtgattgccctaacttccagcttttctctttca

SEQ ID NO: 38741 - DNA, 286 bp, Glycine max
tgcgaactaacaagaaggaaatggcttactcaatgatctcctcctcagttgataccaccggaaaccgttccggtgccgtcatggttgctccattcaccggcctcaaatacatggctggcttgcccacgaggaagaccatctatgacattaccttcattgctagcaacggtggaagagtacaatgcatgcaggtgtggccaccaattggcaagaagaagttcgagactctctcctacttgacagatctcgatgatgcccaattggcaaaggaagtcgaataccttct

SEQ ID NO: 38742 - DNA, 433 bp, Glycine max
cccacgcgtccgaccacgcgtacgattaaggttaacaggtatgctcagcagacagatgcaggacagttaacaagaacccttctgcttgaacctcgtgcgactgtaaatgttaaaccgaatcttcagattgtggctgatgatgttaagtgctcccatggagctgctataagcgacctggaagaaagtcaactcttatatttccaagctcgcggcattgacatatagactgctagaagagttctggtttttgcttttgggagtgaggcgatagataagtttccttattcttccattaaagacagaatgcgtcgtagattaaaaatttggtgggatccatattcgattgatcataatttaagggtggaccggatttgaacctttttaacttcccggtaccatggttaaccggaatcaccatggaaattggtttccc

SEQ ID NO: 38743 - DNA, 320 bp, Glycine max
accacgcgttcgctcattggttccctttgttccaggggaatgctcgattcagctcttgaatggaagaaccagttgctgaaagaaaactgcaagcccaccgtcgttacttacactattttaatagaagcatctcttttgcagggtgggattgatgaagcaatgaagctcttggatgagatgttggaaattaatcttgaacctgatatgttcacttacaactgcatcataaggcgtatgtgcagagaaggatacgtggatcgtgcgtatcataatattagcagcataagtggcagggctatccccggatgtcatacttaata

SEQ ID NO: 38744 - DNA, 424 bp, Glycine max
caacaaaggagtatcgctctgttgttttcaaagaacctcgtgctgttgaatattggggatgtgcagctcctgagttggagtatggaataatgaacattggcagtcgctcataatagcgaaagccaagcgtctgaattgaatcactacatgctattacttggatacttgcatggacacatacgaggtttcatttgccagcgtggcttggtcacgtaccactacttaagcatgtacttgagaaagatccgatgaatgtacagatgctttaggacatgtacaagcaatggactctcttcatggtcaccctgaacttggacgtaatggcgtttgcttaaggagacctcggaatttgagtcctatttgactaactactaatatcagaatagcttcgttcaaatggggtaaatttaatagctttttacgt

SEQ ID NO: 38745 - DNA, 285 bp, Glycine max
cacacgcgtacgcaaatcttctccccactttcaatgcctacactcttaccctttctttcagcgtaggcttacactaactctcacacgtgccttcttcaacccccacacgcttcagtcgctatgtgtacgccgctgacaccaccgttcatgccgcccctaccactcaccatcctgagaagctaggagctgatgatgagccgtcggtacaaccgagacttgcgatgaagctcatatggatggagatgaacattggaaatgcgcttgaccagatggtaccgggcacat

SEQ ID NO: 38746 - DNA, 385 bp, Glycine max
atccgtatcatcggatgaagccggtggcgtcttcattcttagcctctcgaagctccttcaacgcctgagaagcaaatggcttcgtcaatgatctctgccccagctggtaccactgtcaaccgtgccggtgccggcatggttgctacattcactggcctcaagttcatggctggttttcgcaccaggaagaccaacagtgtcattacctgcattgctagcaacggcggaagagtgcaatgcatgcaggcgtggccaccagttggcacgaagaagactgagactctttcctacctgccagaccttgatgatgcacaattggcataggaagtataataccttcttaggaagggatggattccttgcttgtaattcgagctggagcacg

SEQ ID NO: 38747 - DNA, 191 bp, Glycine max
agcagatctttcaagaatggcacaaattaacaacatggctcaagggatacaaacccttaatcccaattccaatttccataaaccccgatgttcctaatctgttgtttaattgtgcatatgttgtatgtacttgaagtacacttgacaacaagaaagtccaataaatatgatatatgttcgtcctttcttcc

SEQ ID NO: 38748 - DNA, 450 bp, Glycine max
gacactcagaaatgatggatgaagcagcagcttgaggtactattccatgctaaaaattgatgactaaaagcgctcatacttgacattttggttcctttgaacattgaagattaggcaacgaaatgttcaggctataagtaatgttggcatgaatgaatgtatctcgttctctttagtgaagtggtgaatatgccatgaattgtaaaaacacggtaaggaaaactttacggatgtgtgcactcatgattctgccattaacttatgttgccgtgcgttctgatcgacgccatgtcaggaataatggtgtgagactcgaaaatcatgattgcaggtatagaatacgaccttacgtgctaataataatgctattcggatgctcactgtctgaggctttgacttcattgacagaataaagagccttgttgaggcagaatgccctggtgtggtctc

SEQ ID NO: 38749 - DNA, 317 bp, Glycine max
caagtttgccaggataccactttgcgggatgatatctcaatataaccaggcttggacagaaagagaaggcgtcaggaatcttttgaatttggtgggcaaggaagtaagaatggaagggtttttgctgaaaacacatttcaatcgttttggagactttgcaaaagagattgagggccacataaaagaagggaggcttaagcccaagactaaaataaacttcggaattgagagctttttggatagcttgaaactcctgttttctagctctaatattggaaaagtagttattcaagtaataaggcttaagtatgcttgat

SEQ ID NO: 38750 - DNA, 422 bp, Glycine max
  unsure (1)..(422): unsure at all n locations
cccacgcgtccggcagaaagcaagctcatcctagagttataaaaatggcagcagcctactccatggctctctcttccccatccttggctggcaaggccgtgaagctgggcccatcagcccccgaagtcgggagggtcagcatgaggaagaccgtcaccaagcaggcctcctccggaagcccatggtacggcccacaccgcgtcaagtacttgggcccattctctggcgagcccccgtcctacctcactggcgagttcccaggtgactacggctgggacactgctgggctttcggccgacccagaaaccttcgccagaaaccgtgagctcgaagtgatccactccaggtgggccatgctcggggccttgggctgcgtcttccccgaactattgtcccgcaacggngtcaagtttggagaagct

SEQ ID NO: 38751 - DNA, 426 bp, Glycine max
gaattgtatacaaacgaatatgttaacattcttgccttcaaaaattatgtaacggtaggcttatcgtgaaaataaaaaaaaaaaagaatacaaaaaaaaaaatataaaaataaaaaaaaaaaaaaaaaaagagaaaatagaaaaaaaaaaaaaacaaggtttacgcttgttgaggaaacacacaacatgcgagcctttaaaaccattcatgaatagtgctttgaaccaaaaaaggactacattaatggacgaataatatagatcagactgtaaaacagttaacctacaatcatttcttttatgctagagaacacgaagccaatcacaacgacatatttatattagagatagataacaccggactctctaatatccaatactacgaaaaacatgaatatggcgcgcaggaatttaatgaaacactat

SEQ ID NO: 38752 - DNA, 431 bp, Glycine max
taaaaaaaaaaataacaaaataacttgaaaaatttaaataaaaaaaaaaaaaataaggggatgaggcaaatttagaaagcgatgaaaatgccatacgttcaaaaaaattcactatattaatgaaacactggctatcgttcccgtactccataggtgaaatgcgcatgtttgtatgcttgctgtggtagcacacaccatctttgtctgtaagaccattactgatgtgtgcgttgaatcaacaaataattacatgcatctccaacaatatacatcatactccttttcttttaaccaacatgcttacttttatgccagtgacctcgaatttcattccatggacacatttttgttcaatatagatgtcaccgtactctctaatatcccatactacaaaaaacattgattatgggtggacaaatttatcttctcct

SEQ ID NO: 38753 - DNA, 399 bp, Glycine max
cccacgcgtccgcccacgcgtccgcccacgcgtccgcccacgcgtgcgctgttttgcaagattttgttggctggctttattttagatgacgctagaaaatataacttattgattattcttgctttggatatgtattcagcattcttacaaaataatcatattcaggaatcgtttgttaatgctttcctcatatgttaggttatttattgtgaatgacaacatcaaattcatagcaagtggggagagaatataaatatagcaagttcttaggttcatttgtgttataggtatgttttttgtgaagaacttgagtatagatattataacactactacacttagggcaattcttttatcttctcatgaccatcccttctatccttctaatgttttccctggt

SEQ ID NO: 38754 - DNA, 452 bp, Glycine max
  unsure (1)..(452): unsure at all n locations
caaaaatagtctaattaacgagggaagttattgggtggaaaaggcgtgaaaaaaaggacaaaagattttatttcaaacatgccttgctttctataagaagataaaatggaccatttcatgttagttgtaaaacacaacaccatatactagttatgttaatcaaacaagttgtccacaggggattaagaaataaatatatggacaaacagattaaggtacgataatcatttttcaattttcacttgcttaactctactaatttgtttacatgacccttgacaggtacgtgtatatacaccaaagagggtgtttcaagagctagaagttgcaaaggacgaatacattcgagctaacttaagcgtacgcaaggaccaaaaaatactcttaccaaagcttngtgagtcattcaacaaggactcaagtttgtgccccattggtgtcaatgatatgat

SEQ ID NO: 38755 - DNA, 448 bp, Glycine max
ccgggccgaccgacgcgtccgcccacgcgtacgcccacacattctgttccatatcgcaatgctggcatcccttgagctatcggcgttctttctgacgttaacttgttaatatcaacctttccccttcttgaactgctctgatcattatgcaacactggaattcacgcggcatcaaaatatatatgtctcaatactaaaccgggactataggaaaaaggccatgttcgtacatcctgataaacatatggctaatgagaaggctgtataagcctttaaaaaacttcaaaatgcatatgacattctactggattctatgaagcgaaaagctcatgatgatgagctaatgagagaggagatttcgagtgtctttcctacatttcatgatgcttctcgtaagaatggtaggcatggattctttccttcatgatctgcacgatctgatgcacat

SEQ ID NO: 38756 - DNA, 308 bp, Glycine max
accacgcgtccggcttctatttctcacgcaaccgtatgctttcatcaatggctacactcgacctatctgcgttgcaagctctaacctgccatcgcttatcctttgcttttccccaaagcggatgaaccacacagagaaactctaacccaaacttggaaaacttggatggaagaatacataataaggagtgaacaagttccacctggcactgaatccggaaatgccacttgggtcatgcagccacctacacagaagcctgatcttcgattaacgcccgatcaccacatgctattgaccgtgcctcttga

SEQ ID NO: 38757 - DNA, 427 bp, Glycine max
ctgagaacttgggcaagcttacgtctctaaataagttgattctgagtggaaaccttatctgcggtgtgatcccggggacgctggggctgtgtaaggctttgcagttgctggatataagtaacaataggatcactggttctattcctgatgagatcggttatttgcaagaattagatatcctcttgaacttgagttggaattctcttactggccccattccagagaccttctcaaatctctcaaaactatccatcttggatctctctcacaacaagctcacaggtacactcacagttctggttagtcttgacaatctagtgtctctaaatgtctcctacaatagcttttctggttctcttcctgatacaaagttcttccgggatctacccactgctgcgtttgctggtaaccctgacctttgcattag

SEQ ID NO: 38758 - DNA, 361 bp, Glycine max
  unsure (1)..(361): unsure at all n locations
gaggctgaaaagggagcgccgaaagattgagacagagatccaagtagtgcgttaaacctagtgtgtttgcgttgcttttacaagtgcttatgttgtcaaataagacacccagttgttagtggcactggtctctcctttttgatgttttgatacattttgttggattttatttcgtcttatgttcttagctgaaaacaatgctgttactgcgtttgcgaatcaacaggatatcttgtttgcataanactgaaatgatcatattcactgccagaaatgatcaagtggatattaatgaaagagggtgctactgtgaccctgcgcaatgtcgaaactgtcatgttcaaacgatctttcaggcttg

SEQ ID NO: 38759 - DNA, 374 bp, Glycine max
tcaactcaagacctgagttattaacggtgttacatatgtggctatacaaatgggatctgagagtggatcggcaaagattgggtttgatattgtcctttgcggacatcttaggaaacgtcttaaggcctgtattgaatcctgtggagagcaagaatggaacttaaatatgtaacttcataattccattgacgattgcttactagaaagcgtccttggagttatcgatgcccaaacacttgctgactcgctggctatctacctagaaaatattctacccagtgttgttggtagagcaaccattggatctatgatcatacttgctcgcacacttactttagcattaactctcttacattcacagttaggatttcctg

SEQ ID NO: 38760 - DNA, 368 bp, Glycine max
atggcttctttatttctttatgttcaaaaaaacaagattttttagatacagaagacaaaggagaaattctggggggttttattccccaattattatactaaatactatacttggagagtaatgagtataatctttggctcagacgatgacactggtatattatatggcggagggtctaaaaacaagcaatttattttgggccgttatgactttggtaggttcattggagctattgttcgttggagattccaggtatgttggcatggatatgatctttatttctgataaaattagagatttttcttttattccgaacattatttattttccatttattccacaaggggccacgatagctttttatggaa

SEQ ID NO: 38761 - DNA, 373 bp, Glycine max
cccacgcgtccgaccacacgtacgaaagtcgttgagaacttagatggagaagcaaatggcggcctcagcgatcttttgcccagctgctaccactgtcaaccgtgccggggcccgcatgggtgctccattcactggcctgaagtccatggctggcttgcccaccacgaagaccaacaatgacattacctccattgctaccaaccgtggaagagtgcaatgcatgcaggtgtggccaccaggtggcaagaagaagatggagactctttcctacctgccagaccttgatgatgcacaattggcgaaggcaagaagataccttcttatgaagggatggattccttgcttggaatactagttggagcacggattcatg

SEQ ID NO: 38762 - DNA, 369 bp, Glycine max
  unsure (1)..(369): unsure at all n locations
accaccgtcgccaccgtncgccacctncgaaaatctctttcgttcagattaggttaccgggcagtgaggcatggcaaaaccaaagcgaatctctctgcgtatctttgcgctgctcctcttgatttccacctcttcgtttcagcttctccgcgcttccgatgacgccgatgatgatgcgatcttctatgattcgttcgacgaggattttgaagaccgttgggttgtgtctcagaaagatgagtacagtggtgtctggaaacatgccaagagtgagggacatgatgattatgggcttcttgtcagtgagaaagcaaggaaatatgctatagtaaaagaacttgatgaggccgtgagtctcaaggatgaaac

SEQ ID NO: 38763 - DNA, 289 bp, Glycine max
cccacgcgtccgcagactcggacgactcagagtgttcatacaatgtacgcatcattggagcgagttgccatcatatctagcagcatagggcagagaaccagtagaggaaaacgcgactcttggaccagataggagagatggcgaacatgtctcttggcctggctggcatatctgcctactttagtgataccttcattcatgtcactgacctgtctgagaggacaacgctttctctcatcactgatggtatgaatgttaatgatgacagatatgaatgatctacttatgc

SEQ ID NO: 38764 - DNA, 320 bp, Glycine max
gctacgcctgcgatatcctatacgagttcaacacatgtacaacttcactcgggctagggaaactctcaagggccattctgcctcttaaccactccaccttctgacttctaagaggcaacttaacttcactgctaaggccatgcaatcagaaaagccaacctatcaagtgattcaaccaaataacggtgataccttcattggaagcctctgaaccccagatacatacaggcccttgattgcatggcacttatcgaacctcaccgcatacatgaccgccctgaactcactactacaaagcatcgacgagggccttgcccatg

SEQ ID NO: 38765 - DNA, 369 bp, Glycine max
cgcaatcatgtgcgcgagcgggatggctacaatgccgggtttcggggaccagtactagaacgagaagctgataacggaggtgcacggattcaacgtggaggtgttggcggtggactggagcatttcgccgcacgaggtgaagaagaaggtggcgagtggagagaggatagagagttccatgaagaggctgatggatgatggagagaaagggaagagaatgagaagcatggtcaaagagatgcacgagaacgcttggtaagctgttcaagaaggtggttcttcttacgacagtctcacagctatgattcatcatttcaagactctcgtgcctaatcatgtgaatgtgaatgggaatattgatcactgaat

SEQ ID NO: 38766 - DNA, 416 bp, Glycine max
gacgaaaatgaaggtgcttgttttgttccatgatacattcttggtagcatgggaatgggatgcgtgcgatatattccatctccgaatgaacactggctatgagtgccgtactacggaggtgaaatgcgcaaggtgaaggctagctgtggaagcacacaacatctttggctctgagaccattcctgatcagtgcgttgaagcaacatatgaatacatacatgactaacaatatacatcagacttcaaaacagctgaccaactagcttactttcatgccagagacctagaagttcattccaaggacacatttgtgtgtagtatacatggtcccgtactctataatattccatactacagaaaacatggatatggcctgtagaaacttaactcgaccttgtatgatgaatgggttaaca

SEQ ID NO: 38767 - DNA, 357 bp, Glycine max
ctcacgcgtccgaccgtctgaaacaaaaggataggatgaagcattctaaggatcccttcgaagcagggttcgaggaatagccgcctgaatccccaacggctacagttacagagacagaggatgaggacaacatggacgtggagcttgccaagctcactttcaccggcgaacctcacaaaatggccaagatgcaggccattttgtcgcaattcaccgaatagcagatgattcgatacgagtgcttctcggaggctggctctcagaaagccgacatgaaaaggttattgtctagcatgactgtgacccacagcatttctgtgcccatgacgactgttgtatcgggcattgcaaaaatgt

SEQ ID NO: 38768 - DNA, 353 bp, Glycine max
tgtccattttattccgaaagatactagaaagttttacataatatatataatatagtacgaaagatgatacactgtttatgtacaagcacactcacaagagcagcaaatcacataattttgcttcatgctggtccacgacatggcagttgatccattgagtgtaggaaacttgggacttcagatggctcgtactatggaaaaatttgaggcactagaaggttttgtaaaccaggcagatcaccttaggcaacatactctgctgcacatgtcacgcatcctgtcaattcaccaagctggtcgcggcttgctggctctcgaagaatactttcatcgtcttcgtaccctttgctctc

SEQ ID NO: 38769 - DNA, 373 bp, Glycine max
ctctgagaccattcctgaagagtgcgttgtagcaacataggaatacatccatggcgaacaatatagatcagactccaaaacagttaaccaacaagcttacttttatgccagagacctcgaagtccatcccaaggacacatttgtgttcagtatagatggcaccgtactctctaatattccatactacaaaaaacatggatatggggtggagaaatttaactcgaccttgtatgatgaatgggttaacaagggcaatgcaccggcactgtccgagactcttaagaattacaacaagctggcgtctcttggcttcaagattatattcttgtcaggaagaacactggacaaacaggccgtaacagaaggaaactta

SEQ ID NO: 38770 - DNA, 391 bp, Glycine max
ctcaaagtctccacattatattatagagcaataataataataataatatgggtaacagcggaaggtgttgtttggcttgcattcttccgtgtggagccctagacttgatccgcatagtgcacttgaacgggtacgtggaagaaatcacgcgtccaatcacggctggggaggttctgaaggcaaatccaaaccatgtcttgagcaaacctagctcccaaggcgtggttcgccggattctgatcctcgcaccggagaccgagctcaagagaggaggcatatacttcttgatcccggcggcatcgttaccggcggagaaaaagaaaagacacatgaaacatgtgaaacacgtgagtggtaaccacggtgggtagtgatagtagtaataagaatg

SEQ ID NO: 38771 - DNA, 301 bp, Glycine max
ctctctctcaattccttatgactaatatttacaactttatgataactaacggtctcaagacagttgggtaataaaataacgtgtcttcgaaaagacaacattattttggccataatgcccttatatccgtttctattattgacacccaaggtgtaatctgaggaatggattttattcacacacgagctggcctcaagtttcgattaggtggatcaactgtcggacgattcttcaacgtacttcgagaacccatggatcacctacgtcctgaagatactgtcacagcatatcccattcgtaa

SEQ ID NO: 38772 - DNA, 316 bp, Glycine max
attgtaaatccaggcatttaggacattcatttcacgttacatgatttatgttcattgagaacgcacgatacgtgatgatgaatatgtcacataggggtctgaaaacatgagccagcgctctattgagggatcaagacacaccgagattgcaatgggtgcctaccaacctcatcatacgtggccatgaacgcagtattatcctcgtggtcagagtgcttcgtacaaccacatagccttgaatgcctgtgttgcgttacaagcgtaacgtgaagtattacatcgagtagaagcggaaagtgtgtacaccatataagtg

SEQ ID NO: 38773 - DNA, 398 bp, Glycine max
tgctcgtactcggttccggacattcccgtggtcgactccacgtcgtctcgatgcgccactcgtcactttctgcagtccgttgtctattccactcatctcactaggcactcagaggcagagcgcaggtcaaagtgcagtgcgcgcagttgaaagtctcagcatcctcaagccacaagcgttgggcatcaatggcttcgctgaaagacgttggagtcgatgttgtggccactgccgcgagtgcagcgctggctagcaacgccatggccattgaagtgttgctgggtggtgatgacgggtctctggctttcgatcccaacaatttctccgtagcctctgtggagaagatcgagttcaagaacaacgcaagtttcccccacaacgttgtgttcgacgaggac

SEQ ID NO: 38774 - DNA, 295 bp, Glycine max
ctcactcccaaattcttacgcctaatatttactacactctgataactaacggtcttaagggagttgggtaataaattaatgcgacttctcaaacacaacatttattttgctatcatctacttagagccgttcctattattgcgacagaagatctaatgagaggaatagaacttattcacacacgatctgacctaaatgtttcattaggaggagcaactctaggacgaatcttcaacgtacttcgagagaccattgataatctacttccagtagattctctcacaacatatcccat

SEQ ID NO: 38775 - DNA, 330 bp, Glycine max
ctcacgcgttcgcccacgcgtccgcccactcgtccgtgataactagaatcagggtgatggagatcatagtacttggtatcttcgatgctacaattctggtagcatggcaatgccatgcatacgatatgttccctgtacgaatgaacactggctatggtgcccatactccagaggtgaaatgcgcaagttggaggcttgatgcggaatcacacaacatctgaggctttgataccattccttaaaagtgcgttaaatctacaaatgaatacatccatggcgaacaatatacatcatactccagagcaggttaccaacacccttacttttatg

SEQ ID NO: 38776 - DNA, 265 bp, Glycine max
gtcaagcattcgcatacttgtgctgatcgttatctgtctctacacctcttcctcggattgggagatcggaaaaacttgcggggcatacaacaaatgcgacactggacttaactgtcaaacatgtactgccaatgggaatacccgaaccagacgctcgcggatacaatcatggagcccaaggtgtaaggtgaaaggcttaccgagaaaccgctattcatggatgacgacttacaactcatatgctctgggcgaagccagatgctgc

SEQ ID NO: 38777 - DNA, 456 bp, Glycine max
ctcacgcgtactcccaccctttcgtttggatgaacgggacactctaaatcactacgctaggtgcccacatacattgtatagccaatcccacgagtgccgcgacttcacattggatgacctattcctaattcaaggtatacatggaaacatcaccgacttgcacttgacgtatctgcgtcgctatgatacatacgtggcgacaacatgagcactcggacagatcattccttactgggacactgaaaatgtcactctcgaagtgatgtcaaaattcatgataaaatacgaacccagcgcactgagggttaaggttcttgtcagcattggaaacaactactaacaattgcctttcatcattggctcgcactcgaacagcgaagcatgggtctgcgaggtcactgctgacctgaatagcatcatgaagacctacaacctctatggcatcgatgtcagcta

SEQ ID NO: 38778 - DNA, 422 bp, Glycine max
atggctgacgcgggcttactacaaggtaatggctcccttaatgatctcctccccagctgctaccaccgggaaccgggcccttgcctacgtgggtgctccattcaccgacctcaaatacatggctggcttacgcacgaggaataccaacactgacattacctccattgctagcaacggtggaagagtacaatgcatgcaagcgtggccaccaattggcaagaagaagttcgagactctttcctacttgccagacctggatgatgcccaattgaccaaggaagtcgcataccttctaaggaacggatggataccttgcttggcattcgagttgtagcacgggttccttgtaccgtgagcacatcacgtcacctggatactatgatagacgctactggacatgtcgaagctgtctatgtttggct

SEQ ID NO: 38779 - DNA, 313 bp, Glycine max
atgcactgcacttggcgaacgttgtcaaatccaatgatacggatgaagccattggggtatgcatcagcttcatcggctacaagcccccatgcttctaagtcattgaaaaatttgcaaagcatctgtaaccaccccactttgtttgctgtacttaaactacattcccatttgcttttgctttatgagatttcatcatcctgtatttttggttcctgttttcggacttcaatggaaattaatggatgagaactaatgaataagctattgtgttgcgttgctttgatttcaaataacttcaagaacccattgccct

SEQ ID NO: 38780 - DNA, 366 bp, Glycine max
gaaatacgtacgtacttcctatgacatatacatattgcgacccttttggctggtagcagggaaagcacacctgcatacgtgaagtcaagccattatgctgcacccttcaatacgagtgttattgcttctgggtttctatttggaataggctatgcagcttacctgatataatgagcatcagatattaatcgcagaggaccaagtatatgggacacctatactaaacaggcaccatagatgatttacgatcataatgatggaagtatatgagtcgaatcttatgaccagtacaagatcgacataaacatggtgaaagaagttgagttggattcatacagattgtccatgtgatggtacacaatattg

SEQ ID NO: 38781 - DNA, 390 bp, Glycine max
gaaatacgtgcgaactaactatgagaggtatatggcttgatcattgatctcgttaccaggggacaccactgtgaatcctgccggtgcagacatgatagttccatttacagacctcaagttcatggctggcttactcaccagggagaccaataatgacattacctgcattgctagcaaaggtgatatgagtgcaatgcatgccaagtgtgaccacacatcatatactaaacaagcacgatactacttacctacctgcacaaaccttggtgatgcacgattggcatatgatgatcgagtaccttatcaagatcggaatgatgcctgacttggaattcgattcgtaccactgtttcatgtaccgtgagcacatcatgtcaccagcatactacg

SEQ ID NO: 38782 - DNA, 255 bp, Glycine max
cccacgcgtccgatgatagtgtttgcatgatagtagcacagatgcttcctttgggacaggaggtacaaaaaatacaggggactatggtggttatacataataatgtgttagatatcaacagcatcaccagcgttaaactgatcgttgaccaacgcttacgcttcatacgactatcagtcgatgcacttactttcgcagccaccaaaatcttcattcagctgattagtgctaccaaggctgatcttggtaaatgaa

SEQ ID NO: 38783 - DNA, 431 bp, Glycine max
cccacgcgtccgacaaggcagaaagcaagctcatcctagagttttaaaaatggcagcagccgcctcgatggctctctcttccccatccttggctggcaaggccgtgaagctgggcccatcagcccccgaagtcgggagggtcagcatgaggaagaccgtcaccaagcaggcctcctccggaagcccatggtacggcccagaccgcgtcaagtacttggggcccattctctggcgagcccccgtcctacctcactggcgagttcccaggtgactacggctgggacactgctgggctttcggccgacccagaaaccttcgccagaaaccgtgagctcgaagtgatccactccaggtgggccatgctcggggccttgggctgcgtcttccccgaactattgtcccgcaacggggtcaagtttggagaagctgtg

SEQ ID NO: 38784 - DNA, 258 bp, Glycine max
gtattggagcctttgtttttcatttttgagatttcatcatcctgtatttttggtttctgctttcggacttcaatggaaattaatggatgagaactaatgaataagctattgtgttgtgttgctttgtttcaaaaaaaaagaataaaataaaaaaataaataatgctactaaaattgcaagattaaaccttagaaaactataacctccatgtatatgaagcaaagtcattaaaatggggcggcctttttaaaggttcca

SEQ ID NO: 38785 - DNA, 326 bp, Glycine max
cccacgcgtccgaccacgcgtccgtcaggaaagaccttgtgctttggcctgatgacctgggaactttctatgaggacactcaactagacaaacatcggcaagctctggacagagttccagaggttcaaccatacttacctgcttcccttaacatccgaacggtttcctttcctacagccataagggtcgcaatctgaccgaaaatggccgaatggaacacattgaggagatcatcaaggaccatttttgcaccatatttcagagcaagtgttggagatctggttagaacattgcgcttgtgccaagccacaatttagagacgcaga

SEQ ID NO: 38786 - DNA, 297 bp, Glycine max
cccacgcgtccgcacacacaccttgttttcctttctatacagacacacagagagagcgggaaacaccctttaaagcctaccactaccactaaaggttacattgattactattctatgtacggacatgttgagaagctagctgaagagattaaaaaaggagctgcttctgatgaaggagtcgaatcaaatatatgacacgtacctgaaacactgcctcaagaggttcttgtgaaaatgggagcacctcccatgagtgatgtaccaattattacacccaatgagctacctgaggctgat

SEQ ID NO: 38787 - DNA, 293 bp, Glycine max
gccgagcgtccctagaaagaatccctacccaaaatgccggatgctcacggtttgacatggcgaaccagagattacttctctcagaccttcatgaaaaagggtaccatcgagcatcacacatacctaaaaacctaccacggcagaaattctggcaacttcaaaggtagcggccccattcaacatggaatgcctcacaaggtctaccattgcccgaacctgtcgcgtatggaatgtgaccaaacgtgctgcctgggtcggattcatcacgcaggtctgccacagaattataaggg

SEQ ID NO: 38788 - DNA, 233 bp, Glycine max
cccacgcgtcctgcaagagagagggagattctatgcttgctaccttctctctgaaaaatgggtacgttcaagtttcaccagtaccatttcgtttgcagggctcttcccactgaagcagatcatcaccccaagatctacctaatgaagctctgggccaccaaccaggttctcgccaagtccaagttctggtattttctgaggaaacttaaaaaggtgaagaatagccatgtcca

SEQ ID NO: 38789 - DNA, 332 bp, Glycine max
ttcgacgcacgacccacgcgtacgattgagcttgctgtagtgaggtgttcgaatctgaaattaacttaaccaaattcatggcgggacatatacgtcctcgcttgttcacttactctaattgcaggaaccatgtatcactccatgatgatataatttacaaggcttctaatggaagatacggccaaacctttatgctttgccatgcaatgaatattgtcacagggccaaaataagacagacatctgttgactggcctgcacactaatactgatgatcattgcggggattgccgtgaacagttgcgaagtgagtctgaaagatcttacgaagca

SEQ ID NO: 38790 - DNA, 396 bp, Glycine max
cccacgcgtccggttgagaactaagaaggagaagcaaatggcttcctcaatgatctctgcgccagctgttaccactgtcaaccgtgccggtgccggcatggttgctacattcactggcctcaagtccatggctggcttacccaccaggaagaccaacaatgacattacctccattgctagcaacggtggaagagtgcaatgcatgcaagtgtggccaccacttgacaagaagaagcttgagactctttcctacctgccagaccttgatgatgcacaattggcaaaggaagtataataccttcttacgaagggattgattcctagcttggaattcgacttggagcacggcatcgtgtaccgtgagcacaacaggtcaccatgatactacgatggacg

SEQ ID NO: 38791 - DNA, 325 bp, Glycine max
gggctgctaccctccggctcgtgtcggatgcgtgccaagaatggggttttttacacgtggcgaaccatgtagtgagccatgagttgatgaaaacgccaaggctggtgtggagggacttctttcaccagccactggatgtgaactaagtgtatgctaatacaccgctgacttatgaagggtatggaagcacgttgagagtgaaaaactggaccattttcatattggagtgaatacttctttctgcattacatgcctaggtccgtaagggaccaatccacatggactgcccttccaacatgctttaggagcatcagctatgaatatg

SEQ ID NO: 38792 - DNA, 441 bp, Glycine max
gctgcatttggtactactggacgtattgtcatttcaatagtattgtacgtggaattatatgcttgttgcattgaatatataattttggagggtgacaatttgtcttctttatttccaagtgcacacttgaatttgggtggaattgaactgaattcacgtactttgtttgctgtgattactaccttggctgatcttactactgtttggctccgggacctaagcattctcagttacatatccggtaagagcttatttttggtgcacgtagtgatcagttatacattaaagcttggtcccatttgcctttggacttaaggacatattgctgaaataaggttttattatacttcatgggatatccttttctgtattgggataagctttgatggtgttgttaaaggaaactataataacgtatcatgttaccaactatatataaca

SEQ ID NO: 38793 - DNA, 370 bp, Glycine max
  unsure (1)..(370): unsure at all n locations
atctttctctcttctctctccacccaaaccctaactaccgaccctgttcccctctcgtgtccgtcatgaaaggaggaacgtccaagaccgaatctaagagagccgatcccaaacttgctgtgaataagaagggagccgccaccaaggctaggaaacccgccggcaaggggaaggcagcgaaagaccctaacaagccaaagaggcctccaagtgctttcttcgttttcatggaggagttcangaatgtattcaacaaagaacatcctgaaaacanagcagtgtctgctgtgggcaaagctgctggagcacaatggaagaccatgtctgatgctgaaaaaacaccttatgtggcacagtctgagaaaaggaa

SEQ ID NO: 38794 - DNA, 396 bp, Glycine max
cccacgcgtccgtttcaactttcaagtctaaaggacaaagattttcaagtgtcgaactggtgagagaacaaaatctcttgatgccatttctgaaatagatcatttatctatatttacaaacggtgaagctggtcattcctctgaagttgctggatttagagtacgggaactctcacttcctaatggagaatcatattctgggtcccttcttggtaacattccagagggtcaaggtaagtatgtatggccagatggttgtgtatacgatggtgagtggagacgagggatgagaaatggatatgggaaaatacaatggccttgtggagtaatgtatgatggtgagttctcacgtggctatatacatggtacaggaacatatatcggccctgataatct

SEQ ID NO: 38795 - DNA, 303 bp, Glycine max
gagaatggttccaaaggggttaacctttttggctgtcttaatatgctcttcgggactgtcactgaatcctgctgatgcggggcaagcgcaacataatggcctcgatatgaacttgtacaaggaatcatgccttcaggctgaagacatcatcacagaacacgtgcagcttgtctacaagcgccacaagaacactggtttctactggctgacgaacatcatgcatgactgggctgtacagagtggtgatgctttactgttgctggactccacaagaaggaacttgtctgataaggaaacagatac

SEQ ID NO: 38796 - DNA, 284 bp, Glycine max
gccacacgtgctctacaatgactaggtttatccatataacggtgaatagtatgcacgcggggtatttggatgtaatgacttaccttaccctcgcagaagaagaaccggaatatgaaaaactatataacatcccaacagtgagaagcccagtgattgtgtttaccttacgagagatgtaacattaagacacttgaagtgatcagattttctagcttatggaataaaatctgtggaccaagatcactatcctgggttgactgatgcattggatggaaatctattga

SEQ ID NO: 38797 - DNA, 309 bp, Glycine max
ctaaaagatggctatatgtttgagtgtacaacaggcttctcagttctcccacatgtccggtacttgatgctttaaggaagaaactgtactttgagatagcagatggcttaaatggacgtgtttgggtcgatgcatcatctgcacacacaactattgttgtagctaatgcgattatgaactctgagacattgagtggtgctcagcagagaataatggttgaaaagctgctgcagacgatccagtgatccttgcatttttgattggccatgcatataagcccttgtgatttcaatttcatagcaaaaatac

SEQ ID NO: 38798 - DNA, 380 bp, Glycine max
  unsure (1)..(380): unsure at all n locations
gcaacagaaacaaatgtggtagtattaggtggcatgaccgaaatgacaggagcggccagcagcgttgagatcaacaatctcgctagctttgctgtanaggaacaaaacaaaagatagaattcagctctggactttgtgatggtgattagcgcacagcatcaaatggcttctggtgtgaattactacataacattggaagcaaaagatggtgggatgaaaaatgactattatgcgaaagggtgggacagggaataccaatagttgatagaattcatgcctacatttggcacatgaagcgagatcgaccatctcgctagctaagctgggagggccctatacataagatagaatgcagatattgagtttgtggggctgaatag

SEQ ID NO: 38799 - DNA, 323 bp, Glycine max
gatatgtcagcatttaaggcagcaaatccagatgctatctttgaagattttattcggtgggattcacctggggattgggaagaggatgatggccctgagggaagtaaatcatcatcatccagtgctcatgacattaagaagtcaaaagatagttggcctccacaagggcggctttctaagagaatgtctgaacatggaaatctatggagaaagctttggaataatgcacctgctcttcctgcttctgaacagaagcctcttcttgatccaaatagggaaggaggaaaagttcttcattatcttgaaactctaccaccacatga

SEQ ID NO: 38800 - DNA, 380 bp, Glycine max
caaacacagaggttgttcataggagttataatgtcataattcgaaaaaatgcgggtagggtcgataatgattgcagtcggactcaacactatacaagtggatgccgacatttacaagagcttgcacatcactcggcgtgttcaatacgcgtcaattctgggcgaatacctacatcgagtgttggataaaacctaaggatcagctgctcaatcaatgagatcattcttatgtggaagcattgaaatgctaatcaagctcggacctggtgattctgacggaactagtacagtctactatttatactgtgcatgaagccaacatgacgagatacatgttgagttcttaggcaacagttcaagacagtcatacactgttcacac

SEQ ID NO: 38801 - DNA, 326 bp, Glycine max
gcacaacggacgaaaatgtcacctttggtgattgatatttgctagaagcacaagacggcttacaggagtttgacatttgtttaacccaatctttggactataaagaccatcaggactgttgctctttaggccagaaatctaactgaccctgcttttcagaatttgttgtgggatgatattaacactcatggatgattttagggaaaagattgaggatcatgaatctagtttgtctctgttttttcccacactattgacaagctgttaatctacatgttagttgataatttgttacatgtgacattgcttaattgggcatggaagat

SEQ ID NO: 38802 - DNA, 356 bp, Glycine max
cccacgcgtacgcattcaccgccggactggccctctcctccattgtactctaggccggtctccgcggcggcgccgacatctcgacgctcaccccatgcaaggagtcgaagcagttaccgaatcgtgagaagcagtcaataaagaatctggagtcgccgctgaaactctacgaggcgggcagcgccctcgcactggccattaacgcaagcgttgagaacacaaataggaggttcgacaactacgcaaagcaagggttgctgtgcggcggctatgggttgccgcacctgatcgtgagcggagaccagaagcactgtggtgagttcaacacactccggatactatacctggacatctcg

SEQ ID NO: 38803 - DNA, 393 bp, Glycine max
  unsure (1)..(393): unsure at all n locations
attttgggcaggaaataacctcttctgcatacccttncacccagcgaaaagaggcgggaggctgtattgtacagtagaagttaccttgaaaatcagatggctgttgccctgggtggaagggttgccgaagaggttatttttggccaggaaaatgtcaccaccggagcatcaaacgacttcatgcaagtttcacgagtggcaaggcacatggttgagagatttggattcagcaaaaaaattggacaagttgccattggtggacctggtggaaatccattcttgggtcaacagatgtcatcgcaaaaggattactccatggcaactgcggatgtagtggatgcggaagtgagggaactggtagagagagcatattctaaggcaacacatattatc

SEQ ID NO: 38804 - DNA, 302 bp, Glycine max
gagacccttcctatataattgtaccacttactttttcaatgtactaggcactctcaggacggatgttttcaaaccggggcggcttacatatactattctctatcaactaactaccgccaattcatacaacaacgtaatacactcgactttaacatatatggtaagcacgaacataaccttgactgtggtagtagctacaagaacttcatcaccgcgcacttcgatcacacgaaacagggcgaaccaactccttacagttttatgcatgctctacatatctgcggctacagaaccaatgaaca

SEQ ID NO: 38805 - DNA, 403 bp, Glycine max
caaacaatgaagccattgttttagacatgatgatggaaatattgatggctggtgctgaagcattgtccaaaatgagcaaccttacgttgctcatattccgtgatgtgaagtttatgggaatacttaattcagttaattgtctctccaataaactacaatttcttgagtggtataactatcctttctcctatttgccatcaagttttcagccgaacctgctggttgaattgatcttgcaacatagcaacatcaaacaattatggaaaggcataaagcatctgccaaatttaagagctttggatctcacttactccaagaatcttattgaggctccagactttggaggggtccttaatcttgagtggataattcttgaaggatgcacaaatcttgcacggatcca

SEQ ID NO: 38806 - DNA, 322 bp, Glycine max
ccagcgtacgtgcacacgtctgattacagtcactggttattcagacgcacaggcggatgtaatagaaagcgatggtgtgtctacataagacggttatcaaaaacatcttgcttacttgaacagcaacggagatgctggagcagatatgatcgtcactcatttattctatgatacggatatattcctgaactatgcgaacgactgtccccaaattcgcaataaccagccctatcgtacctggtaacatgcccatttattactacaaaggctttatccgcatgactgctttttgcataacaaatataccagctgacattattgc

SEQ ID NO: 38807 - DNA, 297 bp, Glycine max
  unsure (1)..(297): unsure at all n locations
catatagaattgactattattatcgncatcttttttatcttacatctgcaatcaaagatggtgcaaatgtaaaaggatattttgtctggtcgttgttggacaattttgaatgggctaatggttatacagtacgctttggaatgaactttgtggactacaaaaatggcttaaagagataccagaaactatcagcaaaatggttcaagaattttctcaagaaatattagaatttaggtaacttatgattccatgaataatgtaatggaatgtatttgccatgtttaactntaaataact

SEQ ID NO: 38808 - DNA, 353 bp, Glycine max
cccacacatacagagagacttccttttcttgaccccaatcgaaatgtcttagggggggggagcagacttgacatggagagctaaactcgctttactgttgaaaaacacaacaaaaaacagaatgcccttttatagtttgaaaaggtagtacatgcaaaacagcaagagacttatggtaccttgtacaccatcactttataagcaaactatggcaggcaaaagaaagtttatgaatccaaagtttgcgaaaaggcatgtttaaacttgaaagacgtcctagagttcaagcttgttggaaaagcacctaaataatctaatgcttaattaagttgcacaaaaataaatagtgagac

SEQ ID NO: 38809 - DNA, 141 bp, Glycine max
tgaattcgttctcagaaccagactttgaagattgcgatacatgatatatagaaggatgcaatggatgacttatggactatgcctttgagttcattatcaacaatggccgcattgatatgcgagaggattacccttaccgtg

SEQ ID NO: 38810 - DNA, 302 bp, Glycine max
tcggttacacgtgctcaaaatcggacccaagcctcttggttcatagatatttacaaggtaccaggagctcaaggagcgatatggcatgaatatttcagctggtggtttgagcgataatgacactactttacatcttgcagtttatactttaccatttggtggaggtggtgaaagcgcaatcggtgcataccattggaaattcttatttgaagctttcagccactaaagaactagtctctatcgccaatttaatggtgatgctccagttaggtacctaccattcacaattgctgacgtttata

SEQ ID NO: 38811 - DNA, 334 bp, Glycine max
cccacgcgtccgaccacgcgttcgatgattttgaaacgtggtcttagtggttcctcaggggacaagttccgcacatggatgggtattacagtggctgatactgacaactgcgctgtcaccactgaagctaataacctctacttcattaaggtgaatgggatcaaaggccgcttgaaccaccttccgtctatctgcgatggcgacatggtgatggtcaccgcgaataaagcaaaacccgatctgaggaagaaagtcttagcaagtgtcatccttcgccaaagcaagccattgcgccgaaaggacagcgtctacatgtactgtcaagataatgctg

SEQ ID NO: 38812 - DNA, 365 bp, Glycine max
ggaaaacctagactaactttacctgcaatgtcgagttcgaattctgaagttgggacattggagagaattttacccaaccaccacccccgaccaaaggattaatctcggtcatatacaaaaacaaaaagaaaatgacttgtgcatcaattgtacgtgtgtcatattaatattttgtaagaattgcaggtggcactatagtggcagctgtgagcctcttaaaggaacgtggaggtggcaacaagcagattaaagtgatatctgctgtctctgcccctccagctctttaaaagctgatcgaacagttccctgggcttcatgtgtatactggaataattgaccccgaagttaatgaaaaaaggttcata

SEQ ID NO: 38813 - DNA, 211 bp, Glycine max
tcacgcgtacgcctttacacatccttcgacacgtctgagcttccttatcgtaccctcttacatgcgttggctctgctgattcccacgatgaccatatttttctaccgagtcaactccatgacgatgactcaatgagttgcactgataccgacccaaaccttaactacaagccggtgatcggaatcctgacccaccccggcgacggtgcctc

SEQ ID NO: 38814 - DNA, 306 bp, Glycine max
gccacgcgtacgaaattaggtcattctctttgcacagttgcatacctctcctttcaagatgcagagctttgtcaagaccctggccggacagaccatcacccttgatgtggaaagctctgacaccatcgacaacgtcaaggccaacatccaggacaaggaaggaattccaccggatcagcaacgtctcatcttcgccggaaagcacctcgaggactgccgtaccctcgacgactacatcatccagacggagtcaacccttcaccttgtacttcgtatccgtggtggcatgcagatcttcgtcaagac

SEQ ID NO: 38815 - DNA, 256 bp, Glycine max
ccacacttccgcccacacctccgcccactctttctctgacgcttatacttaaaatcacggggtctttcataggatggattggactatcattttttaatacaaatctaacgtgttaacttcttttctgtcaattattgtgccccaaaggcttgcccttatcctctttttctcaatcttcctgcaaaaatatctttcaagtcacacacatttctaaataacatttaacatgcaccaatagctccaatattttcttaat

SEQ ID NO: 38816 - DNA, 430 bp, Glycine max
  unsure (1)..(430): unsure at all n locations
ccggggcgcggacgcgtccgcccacccctccngaaacagtgtgagggaaatgaanggcctggttttcttcnttnctgcggtttcttaacagggggaggccatncntacnatatgttccctctccnaatgaacactggctatggtgcccgtactccggaggtgaaatgcgcaagttggaggctttctgtggaagcacacaacatctttggctttgagaccattcctgaagagtgcgttgaagcaacaaaggaatacatccatggcgaacaatatacatcagactccaaaacagttaaccaacaagcttacttttatgccagagacctcgaagtccatcccaaggacacatttgtgttcagtatagatggcaccgtactctctaatattccatactacaaaaaacattgatatggggtgggagaaatttaac

SEQ ID NO: 38817 - DNA, 356 bp, Glycine max
  unsure (1)..(356): unsure at all n locations
tcacatcagcgtttttttctaaaccaanaattcctcataaaggggaccatcaacaaggagttctgaaaacacacatcaccaatctcattgaatatatgctcttgcacaccataacctaccaaatatctcgtactgactactacacattttttacatagaaccaatgcactctgcctgataacatacatccctttaccacaattttctttccaacacctattcttatttatgtgagcacgatatacttgacaactactttcctaagcttcacaatatccatgccaatcatgattgccacaacatcctttcagaaaatcactcatccttaggcaaaatattcaacaacactagcttca

SEQ ID NO: 38818 - DNA, 308 bp, Glycine max
  unsure (1)..(308): unsure at all n locations
ccncccactcttccggattttctcnctttaacaacagaaagaaatccagggttttcttttcggtgggcgaaccaatcaaacatctcacaantccaccttcngcaatgctcctcttaatcatctcgccacaaaagccgctagaaagtcctctctttttaccttccgagtaaaaaagcctcacccttttacgcccggcaccgtttcccttaatgacatcctaaattaccataatagcacggaacttctcatccggaagctccctttccatcggctctttctctacatcgcacattatttcaaaacctatt

SEQ ID NO: 38819 - DNA, 343 bp, Glycine max
  unsure (1)..(343): unsure at all n locations
gctgactctttattctttgaactttggtggttctcacacatgtttacctacctcccttggcgtntaaccatttggggcttgcttcttcttcttcatnccacttatatcattnntccaacaattgtttcaaaatcaataacttctaattctcagagccaccgttttatatttccatgtttgagtgacaccaactgtggctctctttgccgaaccaaacgtttcacttgaggacactttcttatcttacataccagatgcttcttcaccaaacatttttaattttaaaaaattaattaacagtgcttttatagaaaattatagatctatcatctttctactcctg

SEQ ID NO: 38820 - DNA, 390 bp, Glycine max
  unsure (1)..(390): unsure at all n locations
taactanaaacattntcaggaatatgaatgtccttgttttcttcattcctacggggtttttaacagggggatgccgtgcttaccatatcttccctctccnaatgaacactggctatcgtgcccgtactctctacgtgaaatgcgcaacttggaggctttttttgtaagcacacaacatctataactttgagaccattcctgaaaagtgcgtttaatcaacaaatgaatacatccatgtctaacaatatacatcatactccaaaacatttaaccaacaagcttacttttattccaaaaacctctaaaatccatcccaaaaacacatttttctttaatataaatggcaccctactttctaatatttccatactacaaaaaacatttattttt

SEQ ID NO: 38821 - DNA, 307 bp, Glycine max
  unsure (1)..(307): unsure at all n locations
gcgtccgcccacgcgtccgctttgttcactcgtcttctcttgcggctaggcttttagcgcagctgcgtctatatttaggggggaggggtaatgaaaacgttcacatcantattgtggtcattggccatgtcgactctgggaaatccactaccactggtcacctgatttacaatcttggaggcattgacaagcgtgttattgagaggtttgagaacgaagctgctgatatgaacaagaggtctttcacgtatgcctgggtgctggacaaacttaaagctgagcgtgaaagaagaatcaccattcatat

SEQ ID NO: 38822 - DNA, 284 bp, Glycine max
ccaaacattctaacaaattttcaattttaaaacagcatttcttctctagcaacctttacttctcttcggccatctactatcaatggcctttctctaaattccctctcttaaactaaactctctttcaagccctctcgccacactttcaaatccaataacttcattagtaactccttcttaacaaattattgtcacaacactgtgtacttttatttttatcatcttggcaacactacatatccttcttacttatatacctcatatgcaccttcaccctacaaccc

SEQ ID NO: 38823 - DNA, 290 bp, Glycine max
gttacatgaaaaatccttaggctagtaactgggatggcatgacaagtatcaaaattacaaataaattggactcattccacttccacgatctcatccaaagcatagttgtttgttgatacattggcatagttgactttgttgaatcggaccacaacagggtagcgagtgttggggtcctgatcaacagcaaccactgaaccagtgcgcaatgaacaccttgatagcctgccaatgatctaaagcataacacccttccatttacctagacttgtacaatggtattcccacat

SEQ ID NO: 38824 - DNA, 419 bp, Glycine max
gacctttgggctgattgatgtgcttggcctgcgttttggttagaatgatcctatccacctgaatagagagcgagcagcctccgtttgcgttaatttctgagacgagcgttagtatcggcacaaggatacgaagcccagtaacatcgcgaaggacgaagagggccctttcagccccgtttcggccaataaggtcatcggctaggtcactaagtaccttaccggaaagagttacttagcctgatccgccttacataacttagaccccgccgacgagctaacttcgcggctggagagtaaggatataggcgagggtcccaggcgtactaggacggcgaataatacatgtccgggtcccgacgtatcgtacggagacaaggattacggcggtgcgtgcgacggaatcatcgctgcatctcggg

SEQ ID NO: 38825 - DNA, 419 bp, Glycine max
gcgcttggaatgcaaaaaaccgatactggtagcaatttgtccagaaacaaactccgtccatatctcaaaatgtaaatcaagattctttgaatgatcagctcaaggctgaggccaaggccaagggtgagaagatcagcaccaagagacagcctcagggtcccaaacctggtttcatggtcgagggggcaacgttggagacagttacccctattccctatgatgtcgtcaatgacctcaagggaggttattagtttcattctcgttgttggtctgcgtagttttttgtttggggattattaagccttttttgtgttggaagagaaacaattcagactattaaaatatttttggtggtttatttgatggtctaaatacaatgatatgtttttggttcgctcggcataaatgggccttttctt

SEQ ID NO: 38826 - DNA, 404 bp, Glycine max
atgcaagttctataatcactgttggatttattatgagtgttgataagaaagaccccagcggggccaatgtcacaaaggctgccgccaacaataagtgattgcattttgtcaacactgctctcacatcccatcctcaccatgtgaaatgcgcaagttggaggcttgctgtggaagcacacaacatctttggctttgagaccattcctgaagagtgcgttgaagcaacaaaggaatacatccatggcgaacaatatacatcagactccaaaacagttaaccaacaagcttacttttatgccagagacctctaagtccatcccaaggacacatttgtgttcagtatagatggcaccgtactctctaatattccatactacaaaaaacatggatattgggttgaaaaa

SEQ ID NO: 38827 - DNA, 378 bp, Glycine max
ctggccataccatcttacttttactttgttttcacaacatagccatggccatctccgtcagcgcttctccttttgatgtccatcatcttcgatttggacgacaccttgtacccgtcaagcaccggtattgacaagtgcgtcaagaaaaacatccaactctttctcatccagaaatgcggattctcagaatccgaagccttcaccctccgagttgatctcttcaaaacctacggaagcacccttgccggtttaagagcactatgccatgatatcaccgcagaggagtaccatggtttcgtgcacggaaggctaccttacgacttcatcaaccctgatcatcacttacggaaccttttctgcaccatcaaacagagaaaa

SEQ ID NO: 38828 - DNA, 257 bp, Glycine max
actctccttgttacaatggtgaggtttagtttgtctaatgatgctcttaatatcatgatcagctcctataaactgtggaagcgccaattcatgattaggccttcctagaatgtcataataaaattcctcttggttatgcaaaatcatgggtacattgatgaattcgagtattttgatgaccacagggctggtaaaatcttggatgaattgaatgtcattcttaataattgatgttatataatccctttctttaatgt

SEQ ID NO: 38829 - DNA, 413 bp, Glycine max
acgaaggaatataatctgaaacaaataagtttcccaacatagcttcacactcattgaacaagggatggtactggatgcacgtgttgaacgcaatttcaaggagatggataagttctaccaagaagccattgatgaacacatgaattctaagaaaaaaactccagaggaagaggatttagttgatgtcttacttcaactgaaagagaacaacacgttttccatagatctcaccaatgataacatcaaagcagtgctcttgaacttacttgtatgagctacaggtacaactgaagtcacaacaatctgggccatgactgaactaataaaaaatccaagcattatgaagaaagtgcaagaagaaattataggcttaagtggtaagaaagatttcttggatgaagatgatattcaaa

SEQ ID NO: 38830 - DNA, 357 bp, Glycine max
tttagtttttacacgtatcatattagttcatgcttggattaaagtttacagacgggaggttgcaaaagcaagccaggcctggccttttcataacatattttccaggctaaactctattgttcaaacgttctttttaaggctgaattgttagacccagctttgaatgggactctcaatgttcttaaatcgtgtgtaaactttccgactcttgaacgcgtttttttaacctcttctgttgcttcagttgcgtacaacggaaagcctctaactcccgatgtattatttgatgagacttggttttctgacccttgtttctgtatggaatcacatattttgtatacacttttcaaaaacttt

SEQ ID NO: 38831 - DNA, 423 bp, Glycine max
accaacgggacggacgcgtcctcccactcgtcctaaagggtagaggctcgaatttgaccggcgcgaatgcgaagacgaggggcgcgagcttcgcaatcgattgcgggacgcccctggaggatcagattatggacattgcttctctgtataagttccttcatgagaggattaacgtccgcggcaaggccggtgcactcggcgattccattaccgtcaccagtgacaagagcaagatcaccgtcaccttcgacagcaacttctctaaactgtatctgaaatatttgaccaataagtacttgaaaaagcacaatgtgagggattggcttaccgtgattgcatccaacaaggagcggaatgtctatgagttgagatacttcaacattgctgataacaatggtgaagaggaagactgaacatctaatt

SEQ ID NO: 38832 - DNA, 315 bp, Glycine max
acaaactatctggctgcctttaattaaaaggctggatggacactttaaatattgttaaagtaaccatgactaccacacattcctacactggaaaccatatgcttttggattctttacacctttacttgataagatccatttcttctgcactgaacattgttccaaccatcactgtatcttccaatgctgtttctctagtcgttccacatcttaaggtcaagcttaatttaatatctctccttgtgcctacacccaatgtttcattttattacctttttttgaatcttgataataaagatcttactgcttaagatt

SEQ ID NO: 38833 - DNA, 321 bp, Glycine max
tcacgcacaccaaacagcatgaagcttcttgatagagatttgacacctccatatgtaggtgatttccttatggaggtgggtgcctttagagatgcctgacatggccttgttttgcttgctccaaatggaaatggaactcgccttgctcaggcacacagaatccgcttttgattttcacaaaggtccatcaaaatttaccttcataaggatggatgggaaaccttttaaccaacccttcccatttgacaatattccacttttggtggaaatttttttccatggccagtttaacatgctcgccactcatgattccaagtccaa

SEQ ID NO: 38834 - DNA, 432 bp, Glycine max
ttcttcttcactctacaaccactaaactaagtggttggttttggtttagtttcattttggggaagctcttaaacttaaggcttaagccatggcatcctcatcctctctgcatctatctcaggcccttctggcacgtgctgtgtaccttcatggctcttcttcttctgaccgtgtctcactctccttcccatcattctctggcctcaagtcacattctacatgctccaatatgctctccttcaccttgctggctatgacactgttcaggaacaagaccttaaggaattccgacaatggggaagcagaactcctggacatcctgagaactttgagacccttggagttgaagtgaccacacgtcctcttggtcagggcattgccaatgctgttggattagcactagctgagaagcacttggctgcacgatttaac

SEQ ID NO: 38835 - DNA, 204 bp, Glycine max
tttcaagctcatcctagattttttaaaatggcatcagcctcctgggtgggtctctcttccacagtctaggggggcaaggccgttaagctggtcccatcatcccccttagacaggagggtcaacattaggattaccgttacctaacaagccttcttcttaagctccatactctgcccataccgcgacaataacttgctcccattc

SEQ ID NO: 38836 - DNA, 433 bp, Glycine max
gagctacattagctgctggaaggctggtggcagagaatgaaattcttaagtggacactaccggccaacggatgacactctagacagtttcttatcatatctcaaggaaaatggcgtcaagcttgatgaagttgagttgcacaaggcaaatgaggactctgatatatatgaggagagcaatgttattgaaaaacagcaacctctgaagtgtcaagcattggtaaaatgtggtcttcagagtccgagagctgtggtgcctaagactgcaatattgcaaagaatcaattccaagaaggcttcgaagtcctatcagttaggacaccaactttcgcttaaatggtcaacaggagctggacctagaattgggtgtgtggcagattaccctatagaactttagacacaagcctaccccttcttcatacatgcgaatgggc

SEQ ID NO: 38837 - DNA, 437 bp, Glycine max
catggcttctgtttgtggaggttgcttagcattgcaagatgctggggttcctattaagggttctattgctggaattgcaatgggtatggtactggacaccaaggaatttggtggagatggaactccgcttattctgtctgacataactggatctgaagatgcatctggagatatggatttcaaggttgctggaaatgaagatggcataactgcatttcaaatggacattaaggtgggtggaattactttgcccatcatgagaaaggcacttctacaagcaagagatggcaggaagcatatacttggagcaatgatgaattcctcacctcctccagcaaaaagactttcgaagtatgctcctctgattcatgttatgaaggtacgaccagatagaataaatcttataattggttctggtggaaaaaagtgaagagcat

SEQ ID NO: 38838 - DNA, 398 bp, Glycine max
ctagcttgctaaattcccttataattattccttcttgtgttgagttgattcaaacataaacacggcaccctgggttcattaattgatttcattttgcagtaataacaagaacaaaaaataagcatgagttgcaacgggtgccgcgttcttcgaaagggatgcagcgagtcctgtattttgcgaccttgtttgcagtggatcgaaaccgccgaagcccaaggccacgccactgtcttcgtcgccaaattctttggccgcgccggcctcatgtccttcatttccaacgttccagaaaatcaaagacctgctctgtttcagtcgctgctcttcgaagcgtgtggcagaacggtgaaccctgtgaacggtgccgtggggcttctctggactgggaactggca

SEQ ID NO: 38839 - DNA, 377 bp, Glycine max
  unsure (1)..(377): unsure at all n locations
ntccgccacgcgtncggcaagaagaagtttgagactctttcctacctgccagatcctgatgatgcacggttggcaaaggaagtagaataccttcttaggaagggctggattgcttgcttgcatattgatgtgcagcacgcgtttgaatacacatgagcgcaacaagtcaccaggatactacgatggacgctactggaccatgtggaagctgcctatgtttggttgcactgatgcttctcacgtgtcgaaagaacttcaagatgataatactgaatgacacaacccattgatacggctgatccgactagagcaagttcgccaagtgcagtgcatcatctttatcgcctacaagcccgcatgcttctaagtgtgaaaaa

SEQ ID NO: 38840 - DNA, 287 bp, Glycine max
aatttactttgcaattatgctactcttcaaaagtggtcaaacatctgcgcgtcttttcggtgctgctatcatcttaaacaaggaccttggttgggatgaacactgaatcttatgggtaggggccgttcattgtagaagatctaagcttactttcacatgcatgcgacaatcatggtcttttattgtgagacctaaatataaaataatgcccgtcatgctaaatcaagttgactgcaacaaccccggcgtaactcaagttaatggccgtggggtacattctcatttca

SEQ ID NO: 38841 - DNA, 381 bp, Glycine max
aataggcgtttgaaaagacacttgtgctgtctccttgctctccatcgtaagatgtaagaaggatgaagacatgtctcgtggttattcaattacagagattactaaccatcaataaaataaatgtgaatctcacattaaacatcaccgaagtgataacgctgattccggtcactaagaccaaaccgtgggggcgattcgcggcggagattcgagatccgtggaagaagcagcgcgtttggctggggaccttcgattccgccgaggatgccgcgcgggcctacgacaaggcatcaaggaggctcaccctacccaaggccaaaaccaatttcccccccttccccggcccggcagaggcggaccaccactcgcagattccgttct

SEQ ID NO: 38842 - DNA, 156 bp, Glycine max
gagaagcaaggacctaggttctttcgttgctccaagtttggtagcatggcaaggccgtgcgcaccatatatttcctgttcggatgaacactgtctatcgtgcacgtactcccgacgaggaatgcgcacgacggaagcttgctgtggaagaacacaa

SEQ ID NO: 38843 - DNA, 284 bp, Glycine max
acagcatctctatccggaaccatggtgagcaccgttttcatgaggaggcaaactatgggcaccgctagcataaagacattggacaacgttggtgaagctctctttggtctgaaaagtggaccaggtgatcgtgtcacttgcatggcctcgtacaagagaagctcataaccccacaatgagaagtggagtttgaatgcccagatgatgtttttatcgttgacaaggcgggagacgcacgcattgaactttcctactcgtgcagggccggttcttgcgttttctgt

SEQ ID NO: 38844 - DNA, 419 bp, Glycine max
cggacgcgtgggcggacgcgtggggcaagtccattgcatgttctttgataaacaagaagattttgatgatcgagatgtgaggcagatgttgtcattggttcgaagggaagtcttaagcggatgtgtgatcattttcagccgtattgttcatggtgcaataccatctctgaggaagatggcagaacagatgggagctacttgtttgactgaaattgacccgtctgttacacacgtagttgctactgatgctggaaccgagaagtgccggtgggcagtgaaagaaaagaagttcgtggttcatcccctatggatagaggctgcaaattatttttggcaaaagcagcctgaggagaacttcattctcaaaaaaaagcaatagtcacttttcttatggtatcaaacagtgctgtgttcataat

SEQ ID NO: 38845 - DNA, 253 bp, Glycine max
aaaaaaaaaaaaaaaaaaaaaaaaaaaataaaaaaaaaaaaaaaaaaaaaaaaggaaagggcggccgatttaaaggggtccagcgttacatacgcttccatgcttacgttactcctgcttccatagcgttacctcatttcaattcactgcccgacttttttcaatggcctgactggtaaaaccctgtcgttgcccaacttaatccccttgcaggacatacccctttggccagcttgcgtatttcccaagctgc

SEQ ID NO: 38846 - DNA, 387 bp, Glycine max
cggacgcgtgggtgggacagccacattagcccaaagaattcaaaatggcttcaggagaaccttacagacatggatgccaaagtaaaagcaatgatcaagcttattgaagaggatgcagactcatttgcaagaagggcagagatgtactataagaagcggccagaactcatgaaattagttgaggaattctaccgagcatatcgtgcattagcagagagggacgatcatgcgacaggggagctccgcccagcccataaaaccatggcagaagcatttcccaacttgctgactgatgattcaccatgtaattcttcagacactggagctgagccaccgcacacaccagaaatgccacatggcccacatccaattcgtgcattattggac

SEQ ID NO: 38847 - DNA, 301 bp, Glycine max
tctcccacgcgtccggtttgttgtgagctataatctagtttatcgtgaggagaatatgaagttcggctggttctatatcgctgcactagcactcttaacatatccatgcctatgctcattcataccaatggctacctttcatcaaaaaatactgctaccgtatcccttgatcaaatttttaaatctcaacgagaacacatatctacatttattttaaaacctgtacatggtgaagcctattctatatatgctccaaatcactatctgaaatctagcatagatatcctgtcccaatataatg

SEQ ID NO: 38848 - DNA, 381 bp, Glycine max
tcgtccacgcgttcggtgtgctaactcaggcaattatatccatcaaatcaattataaaattagaaccatccagttatgagaaggttataattcagttagtctgtagcttggataaaatcaaggttccagctgcccgtgcaatgattatttggatattgggggagtattgttctttgggtgacataattccaaggatgttgagtacagtacttaagtatcttgcccggtgttttacttcagaagcattagaagctaagcttcagtttcttaataccactgcaaaggtcttactgtgcattaaaggagaagatattttgaccgtgagaaaagtttggagttatgtaattgaattggccgagcgtgaccttaactatgatattc

SEQ ID NO: 38849 - DNA, 424 bp, Glycine max
cagaggctttctcactacctttccagagattttcattaatataggaattcttcttggtgatgtgtgcaaactattcattttcaggcttttcaccacacataaactggaggataatgcttgctgtggggattttgccctcagtcttcattggatttgctcttttcatcattcctgagtcaccaaggtggttggtaatgcagaaccgaatcgaagaagcaagatcagtgcttttgaaaacaaatgaaagtgatagggaagtggaggagaggctagctgaaatacaacaggctgctggtgtggccaattgtgaaaattatgaggagaaacctgtgtggtatgaacttttgtttcctttcgcctcgcttcgtcgaatgatgatcacaggaatagggattcagtggtttcaacagaattctggaattga

SEQ ID NO: 38850 - DNA, 226 bp, Glycine max
cccacgcgtccgcccacgcgtccgcccacgcgtccggctgaattggagaagagaaaggaaaagtgtgatatcgttgttggagatttggcagacccacttgaagatgggccatgctatcaactctacaccaaatccttctatgagaagatcctgaagcccaagctcaatgataatggcatttttgtgacccaagtaggtagataatgaatatgagtaacaccctttt

SEQ ID NO: 38851 - DNA, 360 bp, Glycine max
caggatgatttcttgccaagaactgctactccattggaagatatattcaaatcaatatggtgcgggccctgcttattgttcttggtttgcctgagagacaccttcatacctgagggtagaaagcttagagatccaaggaggctttatgcacctggaagaatgtaccatattgtggagagaaaattttgcagatgtgggagatttcctcctgaagtgaggactgctattcccgttgatggaagatttgagcatatagtcttgtcctgtaatgcaacatcagatcatggaattatttggattgaagggaacctgataaagctttacaattaatgaaagctcagagctctgaaactgtgacag

SEQ ID NO: 38852 - DNA, 424 bp, Glycine max
cggactcgtgggcacaagccaagtgaaagtgagaaaaaataaaaatcaaagagcataatgtgagggatcattcacaagattggggagacccttcatgtgggagggcacaagaaggaggaggagcataagggtgagcaccatgctggagaatacaaaggggagcaccatggtgaacacagtagtgagtacaaaggagagcatcatggtgaacacaaagctggagagtaccatggtgagcacaagccagagcacaaagaggggttcctagacaaagtcaaggacaagatccatggtgagggctgcgccgccgaaggcgagaagaagaagaaggagaagaagaagaaggagcatggccatgagcatggccatgacaagagcagcagcaatgacagtgattaaactgctgcatacctatatatttaaa

SEQ ID NO: 38853 - DNA, 264 bp, Glycine max
tcggctgcttaaggggtttcagccagtgacatgtttatacgccaagagttggtaaagaattagaaggctaatcttcaatctcccatatatcacagctcaagaacttgactcattaatctcaacttaccctagtcaatgcatgagaaagaactcaagaagctttgcattgattcatgtatctctagagcttccaagcataaacctgtaattcggcatataaagcctttgaaaaatgaaaagtatggaaatgtttctcaagaacgc

SEQ ID NO: 38854 - DNA, 284 bp, Glycine max
tctcccactcattctgttcacttgatccttcttaagtcttcatcatcatcatcatcatcaccgcggattgaataatattcctatcataaacatctccatcgcaaggcctgaatagtctactcaccccgactctttctatgcttacttggcttagttcatatacacctttatcttccttttcgcctagtcaggttcaagcatcttctactacatactcacctactactgctccacaaatccctcctgcctcatctactcttctatcgcccattctttagccctct

SEQ ID NO: 38855 - DNA, 190 bp, Glycine max
cccacgcgtccgcccacgcgtccgcccacgcgtccggtcattttgatgagaatatgatttcacggagcaatccataatgatgagacaccttgtttttagcattgaaatctagttgaggcttcgatcttaagttattttgttttgtttttttttttttgctcagcattaagttattttgtattacttattg

SEQ ID NO: 38856 - DNA, 458 bp, Glycine max
gaaaaaagagctcaaaaagtctaaggttatcaaaatagactctcaaaaatcatgggatcagcacatctctcatgccaccaataaaaagtacccagttgtggttcatttctctgctttctggtgtgtgccttctatagttatgaatcctttctttcaagaattagcctccacctatgaagatgttttgtttctgacgttggatgtggatgaggttaaggaaattgcctccaagatggaaatcaaagccatgcccacctttctgttactgagtggagggactcccatggacaaaattgtgggtgcaaatcctgatgaaataaggaaaaggattgatcattttgttaactcaactcattcctacaaatctgtgtaaaccatgcacatgatgaacaaggagttggccaaatcctagaactgttgttcattgtactatgaaccatttcatatatgttttatat

SEQ ID NO: 38857 - DNA, 385 bp, Glycine max
  unsure (1)..(385): unsure at all n locations
tcgtccacgcgttcgctttcgctttcaccgtaacacaaccctcgttgttccgtgttctggcgaagcgacaccgttttacacttcctcttctcggcacagagaacaggattgtgagctatggaggttgctgaccttttgtcactgtagagctttcattccatcacagccattttccaattcggagaatctagcaggttgttgaaaatatggccaagcatcatcctgatttgattatgtgccggaagcagccagggattgccattggacgactgtgcgagaaatgtgatggcaagtgtgtgatatgtgactcttatgtgcgtncttgtacacttgtccgagtttgtgatgaatgcaactacggatcatttcaaggtcgatgtgtcat

SEQ ID NO: 38858 - DNA, 421 bp, Glycine max
gttgcagcattcagatggatgagaagatgctagtgtatgagtacatggaaaatagaaggctggatgccattttgtttgacaaaacaaaaagatcctcactggattggcaaaggcgattcaacattatatgtggaattgctagagggctcctttatttgcaccaagattccagatttaggatcatccatagggatctcaaggcaagcaacattctacttgacaaagagatgaacccaaagatatcagactttgggatggctagaatttttggcaccgatcagacagaatcaaataccatgagagttgttggaacatatggttacatgtcccctgaatacgctatggatgggatcttctcagtaaaatctgatgtttttagttctggggttcttgtgctggagatcatacgtggaaaaaagaa

SEQ ID NO: 38859 - DNA, 430 bp, Glycine max
  unsure (1)..(430): unsure at all n locations
attatcctacctggtgaaagggatggaaagatttggatgtggcataagtgcttgcggtgtccaagaatcaatggctttcctcctgctacacagagaatagtaatgtctgatgctgcttggggtttatcatttgggaaatttttggagctcagtttctcaaaccacgctgcagccagcagggtggcaagctgtggtcactctttacacagagattgccttcgtttttatggatttggaagaatggttgcttgttttcgatatgcatcaattgatgttcactcagtctaccttcccccccacacacttatatttgattatgggaatcaggactggatacaacaagaatctgatgaggtggtcatatcggcagagcttttattctctgaggtactcaatgggtctagtcaaaatngtgagaaaagatctaatg

SEQ ID NO: 38860 - DNA, 183 bp, Glycine max
gacagattgtctcgttctgaacactgatctatatgccagatatacaatcacgctgcaaggtaagaccgcgttatctgactcttctgagattctggcaacatgtgatgatagagatggaaacactgtcgcatccacaacacgctgtacgaaatacagcatgactgtcaacttatgagctctaga

SEQ ID NO: 38861 - DNA, 183 bp, Glycine max
agcaagcgtaccgtgttgcctctctgcaatctacagctaaaatgcatataaagacgtacgtagagatcggaagggttgtccaaattaactacatgctggaatatagggggctcgccttgatcgtcgacgtcattgaccagaacagagctcttgacgatgcccctgatatggctaggtcccaag

SEQ ID NO: 38862 - DNA, 392 bp, Glycine max
cccacgcgttcgtccacactttcttacactcatacatccactcgtccgcgcctttgattgtgagcatggttggtcttgctaccaaataatgattcacatattcatgctggatccctcttacccttcataagcaatatcgttttagtttgaaagccaccggtgaaactatccatgtgtgaactaaaacaacatgggtaattgacatcaaccgagcacgttactgggggtccctgccgtggcttccgtcgcagatgcttctgcaccaaacattgttaattttaagggcttcctttctagagcttccatacaaaatgacacatccatgctacttctactctcgtctataatgaaccactatgtaattgacaatacggggtacccaaactactata

SEQ ID NO: 38863 - DNA, 436 bp, Glycine max
cctgatcttatcccatccttactgacactggctctaaatgatgctttgacttatgataaggcagcaaaatcgggtggtccaaatggctctatacggttcagctcagaaataggtagaccagaaaatacagggctttctgctgccatgaatttattagaggaagcaaaaaaggaaatagactcatattccaaaggtggacccatttcctatgcagatctgatccactttgcagcaaagtgctgccaaggctacatttttagctgctgccattcgaaaatgtggtggaaatgaggagaaagggaaaacactgtacaatgcatacggatcgaatgggcagtggggtttgttcgataggcaatttggtagggctgatactcaagacccagatccagagggaagagttccaatatgggagaaggcaagtgtacaagaaatg

SEQ ID NO: 38864 - DNA, 216 bp, Glycine max
cccacgcgtccgcccacgcgtccgcggacgcgtggggaagaagatgattctaaccgtctgcttcaatatcattttatctctcctctccctctaccacgccttcggggtggatttctgcgtagcagactacacaagccccaatggccccgcaaggtactcatgcaagagcccaacaaaggtcacgggggacgacttcgtctactccggccttggcac

SEQ ID NO: 38865 - DNA, 470 bp, Glycine max
  unsure (1)..(470): unsure at all n locations
attcccggtcgaccacgccgtccgccacgcgtccgccaagcgtccaaaattgagaaattcaaatggttcattgccaacttcgcaagttcggttgaatatgcaacgagtaatgcaaaccaatgctgctgtgttccgtacacaagaaacattagaagaaggttgtcaattaattgataaaacatgggagagcttccatgatgtccaggtgaaggaccgcagtttaatctggaactctgacttgattgagactattgaattggaaaatcttttgataaatgcatgcatcacaatgtactctgctgaagctaggaaagagagtagaggagctcatgcccgtgaagacttcaaggttagagatgatggaagctggatgaaacacactgtgggattctgggagaacgagaaagtnncgttggactacaagccagtgcatttgaatgtattggatgatgaggttgaatcattccctc

SEQ ID NO: 38866 - DNA, 451 bp, Glycine max
tccgcatcgatgttgaacacagtggaagaaggaggggactcggcaatggcttagtcccatcccgcaggccttctctttgatgaagggggggaagacagaacaaggccatgcaaatgccaaagaaggagacagaagagggtacgctaaaaagagagagcaacacccgacccggggatacatgggcgtggagaaagaacggacagaaacccatcaagggtgccccttatcccagagggtactacaggtgtagcaagttcaagggctgtccggcacggaaacaagtggaaaggagctgcgtggaccccacaatgctagtcgtcacttactccttcgaccacaaccattcatggccaccttctagaaaccacgccaggcccaccaagaagcctgaaccggttacggacccggtccaacccgaaccggaggaaaagttcgcggacctgggcgggga

SEQ ID NO: 38867 - DNA, 442 bp, Glycine max
cccacgcgtccgctttatccttcatttgacaagggaagaagaatgaaaatagaataaaagaggagggaatgtagaaaaaataaacagaattcttcattgtcatttggtttgatttatctatgatattggtaactgtactattcactaaagaaatgaaatgcgcaacttaaaggattgctgtgagaaacacacaaactctttgacttttagacctttcctggagagtgcgttgaagcaacaccggactgcattcatggcgaacaatattgatcacacttcctatcagtttaccaagccgcttacttttatgccatagaccttaaattccattccaaggacacatttgcgttcagtataaatggcaccgtactctctaatattccatactacaaaaaacatggatatggcgtggataaatttaactcgaccttgtatgatgaat

SEQ ID NO: 38868 - DNA, 318 bp, Glycine max
  unsure (1)..(318): unsure at all n locations
tgcacttccatacatttgcatggatattacgtatcagtatacgttgctcgtcgatggatttggcctggatccttggaaagagattatagtancaaatgaaattgaataccaaggtgctcttgtggaaggagcatggcctctaggcagtgccatagaagccatatcttcattgcccaaatttaataaattgatgtattttatataacacttaaagagaagtgggcttcctttaattactaaataaaatgaagctcgatgtatatcanataaaaaataaattttttattaaataatattttaaataattaattttataat

SEQ ID NO: 38869 - DNA, 312 bp, Glycine max
  unsure (1)..(312): unsure at all n locations
cgcttctgattattcctcttcccattctattgttcccaaatggacgctnncggaaagacgaagaatttctctctatgaagaaaggtccacatccctaagaagaaaccgttttcaaggtccgtcaaggccggtctccaattccccgtcggaagaattggccgttatttgaagaaaggaacgtacgcccagcgtgtcagtacccgtgctcccgtttacttggccgcagttctcgagtaacctaactgctgacgtgcttgagttggcttggaatgctgcacgtgacaacaacaagaacaggattattccgagaca

SEQ ID NO: 38870 - DNA, 368 bp, Glycine max
cccacgcgtccgcccacgcgtccgaaacaatgcaggaatttttggaacccctttcgtgcggtctgaagataacatcgaactacaatttgccacaaatcatatacgtcattttcttttaacaaatctgttattggatactatgaagaaaacaacacatgaaagtaagaaacaaggaagaattgttaatgtctcctcacagggtcatcaattcacctatcgggaaggaatcctttttgataaacttaatgatcaatcaagttatcaggcattccgtgcatatggacagtcaaagcttgctaacattttacatgccaatgaacttgctagacgtcttaaggaagatggggtaaatattactgctaattctc

SEQ ID NO: 38871 - DNA, 437 bp, Glycine max
gaagttaaataacaagagagtgagttaagtttcagtagagagaaaatgagcgtgaaggtgaattgcgtgggtggcgacactcataacgtcttcgtgtacggtagtctgttagctgatgaagttgtccataccctattgaagcgcgtccctccaaccgcacctgccatccttcacgactatcacaggtttaagatcaaaggtcgcgtttatcccgctattctccctgtccagaataacaaagtttatggcagggtgcttcttggtatctccggagtagaactagatattttagatgaatttgaggatgttgaatatactagaactgatgttgaggtttccttgaaggaatggaaacaagttcacatgaatgatttcgtcaagatgactgatggctttaggcaagagttggagttaccaggatcaaagccaagagtgca

SEQ ID NO: 38872 - DNA, 446 bp, Glycine max
cccacgcgtccggataactagaaacagtgctatgaaattgaaggtccttgaattcttcggggctacaattcaggtagcatggcaatgccatgcgtacgatatgttccctatacgaatgaacactggctatggtgcccgaactctggaggtgaaaggcgcaagttggaggcttgctgcggaagcacacaacatcatctggctttgagaccattcatgaagagtgcgtggaagcaacaaaggaatacattcatggcgaacaatatagatcagactgcatagcaggtaaccaacaagcttactttgatgccagagacctcgaagtagatgccaaggacacattggtgttcagcatagatggcagcccactctctaatattgcatactacaaaaaacatggatatagcgtggagaaatttaactcgaccttgaatgattaatgggtttac

SEQ ID NO: 38873 - DNA, 377 bp, Glycine max
accacgcgttcggcagcagaaggctgttaagttcgcgacggacggcatgggcacaggtctcggcaactcgccaaccgcaaacaccggaagaatccacgcgctcctcaacttcggcaaaaagaaggcggcggcgccgccaccgaagaaaaaggaagtgaaagtgaaaccctccggcgaccggctggtgtgggttcctaatgcggagccgccggagtggctcgacggaagcatgatcggcgaccgcgggttcgacccgttcggtttcgcgaagcccgcggagtacctgcagttcgacctggactcgctggaccagaacctcgcgaaaaacgtcgccggcgatgtgaaccgaaccagggtggaaggcgccgacgttaaac

SEQ ID NO: 38874 - DNA, 260 bp, Glycine max
gggaaaacaaattgtcatgtttctggactattatggttcgctgtctcctatagttgacgaggctgaccgtgctttcatgtctgattcgatgagaaaaacagtgaggaaacttgctaggtgttttcctactgctatagtgaccagcagatgcaaagacaaggtgtacaattttgttcgcttggcagagctatattaggcaggaagttatggcatggatattaaaggaccaacaagtagcttcgtatacaacatagatagca

SEQ ID NO: 38875 - DNA, 442 bp, Glycine max
tccggttcgttgtgagctattatctacggtatttttaggagtatatgaaattgcatgtgttctcaattgggggaatatttttgctccatggccaatccatagcacatgctaccaaatgttttctttttgaatgaaaacttgtttatcgaagcatcctactgccgaaaaatgcacacctattaaacttgctactgaagcacacaacattcttatcctttaaaaccattctctaatagtgcgatgaaccaacaatggactacattaattaccaacaattcatatcatactctaaaacagtatacctacaaactttcttttattcttctgaacaccaagttcattacaactacatatttatatttgacatatataacaccgtactttataatttccatacattaaaaacattttttttaattaaggaatttaatgaaaccttata

SEQ ID NO: 38876 - DNA, 280 bp, Glycine max
cccacgcgtccgcccacgcgtccgggaactttcgctagtcgcctgtccaacctgctcggcgggcctcacatggccaccgtcgatctcgatcgcgacgaactcgccttctacgactccctggctttccagctatcagaaattgtaaaacaaggtcaattggtgtcagatgaaattattatacgtttattgacaaagagacttgcagctggtgaagcttaatgcgaactgggatttatacttgatggtgttcctggaacaattaagcaagcataaatcttgg

SEQ ID NO: 38877 - DNA, 449 bp, Glycine max
gtttgttgtgagctataagctagtttatcgttaggagaatatgaaggtgcttgttttctttgttgctgcagtagttttggtagcatggccatgccatggcgcaggctaccaaaggttccctctccgaatgaaaactggctatggtgagcgttcttcggaggtaaaatgcgcaagttttaggcttgctgtggaagcacacaacattcgagcctttaaaaccattcctgaagagtgcgttgaaccaacaaaggactacattaatggcgaacaatttatatcagactctaaaacagctaaccaacaagctttcttttatgctagtgaacgcgaagtccatcacaacgacatatgtatattcggcatagataacaccgtactctctaatatcccatactatgaaaaacatggatattgggtgcaggaatttaaagaaaccttatatgatgaat

SEQ ID NO: 38878 - DNA, 339 bp, Glycine max
cccacgcgtccggagaaatttatcttgaccttgtatgataaatgggttggcatgggctatgcaccgggactgcccgagactcttaagaattacaacaagctggtgtctcttggcttcaagattatattctagtcaggtagaacactgtacaaacatgccgttacagaatctaacttactgaaggctggcttactactcacgggaaaaattaattcttaaggatccacaagatcctttcacttcaaatgtcagtgcattcaattcagcaactatagatatactgatatggcaggtatacatcattgatgggatcattggataccaatggagcgatctact

SEQ ID NO: 38879 - DNA, 307 bp, Glycine max
cccacgcgtccggaaaaaaaaaacagaattacacagaaactgagtcagggtaaaaatttattatggatcataggttacgttgttttgtgacaatacccaaaattccttttctatcgctactgcctctgattctcgtcttcagatacgttcacacatccttcgacctcgctactatacccttcaacgatggctattctccgctcttcggagatagcaacgttgctcgctcagaggatggcaacggcgtacaactccggctcgatcgctacacaggttcgggtttcatttcctacagtatgtaccagta

SEQ ID NO: 38880 - DNA, 330 bp, Glycine max
cccacgcgtccggttacatattccaagcctacacatatattaagaagggcgcattatgcactattgacataggatccatagcacttctacttctccatcatttcttctgaatctctatttcctcttattattcacgacaggcgtgtcttcactgcctttgaactcattatgataccaactgtcagtgaggattttgcataggaatacgatcgagctattgcagaattacagaaattgttcagggtgaagagtgtactcaaagtcacaactgctgagatagtgtagcatataacagcatctctgggatcatcatcatatgatggcattcta

SEQ ID NO: 38881 - DNA, 301 bp, Glycine max
taccacacatagatccattcatcaattctaatggccgatcatctcaccggctaacgtatctccgaaatcaaggaagccttcagcctctttgacaaggacttgtatcgttgtattaccaccaatgaacttttgaccgtgattccgtcactttaccataacccatctgaggcatagcttcatgacattatgaatgacgctttattcttataggaatgttaccatttatttcccataattccttaatctcatgtctttcacgattaaatacactgattcagattataatcttaatgaggctttc

SEQ ID NO: 38882 - DNA, 313 bp, Glycine max
accacgcgtacgcgaaccttgcattgtatctacccacttctcaaccaagaatggggatggcaacccaagcctgtctcttcaccccacccctctccggtctcaaacccaacgaccgagccaccgagccatggaaacaatcctgcagcctctacttctccacctataagcccatcaagttctcgcgaacaatcagagcagcagtcaccgaccagaccacataggcaccggttgggttcaccccaccggaactggacccaaacaccccttcctcgaatctttgatgcagcaccggcagacttctgcgcaaggccca

SEQ ID NO: 38883 - DNA, 367 bp, Glycine max
cctacacgtatgtctaaccctttttcatatactacaattttaacgttaagactgtacatagtgaatcgtataattactggatcaatacagacctagtgacgtctgtccacacttcatttgcaaagatgcactatggaacgctagaagacgatctgatcagcgccaaacgaatccatgacaatgattttctatccagcatcgatcctcatgtgattctgacatacaaggcacaggagaaaaagagcactgcgcatgaagatcctggatccaagccagattggactgagagctatcttttcactgtctcagacagtgcatataaacttaatctatagatattggataaagacaactttattctagatga

SEQ ID NO: 38884 - DNA, 347 bp, Glycine max
cccacgcgtccggagcgagctatctcggaacagagcgttgaaaatgaaggtgcttgcattgttagcagctacaattttgagagtatgacactgctctgcgtacgatatgttccgtatcagaatgaacactggctatggtgccagtacttcggaagtgaaatgcgcaagtcggatgctagatgcagaagcactcaacatctcaggctgtgataccattcctgagtagtgcgatgaagcaccaaatgaatacattcattgcgaacaatatacatcacactacaaatcagctaaccaactagcttacttttatgccaaagaccttgaactgcattccagggacacatttg

SEQ ID NO: 38885 - DNA, 334 bp, Glycine max
acgcgtcacgcatacatccaaatcttaaaaatattcagtggagaacaacactaaagtgggctctgttggcgcgcatatccagcatgcaggcatcacaggcaaggctgttcaaggagtacaaagaggtgcagcggcaaaaggctgtggacatcaataattaactaccctatgcacaatcaaacattattgaatggaacgatcttatcaatggaccctctgagactccttatgagggtggtgtgttccagcttgcgttttctgttccggagcagtatcctttacagccacctcaagtccggtttttgactaaaaaatttcacccaaatgtgcattt

SEQ ID NO: 38886 - DNA, 244 bp, Glycine max
cgagaactggacacggtttgtcaagtttcacacttatcaaagagctatatcttgcggggaacaaattaagtgatgttggaagactacacaggctatttaagctaacacttctagagttgagctttaacaatatcacatcaacaaaagcattacgccagctagcgtctaactacaactcacttaatgccgttaatctccttgcaaattcgattcacagcaatatcaatgatgaccagcttagcaa

SEQ ID NO: 38887 - DNA, 438 bp, Glycine max
aagagctctaatctacatatccattttaggaacatgaatgttcacccatatggcggtgtttaataacttgctcggtccactaataatttcaatggagctcaactgaaggctgtttgtgttgaggctggcatgtttgctctactccgtgatgcaactgaggtgaaccattatgtctttaatgaatgttttatttcagtccaagccatgaagtatgcatgcctctatttttatgcttaagcttgatttttgaactagctatttttcattttactaaatattctttgtcctatttttctcatgtgtaactttattgttgttgtgcaattttgtattttattcttttatttttttttaggttattatatatgttgtatttctactcttttttctttttatactttatttttttaaaatccttattattgtttttttattttt

SEQ ID NO: 38888 - DNA, 371 bp, Glycine max
  unsure (1)..(371): unsure at all n locations
cccacgcgtccgagagtttgttgttagctataagctagtttatcgtgaggagaagatgaagttgtttgttttctttgttgctgcantagttttggtagcatgtccatgccatggcgcaggctaccaaaggtttcctctccgaatgaaaactggctatggtgagcgttcttcggaggtaaaatgcgcaagttttaggcttgctgtggaagcacacaacatcctttcccttaaaaccattcttgaagagtgctttgaacctacataggactatattaatggctaacaatttaaattagacttttaaacatttaccaacatgcttttttttattctatttatcttcaattttattacaactacttatttatatt

SEQ ID NO: 38889 - DNA, 465 bp, Glycine max
catacacattctaacatacaacttatttattgttctcatagtatacatagccttcttgtgggtgctacttaccaactcacactctatccatacctgttctttcaatctcaacatgtttaacccatttcaaccaaacattattctccaaaaagattctagtatttcatcctctctggttttacaactcaccaaaattggcagctacggcgtacctacactttaatctctcgatcgtaccctttacgcttctccaatccatattatagacagcgaatccttcattttttcttatcttttctacatcttttaaatttaacattttctcatctcacatattatatctatcttactgtcttgccttctttttggcacccttctgtttttactctaatttctactaatttattttttgtctttttaacattatcctaaaggactaattttttcaaatctttttattttttt

SEQ ID NO: 38890 - DNA, 291 bp, Glycine max
ctcacgcgcttctatattcgatcttacatcgaagctctcgggagcaaccacaacaccggctgcatcacatggcaaacgcagcatctggtatggcagtccatgattactgcaacttgaggtttttggagctgaaggcataaaggacacacctgttcatagtttttaagattgaggagcatcataaacaggtcattgtggagaagcttgctcagcctgtccagggctattaagatttcactgacagtcttccttcttaacagtgccgctatgctgggtatgaacactagtatc

SEQ ID NO: 38891 - DNA, 369 bp, Glycine max
  unsure (1)..(369): unsure at all n locations
gcgtccgcccacccgtccncnttnntacaaaatggacgattctcacgatgagctctacattagtcggacgctgttaaatttttatgatagctgggaattaacaagtcccctgcgcttgcttttttggtcgcgatgatacgatactttgtgaaattacttgtactttacttttttgcttagttttacgacgaaacttctttatctgttaaaaaaacactaacttcaataggcccctttggaattcgggcgccaaagcgcccgaatacctggaatttttaaccatataaaaaaatattatttcatacaataaattttaataaaaaaggggccccctttctaaagatccaaatttttctcccccgtctttcc

SEQ ID NO: 38892 - DNA, 439 bp, Glycine max
  unsure (1)..(439): unsure at all n locations
cccggaatccggtcggccacgcgtccgccaacccgtccgccaacccgtccgttttaacacacactttctctctctctctctctcacgcaggacttgtagcaatggcgagccctcccactccacgcgaagagttcgtgtacatggcgaagctggcggagcangccgagcgctacgaggagatggtggagttcatggagaaggtctccgcctccgccgagagcgaggagctgaccgtggaggagcgtaacctcctctccgtcgcctacaagaacgtgatcggcgctcgccgcgccttctggcgcatcatctcctcaatcgagcagaaggaggagagccgcggcaacgaggaccacgtcgccgtcatccgcgactaccgctccaagatcgaggccgagctctccaacatctgcgacggaatcctcaaactcctcgacacgcg

SEQ ID NO: 38893 - DNA, 414 bp, Glycine max
cccacgcgtccgtcaatttatccaattaattagtgttttattttcttgaggcaaaagcaatgttttgagtttttaatattttccatttgttcgaagactatattgtgtaaggaacttattgtagttcatactcaaaaaaaaaaaaaaaaaaaaaaaaaaaaaaaaaaaaaaaaaaaaaaaaaaaaaaaaaaaaaaaaaaaaaaaaaaaaaaaaaaaaaaaaggggcggcctttttaaaggatccaagtttacttacccttgcatgcaacttaatactttttttatagtgtcaccaaaattaaattcattgcccgtctttttacaactttgaaactggaaaaaccctggcttaacccaacttaatccctttgaaaaaaatccccttttctccagttggtataataccaaaaaggc

SEQ ID NO: 38894 - DNA, 387 bp, Glycine max
ttcaaacgtccaaatgatctagatccaccaaaccaaaccaaaccaaaatggcaggaggcgaagcctcattcatgatatcaacaccatccttatcttccaccatacaaaaacaccatcatttgaagccatccaacgtgagctaccaaggtcttagacccctcgcaaggttcaccaaaacctgatcaaccaaagcgagcaccactaccaaaagggttattccaaaaggtggtgttagagctaaactcaactcagaccttgtgataagcctgatcactgacctcttcctcttctagagaaaggacgtgttcttaaacttccaaaggtagaacgtgagcaaatcatgtgcctgagcagaacggcctgacacactttgaggctggtgataca

SEQ ID NO: 38895 - DNA, 287 bp, Glycine max
gtggttgaaagttaaaaagtagcaaagatgtttccattcgggcacaaaggtcaaaggatgaaggggactattggggttattccaaaaaatgtgtttgatattaaccaccttacccatgtttaccggatccgtcggacccgcttaaaacttttaaggcgggcccttcataccagtacctttttaagcctcttcattttccatccaactaattagggctcccaaggctattggtggaaaaggaaaagttggaaaggctccaattttggagggaaggttacctttcccac

SEQ ID NO: 38896 - DNA, 473 bp, Glycine max
gcccggaatccccgggcggacgaaggcgtccgccaacccgtccgccaacccttccgactttttttgacaggagaccttcatttttgcagaggggctctctgaaaatcaatgcaattaccaaaaaatgggaacccactaaggttgtacctcaggctgatagagttcttgttcgtttggaggagctatcagataaaacagttggtggagttttgctgcccaagtcagctgttaaatttgagcgatatcttgtgggagaaatcctaactgttggtgctgaggctggagaactaaaggctggaacaaaggtactattcactgacatgaatgcttatgaggtggatttggggactgatgcaaaacactgcttctgtaaagcaagtgacttattggccgtggttgagtaaggtttgccactgtatgagacaaaacgggagcaatcctttttatgatatatctttgacaaatgtattttt

SEQ ID NO: 38897 - DNA, 456 bp, Glycine max
ccaacccgtccgcccacccgtccgcccacccgtccgattggatgcaaggttcctgagtgcgtggaaggaggaaagagttgaacctgcaaaggtctttaaataaggtggcattggtgatatcgtgactgatcaacctgtagacaagaaaaaattggttgatgatgttaggaaggctctttatgcagccaaaatctgtagttatgcacagggaatgaatttgatccgtgcaaagagtattgaaaagggttgggatttgaagttgggtgaactggcccgtatttggaaaggtggttgcatcattagagcaatattcttagacagaatcaagcaagcgtatgatagaaaccctaatctggcaaaccttcttgtggatccagagtttgcaaaggaaataatcgatcgccaatctgcctggaggagagttgtttgccttgctatcaattctggtatcagcac

SEQ ID NO: 38898 - DNA, 423 bp, Glycine max
ggaacacgctgatctcagtgttctctcaatactttcatgggatccgctgtcttagtacggatgtggagatgtgcaatctggggtttaagcccaatttcatgacttatggcagtgtactcagtgcatgtgccagcatttctgatctgaaatggggtgcccatttgcatgctcggattcttcgcatggaacatagcctggatgcgtttttgggaagtggtctcatagacatgtatgccaaatgtggatgcttagcactggcgaggcgtgtgtttaacagtttaggggaacagaatcaagtttcttggacttgcttgatttcaggggttgcacagtttggacttggtgatgatgctttggcactatttaaccaaatgaggcaggcttctgtggtgttggatgaattcacccttgtgacaattcttg

SEQ ID NO: 38899 - DNA, 424 bp, Glycine max
gaactgtgacgtctagaggcatgctacagcggcctgcatcctgtagagcggccgcacaatttcagcacactggcggtcgttactagcggatctgagattcattaacaggccaaatcgaacgctatggacagcccagcaatcgtgcacttataggatattgatgcgactgtcacagggtacacaacacgagtaaaaatatagagatagcgaatagatgaccttgacatcgtggcgcatatatacagatgcagcagctgtattcttgactgcctggaaatcttgcgcaagtactttggtgctagacttgaaaagaagatctatgtcgataaaccatcctgggtatccaagttttaccaactcgattatcttcggacgaaaagggaccgagaaagtggcactaatagaaattgatgatagccaaccg

SEQ ID NO: 38900 - DNA, 457 bp, Glycine max
cacaaagctgctggagcatttggtggcatcagaatttggagccggcctcaaattcctgtgccttttccttctcctgccggggacattaccatacttgctggagattggttcaagcttgaccaccgaagactgagacgactcctagagaatggtcataatctccccttccctgatggccttcttatcaatggacgtggttggaatggaaacaccttcactgttgatcaaggtggaacctgacagcaagtggaccaagaccaaaccctcagggatcataccactatggattgatcaaaccgagtcgaaccatcatgcttgcaaattctgctccttatatcaatggcaagcagaggtatgcggtcaacggtgtctcatacaatgaaccagataccccattgaaacttgccgactacttcaacatccctggagttttctacgttggaagcattcctaccta

SEQ ID NO: 38901 - DNA, 167 bp, Glycine max
gtgagccacacacacaatccattccctttctgcactacggcaatgaccacccaagcttccgccttcttcgtaaccgttccgtccgtcgcaacccctttccgtctccaccgtaatcccttccttgttctagcccaatcgtaacctatcagataaatccttttaaatta

SEQ ID NO: 38902 - DNA, 405 bp, Glycine max
gattttgattgttgcaactggctcaacagttataaggctgacagatttcggtgtagaaggaggtgatgcgaaaaacatcttttatttgagggaggttgacgatgctgacaaattgtacgcagcaatcaaggcaaagaagaatgggaaagctgtggttgttgggggaggatacattggtctggagcttagtgcagtgttgaaactcaacaatattgatgttaccatggtctacccggagccttggtgtatgccacgatcttttacggctggtatagctgaattctatgagggatattacgcaaatattggtgtaaatattattattggaaacagttttattttgttcattcttattccgtttgatcggttatttttaccttgattcttatcgtaaatttttttgta

SEQ ID NO: 38903 - DNA, 475 bp, Glycine max
cgacaccacgcgtgcgggttgttagaatagcttcaatccaaccacgtgcatcatcttcaatttcccaacccaacccgactttttcatcatctgaatcaaatgcaaactcacaattcaacaaatctttgctctcatggaaccgactcaagcctccctcaaccaaatgcaacttccccaaactccgccacaagtggaagcaataccaaggaatcaaccactgggaaggcttgctggatcctcttgacgatgacctacgctgggaaatcctaagatatggccactttgtggatgctacatatagctcctttgactttgacccttcttctcttacctatgccacatgtctttactcgaagaaatcgctattgaacaagtgcgggttgggaaactatggataccgattgactaaatatctacatgtcacgtgtgggattcacatgccaacatggataaataaatgttttaaacaagcctg

SEQ ID NO: 38904 - DNA, 418 bp, Glycine max
cccacgcgtacggaactaatgaataagctattaatttccatggaagaagtttgactgctcgcggtggtgcttctcacaatgttctcctctgcctatggctatggatatggtggtggctgggttaatgcacatgccaccttctatggaggaagtgatgcctcaggaacaatgggtggggcatgtggatatggcaacctctacagccaagggtatggaacaaacactgctgctttgagcactgctttgttcaacaatggtcttagttgtggctcatgctatgaaataaggtgtgtgaatgaccataggtggtgcctccctggctccattatggtcactgccaccaatttctgccctccaaacaatgccttaccaaacaattcacgatgatggtgcaacccttctatgcaccattttgacc

SEQ ID NO: 38905 - DNA, 430 bp, Glycine max
  unsure (1)..(430): unsure at all n locations
tgctagccacacacacatatcattccctcttttcactaccgcaatgaccacccaagcttccagcttcgttttcaccgatccctgcgtcgcaacccctttccgccgccaccggaatcccttcgttgttcgagcccaagcggaaccttcagataaatccgttgaaattatgaggaagttctcagagcaatactcccgtaagtcaggaacatacttttgtgttgacaagggggtcactttcttttgtatcaatgttttttctgaccatatttattctttntgtttctccattttactcttttcttctttttctttgtatgattttctttttgttttttttttatttttgaatttattctttttttgttctttttattttttttatttttttatttttctttatatttaattttactttttttttttttttttt

SEQ ID NO: 38906 - DNA, 458 bp, Glycine max
gaagaagaagaggcatgcccagaagaaaagggagatattcccttgcaatgtcatgcgccggagacaccaactttggtggatactggtggtatagcagtgacgaatacgacgaaaccgacacccttatgtcctcgaaaagcctctcgtgggattcctacgggtcccggcgccggcgcaggaataatgaacggagctacgacatgcgtgttctgccgctgaacggtaaggtgaaggatacattcgcggtggagaagcgctacagcgacccttacagagatttcaggacttcgatgctcgaaatgatcgtcgagaagcagattttctcgaccgctgatttggagaatctcttgcagtgttttctgacgatgaattcgcatcaccattataagatcattgtccatgtcttcaccgagatttgggaggctctgttctctgactggtattgataattagagaga

SEQ ID NO: 38907 - DNA, 167 bp, Glycine max
tttacgcgttcgatatgatccttccatctagcagcaccttaggatggcatagtcttaaaggtaatgtgctgggtcaaacgaagaatggcttatggtggatacctaggcacccagagtctatgaagggcgtagtaagttactattggctttgtgtagtttaaaataag

SEQ ID NO: 38908 - DNA, 193 bp, Glycine max
tgagatgaggtggagtggtgtcggaatcgactagtggtggaggaatgaacagttttttgtcttttgttgtttctcgtcacatctttttgctgttttccaaggcttgctcaaagtgcttgcttgaattgacaccaactttacttttaatcttttagtcttttatgaagacgtagtctttgtttttcttttcatg

SEQ ID NO: 38909 - DNA, 274 bp, Glycine max
cccacgcgtccgaatttctctctgccttgctcatttacacacctgtccaacctttcacttgcagctgtatttgaatccctctctctcctttccaaatggccagcgttgaggttgcacatcaaacaccaacaacagttccagaaaatgaaacaaccgaggtaatcaagacccatgaaacaacctcggaaccagtaccagccactgaggctcctgcaacagaacaagcagcagctgaggttcctgctcaagaagaacaacaagcaacttaggttcc

SEQ ID NO: 38910 - DNA, 458 bp, Glycine max
gcggcaactaaaccttaatgcaagaattaggtttcatcaccgatgtgcatggatcttgcaacagcttcaagatcaacaagctcgctcgctttgctgtagaggaacaaaacaaaagagagaattcagttcttgagtttgcgaggtattttactgcattcctacattatatctttacattaaaattctttctcaacctaataatattctgtatcacttacttcaatgtaatttttagtagagccttgttttttgcattttttatatcatcttttattcttcatgatttatctatttttataatgctttttatatcttaattgaatgaacttttttatttatctatatctattgtatttattttattgtatttttttttgtttaatcatttacttttttctatttatttgatcttattttatttctactttttttatttaatttttttttttctttttttt

SEQ ID NO: 38911 - DNA, 211 bp, Glycine max
cccacgcgtccgtccacgcgtccgcccacgcgtccggggagggcgcattagttttaggggagaagtgcaaaattaccaaaacacagtgtctcaagtggtaaatttactgggaaatgaggactcagctgcaaattacttgagcaagtgcatatactcaattgggttgggtagcaatgattacctcaacaactacttcatgcctcaattctat

SEQ ID NO: 38912 - DNA, 361 bp, Glycine max
cccacgcgtccgcccacgtttccgcaacccttttgcgtgcttagcagagagagacgcacccggtgggctaagacccgcgaggtgttataggcaaattaagaacaaaccataccccaagtcacggttttgccgtggtgttcctgatcccaagatcaggatttacgatgttggtatgaagaagaagggtgttgatgaatttcctttctgtgtccatctggttagttgggagaaggaaaacgcttctagtgaggccctggaagctgctcgtattgcttgcaacaagtacatggccaaatttgctggaaaggatgctttccacttgagagtcagggtgcacccatttcatgttcttaggatcaac

SEQ ID NO: 38913 - DNA, 388 bp, Glycine max
cccacgcgtccgcccacgcgtccgcccacgcgtccgcatgtatatggcatgccatatcaatgttcaatatatcaccttcttccaacacggcctcatcactggctagtggcacacacagttgcaagagaaagagagcgagattccgatggcgactctggattccgacgtgcctatggttcccgccggcgagccctcgagcagcgccggtccttcttccaagaagcccaagcgcttcgagatcaagaagtggaacgccgtcgctctctgggcttgggacatcgttgtcgataactgtgctatctgccggaaccacatcatggatctctgcatcgagtgccaagccaaccaggctagcgccactagcgaggaatgcactgtggcatgggga

SEQ ID NO: 38914 - DNA, 383 bp, Glycine max
cacacgcgttcacacctctgctcacgctgcttgtgttgcagctcagcttctagcacatctagggctaaaggtaaaggagaagggtcacgtaaaggttcacatcattgtccatgtcaacgtccatgtatactctaccacatgcaatatcactgaccagctgatatacatgctcgaacgcattgacaagcgtgttattgagaggtctgataaggtagccgctaagactaacaagaatgccttcaagcatgcctgactgctggacaaacttaaagctggactcgccataggtatcaccattgataatgctgtaacgacgtatgattcttccacatattattgcgcacctatacatacgccttgacataaggatatcattactaata

SEQ ID NO: 38915 - DNA, 441 bp, Glycine max
gtcttcaacaactgagactaaatctcttgtaacttaaattttggaatccatgtttgcaaacgatgttgcgagtccaatacgactttgtttccttcaccatagatgaacttgatctttgaaagattggcaaatggagtgaaagaaacaggaacttcaaattggtttcctttgaaaccaaaatattcaagtgatgtaaggcttgcaaggttagaatcaaaatttccaatgaagtgattttcagaaatttccaacttccggagagatgtcatgttaacaaaagatgagggaagtggtccctcaaattggtttccggatagatctaactccttcaacttctttagcttaaaccaatccgtgggaagaaaggtgccatttatatcacattgttgaagagacaaaacttttaaagatgtcaattccccgatatttttaaaaactcat

SEQ ID NO: 38916 - DNA, 348 bp, Glycine max
cttctccccacttcctctatataatacacactatacaacataacattcgtatatacacacaggaccaaccactctttttacttgatttacttcctccatggcatctttcatcatcataccactcctacttctttctatctgcgtcgtacatgtcttacatcaccgtcgaggctattgtcggggctacccaggtaatggcggtagcggctatcctggccgtggtggtggctaccctggtcgtggtgtcagcttataaaagtgacaacccggaacccttcatggaccagcgcgtgaaacgctacggtccaatcttcaccacccacgtgttcggcgaacccaccgttttct

SEQ ID NO: 38917 - DNA, 410 bp, Glycine max
gttgccatgagggagttttcttcttgttttgtagaaaatggtgttcaggttgctgactcatgctcatcaagcaccacaagagcagcacaaaatgtggtcacgtgtgtctatcagtgcaaattaagaggccattcaagcttgattacagtctcgtggacaaaaactctgattggtcaaggcttgagtgtggaaattgatgacttgggaaagcattgcctctgcaaggttgagataaagccatggctcttctcaaagagaaaagggtcaaagaatttggaggtccaatctggtaaagttgacatcttttgggatttgagtagtgccaagtttggttcagggcctgagccaatggaggggttctacttagcggttgtgttcaacaaggagacggtgttgctcctaggggatct

SEQ ID NO: 38918 - DNA, 381 bp, Glycine max
cccacgcgtccgagcatggccatgccatgtttcaggctaccaaaggacatctgggataatggaaactggctatggagagcgttcttcgtaggtaaaatgcgcaagttttaggctagctgcggaagcacacaacattcgagcctttaaaaccattcctgaagagtgcgttgaaccaacaaaggactactttaatggcgaacaatttatatcagactctaaaacagttaaccaacaagctttcttttatgctagtgaacgcaaagtccatcacaacgacatatttatattcggcatacataacaccgtactctctaatatcccatactatgaaaaacatggatatggggtggaggaatttaatgaaaccttatatgatgaatg

SEQ ID NO: 38919 - DNA, 384 bp, Glycine max
tcactttctctctgtatttctctttctcattttctactctttccttttcatcgcatcttagttttatttgcacatcttgtagttcccatggatactgctctcatggaagagcacaatattcttaatgatcatgatcataataacaagtctgacgcacatttgacttctgccgctgcttttgtacacggtcgaattcaagaccctcgttatgacgcttgcactatatgccttgaaactttctatgatattcatcctttcacactgactaacttcaatcatgactttcatcttcaacgcattctcgaatgacgtcaaagaaccttccaatgtcccatttattgacagcctatccatctcaaatattccactttccaacaattactt

SEQ ID NO: 38920 - DNA, 454 bp, Glycine max
gtgacgggaagggagtgatgttcttcttaagagaggtgagtgcagagcaaaaggtggggcggctggattcaaagttgcaattgtgggggctgctggaggaattggtcaatccctttctttgctgatgaagatgaacccattggtttcagttcttcatctttatgatgttgtcaacacccctggtgtcacagctgatgttagccacatggacactggtgctgtggtaatttccttttcatagggttattgattgtcaattaaattgtaacataagactgagttgtagttgttgtgttaatgctgaggctagttacaatagtttttattggagtatatgatcaattagtttgttaagaattatttacacatggttaggttaacaaaataaataggagcattgtaattcacttttcctatcttttaatcaatatgacatctcttgagacttattctc

SEQ ID NO: 38921 - DNA, 376 bp, Glycine max
aagctagtttatcgtgaggagtatatgaagttgctcgatttctttgttgctgcggagctggggtagcatggccatgccatggctcaagctaccaaaggttccctcttcgaatgaaaactgtctatggtgagcgttcttcggaggtaaaatgcgcaagttttaggcttgctgtggaagcacacaacatacgagcctttaaaaccattcctgaagagtgcgttgaaccaactaatgactacattaatggcgaacaatttacatcagactctaaaacagttaaccaacaagctttcttttatgctagtgaacgcgaagtccatcacaactaacatagttatattcggcatagatgacaccgtactctctaatatccata

SEQ ID NO: 38922 - DNA, 385 bp, Glycine max
gctctaccggtcttgacgacccaggccgacccacgcgtccgaccacgcgtgcgcacgaatgggtcacattatcaacatggcacaaggcatacaggcccttaagggcaactacaatgtgcataaaccccaacctcctaaatcttcaagtaatcttgattttgcatctaaaaaactgaaaaattcatcaaactctatgttggttctgaaaaaagattcaatttttatgcaaaactcttgctcctttacgatttcacgatcagcggctacagactgtatgcttgacggtgcaagcagacgtccacgatccgcccgcaaatcctcaggccattccagaaccgtacgcattcccggcgacaagtccatctctcaccggcactttatgttc

SEQ ID NO: 38923 - DNA, 460 bp, Glycine max
tttaaatggtctttctggtggatgcatttagtagggaaattttccttttttgtttgtaatggctgtagatgagagaactctacaactggcatgatgttgccaaaaggactgaaattgtatatgatcgtgctttcaagtgctccaatcaaaatctacttgaacgtctctcacgatacctcttttgtggagcatgggcgggcaagctgtttttcttggttatgattgttggattcttgttatggcagctattggaattatggcagcctgcagatgatatagaggaggtaccagatttcactcttccatgcagctgtgatgaagagatgttggagaaaaactcagtgaaatgagtaatgtgataaattattttggtgaaccatggagttaatgttttgcagaatatcaaaagaatacaagtgctggtaacactaatccaagttcccagatcttgaaatggaga

SEQ ID NO: 38924 - DNA, 446 bp, Glycine max
ctgctacttactactatagtgtctgattcacaggccagagggcaaagattttgagcacaatggcctcgacacagtgctttttgcaccaccacgccctcaccactccagctagagcttcaacacagcgcctagttgtgagcaccaaaccaaaccacattgtttgcaaggcagcacagaagcaggttactgtccaagagggtgaggacactactactggccttgtctctcgcaggttggccctcactgtgctcattggtgctgctgctgttggctctaaggtggcacctgctgatgcagcctatggagaagctggtattttacccttttgccccttctttagatgaccaactgatgattgtcatgcatgactcatattcattcagaacctcaatcgtgcagataattgaggtcaaatatggctaatatggcttgcaaactttgtttgg

SEQ ID NO: 38925 - DNA, 316 bp, Glycine max
agctgctgttcttgcgcgtgaacaagcctcttgtaagccaaaaccatggttaagcataacgagtgttatcccaaacggacacttgcgtaagcactggcagaactatgtgaagacttggttcaatcagccagcacggaagacaaggagacgattggctcgtcagaagaaagctgtgaagatataccccagacctactgctgtacctctcaggcccattgtacatggtcaaactttgaaatacaacatgaaagtgagaggtgtacggttaatttatcttgattaactcatggttgtatgtcttaatagtcaatttgta

SEQ ID NO: 38926 - DNA, 388 bp, Glycine max
  unsure (1)..(388): unsure at all n locations
cccacgcgtccgcccacgcgtccgcccacgcgtccgaatccttcctcggactagctccgtctgcgccttccgcgcgctctcaatagaacacatctggtccctcgaagcccctctccgcgacgcccactggcgctccctctacggcctctcctaccctgtcttcaccaccgtcgtcgacaagctgaaaccccacatcgccctctccaacctttccctcccttccgactacgccgtcgctatggtcctctcccgcctcgcccacggcctctccgccaaaaccctcgcctaccgctactccctcgacccttacctcgtctgcaagatcaccaacatggtcactcgcctnctcgccaccaagctctaccctgaattcatcaagatccccgtc

SEQ ID NO: 38927 - DNA, 240 bp, Glycine max
gaaaaagaaaaaagaaaataatgtctctagttactgcagagatcaaagccaaagcagaggtgtatcatggagatgaactctgccaagagaagtcaaagttgctgctaaaggaggtagggctacctaatgggcttttgccattgaaggacattgaggaatgtggctatgagagggatagactgtttatggaacttagtcagcacacattggttaccaatgcctttcaacacacttgaccaa

SEQ ID NO: 38928 - DNA, 421 bp, Glycine max
cccacgcgtccgcggacgcttgggcggacgcttgggcgatataactagaaacagtctgatgggaattaaggtacttgctttcgtcgttgctacaattttgttagcatgtcaatgccatgcgtacgatatgttcactgtccgaatgaacactggctatggcgcccctactccgtgaagtgaaatgtcgcacgttggaagcttgctgtggaagcacacaacatcttctgctttgagactaatcctgaaaagtgcgatgcatcatcaaatgaatacatccatggcaaacaatatacatcatactttcaaacagttaaccaacaagcttacttttatgccatagacctcgaaattcattctaaggacacatttgtgtttagtatatattgcaccgtactctctaatatcacatactacgaaaaac

SEQ ID NO: 38929 - DNA, 446 bp, Glycine max
cccacgcgtccgaattgcttctgctgaacgttatgacattgctgtatgtgctgcggattggcgtcttacggcgtttaaatcagttgatgatagtacaagattctggatcaagggttgaaggttttcagttcaaggtcttttagggaaagaaatgtgttccagtgcttttgttgatggaacaatggtgatttttcgtttggcaccacaggattatcaccgtttccattttccagtatcaggaatttttgagcaatctgtagatatccctggatgcttgtatactgtgaatcccattgctgtaaatagtaagtactgtaatgtcttcacggagaacaagagagttatttcaagaatttcaactgtagattttggaaaggtggcatttgttgcaataggagctacaatggttggtagcattacttttacaaagaaaaagggcgattatg

SEQ ID NO: 38930 - DNA, 449 bp, Glycine max
gtagttgagaactaagaagaaggaaatggcttcctcaatgatctcctccccagctgttaccaccgtcaaccgtgccggtgccggcatggttgctccattcaccggcctcaaatccatggctggcttccccacgaggaagaccaacaatgacattacctccattgctagcaacggtggaagagtacaatgcatgcaggtgtggccaccaattggcaagaagaagttcgagactctttcctacttgccagacctcgatgatgcccaattggcaaaggaagtcgaataccttctaaggaaaggatggattccttgcttggaattcgagttggagcacggtttcgtgtaccgtgagcacaacaggtcacctggatactatgatggacgctactggaccatgtggaagctgcctatgtttggctgcactgatgcttctcaggtgttgaaggagc

SEQ ID NO: 38931 - DNA, 414 bp, Glycine max
cccacgcgtccgcccacgcgtccggtccagtagcgtccatcgtagtatcctggaccatgtggaagctgcctatgtttggttgcactgatgcttctcaggtgttgaaggagcttcaagaggctaagactgcataccccaacggcttcatccgtatcatcggattcgacaacgttcgccaagtgcagtgcatcagcttcatcgcctacaagcccccaggcttctaagtgtgaaaaatttgcaaagcatttgtagccgccaccccactttgtttgtttgtacttaaactacattcccatttgtttttgctttttgagatttcatcatcctgtatttttggtttctgttttcggacttcaatggaaattaatggatgagaactaatgaataagctattgtgttgtgttgctttgtttc

SEQ ID NO: 38932 - DNA, 429 bp, Glycine max
gccaaaggccatatcatcttttattattcgaaataatgtgcgggatcatacacaagattggggggaccctgcattttggaagggccaagaaataggaactctaaagggaacaccatggtgagcacaaaggtttactccaaggaaaacaccatggagagtacaaaggtggacacttaggagaacaacgacattgggagcacaaagagggacttgtggataagatcaaggacaagatccatggcgatggccatgacaagggtgagaaaaagatgaagaatgacaataagaaaaacgatcatggacatgaccattatggtcatagcatcagccgtgacagtgattagatcttataagttaagcaagagtacaggacgatattagtgacagagtcaggattcctatttctgccttatgagataattcagataa

SEQ ID NO: 38933 - DNA, 332 bp, Glycine max
cccacgcgtccgcccacgcgtccgatggtcttgggctatgcacagcactctctaacctttgttccaacagagagcagtatgcattttgggatgcattccatccatctgaaaaggccaacagactaattgttgaggaaattatgtcaggttctaaagcctacatgaacccaatgaaccttagcaccatcctagctttggacgcaaacacatgaagatacacacatctaataaatcctagcacttgtattggccttccctgctagttaatgacatctctctttccacatttttagattctaattgtggttattgtattaatatgagtgaggaac

SEQ ID NO: 38934 - DNA, 388 bp, Glycine max
cccacgcgtccgcccacgcgtccgatttagtgctgcgtactaagtttttggtttcatcagatccacaccggaattctattcagactctatacatagttacatcgatcctcgcggggagagccaaataacgagatacacaggttttaattctttgagagcggaaatggatacattttcacatgtaccaccaggctttcggtttcatccaaccgatgaagagctcgttggttactaccttaggaaaaaggtagcgtctaaaaggattgatctagatgtgatcaaagatgtcgatctctataaaattgaaccatgggatctccaagaactatgcaaaataggaaccgatgaacaaagtgactggtacttcttcagtcataaagataagaaa

SEQ ID NO: 38935 - DNA, 198 bp, Glycine max
gtagctcataactaagaacgagaagcaaatggctcgctaaatgaactcttccacagctgttaccactgtcaaccgtaccggtaccggcatggttgctgcattcactggtctcaagttcatggctggattacctaccagaaagaccaacgatgacattacctccattggtagcaactgcggacgagtgcaatgcatgca

SEQ ID NO: 38936 - DNA, 240 bp, Glycine max
tcgcagaatacaaggcccagtgctgaagaccttcctgaggatttagctctgattgtaacttgatgttggaaagaggatccgaatgatcgaccaaatttcagtcaaatcatacagatgctccttcgatatctatgcaccgtttcaccaccagaaccgagtgttcctctgctgattacttcatctgagaacgcggtgttgccaccagaatctcctggtacaagtgcattaatgcttggaaga

SEQ ID NO: 38937 - DNA, 345 bp, Glycine max
acgcccacgcgtacgaccacacgtccggtctatcattaacaggcatatcttctacaagaccgtaaacgacaagaccatcacccttgacgtggaaagctctgacaccatcaacaacgccaaggccaagacccaggacaaggaaggaattcccccagaccaggaacaactcattcacgcgaggatagcaacttgaggacggccggacccttgctgactacaacattcagaaggagagtactgttcacctcgcactgcggctccgaggtggcatacaaacctgtaatcagacactaaccggctagagcataaccctataggtcgcaagctccaacaccatcgataacg

SEQ ID NO: 38938 - DNA, 391 bp, Glycine max
ggattacaacaacaacaacaacaacgccttatcccactaggtggggtcggctacatggatcaacttccgtcataatgttctatcaggtggaatactatggaagtccagttagcttgaagagcattgctcaaattagcactcctgatgccagttctcttttggtacagccatatgacaaatcaagcttgaaggctatagagaaaaccatagttagctctgatcttggtatgactccaaataatgatggagaatcgatacaattgagaatcccacagttgacatctgataggaggaaggaactatcgaagatagtggctaaacaagctgaagaagggaaggtggctttgaggaatataaggagagatgcattaaaagcttatgataaacttga

SEQ ID NO: 38939 - DNA, 290 bp, Glycine max
  unsure (1)..(290): unsure at all n locations
aaatttaagggttcgagcatgccgtctcaggggatgctcgctcgggctgcttacggaacttgatatatgaccttgccaaagagtgctgggctaatgtgctctagtgtcctgatgtgcgcgcgacttttaatgatgatgctacggtccccatcatagggctaatagacgtgcaggacaagaggggcctgatgaatctgtattgcttggggtcaatagatgcggcttgttgcttgtttggaagacgcangctaagccatacagaaatacgtgacatatatggcacgcggcat

SEQ ID NO: 38940 - DNA, 415 bp, Glycine max
cccacgcgtccgggcattggagtcgccatacccctgagggtgctaaacttgaagctgagtggaatgccaagtttgcagaatatgagaagaaatacagtgaggaagctgcagagctgaaggctattattactggtgaattaccagctggttgggagaaagcacttccggtgagtaaactaacaaacttccaggtttctcttaatatttattctgggctaaatctccttattagttgaatgatgtctaatccaattttattggtgcccttataatgagaaaaattctgaatggtggtgatttgtttccatgatttgttataatcattagctttcctaattacagttaaaattcatattaagtagcatgtgcattgcatcttcactcatcatccctatttttgcttcatgataaaact

SEQ ID NO: 38941 - DNA, 384 bp, Glycine max
ttcttaattcttaaatcttaatttcttacacacacacacactcttactctggtatgtatataccgcaaccactcgcgtcgtcactgtcacagtcaaaggccaaggcagaaccctaaattgtctcacactttcgtaggaatccgattttggctttttccgtgacaagatgccggcgaatgacgacggctccgacaaggagaagtgccttgatctctttctgaaaatcggcttatacgagcgcaccgctaaaaacaccggcgcaaacaacaaagtcaccgccaatcttactgcagtcatctacgaagccggtgttattgatggatgcagccgaacggttggaaatcttctttacacgggtgcaacgaaataccctgcaaatgcctt

SEQ ID NO: 38942 - DNA, 324 bp, Glycine max
gccacgcgtccgcccacgcgtccgcccacgcgtccgaaacgccgcagtctggggtctgggagaaaccctaatgggagagcgcggaggtggcgaacgtggtggcgaccgaggaggtttcggacgcggcttcggagggcgagggcgcggaggcgacaggggccgtggtcggcgtagaggtcctcgacgtgaggaggaggagaagtgggtcccggtgactaagctggaacgcctggtgaaggaaggatgaatccgaagcctggagcagatcgacctgcactcgctggccatcaaatagcaccagatcatcgacgcgctggtgggccc

SEQ ID NO: 38943 - DNA, 332 bp, Glycine max
agaacaagtagttgagaactaagaaggagaagcaaatggcttgctcaatgatctcttccccagctgttaccactgtcaaccgtgccggtgccggcatggttgctccattcactggcctgaagtccatggctggcttccccaccagaaagaccaacaatgacattacctccattgctagcaacggtggaagagtgcaatgcatgcaggtgtggccaccagttggcaagaagaagtttgagactctttcctacctgccagaccgtgatgatgcacaattggcaaaggaagtagaataccttcttaggaagggattggttccttgcttggaattc

SEQ ID NO: 38944 - DNA, 305 bp, Glycine max
cccacgcgtccgcccacgcgtccgagatgctacaggattggtagttaaaggggatctcgatgttcattcagtttatgctacttctctccctacttcacatccaagtttctcacctcaaagggtactggaaatgtcggagacctggaaagccagtgctctacctaaacatgctgttaaactttttattggagttctttctgcttcaaatcactttgcagaacgtatggcagttcgaaaaacatggatgcaagcagctgcaatcaagtcttcagatgtagtagtgcgattctttgttgcattgaatc

SEQ ID NO: 38945 - DNA, 323 bp, Glycine max
tcgcgagataactagaaacagtgtgatgaaaatgaaggtccttgttttctttgttgctacaattttggtagcatggcaatgccatgcgtacgatatgttccttatgctaatgaacactgtctatggtgcccgtactccggaggtgaaatgcgcaagttggaggcttgctgtggaagcacacaacatctttggctttgagaccattcctgaagagtgcgttgaagcaacaaaggaatacatccatggcgaacaatatagatcatgctccaaaacaatttaccaacatgcttactgttatgccagagacttttaagtgttttccc

SEQ ID NO: 38946 - DNA, 393 bp, Glycine max
cccacgcgtccggagaaggatgtgccctgggtaccctcttggccttaaggtcattcaggcaagtttggccaattcgttgcatggatttaactggagattgcctgataatgtgaggaatgatgattcgaatatggatgagatttctgggctctctacacctaagagactaccactggaaactgtcgaggagcctaggctttcataccatctttattctctctgagcagtgcctttgcacaaagcgattctctctaataacattgacgcatggataatgggtcttgagtgagattatgattgtcacactggatcgcaatatattgttctatctattcataacaatggtacacagagatactgggcttcttggtcatggcattgatgtcagtcatt

SEQ ID NO: 38947 - DNA, 435 bp, Glycine max
caaacacatgccatggcaccagcgtcaacgtgtatgaacttcaacctgtcaacaccattcaagggtctctctttatctgcttgttcatcattcttcggtggacagtagtggttctattcgcacagctcctgtctcggtggagcacttgacgcagcactaccctctgaccatagagaacactcacaagacgggggcgggcatcaccaagaacggacgcgactcgcagggcaagcgcctctgattcaagacttacggtgaccactgtcgcaagcccggatacatcatcggtctccagcgcggaacctagtctcatgcaggaaagactgtgtcgctggtcatagactatcccatgatctccttgattgatggacttgtaaaccctgagaaatattgacctgacatgacataggtgagtgattaccctacagaagtaca

SEQ ID NO: 38948 - DNA, 266 bp, Glycine max
catgtcgtagagatctaataacactgacttgggttactcaatgatcttcttcacaggtgttacgcaccaggaaccgtgccggtgccggcatgggtgctccattcaccggactcaaatccatggctggcttaaagactaggaagaccaacgatgacattacctacattgctagcaatggatgcagagtccaatgcatgcatgagacgacaccaattgggatgaagaatctagagactcttgactacttgccagacgatctatgatgc

SEQ ID NO: 38949 - DNA, 396 bp, Glycine max
cccacgcgtccgcccacgcgtccgcccacgcgtccgcccacgcgtccgcacactttggtgggcacagcaacaataacaatggcagcctcactacaagctgcagctaccttcatgcaacccaccaaggtgggcatggccactcgcaacctcaaatctacacaatgcatttctaaggcttttggcttggaacccgctgcagctaaactcatttgctcccttaagcccgatctcaaagattttgctcaaaaatgtgtcgacgccaccaaaattgcaggattcgcccttgccacctcagctctcgttgcttctggagcgagtgcagaaggtgttccaaagaggctaaccttcgacgaaatccagagcaagacatacttggaagtgaagggaactggaact

SEQ ID NO: 38950 - DNA, 402 bp, Glycine max
gaagaaagagacctgaaagtgtcgcactttcagatcgtgagctcgtaaaacctcacacaccagggggcgtcactggggcgtacatgcacctccatgaactacttatgtgaaatcactgatgctctatggttcattactgacggtttacctgccaacggcaccttatacctgggtgcaaaacccttcgacctgcacggaactgtggtgatcggtgcttttcactgtatcccagaatgctacatcatctgtcttcctgtagtcataaagttcgtcataatcatggctacatgctgctcgttttccccgatggggcctactcggttcgcctcgggaactaggccttcattaagcacatgatcaaggtgatcaaagtcatgtactacttcattaccttcatggtgg

SEQ ID NO: 38951 - DNA, 444 bp, Glycine max
agaagaatgatctccaccccaagtcacaaattcttaaagagtcattagtcagtaataaatgtggtaatgttccaaaaaatgttgatcaacgtaaaaatgaacagaatcttacagcaaggaagcaaaatcataaagagaacatggctggaaatattgccactactactaaggtggagaaaagagcatatccatcatttgaagcttttacaatagaggaagaagaaggttcacgtggttatggcaccgtttaccgtgctcaaagaactactgatggaaaacgggttgcaataaaatgtcctcatactaatgctcataaaaaccatgtaaataatgaacggagtatgctcgagcgttttggtggtaaaaactatataataaggtatgagggctcttttaaaaatggcaacagcgactgctttgttttagaacatgttcaccatgata

SEQ ID NO: 38952 - DNA, 161 bp, Glycine max
gcaattcaagggacgaaccggcgttaacttgtcctaagaataatcgggagcgacaattgaggattatgccgatcagaaccatcgccgatggaaggcctgaataggcgactaaccctgccacgttgaaggcggttttggctgacttcatgtaaaccttcatc

SEQ ID NO: 38953 - DNA, 384 bp, Glycine max
atgcgccccgctttaattatcagttataagaattaagatagcatgtctttgctactttgcgagtaaaaaaggaaaaaaaaaaaaaaaaaaaaaaaaaaaaaaaaaaaaaaaaaaaaaaaaaaaaaaaaaaaaaaaaaaaaaaaaaaaaaaaaaaaaaaaaaaaaaaagggggggggcgttttaaaggatcaaagtttacgtacgcgggaatgcaacgtaaaaatttttttataggggaaccaaaattaaattaacgggccggggtttaaaaacggggggacgggaaaaaccctggggtaaccaaactaaatggccttgaaaaaaatccccttttggcaaggtggggaaaaaaaaaaaaggcccgaaccaatggcctttccaaaa

SEQ ID NO: 38954 - DNA, 387 bp, Glycine max
ggagtattcaaaatatgcagacgttgcggggactcctactcctggttgtacggaaataccgacttgtacggtttggcttgagaggttggacccatatacgagggggattctcacaacactttgcgaccactcatttgattgaccttgtgtgtcaaaggggacgtatttatcttgccaggtttgtagattctggcagcaacacgatgagaagccaacctgatttatttgcggaacattagatgatctctgggtttgtatgatttgtggatctgatggatgtggaagatataaagaacgacatgctatgtaagcttggagagatactcagcgttgctattatcttgattataaaacacatctaatttgggattatgtgggtgacaatta

SEQ ID NO: 38955 - DNA, 449 bp, Glycine max
cccacgcgtccgcccacgcgtccgcccacgcgtccggtggaatccgacaactgaagatcaagctattgatcgagctcacagaattgggcaaactcgtcctgttactgtgacacgaatcactataaaagatacagttgaagataggatactggctcttcaggacgacaagagaaaaatggttgcatctgcttttggggaagaccatgctggcgcgtctggaactcgccttacagtagatgatctgaagtatcttttcatggtgtagactctagaccactccttgcttgttcttcccatgatggatgatttgaagttttgttttgggtggtttggcatggagttaggatggttcttaaggaggagggtatgactgttttttgagtacctgctgacatcggttgcacaagttggcaggcaaggcgaggcttggttgatccaagtggtaactt

SEQ ID NO: 38956 - DNA, 407 bp, Glycine max
  unsure (1)..(407): unsure at all n locations
gtttgttgtgagctataanctagtttatcgtgaggagaatatgaagttgtttgttttctgtgttgctncgggaggtttgggagcatggccatnccatggcgcangctaccaaaggttccctctccgaatgaaaactggctatggtgagcgttcttcggaggtaaaatgcgcaagttttaggcttgctgtggaagcacacaacatccgagcctttaaaaccattcctgaagagtgcgttgaaccaacaaaggactacattaatggcgaacaatttacatcagactctaaaacagttaaccaacaagctttcttttatgctagtgaacgcgaagtccatcacaacgacatatttatattcggcatagataacactcggctctctaatatgccatactatggaaaacatg

SEQ ID NO: 38957 - DNA, 226 bp, Glycine max
  unsure (1)..(226): unsure at all n locations
ggaagacaacncgacaaaaaggccgnaacagaagcaaaccnaaagaaggcnggcgnccacacangggagcagnnaanncncaagganccacancnnancacnccaaangcaccnncanacaaancagcaangagagagaancngnngaggcaggganacagaanngnnggaancannggagaccaanggagcgancngcnnggagaccacagaggcgaaagcagga

SEQ ID NO: 38958 - DNA, 268 bp, Glycine max
aggcacacgtacggaggcgagaaacagacagaacaaccatgcgctcgaacgggataaaggtggaaacggaaaaccaaaaacaatgcctccagcaagtgtaatgacgaggcttattttgatcatggtgtggaggaaacatatcagaaaccccaacacctacaccagcctaagcggcctaacttggtcactcatttcattcaggtcttttacttcttctgacttcgagagctcgagctggagtattattattcaacattcttttcttttt

SEQ ID NO: 38959 - DNA, 408 bp, Glycine max
  unsure (1)..(408): unsure at all n locations
gacccacgcgnncgnccacgcgtccggctattccttcctcgttatggagtcgcgagtgctgtcacgcgccggaaccttgtcctccctccctgacctccgcaagccgccgcgggaggccgtctccagcgcctccctcgtcgccgtgaaggccgtgggctccgtcgcggacggcggcggcggcggcggcggcggcggcggtggtgaggtggaaactccaagggccactgggaagagagggttctctgagactgttgatctgaaacttaatcttcattccaaggaagatctgaatgagaatctgaagaatgtctcaaaggagaagaccctccttaaggatcctgccaagccaccggctaaggctcaagtggttggttggccaccagtgaggtcatacaggaagaacatgat

SEQ ID NO: 38960 - DNA, 358 bp, Glycine max
  unsure (1)..(358): unsure at all n locations
gacccacgcgnncggccacgcggccgcccacgcgnacgcngaagggnanagccgaaaacctttcagaagaagaaaggaacggcncgaaagagagggncaaanccanggacacagacaacagnggaacaancacaancgaagaggggaaagccggncgcccaaaanngggaacgaaacnanccgaagcagaagcaaggcaganganggaagcggccgacgcaganggaaacggaaccanngaanacanggaaggaagaaccgcgaccacgcacangaanagaanggaaagagaggancaccgananaaagccnnngaacangncgacaanngaaagagcggggacancacaaaggaaga

SEQ ID NO: 38961 - DNA, 247 bp, Glycine max
gtgagtcgtcaagatgcacacatgaaggattaaaatccacaacgatcaggaggctgaaccagctgaatttgaggaatcagtcggacaggcattgacagatctgactaataccaacaatgagctgaacagtgatatgaaagacttatacatagactcaattgaacacatggatggcattggtaaccatcaggatgtggtgatccatgtccgctacagattaagagaaggattaccgaagattcatgtc

SEQ ID NO: 38962 - DNA, 274 bp, Glycine max
caatatcgaacgagttaaaaaaaaaaaaattataaaaaaatctcaaaaaaaaatataaccatggtataataatggagctattgcaggaacgaaccaaagaccatgcataactaccatgaggaagaacatcgtgaagctgacaggacaaacactcccattccaactgaactgctagagcttttaaagcctatccctgcaaaacgctaaaatcaatgaactctctaagcaaatggatgatacacagtacccaaaaacattcttatataatgaaaac

SEQ ID NO: 38963 - DNA, 145 bp, Glycine max
cagatagttgagaacttttaagagaagttttggcttcctcaatgatctgttccccaggtggtaccactgtgaaccgtgcccgtgccggcattgactctccatacactggccttaagtccatggctggctttcctaccagtttgac

SEQ ID NO: 38964 - DNA, 450 bp, Glycine max
aatgggtcacctaatttctttcaattcactttcattatagtatttcctgattttccttcacacgctgctgtgtggtctttcttaatttgcctcttcttttctcttttcttgttgtcgaaccatcttggaaaagaagttggctgatgctgatgtctctgaggaggatcaaaacaacctgcttaaatttttagagaaaaaggaaactgaatatatgcgccttcagaggcataagatgggtgttgatgattttgagttattgacaatgattgggaaaggtgcatttgttgaggtcagagtctgtatggagataactagtgatcatgtatatgcaatgaataagctgaatatattatatatgcttcgtatagtccaggttgtgcatgttaaagctgtaagggtatttcttgcagaggttgactgaaattgctttgtctaagctttattgttctt

SEQ ID NO: 38965 - DNA, 229 bp, Glycine max
attcaagtagttttttctcggctttatattgttcttaagcctacgctttcttgaatccaattgtggatattatgccagtaatacccttactcttttttcttttagcttttgtttggcaagctgctgtaagtttcttatgatatctgttattcgtgttatgttttttaatcttacaattaatcatttattattaacaacttttcatattcctaatatactttatatttta

SEQ ID NO: 38966 - DNA, 370 bp, Glycine max
cccacgcgtccgagtgaatgccccatctgcttagaagagttctatgtagggaatgaggtccgtggcctgccctgtgctcacaattttcatgttgaatgcattgatgagtggcttaggctcaatgtgaaatgtcctcggtgccgttgctcagttttcccaaaccttgatcttagtgcactgtccagtctccgtgctgagcctgaacaattttctgccagtgttgtgacaacagccagatatgtgagaggccaaccatctagtctaagttaccggctaagattgcagggtcttctgtgtccagtccgtgctgaaattgcaggaccagttggtgacatagataatgcgttgaaaaatgctcagaatggcgttg

SEQ ID NO: 38967 - DNA, 246 bp, Glycine max
gaagcattagcaaaagcaagaagaactagtctaagcataaatggcctcttcagtgatggcatctgtggccctcaaacctgcccctttaactgttgagaagtctcaattagaagcctttccttccttttaagggacttctcttcattcaaagttgttgccagtggtggcaagaagatcaagactgacaagccttatggaattaatggtggcatggctttgagggaaggagttgatgcatctggcacg

SEQ ID NO: 38968 - DNA, 452 bp, Glycine max
cccacgcgtccgtccacttcgaaagggttaggtttacgaagaaacaccaatcctgtccgagaaatcaacgatgcctcgctatgatgataaatatggtaatacccgcctctatgttggacgcttgtcttcgaggacacgttcccgtgacctggagcgtgtcttcagcagatatggaagaattcgaggtgtagatatgaagaatgattttgcctttgttgaatttagcgatcctcgggatgctgatgatgctagatatagcttggatggtcgtgatgttgaaggaagtcgtatcattgtggaatttgccaaggggggtcctcgtggttcccgggaaaacttgggtcggggtctacctcctggatctggacgatgctttaactgtggcattgatggtcattgggcccgagattgcaaagctggggattggaagaacaagtgttaccgttgtgggg

SEQ ID NO: 38969 - DNA, 437 bp, Glycine max
  unsure (1)..(437): unsure at all n locations
ctgatgtgcccccatctatgactcaaaacggtaggtcaagcagatattcctttggctcaagcaatggcaatggtgatacccctgcacaaaatggctctgctgttatcaatgttgatgattatgatagtgatagctccaattttgcaccatccacgccatcaactatgtcaatggctgttccagcagaactaggtggagctgtacccttgatcaacagattccaggtggatggatttttaaaattaatgcagaaacaaattcaatctgctgggaaacatggatttttttctaaaagatctgtangtccccaagttcgagaaaaagttacatttgaggacatgttgagttttcaaaaggatccaattccaacatcattgctcaagttaaatgttgattttgtaagtagggcaacaaaattattccaaataattttgaaa

SEQ ID NO: 38970 - DNA, 242 bp, Glycine max
gactcttgcatgcacttcaatccttcgtagcattaatgttgtggccaagtcatcatgagcgtcatacgtatttctttgtgaatgtaaatcaaaattataagagagaaaatggtgcttttgtactacagattactataaataaaaaacttttatggttttcaaaaaaaatataattaaaaaattaataaaaaatatattaaaaaattttataattattatattttaaaatttttaaataattt

SEQ ID NO: 38971 - DNA, 327 bp, Glycine max
  unsure (1)..(327): unsure at all n locations
cccacgcgtccgatagactatcttatanaataatataaataagaataaaaaaatagggaaaaaaaaagaatctatataaatataaaaataatatatataaggtacaaatagtaaatcgaggtacccattttatgataaactttccttccatttttgttcttctagtaggcctagtatttccggcaattgcaatggcttctttatttctttatgttcaaaaaaacaagattttttagattcagaaaacaaaggtaaattctggggttttttatttcccaattattatactaaattcaaaaaaagggggaggatggggtttaatttttt

SEQ ID NO: 38972 - DNA, 344 bp, Glycine max
ggttgatatggctgacggtaggaggctactgggaccgaatatagctgtccaggggaacgtcgaccctggtgttctttttggttcaaaagagttcatcactgatcggataactgatactgtgagaaaagcaggtagagggaaacatatcttgaatcttggacatggcattaaagtaggtacgcctgaggagaatgttgcacatttttttgaggttgctaaatcaatcagatactaagaagctaattatgattaattaattcttttgtttgaaaaaaaaatttataaaaattaaattatgggggggttgtatatattattaatatattttggtgtaaatttatatt

SEQ ID NO: 38973 - DNA, 373 bp, Glycine max
ggaaaaaccggggcgacccacgcctccggttcctttcaatttccctcactttgtctgttcccaaacgcccctctctcttctccaatggccgaccagctcaccgacgaccagatcgccgagttcaaagaggccttcagcctcttcgacaaggacggcgatggttgcattactaccaaggaacttgggactgttatgaggtcacttggtcaaaacccaactgaggcagaactgcaggatatgataaacgaggttgatgctgatggcaacggaaccatcgatttcccagagttcctcaacctgatggctcgcaagatgaaagacaccgactcagaggaggagcttaaagaggctttccgtgtgtttgacaaggatc

SEQ ID NO: 38974 - DNA, 262 bp, Glycine max
  unsure (1)..(262): unsure at all n locations
ttcaaacagttccttttttctcacacacttcctttgttcgacaccgcagtttcagggggagatccaacattgttcaatccaaattcaacgcattccatggngaatcctgcatccggacgattctatgctcttgttctgctacatcgtttgctagggcccatcgtgcacggatgtggaagttccgactttcaaaactggaaagcacgggcacgctaagtgtcactttcgtggaattgatattttcactgccaagaaaccttgg

SEQ ID NO: 38975 - DNA, 274 bp, Glycine max
cccacgcgtccgctccgccacttctgtttctattgaatcaacaatcatgtcggacgaggagcaccatttcgagtccaaggccgacgccggagcctccaaaacctaccctcagcaagccggtaccatccgcaagaacggctacatcgtcatcaaaggccgcccctgcaaggttgtggaagtttcgacttccaaaactggaaagcacggtcacgctaagtgtcactttgttggaattgatattttcactgccaagaaacttggggatattgtgccc

SEQ ID NO: 38976 - DNA, 459 bp, Glycine max
cacgccgtctcggctctatggcctacctctctaacttcttcttatttgttctctcacgatctccactagcccttctcttgttggtgcttttacttaccaaggcgactgactcgactcgatactcgtttcgtttcaaccttcaacaaagttcaacctcagtctcaactcaaaccattatgcgtccaaaaaggatgcttagtatttcatacctctggggtgttacaacctcaccaaagttggcagcaacggcgtgcccacctcgggatctctcggtcgtgccctttacgctgccccaatccagatttgggacagcgaaaccggcaaggtagccagctgggctacatcctttaaattcaacattttcgcacccaacaaatcaaaacggcatcgtggtggttgtccaatggacaagtggcggagattctcgttacctataatgcccgcacgagcctcttggtt

SEQ ID NO: 38977 - DNA, 347 bp, Glycine max
ggtgaaatggcaatgtgcacaaattttttgcagggtcaagcctctgaatgggcattggtaagacgtcattcatctgaagatttatttggtgtacaaatctgtggggcatatcctgatactgtggcacgaacagttgaactaatagagcaagagtgtacaatagattttattgatataaatatgggttgtcctattgacattgttgtgaataagggtgctggatcagctcttctaacaaaaccaatgcggatgaaaagtattgtagaagttgcttcatgcacagcggaaaaaccaataactatcaagggacggactggttattttgaaagggagaatcgcattgattc

SEQ ID NO: 38978 - DNA, 348 bp, Glycine max
gccaggtttacaaggtgtccatcgtagcagcttgtgggctttcatggcccagtgaccgtctcgttatccaagtcctggacgattcaactgacactgtcattaaggaaatggtggagcaagaatgtttgagatgggcaagtaaaggcatcaacataacgtaccaaataagggagaacagaacgggttacaaagctggtgcgttgaaagaaggcctcaagcgaagctatgtggagcattgcgagtacgtggcaatattcgacgcggatttcaagccagagccagactttctcaggcgagcgattccattcttggtggggaaccctgagattgccctggttcaaagctcgt

SEQ ID NO: 38979 - DNA, 448 bp, Glycine max
aatcacacaccaaacttctgaaaataatggaaatttcaaagcatactaatcggtcttatgaagattttgatccgctgtttatgtggcgtagagaagagggtcgtgacacccttgaacttcaccttccaggttttaggagagaccaaataagaattcagataaaccatgttggtttattggtaataagcggggagcgtcattttgaaggaaacagatggaaacgtttcaagaaagaattcgaaatcccatcatattgcaatgacgatgcaatccatggcaacatgatgcagagcattctttcggtggtgatgccaaagaaaagtcctcaaattagccaagaggagcaagaacacaagaaagagagaagggcaaataaaaaagaagacaccgaagaagcctcaaccaaagagggaatagctgaagaagatataggtcatgcataagagta

SEQ ID NO: 38980 - DNA, 460 bp, Glycine max
  unsure (1)..(460): unsure at all n locations
gtgatcatgggcttgatgtaatggatgtgctaaagaagaatgcctctttagctttgccagtcatattaactcgcttgaagcagaaacaggatgagtgggcaaggtgtcgtgctgattttaataaagtttgggctgaaatatatgcaaagaattatcacaaatcacttgatcaccgtagtttctactttaagcagcaggatacaaaaagcttgagcactaaagtcttactggcagaaatcaaagaaattagtgagaagaaacgaaaagaagatgatgttcttcttgcaattgctgctggatacagacagccttttattcctcacttggaatttgtgtattctgatccagagattcatgaagatctgtatcaactcataaaatattcatgtggagaaatgtgtacaactgaacagntggataaagctatgaagatttggacaacatttttagaacccatgct

SEQ ID NO: 38981 - DNA, 289 bp, Glycine max
cccacgcgtccgcagcattgcgaattgatgtggacaagaatactaagaaatcgcttactcgtgtcgttgttactcgagctgatattgatatgaaagacataaaggcagagtaccataatctatatggggtttctttaccccagaaagttgaagaggttgctagagggagctacaaggatttcttgctaaacttgattgttagaggaggctaattgaagaaattgaaaagagaacaaaaacttggaagatcaaataaaaaaggaaaattttttcctcccagttttccttg

SEQ ID NO: 38982 - DNA, 282 bp, Glycine max
tccacgcgtccggccactcgtgcgtacacgtttacgaagcaatcaaagacggcaagcacagcggagcattcaatgactcatagatagcaaaatacagtcgtcatcattcgtcctggaaaggcgaaaacgcgttaccgtcgctacatatcacgccgtgtaccaatcatcgtgtacagaacggaaggagccaaagccgttaaggcctttcgaaacatcccgggcatagaagttgataacgtcgctaggcttaaccttctgaaacttgctccaggacgacacctc

SEQ ID NO: 38983 - DNA, 338 bp, Glycine max
cacttgctaatttgggctatgatgttacatttatacaaggttctcttagtaatggagagagagacaaagttgtcaaggagtttaaagatggtttgactcaagatcttatatcaacagatattcttgctcgtggctttgatcagcaccaggttaattttgtcattaattattaccttccaaataaacacaatttaccggatgaaccaaactatgaattgaatttacacacagttatcagtgctggtcgcagtggatacactattgtaccatataatgtactatcgatttgtcaagcgcacgtgtaattttatggctcatgatgagcacattcattgtat

SEQ ID NO: 38984 - DNA, 446 bp, Glycine max
gcgcgcagatggaactcgatacgatagtttgaagatggctcagtgtgtgtgcaacacagggctgcaaggtgaacacgtcctgcagcggcagcaactgccactgcagaagctcctagagcggctgaaaccgctgcggaggctgcgagatgtacccagacttgagctacactgagtcaaccaccaccgacaccttggtcatgggagtggcacctgctaaggctcaatttgagggtgctgaaatgggtgtgcccgctgagaacgatggctgcaaatgtggaccaaactgctcctgcaacccctgcacttgcaagtgaggtgatgggagagcaagctttaagcagagatagcccttaattaggaataatgataaactattaatgtgtagctaaaaacttatggataatgtctgtgatgggtttcgtgcactctggtgttttggggtaaac

SEQ ID NO: 38985 - DNA, 338 bp, Glycine max
tcctgaagcggcaaaagaatacattcatcgcgatttttatacatcagactcaaaacagtgaggtaaatcttacttctatgcgagagacctcgaaatccatcccaaggacacatttgtgttcagtatagatggcaccgtactctctaatattccatactacaaaaaacatgcatatccactggagaaatttaactcgaccttgtatgatcaatgggttaacaagggctaatcaccgtcactgccctaaactcttaagaattacaacaagcttctgtctctttgctttacatttgcatctgttacagccttattttacaacgtttttccttactagaata

SEQ ID NO: 38986 - DNA, 308 bp, Glycine max
aagtcgcctagaactacgaagatggaaatgttttcttcaatgatctccttcccagctgttgccaccgtcaaccgtgccggtgccggcatggttgctccattcaccggcctcaaatccatggctggcttccgcacgaggaagacctactatgtcattacctccattgctagcgtcggagtaagagtacaatgcatgcacgtgtggccactaattggctggaagacgttcgcgacttttcactacttgccagaccttgacgatgctctatttgcataggtagtcgcgttcctcgtaaggaaaggatggtt

SEQ ID NO: 38987 - DNA, 445 bp, Glycine max
cttgtattcacatttcaacaactataaccattgctttctcctcctccaaggcagttttccgtgcctgctctttttgcctatttgcatctttggctgttgctggcgatttctccattgtgggctattcatcagaggacttaaagtccatggataagctcattgaactctttgagtcatggatgtcaagacatggcaagatttaccaaagcattgaggagaagctgcacaggttcgatattttcaaggacaacctaatgcacattgttgtgtgaaacatggtttttagcatcatactgtctgtcttgattgattttaattattttagcctctatttgtccattttcattttttttttactatagttttattattttatattgagttggttttttattttttgctttttatatatttttattcctttttttatttttttttttttttt

SEQ ID NO: 38988 - DNA, 457 bp, Glycine max
cccacgcgtccgtggtcttagaaatggttttaagaagaaaaaacattaaggctgaagtagacaactcgagtgaaatatattttcctcattggatttacaatcgtcttgaatcaaatcaagagcttggtttacaaaatataaaaaatgaaggtgatgaccaaatggtgggaaagatgacaatagttggcttgtggtgcatacaaacccacccttcagctcgaccagccattagtaaagtgatggaaatgttagaaagtaaaatggagttattgcaaattcctcctaaaccttttctgtcttctccttcaacctctccggttcatttatcatgtgagacactatagtttagaagaatatatactaagatgtagcctttgttgtagtacattgcacttattactatttttcttcttcttttagtttggctttatacattgatgagtaagtgcagcgttaa

SEQ ID NO: 38989 - DNA, 282 bp, Glycine max
cccacgcgtccgcgccgtgcgcctcagaattgttctcttcgcctccggagttgcgtccaggggaagctgtcaagagcttatcttctaagggaaggctacagtgaatggtaccttgtgtaatacgcctcagactaaagttcatcctgcgaaggatgttatctatgtgaactggtacaggctatcttagaggcaatcttataatgattatctttgcattgaacaaactcaaagggtttatatgttcatctgcttagaacatagttaaatttttgattagattat

SEQ ID NO: 38990 - DNA, 188 bp, Glycine max
cagacgcgttccatcgcttgctttcacatttttgctccaagagctgcctcttggctgattgtctctgtgttacagacaggcttttctaatgttattaaagatttcaagtatgttcattctcatgagtgggtgaaagtcgattgaaattactcaaccatcttcataactgatcatgcacacgatcattt

SEQ ID NO: 38991 - DNA, 340 bp, Glycine max
cgcacgcgttcgtggatttgagccatcacttttccgaactggacagatggttgggattgggaatcagtatagctagatcttcattatgagaaagaacgacaagcaatgaacgttgacaaggcacacatccactcattcagcattgctaaagtcacagatagaacccgggaccacatacatgcaaaatcaggatactagcaatatgacgagcacactgcacaatccaggaaccataaaatcgtcaaactagcgtactgagatcaccgaatattcaagagcaaattaaactactcgttgcaatataccatcaattgcactaccacaatatgtaatagaaaag

SEQ ID NO: 38992 - DNA, 437 bp, Glycine max
attgtttgttgttgtaactcgagcttctgctttcggtgctctgtgtttgtgcttgattttggtctcacctgaaaatgtattgctgcggaggtaactgtggttgcggaagctcctgcaagtgccgcaacggctgcggaggctgcaagatgtacccagacttgagctacactgagtcaaccaccaccgataccttgttcatgggagtggcacctgttaaggctcaatttgagggtgctgaaatgggtgtgcccgctgagaacgattgctgcaaatgtggaccaaactgctcctgcaacccctgcacttgcaagtgacgtgtcgggagagcaagcttcaagcagagatagcccttaattatgaataatgataaactattaatgtgtagctaaaaacttatgtattatgtctgcgatggttttagtgcactctggtgatta

SEQ ID NO: 38993 - DNA, 321 bp, Glycine max
cccacgcgtccgcccactcgttctaaaaaattaaaaaaaaaaaaaaaaaaaaaagaaaaaagaaaaaatacaaaaaaaaaaaaaaaaaaaaaaaaaaaaaaaaaaaaaaaaaaaaaaaaaaaaaagggactgccacttaaaagaatcaaagctaacgtacacgtgcatgcaacgtaaaaccacttctatagtgaaacctaaattaaattcactggccgtcatttaaaaacatctggactggaaaaaccttgacattaccaaactaaatcgacttgcataaaaatccccttaagcaaattgtcttaatagcaaaaaggccca

SEQ ID NO: 38994 - DNA, 441 bp, Glycine max
cccacgcgtccgatatagcccatgccctattcaaccaaaccctaacacacacgcatttgatgtcagtttccatggctagcctcaaggttgcatttttggctgcagtgctctgcatggttgtggtgagtgcacccatggcacatgcagctatcacgtgcgggcaggtgacgagtagcctggccaattgcatcggttacctccagaagggaggaacgccgtcatcgggatgctgcaacggagtgaagagcctcaatgccgccgccaagaccaccgacgaccgccagactgcgtgcaactgcttcatgtcggccgccagccaaatctgcggcttcaacgccgacaacgccggctagctctccggcaaatgctgagtctgcataccttacaagatcagcacctgcaccaactgcgctaccatcaaggttttgaagagaaagtcat

SEQ ID NO: 38995 - DNA, 439 bp, Glycine max
  unsure (1)..(439): unsure at all n locations
ctcacgcgtacgcattaacagctagaatggctcttaggcgcttgctgacgtccatttactggctctacactcatggtctggcgagagaaaggcatgccagagactaagattttacggcatgctagctgcccaaacaactgtattccaagatcattgcaagatcatctaaagcctgacccttcaagtgatgaaatcgatgatcaccctatgctgattgtagaaacacagtgctgcgtaacctgcttgtataaagaataccgttattcangcataacattgaacgtacaattcagcaagactctctttcaacaaccatggggtgtcggtacatggttaaaggaaattaatgacactactaacgaaggatatactttcgaagacctatgcatcaagaacgaagcccttgagggagaaagaaacgtttcggcataatccttgg

SEQ ID NO: 38996 - DNA, 324 bp, Glycine max
gtcctactgaggtgtgtgtatacaattactttcacatacacacagttgttaaggatgatcggatagtgatgaagaggacgttcatttcggcggttgttttgcgagcatgctaggtgctgggaatatcccaatacgctgatgctagaaacttggctgaaaaatcaaaggacgaggtcaagaagccagaaaattgcttacatagaaggtccatcgttggtgccagaggaattgaagacgttggtgcagctgatgaatacatccatggcgaacaatatagatcagacttcaaaacaggtaaccaacaagcttacttttatgccagag

SEQ ID NO: 38997 - DNA, 320 bp, Glycine max
gaagcagaaagagaagcattagcaaaagctttaagaactagtctaagcagaaatggcctcggcagtgatggcatctgtggccctcaaacctgcccctttcactgttgagaagtcctcagttagaggccttccctccctctcaaggaactcctcttcattcagagttgtggccagtggtggcaagaagatcaagactgacaagccttatggaattaatggtggcatggctttgagggaaggagttgatgcatctggcaagaagatcaagactgacaagccttatggaattaatggtggcatggctttgagggaaggagttg

SEQ ID NO: 38998 - DNA, 261 bp, Glycine max
cacgaacaaccccgacgccgacggctccggttccgtttttcgccgacgcctccaactcaggatgtacgggaacatgtaccgtatcatgttctacacggagttcgagggcgaggaggatcccatcttccagaggcttagggccttgaacggacagaggagacgatcggcacatagcttataatataactataacgatttgattacgatcttgagaccctgtttgaagggtaacttggacatttgtaaggaggtgaacgaaac

SEQ ID NO: 38999 - DNA, 382 bp, Glycine max
cccacgcgtccggtttcttacaaggctctactctactgcttcaccttctgctctagaaaattcagtggtgatacatggcttcggctactctctctgtagccaaaccagcccttcaggcaaatgggaaaggcttctctggattctctggccttcgcaacttatcaagcttcctttccttttctagaaaatcttcagaggatttccattctggcattggctttcagacctatgcagttggaagccgtggaggataccagaaaggtgtgacacaagccaaactgaaagttgccataaacggatttggaaagattggaaaggaacttcttgaggtgcttgcaccgtcgcaaagactcccctcttgatgtcattgccattaacgaca

SEQ ID NO: 39000 - DNA, 284 bp, Glycine max
cttacatcaatgggttctggcagaacctggtccttgaaggcttaaccatttggttgttgcctatgatgattaatcaacttatgccctatggggattttcggttgcagcttgttcaaacacgtggaacctatcacattttgtggaaaaactccgggaaagattgtccctccaagaggccctagtgattttggatgggaccctattttagaccctgagggttatcaccaagcttttccacagatccccaaagaagaaaacaccaaattttaccactgttcaaaatt

SEQ ID NO: 39001 - DNA, 451 bp, Glycine max
  unsure (1)..(451): unsure at all n locations
ccacgcgtncgcccacgcgtccgcccacgcgtccggggagaacagttgttctctactttgagcaaagccggaggcaaagctttcagtaacatggctgttggttataacaacgtggatgttgatgctgcaaacaagtatggtgttgctgttggaaatactcctggagtgctcactgagacaacagctgagttggcagcttcattgtctttggcagctgctagaaggatagttgaggcagatgagttcatgagggcaggattatatgatggatggctacctcatctatttgttggaaacttgctcaagggacaaactgttggtgtaattggagctggtcgaattggatccgcttatgcaagaatgatggttgaagggttcaagatgaacctaatttactatgatctctaccaagccacacgactagaaaagtttatcacagcctatgctacat

SEQ ID NO: 39002 - DNA, 422 bp, Glycine max
tagaaacagtgtgatgaaaatgtaaggtcctggtttcttcggtggtaccaatgtggtagccttggcattccattcctaccatatggtcccttttcgaatggacacttgctattgtgccccgtactccggaggtgaaatgcgcaagttggaggcttgctgtggaagcacacaacatctttggctttgagaccattcctgaaaagtgcgttgaagcaacaaaggaatacatccatggcgaacaatatagatcagactccaaaacagttaaccaacaagcttacttatatgccagagacctcgaagtccatcccaaggacacattttgtgttcagtataaatggcaccgtactctctaaatatccatactacaaaaaacatggatatggcgtggagaaattaactcgaccttgtatgatgaatgg

SEQ ID NO: 39003 - DNA, 387 bp, Glycine max
accaggcgcacgttagcacaaactatcatggccacggcaacagcagctgccacctcgtcctttatggggacgcgtcttctggaggctcactccggagcggcgcgagtgcacgcccgattcggcttcggcaagaaaaaggcttccgtcccaaagaaagcctgcaggggatcgggccgagacaccgacagacccctttggtatccgggcgccaaagcgcacgaatacctcgatgggtgactagcctgagactactggatacatccgagagggctaggcaagcccacctagtacctgaaaggctagctggactcgcttgaccagaaccttgcggaagaacgttgctgaggtcatgattggaaccaggaccggactcgtggacctgaagat

SEQ ID NO: 39004 - DNA, 455 bp, Glycine max
gaacgaatggaatgtataaaaccaaccaatagcttcacaatctttcttgcacgccattggggatcacttccgatagctctcacaatcctatggcggagaacaacaacaaccaccaccttgaaaccgccaccagaaggcttgcctctgtgaccaaccacctcacttccggtgggaacaacagcttccgccgcgtccacggagaagttccatcccacgacgtcgtttggaggatcgtcgcctccgaccacgacaactccggcaaggacttcaccgacattgtctacgagaaggccgtcggggaaggaatagccaagataagtattaataggccagagagaaggaatgcgttccgaccccacacggtgaaggagcttatgcgtgctttcactgatgccagggatgatagctctattggggtcgtcattctcactggcaagggaaccgaagcattttgt

SEQ ID NO: 39005 - DNA, 429 bp, Glycine max
gattgtcgtgactcgttcttcttcgtcgttatcttcttcttttgttgtttgtgtgtctgggctttctctcacctgaaaatgtcttgctgcggtggtaactgtggttgcggaatcgcctgcacgtgcggcaacggctgccgaggctgcaagatgtacccagacttgagctacaccgagtcaaccaccaccgagaccttggtcatgggagtggcaccagttaaggctcaattcgagagtgctgaaatgggtgttcccgctgagaacgatggctgcaaatgtggagctaactgcacctgccacccctgcacttgcaagtgaggtgttggagagctaaagcttcaagcagagatggcccttataaataatgataaatactatatgtagtttcaaaacttcaaaattatgtaatatgtattatggtgcactctg

SEQ ID NO: 39006 - DNA, 351 bp, Glycine max
  unsure (1)..(351): unsure at all n locations
cacgcgtccggnctcgcttggtggcggcacgaggccagcacgtgaccatcattaccacccccgccaacgctgaactcttcgagcagaacatcgacaaggacaccgcctccggccaccacatccgcgtccacatcatcaagttccccaacgcccacgtagggctaccggaaggcatcgagcacctctccgccggcaccaacaatgaaacactctccaccggacgtcttcatccctgacatactcttcacctggaccaaagacttctcccagaaactctncatctcgcggctagtcttcaaccctatatccatcttcgacgtctgcatgatccacgcccttaaaacccaccct

SEQ ID NO: 39007 - DNA, 216 bp, Glycine max
atttaaacaagttttacatggacttacacaaacagcacgcacggtacaactgcgcaacttataacgcagaagatggcctactgaacggaggaaagcccaagaccgaatctcatagagcccatcccaaacttggtgagaataagaatggagccaccaccaaagccaggaaaccccccggcaaaggggaaacagtctaagacccttacaaggccaaga

SEQ ID NO: 39008 - DNA, 422 bp, Glycine max
gagaaagagagagagagagtgagaaactgttttaaattcgcaaaccctaagttcggaaaggggggctatggctgtctccaaggatcgcgagaacttcgactacatcgccaagctcgtcgaacaggccgagcgatactaagtgatagtggaatcaatgccgaacgcagcgctactagacgccgcaccaactgtaaagcagcgaaagaccctaacaagccaaagaggcctcctagtgctttcttcgatttcatggatgacttcaagaatgtattcaacatataacatcctgaaaacaaatcatcgtctgctgtgggcaaagctactggagcaaaatgcaagaccatgtctgatgctgaaaaagcaccttatgtggcaaagtctgataaaaggacagtggagcacgagaagatcatgccagccta

SEQ ID NO: 39009 - DNA, 429 bp, Glycine max
  unsure (1)..(429): unsure at all n locations
cccacgcgtccgcccacgcgttcgcccactcgttcggtcagtctcgaaaaggattaccctgaccgtggtgatgagggtacatgtgacctaaataagaaaaatgctattgttgctattgatgactacggatggcttcctaccgaaaatgagacaatcttgaaacggagcattgcaagtcggccagtggtcgtaattattgcaacagacgacgatgaatttcaatattatgaatcaggtatattcaaagggaaatgcggtacaaaagtaaatcatgctgtcctgcttgtggggtatggtacagaaaatggtgaagattattggatagcaaagaattcatatagtgataaatggggagataatggctatatcagaatanaaagaanactgagcacttgtaaattggaatcgaggttactatcccatatagag

SEQ ID NO: 39010 - DNA, 455 bp, Glycine max
cccacgcgtccgcccacgcgtccgcccacgcttccgcaattccaatcaccaattcaaaaccggtcttcccttggaacaaattgagagatcgtgatggcaccaaaggcggagaagaagcccgcagaggagaagaagtccacggtgggagacaaggctccggcggagaagaagccaaaggccggaaagaagcttccgaaggagggaggcgccggcggagaagggaagaagaagaagaggaacaagaagagcgtggagacatacaagatctacatcttcaaggttctgaagcaagttcaccctgacattggtatctcaagcaaggccatgggaatcatgaacagcttcatcaacgacatcttcgagaagcttgcccaggaatcttctagacttgcccgctacaacaagaaacccaccatcacttcgagggaaattcagaccgcggtcaggcttgtgct

SEQ ID NO: 39011 - DNA, 441 bp, Glycine max
  unsure (1)..(441): unsure at all n locations
catcgctggaacttccatttccggtgaccggaaaaccccatcaccgtcgccgaaatgggaaccgttaacaacaccgtcgacaccgtgaatgctgcggcctccgccatcgtctacgctgaatccagaatccaacccaccaccaccgtcccgaaaaaacgctggggaagctgctggagcttatgttggtgttttggacctcataaaaacagcaagagagtgggcaatgctgtccttgttcctgaacctgttgaacctataggcccagttggatttcatcctgctactgctgcaccaaatccttcaactgctattgtaatgccattcattgtccctccctcttcacctgcatcttttctccaatctgatcctncatctgctactcaatcaccggttggattattctccctcagttctctcactggtaatgcttctggtggacct

SEQ ID NO: 39012 - DNA, 212 bp, Glycine max
  unsure (1)..(212): unsure at all n locations
taccaaataaacttccttccattaaaccaaaatcccggggcaactttttcaaagggntngaacgagctccccaaaatccacgnaaccgggggnaaggcgccgcggaagcagctggcgactaaggcggctcgcaagtcggctccggcgaccggcggcgggaagaacccgcacagattcaggccgggaaccggggcgctgcgcgagatccggaa

SEQ ID NO: 39013 - DNA, 217 bp, Glycine max
  unsure (1)..(217): unsure at all n locations
aaagnacaaaatagatttggaaatccaggtacacaccccattctacccatttgccgaggcgagagaatcatatgcccccggaacaaaggagtatgtacatattccaattcaacagaggaatgggaagaagagtcagaccacagaacaagggctaaagaaggagttcagctacaacaaaaacctcaaagaccacaaaaaggagatcagcttcaacgga

SEQ ID NO: 39014 - DNA, 273 bp, Glycine max
  unsure (1)..(273): unsure at all n locations
cggacgcgtgggcggacgcgtgggcggacgcgtgggcggacgcgtgggaaaccctagtctcgatacatcaacttgggaggttaaagagacngcaacgttgtgctgtccgccttgaccgagccaganctttcgtcttggccctcaattttgccctgtaaaactaatcccagtcacaacagaaataatcaatggcaccgaaacagaccaaggctgagaagaagatcgcttacgatgcgaagctgtgcgacctaatggaggagtacggccaaatcc

SEQ ID NO: 39015 - DNA, 321 bp, Glycine max
accgacgcgtccgtttgatcctcattgccgtctcacaaagtgtgtttagacattgaagttttacccaagggtgggctgaagccggcgaaagagccgcgaggctcacttcaccgctgcgtcgagcgtgcgtcgcgttctgatgagcgcagcctctgtcagaccgatgcttcagtcgtagtacagcagcgcggaccattccgggtcgcaaggacaacaaggtgcaggtggtgcagggatcctacatgggccgtgagagcaaactggtgcacgactatcgccacaagtgggtcattcacatggggcgcatgacccgctagaagg

SEQ ID NO: 39016 - DNA, 427 bp, Glycine max
acccagccagcgttgttgttttacacacttggtggttgcaaatagcattaccacaaagtggtgacggctccagatccgtgttagtcttgtacgaacgaggatcattggcacgattagtcaatgaagtcccatatccacgttcttgtgaagcacgttttcgagcggttatcaatgccatacttcctagcgactaatgactctaggcacatttttaatatctggcttagactaacggcgtggagaatgatgcaggctaccgtcttgtgattagcctttgagcattctatcatgcgattgatgagccatgcgtgatgccttctaacagccaaatgtgtatggtgcatccatattacaaacgaaaccagtctatctaccttgacaccattaatatggattcacttgcccggaaagccctggtcattgcaga

SEQ ID NO: 39017 - DNA, 434 bp, Glycine max
tcaagaatgagggtattttgattgcaaaacttcagcatcggaaccttgttagactcacgggcgtattgcattgaaggagatgaaaaaatcctactttatgaatacatgccaaacaagagcttggactcatttatatttgacccgacacgaacttcactactggattggccaatacgatttgagataatcgtatgcattgcgcgaggcatgttgtatcttcaccaacactccacattgagagtgattcatagagacctgaaaaccagctacattcttctagatgaggagatgaatccaaagatatgagactttggtctggccaaaatatttgggggaaaagaaactgaagcatgtacagggagagtaatgggaacctttggatacatgggtccagagtatgccttggacagattcttttcaaccaaatacgacgc

SEQ ID NO: 39018 - DNA, 292 bp, Glycine max
  unsure (1)..(292): unsure at all n locations
tccacgcgtncgctcacacgtacggccacgcgtacggataaagcccgtggaacagatgacgtagaagctgacgcgagccctgcttttgagctccttacttcagtaaaaagtctggtgcgccctgatttccacgtctaggccctaaattggggggctcgcgaagggggtgcttatactgcagaagctattgctgaaatgcttggtaattcgggaacaccgtgcgttatgagaggtcactctgaactgatgcagctgttgaatgtatcaaatgagcctgtgggagataaacatg

SEQ ID NO: 39019 - DNA, 341 bp, Glycine max
cccacgcgtccgttgatcgagagcggacgtacctttatatatatgctttttcctcaatgaggtgtgcttcatgatccatattgtccttgaaagatgatggaactgagacaccattggccactgagttaattaagccacatcctcaaggagaagaatatagtcctgttagcgaagccttcatgcctgccagcgaatgactggaagctcatatttggctactgacaaaggcttatgttctcgagaatgatgcatgcatccatgctattattagccatttggtaagaactcatgcaattgttgagccattcgtcatatcaacaaacaggcatcttagtgtggtt

SEQ ID NO: 39020 - DNA, 242 bp, Glycine max
cccacgcgtccggcgagagagagagagagattggcatcacttggtggcaatcgtgatgtgggaggaagccagaacagccttgagatcgatggtttagctcgctttgctgttgaagaacacaacaaaaaacagaatgcccttttggagtttgaaaaggtagtaagtgcaaaacagcaagtggtttctggtaccttgtacaccatcactttggaggcaaaagattgttggcaaaagaacgttta

SEQ ID NO: 39021 - DNA, 418 bp, Glycine max
  unsure (1)..(418): unsure at all n locations
acacattgccacttcttaattttcttattttctatggcttccaacaaactccttgccaccggtttggtgctttctctcctcttttactcaacattcactcatgccaattgcccaccacccactccaactccatctccatctccgaagcccacaccacccacaccaccaactccaaaaccaacaccttccactccaaagcccacgccaccaactccaaaaccaacaccacccacacccacacccacacccacaccacccacaccacccacacccaaggctggttgtcctccaccttctcctccttcgccacccaaagcttcatgccccaaggacacattaaagctaggtgtttgtgctgacatcttangacttgttaacgttactgttggaactcctccttcgagcgaatgctgtgcat

SEQ ID NO: 39022 - DNA, 389 bp, Glycine max
aataaaaaaacatacattaaagaaattattttaaaaaaccaaataaaaaaaaaaaaaaggggggacataaaataaaattagaaaggatgcctctaaatgaaatgaaagtatgacatgaaaggtcgtacacgtatctcacaagtgttatgtgatatgtatgatgtgtgaatcttgaaataatatcttaagggcacgaagttattagttaaaattattagaggtagctttatgaatgggtcataataataaatgctagctatatgtaccactatggaataagattgggtcataataataaagctagcttgctagctatatgtactatacgttactatggaataagacccatactagtgctataggggcttgctatatgcatgtgtttcatc

SEQ ID NO: 39023 - DNA, 287 bp, Glycine max
cccacgcgtccgcccacgcgtccgcccacgcgtccgctcaaagctattatttttctcctttgttgcagggaaacaccaccccatgttgtctaaatggcttcttttcatctttctcacgtactactcaacctatctcactgtatcacattcgttgaaaattccaaggttgagtcccattgctgaatgggaaacaactttacacaaccgtgcaactgtggttgcaactgatacagatacagagaacctcattacattttactaccaacaagttcttgatcactttaact

SEQ ID NO: 39024 - DNA, 296 bp, Glycine max
  unsure (1)..(296): unsure at all n locations
gtccgatctgaagctctatgagatacgactgagagtgngacaaaaactctttttgcggctgcaccggctgctttacatacgctattatctgaccctgagatggaatcaatcctgcatgtagcttgatcagctgcgctcattcaatttgcaagcaagaagcttttgtttgctgaggaccgagagcaaactgtgaaacaacttggcgagttcttgaacaccaacgttgcccccaaagaactggttgatgaactaaaggacattgaaaaggctcttttaccatcctctaccgataataa

SEQ ID NO: 39025 - DNA, 475 bp, Glycine max
  unsure (1)..(475): unsure at all n locations
tcgcccacgcgttcgctcgaatctcttatctgctttgtagattgagtcaaatcaaagtaagcgaagcccagattaagcaccaccgtttctgtcacagtcaagtgtcgtcggtattgcctcctccatctaatttgcaacaccaacagacacagtgtgatccttctcacaccgcagttcccaggaattatattggggaaaatgtatctagaaaagataagaacaaatatctttacactacgcttcttgaactcaacgacagtaaggaggctgtttatggtgctcttgatgcctgggttgcatgggagcaaaacttccccatcgcctcattgaaaacaatattgatttctcttgagaaggaccagcagtggcatanggttgtgcaggtaattaaatggatgctgagcaaaggacaggngatgacaatgggcacatatggtcaactgatacgagccttagatatggaccatagagtcga

SEQ ID NO: 39026 - DNA, 412 bp, Glycine max
agaatatgattttttatccccctcgaggctgctacaaaggggttcgtagcatggccataccatgtcgcacgctaccaaaggctccctctccgaatgaaaactggctatgctgatcgttcttcgaaggtaaaatgcgcacgttttacgcttgctgtgaaagcacacaacatccgagcctttaaaaccattcctgaaaagagcgttgaaccaacaaaggactacattaatggcgaacaatttacatcagactctaaaacagttaaccaacaagctttcttttatgctagcgaacgcaaagtccatcacaacgacatatctatattcggcatacataacaccgtactctctaatatcccatactatgcaaaacatggatatggagtggaggaaattaatgaaaccttatatgatg

SEQ ID NO: 39027 - DNA, 410 bp, Glycine max
cttcagataaacacctatattgagacaaccttttacaagaactgtgacttgtaaccccataagagatccattaacgagggagctctatcaagaacatcccctatcccatcataacactcgttacgacttctaagaactacttgctttacctaacacacttcaaagataatacccacacgctgtacgactcctatggaatcacacaacattcgaccctctaaaaccattcctgaatacagcctataacctacaaaagactacattaatggccaacaatttacatcatactctaaaacagataaccaacaagctctcctttatgctagtgaactcaaagtccatcacatcgacatatctatactcagcatactatacacctcactctctaatatcccattctattaaaaaca

SEQ ID NO: 39028 - DNA, 377 bp, Glycine max
cccacgcgtccgctggataatctactggtgtatctattcgagctctatatggtgctagacgagtcgtacagctagcgactcagctagctacacacgctataggagcttcaacagtcgctgccacttcacgtcctacaaatctggacctattgaataacttggcaactgactaggctattgactactcagaagataaccctgaagatttgccagaaacatatgatgccgtttatgatgccatcaggccatgtgacacggctgataacgctatcaaagacggctgaagcaccgtggctcttacacgagctaggacaacagctggcttcacattcgaagttactagcaatggagctcttctgacgaaactaaacacttac

SEQ ID NO: 39029 - DNA, 421 bp, Glycine max
ctctgcgcagcaccctacctgtgctttatgatgcatatctccgcatgacccttaccggcctgaccatcacccttgaggtggtaagctctgacaaccatcgacatcgttaaggccaagatccaggacaaggaaggaattccccctgatcagcatcgtctgatcttacgcggaaagcagctcgaggacggccgtaccctcgccgactacaacatccagaaggagtcaacccttcaccttgtccttcgtctgcgttgtggcatgcagatcttcgtcaagactctgactggcaaaaccatatccctagaggtcgaaagctctgacaccattgacaacgtctaggccaagatccacgacaaggagggaatccccccagaccatcaacgtctgatcttcgacggaaagcaacttgaggacggtcgca

SEQ ID NO: 39030 - DNA, 448 bp, Glycine max
  unsure (1)..(448): unsure at all n locations
cttagtgtgcgtccaccccaacgtctatataaaggattacggatgggaaatattgaaactgtcctttccagcagtattgctgctgtcttttttgcagcttttgtcgttgctggaactatgtggtatggttcagcaacaacccctattgaattattcggtcctactcgttatcaatgggatcagggatactttcagcaagaaatatatcgaagagttggtgctggactagccgaaaatcaaagtttatcagaagcttggtctaaaattcccgaaaaattagctttttatgattatatcggaaataatccagcaaaaggggggttatttagagcaggttcaatggacaatggagatggaatagccgtcggttggttaggacatcctgtctttagagatnaagaggggcatgaactttttgtacgtcgtatgcctacttttttttgaaaca

SEQ ID NO: 39031 - DNA, 398 bp, Glycine max
gcgcccacgcgtacgctaacgtgtcttttgatttatacacctacagtcacactctttgtcatggtcaagatgtgaagatgtcgaccctgtcaaggaagagactgatgagggattttaaaagattgcgacaagatcctgctgctggcatcagaggggctccccaagacaataatattatgctttggaatgctgttatctttggaccagatgacaccccttgatatggtggtacgtttaagttgacactttagtttacagaggatgatcctaataaaccacctactgtgcgacatgttattcgaatgtttcatcctagcatttatgctgatggcagtatatgcttggacattttacagaatcaccggagccctatttatgacgtatctgcaattcttacc

SEQ ID NO: 39032 - DNA, 228 bp, Glycine max
tattacctcattcactggcctcaaggcaagctcatacaaatttagtgccgcatttaaagtctcaactccccaagccacaaagtctttcatcaaagcttctctgaaagacattgaagtctctattgttgccactgtcgctattgcattgctcactatcaacgccatgaccattgaaatgttgctgtgtccttataacacttctcttagctttccttcccaacaatttct

SEQ ID NO: 39033 - DNA, 334 bp, Glycine max
accgagataactagaaacagtgtgatgattttgaaggaccttgtatttcttcaatggtacgagtttcttagcatggcaatgccatgcgtacgatatggccaatttcataatgaacacttgctattgaaccctaactccggatgagaaatgctcaagttgcaagcttgctgtggaatcacacaacatcacaggctttgagaccattcctgaatagtgcattgaagcaacaaaggaatacattcatggcgaacaatatatatcagactccaaaacagtttaccaacaagcttacttttatgccagagaccttaaagtccattccaaggacacattt

SEQ ID NO: 39034 - DNA, 381 bp, Glycine max
ctaaaactaaatacccattggatgagttacatttcttccgaggttgctcctctaatatgcctaatattttctgcaatatcaattgctacattatttctttatgttcaaaaaaacaatattttttacatacaaaaaacataataaaactctagtgttttttattccccaattataattctaaattcaaaaaaaggacactaatgagtataatcttatcatcatactatgtactaatatattccattacatatgttctaataacaagcaatttattttttacacttaacactttatcaagtccattttaattaatgttcatttcaatttccatttttcttattaatacatttgttctttatttttaacaaaattatttatttt

SEQ ID NO: 39035 - DNA, 371 bp, Glycine max
cgagatcactcgaaacatcctttttaaaatgaaggtacttcttaacggccaggttacaaacatggtaggatggcaatgccatgcgtacgatatgttccctctcctaatgaacactgtctattgtgcccgcactcctgaggtgaaatgcgcaagttgtaggcttgctgtggaatcacacaacatctttggtctctataccattcctgaagagtgcgttgtagcaacaaatgtatacatccatttcgaacaatatatatcatactccataacagttaaccaacaagcttactcttatgccagatacctctaatttcattctaatgacacatatttgttcatttaatattcactcttctctttaatattttatt

SEQ ID NO: 39036 - DNA, 472 bp, Glycine max
cagagcgacgcgtcggctcactcctgctgacacacgtacttgaatttcagcccacatagactgacactttggaggcgagttcagcttcctcggtttgactctcgtagacatcacaaaccttccctgcattcatcccacgcatggctgccatgaactctagcgaattggcctgcaactatgccatatcaggtgcaacgtgttcggagctcaatgggaaggtcacttgcgtggcctatgttgcatgctctggctacaagttgccattgatcaaagctgacgccagagttcctaaagccaaagaatctgaaggaggaaggagaggtgcccttgatctcttggcagctacccttttcacctctgcagcttccaattcttctgccaatgctgggatcattgaagattaccttgagaggagcaaggccaacaaggaattgaatgacaagaagaggttagctactactggaacaaactt

SEQ ID NO: 39037 - DNA, 466 bp, Glycine max
gtcttcgcaccttagaggacctgccaaaaggtgcatttgtgtgcgagtttgttggagaaattttatccatgaaagagttgcatgagaggaacttgaaatgcactgaaaatgggaaatatacatgcccagttttactggatgctaattgggattcaggatatgtgaaggacgaagaagctctatgcttagatgcagcttcctttggcaacactgccaggtttatcaatcacagatgttctgatgcaaacttgattgaaatcccagtcgaagttgaggatcctggtcattattactatcattttgcctttttcacttccagaaaaatatcagcacaggaagagctaacatgggactatggcattgactttgatgaccacgatcatcctgtcaagctgttccagtgcagatgtggcagtaaattctgcaggaacatgaagagatatagcagatctcttagatatgcgtc

SEQ ID NO: 39038 - DNA, 152 bp, Glycine max
tgaccttcttcgtgtgtggcaaagtttaagtaatcatgggttaagaaaaggttcacattaacattgtcgtcattggacatgtcgactcttggaagtcaactaccactggtcacttgatctacaagcttggaggtatttacaagcgtgtgatt

SEQ ID NO: 39039 - DNA, 345 bp, Glycine max
  unsure (1)..(345): unsure at all n locations
acaaaggcttcaagatgtgtcaagagcttggtcttgtggataagattccaaggcttgtttgttgcccaggctgccaatgctgatcctttgtatttgtactttaaatccggctggaaggagtttaagcctgtgaagtcaagcactacctttgcctctgccattcaaattggtgatcctgtttccatcgacagggcggttcacgccctaaagagttgcgatgggatcgtggaggaagccaccgaggaggagttgatggatgctactgcgcaggcagattccactgggatgtttatctgcccacacactggggttgctttgactgctttgtttaagctcangaacagt

SEQ ID NO: 39040 - DNA, 408 bp, Glycine max
gaaatggcttcctcaatgatctcctccccagctgttaccaccgtcaaccgtgccggtgccggcatggttgctccattcaccggcctcaaatccatggctggcttccccacgaggaagaccaacaatgacattacctccattgctagcaacggtggaagagtacaatgcatgcaggtgtggccaccaattggcaagaagaagttcgagactctttcctacttgccagacctcgatgatgcccaattggcaaaggaagtcgaataccttctaaggaaaggatggattccttgcttggaattcgagttggagcacggtttcgtgtaccgtgagcacaacaggtcacctggatactatgatggacgctactggaccatgtggaagctgcctatgtttggctgcactgatgct

SEQ ID NO: 39041 - DNA, 387 bp, Glycine max
  unsure (1)..(387): unsure at all n locations
cacgcccgtccgtcaaagtcctcctccacctatctcccacttctcctctctccaccatanccattacacantcaccgacctgngctccttccccagcttcctgcgtcccaagtacatnttaccaaattncacctccacctccggtttatnatctatgcttccccnnacctccacctatctacacagtaagctcaaattgtgaaagcaccattcatgatgaatcattttctagttttcatcgaggaataaaggcaagctctattttgagccaagtgaaacatctatcttcctgtctaagttctttgaataaaagtctgaatgtgtcatctctatgctacaatgtttatgattcacatcaggttgattctatttgtttgatggccatct

SEQ ID NO: 39042 - DNA, 259 bp, Glycine max
tcgcccacgcgtcctgtaaaatggaagtaatctgaatatggaggtggacagtctgttgctgggttgatattgcatacggcatcactgaaccatccagcttagctgatatggccgccaatccttcccatgcactggtctatcttgtggttatgctctcagctagagccctgttcacaaacacatggatcgaactctgtggctcatctgctagagatttcgccaagcagcttaaggaacatcatataggcatgcccttaca

SEQ ID NO: 39043 - DNA, 424 bp, Glycine max
  unsure (1)..(424): unsure at all n locations
cccacgcgtccgcccacgcgtccgagcaagctcatcctagagttttaaaaatggcagcaggctccttcatggctctctcttccccatccttggctggcaaggccgtgaagctgggcccatcagcccccgaagtcgggagggtcagcatgaggaagaccgtcaccaagcaggcctactccggaagcccatggtacggcccagaccgcgtcaagtacttgggcccattctctggcgagcccccgtcctacctcactggcgagttcccaggtgactacggctgggacactgctgggctttcggccgacccagaaaccttcgccagaaaccgtgagctcgaagtgatccactccaggtgggccatgctncgggcccttgggctgcgtcttgcccgaactattgtncccgaacggngtcaagtttggag

SEQ ID NO: 39044 - DNA, 453 bp, Glycine max
cccaatcgtgcacagaaattttaggatcgtgcaaccatatgtgaagacgtgataagggagactcgactaggttcaaatgaatatgctggttataaaccagtgatgtgtaaacaccacagaccaactcgtcaaggatttagaaaattatgacatatgatttccacataggagacatgccttatgcaaatggatacatctcacaatgggaccaattcacagctcaagtgcaagaaatttcgtcaacagtaccatacatgattgcaagtggaaatcatgaacgtgactggccaaacacaggatcattctatgatactccagattcaagtggagaatgtggagtccctgcagaaaccatgtattattttcctgctgagaatagagccaaattctggtataaagcagattatggccttgttcgcttctgcatagcagatagtgaacatgactggagag

SEQ ID NO: 39045 - DNA, 441 bp, Glycine max
gcaccacgtacgaatagttgcagagctataatctaacatatcgtgaggagaatgtggactggttagaaatctttagggctgcagtagtcttgatggcatggccatgccatggcgcatgctaccaaaggttacctctccgaatgaaaactggctatggtgagccttcttcagaggtaaaatgcgcaaggtttaggcttgctgtggacgcacacaacatccgagcctttaaaaccattcctgaagagtgcgatgaaccaaccaaggactacattgatggcgaacaatttagatcagactctaagaccgttaaccaacaagctctcttctatgctagtgaacgctaaggccatcacagcgacatctgtatattcgacatcgataacagcgtactctctaatgtccgatactatgcataacacggatatggagaggaggaattta

SEQ ID NO: 39046 - DNA, 421 bp, Glycine max
cttaaaagtagacgagcttcccctcttgctttactctgtttctcttcacttcttttggtaatcattctatagcgtgtgtgttgtgagcacatgaagattctctcaagggctcaagctctgaagtttcggtctcttcccaatcttacatcctacaatattttaattgacatgctttgtaaggcaggagaacttgaagctgctctgaaagttcaggactccatgaaagaggctggcttattccctaatatcattaccgtaaatattatgatcgatcgactgtgtaaagctcaaagacttgatgaagcttgctccatatttttaggattggatcataaagtttgcacccctgactcagtaacattttgttcactcattgatggcttgggcagacacggcaaggtgaatgatgcctatatgcttt

SEQ ID NO: 39047 - DNA, 402 bp, Glycine max
cttttattgttgcttcattgatcatgaaaacgagggggctagattactactgaactacgggttcatgcagctggtgatgccatgcttaccatatgtgccctctacgaacgaacactgactatggtgcccgtactccggaggtgaaatgcgcacgttggaggcttgctggggaagcacacaacatctttggctttgagaccattcctgaagagtgcgttgaagcaacaaaggaatacatccatggcgaacaatatagatcagactccaaaacagttaaccaacaagcttacttttatgccagagacctcgaagtccatcccaaggacacatttgtgttcagtatagatggcaccgtactctctaatattccatactacaaaaaacatggatatggggtggaga

SEQ ID NO: 39048 - DNA, 410 bp, Glycine max
cgacccttggctttatatttctgtacatttatattctcactggggaggaactcacaaagctagctagagactatatcaagtatctatttgggggaagccagagtgtccgactgaaaaatgccatgtatcaatggggacaactctatgaaagcatgacagctcagaaagaagaggaagacgagtattggttgcagaaggccattctggatacaccaacttggtggcacgaccctgctgattaccgtgaagcccttaaaaactacttgctatcacgtacagatgaggccattgccgccaggaattacttagaattagattcagatgcagacgttaggtatggctgggactcatgtgccgaaaaatatgaagatgaagatcaatatcaatataaagatgattatgaagaaaag

SEQ ID NO: 39049 - DNA, 365 bp, Glycine max
cccactcgttcgcccacgcgtccgtaaattaaggtttttgccgttgcaggaataagcaggaatggcgtcgaagataacacgcttggtcaacaaaaaccccgaattgataaggggaatcggaaagtactcgacgtcgcagatgtaccacaagaggggcatttgggctatcaaggtcaaaaacggtggcgttttacctcgccacgaccccgaacccaaacctgaaactgccactgaaaaaccacccttattttaccccgctgatgatgtcaagaaaccccttgtgaacaagcacaaacccaaaccatctaagctcagggctagcattacccccggaacagtgttgattcttcttgctggtagattta

SEQ ID NO: 39050 - DNA, 383 bp, Glycine max
cggacgcgtgggcggacgcgtgggcggacgcgtgggcggacgcgtgggcggacgcgtgggccatggtgagcacctccttcatgaggaagcaacctatgacgaccaagagcctaaagacattccccaacgctctttttggtctgaaaggtggacgaggtggtcgtgtaacttgcatggcctcgtacaaggtgaagctcataaccccagaaggagaagtggagtttgaatgcccagatgatgttttcattgttgacaaggctgaggaagaaggcattgaacttccctactcgtgcagggctggttcttgcgtttcatgtgttgggaaaattgtgaaaggtgacgtggaccagtcagatggtagcttccttgatgatgaacaaata

SEQ ID NO: 39051 - DNA, 109 bp, Glycine max
  unsure (1)..(109): unsure at all n locations
gctttgtgttatgaattgattgccgtagatggtaacactgtgatctggaaaaagccagcagtggagatgtgtctccccaaccaaaatgaatgctatcctgtatgatntc

SEQ ID NO: 39052 - DNA, 407 bp, Glycine max
cccacgcgtgcggtgactcgatcttcttcgtcgctatcttcttctttgaagtagagcgtgcgtttttctctcacctgaaaatgtcttgctgcggtggtaactgcggttgcggaagcgcctgcaagtgcgggaacggctgtggaggctgcaagacgtacccagacttgagctacaccgagtcaaccaccaccgagaccttggtcatgggagtggcaccagctaacgctcaattcgagagtgctgaaatgggggttaccgctgagaacgatggctgcaaatgtggagctaactgcacctgcaacccctgcacttgcaagtgaggtgttggagagctaaagcttcaagcagagatggcccttacgaataatgataaaaactatatgtagtgtcaaaacttcaaaaatatg

SEQ ID NO: 39053 - DNA, 435 bp, Glycine max
cccacgcgtgcgcacacgcatacgttcctttattgtccttcggaaggaagaaaagtatgctgccggtcgatccatactgcctgtgctacaggctgaagaggatgagagatttgttaaagagtggcataaatatctcgagtatgaggcagacgtgatgaaggatgtgcctggttggaaagttgctgaaagtgtgtatcactctgagagatgggtgcccccagcaagtggtgagttgcgtcctgatgtatggtgatgttatttcagccatctctatctgcttctttcattacatgctgctggtacttttgtccagtctctaaattacatgctggtacttttgtgcaggctcttaaataaatttatatcaaaaggttgcaaccctttggaatataatattcatttttaaaaatgttatatgaaggaatcttatttatg

SEQ ID NO: 39054 - DNA, 355 bp, Glycine max
gcaagatgcgagtctctatcttcttcctacgacaaccgtttcctctcgccggaaaaccggcgttcatctctatgtgcgtgcgatccgtgcgccatgagttccggcgagctcctccacatacaaccccaggagctgcagcttccctttgaattgaggaagcacatctcatgctctttgcagccgtctaacaagactgacaactatgtggctttcaaggttaatactacacatactaacaaatatcgtgttagacctaacactggagttgtgatgcctaggtctacttgcgatagcatagtaacaatgcaagcccaaaatgaggcaccttctgacatgcaatgcaaggataagattc

SEQ ID NO: 39055 - DNA, 157 bp, Glycine max
gatggatccagacgcgtcggcaaaggcatccgtggagcactactacagcaccttcgacagcaacctgaacgggttagcggattagtatcatgagggtttcatgctgaccttcgtagggctgaagatccagtgcgcttgcagcatcagtcagtaaact

SEQ ID NO: 39056 - DNA, 281 bp, Glycine max
ttccccatcgacccgcgcgtccgataaaccataaccaggggtattatgaatctttagttttggatcgagcctctgaggaacaaatcgggtccaattccaatatgcctaagcaaattcacaagattaatgacttcctactaactgctaggacgaatgatgcacgctctgcgaaaatcaagcggatcaacgacgtcgtgaagctcaaggtcctctgcttcaagtaccttaacaccctctgtgagaacaaatctcagaatgcataataacatcatgcatcactt

SEQ ID NO: 39057 - DNA, 372 bp, Glycine max
ggatctctgtccggccattcaaggcaagtgaagatgttgacgatgtattgttatggttgggagatgctagagtgactcagaacacacgattaaagacctgtgggtccaggtcagaggctttgacattcctgaaagatgagtgtgttcaccccttacgccggtcaatatgccttgatgatcgttccatagggattgtttgggtgcttccttattcgggtgatgaaaggtacaaagctgacttgggatatgccttagggttcaactgttggggcaatgggatagccactaaggcagtgaagattgttttgtcccaagtcttccatgatttccctcacttgagaaggttgcaagcttatacttatttgcgccaca

SEQ ID NO: 39058 - DNA, 396 bp, Glycine max
cccacgcgtccgcccacgcgtccgcccacgcgtccgcccacgcgtacggttactcatggggaacgcggcgcttcggaacgtgaaggtgctcccgaactcggcaaatatggaggaagctcgtcaccgagtcttccaattcttcagaacggcttgcagatcgttaccctacgtcatggaaatctacaacctctacgacgtcgtttccgtctccgaactccggtcctctgtctgctaccagatccgttagaacatccacgtcaccgatcccaaagtgatcgatatgctgcttttcaaggggatggaagagctgaagaacgtcgtggaccattcaaagcagacgcatcatatcattggtcagtatgtagttggtcaacaagtacaggattcaaccacaaa

SEQ ID NO: 39059 - DNA, 318 bp, Glycine max
ctcacgcgttctctctgcttgggttgcagctcagcttctagtacatctaatgatggagggaaaggaaaagggtcacgtcaaggttgacattattgtccatgttaacggtcataaggactctaccactggcaatatcacttaccacctgatctacattctcaaacgcattatcgagagagttattgagagatctgataagatgaacactaagactaacaagaatgccttcaagcatgactagctgcttgctaagcttaaagcaggactcacaagaggtatcaccttggataatgcctagaccaccattgactattgcac

SEQ ID NO: 39060 - DNA, 458 bp, Glycine max
cccacgcgtccgtgagttttggctttcctcaagtaagtactaatggtttattctacatgaaatatgctttcatttaaatttgacaatggttacaggaattgaagcgctttccaactcttcaagctgaaatagcagaagcagctaatgaggggttagagagattccatgatgacggtaagaagacaacgttgcggctggtggaaatggaatcttcctatatcaccgttgatttcttcgggaaactccctcaggaagttgacaagggaaagaattcagcttcctccttgttagatgatcagtatgccaagggacacttccagaggatcggttcaaatgtttcatcttatgttgggatggtgtcacaaacgttgaagaacaccattccaaaggctgtggttcattgccaagtgatggaggctaagcgatctttattagacccgttttatgcacaactgggc

SEQ ID NO: 39061 - DNA, 364 bp, Glycine max
cccacgcgttcgctgactcatgggcggacgcttgggccaatatagcccaagccctatacaaggaaaccctatcacacacccatgtgattcaagttccatggctagcctcaaggctgcatttttggctgcattgctctgcatgcttgaggtgagtgcacccatggcacatgcagctatcacgtgcgggcaggtgacgagtagcctggccaattgcatcggttacctccagaagggaggaacgccgtcgtccggatgctgcaacggagtgaagagcctcaatgccgtcaccaagaccaccgactaccgccaaacggcgtgcaactgcctaaagtcggccgccagccaaatttccggctttaacgcc

SEQ ID NO: 39062 - DNA, 381 bp, Glycine max
tcggagcatttggggctggatttttgaaacagtcgaagtggaatgatgcatgactagagatgggtcataatgaatatataggcactgctccatatatatcctgctctccttcactacgtcaccatagattatgccagagagatcagttcctgatcctctcatctgatggtttatatcaatatctaagcaatgaagaagtggcttctcatgttgagagcttcatggaaaaatttccagaaggggatccagcccaacatttaatagaagagctgctcctgcatgcaactaataaggctggaatggattttcatgaattgctagatatcccacaaggagatcggatgacgtatcacgatgatgttactggcatggtgatatcac

SEQ ID NO: 39063 - DNA, 346 bp, Glycine max
cttcatgcggcgtcgcagtctgtcaagacttgaggaaaatgagaatcttggggtaaccccgtttgagaaaaatgttgatatctggagacaggtttggcgggttggttttcgccaagatttgcttgttaagggtgtttgattccgagaaccaattttctatcgctggccttaacttgaagcatatgcacgagatggttattagcataaactctcattggtcttgggtaattagggagatcttttaccagcttgtgtgacagagaaatgggtagaggcttttcatgctcataatatcctatatatctcctggtcagcttaagctggttcagcatttgtcgaaggtaaa

SEQ ID NO: 39064 - DNA, 388 bp, Glycine max
atgtctgtgggagatggcgccgtatgcggccggaccgacgtggtcactccattcaccggcctgaaatgcatgcctggcttccacacgaggaagaccatcaatgacatcacctccattgctagcaacgatggaagagtacaatgcatgcacgtgtggccaccaattggcaagaagaagttcgagactctttcctacttgccagacctcgatgatgcccaattggcaaaggaagtcgaataccttctaaggaaaggatggattccttgcttggaattcgagttggagcacggtttcgtgtaccgtgagcacaacaggtcacctggatactatgatggacgctactggaccatgtggaagctgcctatgcttggctgcactgatgcttctc

SEQ ID NO: 39065 - DNA, 439 bp, Glycine max
cttgaagtctccacttatggggctatttgaaaaacgccgagcacgcaagttgttcattagggtccaaatttccaatgaaagggtccccagaaccctggacggaatggcctggccagaatgaattcttaagaagtggttggaaaattccggcttggtggttacccttttaaattcattgggcattctttggcgcttcattggtaagaacgctacttgggttaaccagtacttgacacttggaatagaatgaaggtatatgcagagtctcttgcacgctttcaaggagggtgaccttacatatatcctttggatgggttatgagagcttccccaaggatatgcacggcttagtgctgcctattgtgggacatatatgtttgataaacctgagtgcgaagtataatttgatgaggaacgaaaggttgttgatgtcacatctg

SEQ ID NO: 39066 - DNA, 446 bp, Glycine max
gttttgctactaataatgacaacaacagtgacgacggcgacaaggacagtaacaacgttggtgccgccggagaggaaagtggtggcgacgattcgaaatccaacgttacgacgacgatgcccgaagaagagagaggattcacttcgcagaaatcgacgcctccttccacttctcagaggtcgtctttgtcatcgcttggaccagcatacaacacttttcaagttgattctttcaaacttattgagctccttgggcctgagaaggttgatcctgctgatgtaaagctgattaaggataagctttttgggtattcgaccttctgggtgacgaaagaggagccttttggagacttgggagaaggcattcttttcattgggaatttaagggggaagagagaggatggttttgccaaactccagaatcagctagttgaagtcacgggtgat

SEQ ID NO: 39067 - DNA, 343 bp, Glycine max
tcggtttgaggaacatatataaagggtctggaatagggttgagagggatcaaaacgcacaccagaacacggtactgagttattagtaattgtgttgcgatgtgttgagcaagatagaaggatcaagaaaggataagacgaaagagggaatagggttagggctaggtttagggttaggtagaggatgcctgagaacaaacgtgaggtagcggagaacatgatgattggaaagaacgatgctgaccaccagaagcgagtgctggtgttcacggatgacaggcaggagtacacgcaagtgctgcggatgcttgataacgctcggagcaaagcgatgtgcatccacg

SEQ ID NO: 39068 - DNA, 463 bp, Glycine max
  unsure (1)..(463): unsure at all n locations
aggacattgatgttattccaaatgaagagatgatattggcacttagtgaaaaaggttatatgaaacggatgaagccaagcactgttaacctacaaaatcgtggaacaattggaaaatctgtaggaaaattaaaagtgaacgattcaatgtctgattttctcgtttgtcatgcacacgatcatgtcctatatttcagtgataagggaacagtttactcagctcgtgcctacaaaattcctgaatgtagccgcactgctgctggcacaccacttgttcagatcttatctttatctgatggtgaaagaataacatctattattcctgtgagtgagtttgctgaggatcagtttttgctgatgcttacaatgcaaggctatatcaagagagtatccttgaatttggtttcatcaatcangtcgatcggaatcattgctattcaattggttcctggtgatgagctgaa

SEQ ID NO: 39069 - DNA, 372 bp, Glycine max
  unsure (1)..(372): unsure at all n locations
tccatgtcgtttttgtcgttgatgagcgttttggtctgaaactcgacgccaatggtggctggagaatcgacgttgaattgggtcttggcgaagcgcgcgaggagctgggtcttccccacggcggagtctccgaccagcaccaccttgaacacgtagtcgatcttgtggttgtattcgccgtacaggttcgacatcatccccgcggaagaagaattcaatcgccgatcgtcgtcgtcgtcgtcgtcgtcgatcactacgcgagatggaggaaggtggcggtgctgctgccgtcgttgtcgttgtcgctttgatgaaccatcgccttcttatcttctgtctagctaaaaaaaaaaaaatnaaatattaatttat

SEQ ID NO: 39070 - DNA, 341 bp, Glycine max
gtcacaaatatttgtggcataacaccgttcttttcatgttcaaagggttcaacatgacgggggtgatatggcgctgacattcacgaagcttgttagccggctcttcgcgaagaaggaaatgcgacttctgatggatggtcttgatgctgctggttagaccactattctttacaagctcaagctcgtagagatcgttactacaagtcctaccattgggttcaatgtttacactgtggaaatcaggaacattatcttcactggtttgagatgtttgtggccaagacaagattcttccttggggatgcactacttccatatctctcagggttttatttttgttg

SEQ ID NO: 39071 - DNA, 436 bp, Glycine max
gttcaggctatctacgaaggtgtgcacagtttggacattgtggacgcaaattggagataggcgtcccttgtatgacttgcagaccattacaacgggaagcattgcttgaagtagacactttgatgcacacatactaccttgaattgcaaatatctgtctttagaaacgatgtcgtaaagagttgttatctatatgtatgatcaatcatagtatctattaggacattaatcatcggtagtactaagtgtagtcttggcaccatttaattctcaatatagggatcgagttaattttgtgatgttgaatgttgataacacatagtgggagcaagagcttgacgagtttggcgtggagggtattccacactttgcatttctggatatataaagaaatgaggagggcaattgtgtcggtatgctaccaatacaggtcttgc

SEQ ID NO: 39072 - DNA, 360 bp, Glycine max
gcggtgatttcagtgagtgatcggtggtcacttgatctcatcataatcgtcagcggcaattgaggaagatgccgatgggaaacattgccgtcggaaggcctgaataggctactcacctcgacacgttgaaagctgttctggctgagttcatctcaaccttcatcttcgcgttcgccggctcaggctccggcatcgcctacaacaagctcaccgacaacggcgctgccacccctgccggcctcatctccgccttcatcggccatgcattcgccctcttcgtcgccgtctccgtcggcgccaacatcttctgcggtcacgtcaaccccgtcgtcacctttggcgccttcgtcggcggcaaca

SEQ ID NO: 39073 - DNA, 330 bp, Glycine max
cccacgcgtacgtacttaataggaaaagatgaaaggagtcacacagtaagcccagctctggtctgctacaattctctaacaatggcgacggctttcaaaatggcgactactgtgatgtgagtgacggatgagtgcacgaactcattcatgggaatgaaacgtaagatggtgcacagatacatagtctgcaacatcgatcagaagacagggctcggcaccgttgataaggtcgatggccccggcgagagctatggagatctcccatgcctgttgctcaacgatgattggatcaaggctgcggtcgactttgaattggtgaccgctgataac

SEQ ID NO: 39074 - DNA, 443 bp, Glycine max
cccacgcgtccgcccacgcgtccgcccacgcgtccgcccacgcgtccgaaaagggctgtacgtacctccaaagggcaagcacttgctgatgagtatggtatcaagttctttgaaactagtgcaaaaaccaacatgaatgtggaagaggttttcttttcaatagcaagagatatcaagcaaaggcttgcagacacagattcaagagctgagcctcagactatcaagattaaccaaccagaccaggcagccagtggtggtcaacctgcacaaaagtcggcttgctgcggttcatgaaaagaatcagtatctgtagcaagaggtgcaggtttctgcaatagcactcttctgggtgctaatgttattctgatgacattagaaagtgggagcatgtatttgtccctctgtatcttccaactgcaaatgtcgtgttttaaaattaatat

SEQ ID NO: 39075 - DNA, 341 bp, Glycine max
gcagctgatgaatctgtggtaatctcggatgatctagatgtcatgaaagaggggtgcgccaaatcctttgctccctttccaccagggtgtatgtttcacagtgaaggaggattgatgagctttgagcatccaatgaacaagttgaaagcaatgcctagaatagacagtgaaggggccatatgtggagccaacttcaaggttgacaagtacgcaagggtcaacagcatacctcgagtaggaagccaggctaattggatggaatggacccagcattagcccaaaaaataaaatagtttaaatgtggatttagtttttataaatataataaattttctgtttaa

SEQ ID NO: 39076 - DNA, 210 bp, Glycine max
gcagtaccttggtcaaaatgaggcctctctagcatgccctcatgggtgttgccctacttccttattgttcaacccttcgccaccccactttgtttgtttgtacttaaactacattcccatttgtttttgctttttgagatttcatcatcctgtatttttggtttctgttttcggacttcaatggaaattaatggatgagaactaatgaat

SEQ ID NO: 39077 - DNA, 325 bp, Glycine max
  unsure (1)..(325): unsure at all n locations
gcacgccatcatgaggaggacgggactccccgcgcgtgacctgcgtatattggaccctctgttgtcatacccttctacccttctgggtcgtgagagggccatcgtcatcaacttggagcacatcaaggccatcatcaccgnccacgaggtcctcctcctaaactcccgccaccaccaccagactctggccgatgccaaccccaaccctgacgacgccatcaagattctccccttcgagttcgaagcccttgaggcctgtctgaaggccgctggaaccgccttgaaaaacgaggctaaaactttgaaccaggaggctaatccggcc

SEQ ID NO: 39078 - DNA, 399 bp, Glycine max
agaacacgtacgagagcactaagatggaaactcagatggataagtaaatgatttcttcaacgattgctaccactgctaacagcactggcaaccgcatgggtgctggattgactggtctaaagactatggttaacttcatgactaggatgaccaacagtgacactacctatgtcgttagctacattggtagaaaccaatgcatacagcagtggacaccagtttggacaacaaatgtcgagactatgttctacattctatactatgtggatgaacaagatgatgcagaagtggaatacgttgttaagaacctattgatgactggatggaaatcttacttggaacacgagttcgagcaccgttagcactaccgggcacacagatagtaaccaggacactact

SEQ ID NO: 39079 - DNA, 234 bp, Glycine max
aaaaaaaaaaaaaaaaaaaaaaaaaaaaaatttaaaaaaaaaaaaaaaaaaaaagaaaaagagaaaagtggaactaaaaaagagggaaatgcctatagtaatagaaagctagctggtactaaagattatgcgttcttgggtttccatccaagtcagctgaatccctgctggctgtgtcgtgccagtcctgtgcaagtaaggcgaattgtaaatccgtgtttcttacttttgaat

SEQ ID NO: 39080 - DNA, 326 bp, Glycine max
gttggcgaccatatttacactgatgtcagtctatcaaaagtccatctgcgatggcgaacaggattgatttgtcgagaactggaagaagagtacgatgccttgattggtagccgcagttatagagaatcattggtggagcttattaatcaaaaggagattgtaggggatctctttaatcaacttcggctggctctgcagaggcgaagcaaagaccgttctgctcaaaccctagcagcaactaacttgaatgatgaagacctcactgatagcatgcaaaagctacttattgttatgcaaagactggatgagaaaattgctccaatgct

SEQ ID NO: 39081 - DNA, 457 bp, Glycine max
cccacgcgtccgccaagaaatctgaaattgaaagattggtgaagcagatagaatctctgaatccaactccatgcccaactctagaactggagaaggtggctgggtgctggaggcttgtttacagtacgatctcaattttgggatcaaagaggaccaaattaggcctcagagacttcatctcattggatgatttttttcagacgattgacatatccaagagcaaagcagttaatgtgataaagttcagtgcaatgggattgagtttgttgtctggacagcttaatattgaagcctctttcaggattgcttcctcaacaagggttgacattaatttcgaaaactcaacgatcactcctgaccggttgatgaatgtatttcggaaaaattatgatcttttgttgggcatcttcaatccagagggatggctggaaatcacatatgttgatgataccttgag

SEQ ID NO: 39082 - DNA, 360 bp, Glycine max
  unsure (1)..(360): unsure at all n locations
cccaacacaagaaatacgcgtggcgccatatatagcagcagagactcagaatcagaatctaaaggcaaaagggtttgaaggtgtgccttgttaaggtttcgtctgatccaaagagagaagaagaaatactggaagaagaactacattttcccgataacgagccacttattgtgagagacgggaacagaaggctaatgcaagacatagattgtggtgggttgtgcaagacgaggtgcagtgcacattcgagacccaacttgtgcactatggcgtgtggcacgtgctgtgtgaggtgtaagtgtgtcccacctggcacatctggnaatagggaactatgtggaacttgctacactgatatga

SEQ ID NO: 39083 - DNA, 315 bp, Glycine max
cagacgccttcgggagatatgcagctactccttggatgacgaatgggtttacaaggtccaggcacctgacctgaccgagacttttaagacttactacaagctggtgcagctggacttcaagaatataatcgtgtcaggatgaacactggacttacacgtcgatgcagaggcaaactctatgaacgctggctactacacatggtaaaggttcattatcaaggatccagatgatatctgcacacaaaatgcatgttcatacaaaacagcgcatgagagacaaactgatcacgcatggattcaacattgccgatatca

SEQ ID NO: 39084 - DNA, 457 bp, Glycine max
tccacgcgttcggtggaaggtgagagggaggtgaagatgagaaagatggaagaggcgcacaggagcgggaagctggtgttctgctgcggggaggtgcagagttacacgctggagatgctgatgagggcttaggcggagttgttagggagggggagtgtggggaccacctacaaggcggtgatggattcacggctgattgtgacggtgaagaggttggatgggaaaagtgcagcggcagtgagtgatggagaagggtttgagaggcacatggaggttgtggggaggctgagacacctgaatttggtgcctatgaggtgctattttgatgccaagggtgaaaggcttgctattgatgactatgagcccaatgtgagactgttcaatctaggtcatggttcatgatcagcgtgggcaaaaccattgcattggacatcatgtttgaaaattgcagaagatg

SEQ ID NO: 39085 - DNA, 291 bp, Glycine max
cccacgcgttcgcacgagcctcgaagtggatccttcgcaacatgggtgctagagaaccacgcaattcacctgaaccctgctcactacatcagtgagattattagagaaggcacaaaaaatggcactgctttctttaagtgccatggacatgagcaatttgagatgacgggtttggatcctgagtataataggttgttcaatgagggcatggtgtgcactgctagggttgtgtccaaggctgtgatcactggctacaaagatgggttcaaccagattaagtccttggtgatg

SEQ ID NO: 39086 - DNA, 468 bp, Glycine max
tgctcttcacttccggaatcgacccacgcactccatgctgtctggccaatttgttgcatggatttaactggatattgcctgataatgtgaggaaggaggatttgaatatggatgagatttttgggctctctacacctaagaaactaccactggaaactgttgtggatcctatgcttccataccatctttattctctctgagcagtgcctttgcacaaagcgtttctctctaataagattgttgtagggataatgggtcttgagtgagtttatgtttgtcacactggattgcaataaatttttctctcttttcataacaatgttagaaagagagaaaaaaaaaaaagatgttgtggtgatagggactcgtggtaaccaatgcatggcaaatgtgcaagcgaaagtattttaatgtgaccattttctctctggcagaaacatgcttttctcttcctttccttttttggta

SEQ ID NO: 39087 - DNA, 314 bp, Glycine max
agaccaccctggtgcagtacccataacctcctccccagggggaggatttaaggctttttgcggctggggttccaataatcctggtgggaccaaagttggaccttcaggaagataagcaatttttatatagaccaccctgttgcattaccaatacttccacacacggggaagaatttagaaaactcgattggggctcctgcgtacatagagtgtggttcaaaaacacagcggaatgtgtaagctgtctttgacgctgtcatcaaagagggtcttctaccaccaaagcgcaagagaaagaagagaaaagcacacaa

SEQ ID NO: 39088 - DNA, 263 bp, Glycine max
aacattgcaatgccattcctaccatatggtcccttttcgaatgaaaacttgctatggtacccctacctccgacgtgaaatgcgcaagttggaagcttgctgtggaaacacacaacatctttgtctttgagaccatacctgaagagtgcgttgaatcaacacaggaatacatccatggcgaacaatatagatcagactccaaaacaatttaacaacaaacttacttttattccataaacctttaaaaccatacaaaggacacat

SEQ ID NO: 39089 - DNA, 450 bp, Glycine max
tcgcttttgggtatctctcagatggtctcttagctcgagcccaagagaggaagaaaggagtgccatggacagaagaggaacacagaatattccttgttggacttgagaagctgggaaagggtgactggaggggaatctctagaaactttgtgactacaagaaccccaacacaagtggcaagccatgctcaaaagtactttcttcgattggcaactatagacaagaaaaagcgacgttcaagtctctttgacttggtatgcatacataacaatgaattaatttactatatattgcttttattaattagctacctgataatttcacactgaatgaatgataaatgtttctctttaaactgaaaagtaattcacttttcttttttacttttcctttgtcgttgaattattgtggcaagttggtagcaacaaagcaggttctaattcattttcg

SEQ ID NO: 39090 - DNA, 400 bp, Glycine max
cccacgcgtccgcccacgcgtccgcccacgcgtccgcggagccctctcttcaggtcaccatctagactgcaatcatggctgatggaccacagcatccatcagttgttcagaagctagctggacagtcttacctggtgtccaggcttagccccaactttaactctaggaattattctgcaactggttcttacgtcaatggcggaatgcactcgcctgggttggctttgtgtcacctgtatctccagttactgtgcatgctccagcagagaaaggagtgagtggacttctagtggactttctgatgggtggagtatccgctgctgcatcgaagacagctgctgctccaattgaacgagtcaaatcgcttatccaaaatcaggatgaaatgatgaaaagtggt

SEQ ID NO: 39091 - DNA, 438 bp, Glycine max
cccacgcgtccgcccacgcgtccgcccactcgttcgcccacgcgtccggtttttcttcctggtctacccctttgatctcatgcaatctcccctcatggatccctttgatttgattcgcaaagggtttggctgaagctatctggaatatttgcgttacatttttggaggtccatctatgttttagtcattttgtccatattcttgtcaataatgagcttatccaagaaaggttcccaaacagacacaaaactgagctccttaaacaaagcaacctatttgaatccaaacgcagcagagtttgttccatttgccctcagatcatcgccatctggaagcaccagctcggtagatgcagcagcgaggtttactactgctggatctcttgggaaagcagctttagatcgatcagaatcatgcatttcaaataattccgatgat

SEQ ID NO: 39092 - DNA, 255 bp, Glycine max
aaaaaccggcccgacccacgcgttcgaccaaacaaactaccaactcaattttatttttttaatggaatgctcaaaaaatcaaggaagagctgattttggtccatctttggatactctccaaaacatctttcacaaacctctacagaaaaatgatgctatagaccatcttccagtcattgccttcaacttcggtctaaacctccctatatggaacaacaccgagcaaaccgatcttatataaccatttactccttc

SEQ ID NO: 39093 - DNA, 446 bp, Glycine max
cccacgcgtccggcttcaatggcctctgtttcagcaacttgagagagggttggaagctgagagaagttgctgaaacagaggccattgaagctaagcttgcaaccctctctcaagttgtctacaaggactagccaggggtgttacaaaacttcaagtttggaggtagtttctgtgggatggaataggagaacctttccctctttgagatcctcccgtttctgcatttgtgcagtcaaggcacaaccggagacagtgcagaaggtctgcaatattgtgaggaaacaacttgctctgcctgctgaatctgagcttaccccagacaccaaattttcagcacttgttgctgattcccttgacacggtggaaatagtaatgggtttagaggaagagtttgccttaacttgttaggaggatggctctcaaaccatttaaaccgttcaagaggc

SEQ ID NO: 39094 - DNA, 222 bp, Glycine max
cttagaactctgtccacgctgctgtttatgttatatcatgcctaaccaaatacacgggattggggatttacttctcactgtcagaatgcaggatgctaggtcatcgaacatcactacgagcagaaatttcggtacatacaccgtcagatgcttcaaatacctatacacactatgagtgattgacccagagaaagctgatacattgaagcaatctattcctac

SEQ ID NO: 39095 - DNA, 457 bp, Glycine max
aaaaccgggccgacgacgcgtccgcccacgcgtccgtaaaaaaataaaattaattttttttcatggtaaccattcgtgcagatggggttagtaaaattatccgtgaacgcattgagcaatataatacggaagtaaaaattgtaaatacgggtaccgtacttcaagtaggcgacggtattgctcgtatttatggtcttgatgaagtaatggcgggtgaattagtggaatttgaagagggtactataggcattgctttgaatttggaatccaaaaatgttggtgttgtattaatgggtgatggtttgatgatacaagagggaagttcagtaaaagcaacaggaagaattgctcagatacctgtaagtgaggcttatttgggtcgtgttataaatgccctggctaaaccaattgatggtcgaggagaaatttcagcttcggaatctcgattaatcgaatc

SEQ ID NO: 39096 - DNA, 415 bp, Glycine max
  unsure (1)..(415): unsure at all n locations
gtttgntgttgtaactcgttctttttctattgccgnncggcgnnggggnncggggcgnccggcaaccggaaaaggccnggcgggcgaggaaacgggggnggcggaactcctgcaagtgccgcaacggctgcggaggcttcaagatgtacccagacttgagctacactgagtcaaccaccaccgagaccttggtcatgggagtggcacctgttaaagctcaatttgagggtgctgaaatgggtgtgcccgctgagaacgatggctgcaaatgtggaccaaactgattctgcaacccctgcacttgcaagtgaggtgttgggagagcaagctttaagcagagatagcccttaattaggaataatgataaactattaatgtgtagctaaaaacttatgtattatgtatgtgatggttt

SEQ ID NO: 39097 - DNA, 213 bp, Glycine max
attgtttgttgttgtaactcgttcttcttctttcgttgttctgtgtttgtgtttgttttgtctctcacctgaaaatgtcttgctgcggtggtaactgtggttgcggaagctcctgcagtgccgcacggcttcgaagctgagatgtccagacttactcatgataccacaccaactgtcatggatgcactgtaagtattaggtctaatggttccc

SEQ ID NO: 39098 - DNA, 438 bp, Glycine max
cccacgcgtccgcccacgcgtccgcccacgcgtccggtcgacgagaacttcgtgaagaagcacactggtcccggcatcctctccatggcgaacgccggtcccggaaccaacggatctcagttcttcatctgcacgacgaagacggagtggctcgacggaaagcacgtcgtgttcggacaggtcgtcgaggggatggacgtcgtcaaggagatagagaaggtcggatccagctccggcaggaccgtcaagcctgtcgtcgtcgccgactgtggtcaactctcttagatagacgacgttgaccctaggcttttatctctgtgtcggtggctctgaatgtgtcgtttctttcggtgtcgtttttgcctttttttctctatcccatgtcgtttagggtgattggcgtgttatggatatcatttcgaaaccccttccctttga

SEQ ID NO: 39099 - DNA, 182 bp, Glycine max
  unsure (1)..(182): unsure at all n locations
cttcttcgacgntatcttcttcggggggtgtttgtgagactgatttaggtctcaccttaaaatgtcttgctgccgaggcaactgtggttgctgaagcgcctgctagtgcagcaacggctgttgaggctggaaaatgtacccagacttgagctacatcgcatcaaccaccaccgagacctttt

SEQ ID NO: 39100 - DNA, 284 bp, Glycine max
aagatccaatcattgatgttgataaattttaatgatcccaccaacttcaggcgctcacggcggtggaccaaaactaagtcatatataaaacatatacaaactacttactgtactgatctaacacttagaaatataccgtcgcacaccagacaaattcagcatacctgggataagccctggaatcaactttacaagtactccacttggaatcgagttctcaaagaaaccttattgtgcttaatccttcaaatgggttgcgtttgttgacaatgaaattcaaaaag

SEQ ID NO: 39101 - DNA, 437 bp, Glycine max
cccacgcgtccgattgttttatatgtttttattacttcctttctgccaatgtccaccagctggatctctaacatttgcaaaatattgtcaggactgcgtgagtgaaatcatgagacatgcaagacgatcaaatatcccaatagttatagacggggatggactttttcttgttacaaataatcttgaacttgttagcggctatgccttagctgttctaacaccaaatgtcaatgaatataagcgtctagttcagaaagtactaagttctgaagtaaatgacatagatgctcctcaacaactgctatctcttgccaaacaaattggtggtgttactatcctaagcaaaagaaattctgatcttataagcgattgggacacaagcaggtctttcacaaatatataaagcttggttggtcccttttttttggttttttttt

SEQ ID NO: 39102 - DNA, 288 bp, Glycine max
gctacgcaccagtttcaccggacgaatttgttgttgttgggagcgatccgagaaaaagtgtgataacatgttggtttaccaggaccttcttacaggtgatgagcttctttgtgactccttacgttacaaggaaattgagaatggaatgctgtggtaagatgaggggaagtgacgttgttaaaggagcacatgatgtaacacattggtgcacacccttctgctgagtgtggatgagaagatgacggagttgaagatgcagctgttaaagttgtagacattgttgacaca

SEQ ID NO: 39103 - DNA, 324 bp, Glycine max
cgcttatcctttatggattgaacaaacttgccaccgttggacctgtcaacaccagcgcgactgaaatgtacaacacgagggacatagctaaactggatgcatggaaggccgttcgaggggacatccaaggacaaagcagtgggtgattacatcaataaggtggaacagctgctggaagcacatgacttgcctgctggataacagatggatgacttgctttctgcatactgagctagaaggtcacatcagctttgagagtaacaattgcaaagctttgaagctgttattatcataatcatactgatctctaacgattaagacatg

SEQ ID NO: 39104 - DNA, 226 bp, Glycine max
aagaaagcaagctcgtgaatatgaaattgttgttgaggcttccgattctgtagctgacgagaggatgatcaaagcactcctactgatgactcttacgcaaacgattctaatgccactgatagtggcgatgagaaagacaagcctgccaaaatggaatcaaagaaggatctgtcttctaaggcatttacttgtaaaaagaactcaccagattatgaagattgaaaga

SEQ ID NO: 39105 - DNA, 320 bp, Glycine max
gctacacgttcaaatctaaatatggttcaaatgcttccaaacagatgggaatggaaggactgtatagctgacagatcttaattatctttattataaatatgggcaaaatccatggaatgatagtctcagcagacctgttacagacctgcttactattatagcaggtgctgtaagaggcattactagcaacatatgcgatcttttagaaagctatctcatcatggaatgcttacaataatcaactcagggaacttgagcaaacatggaatgacattgaatgagcatattgagtacttgtagcgaaagatatgcaatatgct

SEQ ID NO: 39106 - DNA, 331 bp, Glycine max
gttaaacatataggtggcgcactgagtgtagcaggtgcacaacaaatgactgtgatggataggttaatggtggtatgcaaatcaagcaagaatgcactctgcatgttctatacactgtggtacaagctacaccatgagctgctgaggttgggatttttcttcgatttccacaggagtgcacaaatcactgtaacagtttcatcaatcaataaaatgctgaagcggcatgcaacatgatgaggccgtgccactaacacctcatatacaaatggttgaagtaacagcacctgcaactgctgaaacctacgctgcagtcgcttctgctgtgtca

SEQ ID NO: 39107 - DNA, 388 bp, Glycine max
cccacgcgtccctttctcaatatattgttactagcagctcatatcaaaacacagagacgctactgcatttatacgagcccactgtgatcattattcctccaaacacgttagcatacaattccacggctggagttacagaatcggttgatagattttatggttcagtgaagcaggtgatgctggcccagagttgctttgatgacacacacggtgctatcttaataaaaaacctttctgccaaggaaccttcaacacttggtgtggacacttactataagcagtattatcactgcctggctgctgctgctgtcactttaaagtggacggaagcaaaaaaagggggtgttggtaaccaataatcatttgtcgtcaacttcaattgaacaat

SEQ ID NO: 39108 - DNA, 341 bp, Glycine max
catttctaataataggcgggaaccaaggtgtctatggcaaccatggcatgatttacattgcaggattgaaggccctgctgcatatgatatactcactaattttgagcagcgctggagaaaagccaccaaatggtctgagttgggtcggaaactcaagagagtatctcactggaacgatgattctttgatcaaggtagaacgcatcttttgtattcttagtccttcggaatcaactccagttgatgatcctgaactatgggtttcgaaggaagacgatcctgaaaattggcatgttcaagtttttcgatccataaattctggttctttgaaaggattcccta

SEQ ID NO: 39109 - DNA, 192 bp, Glycine max
cttacgcctagggttttaccgctgctttttctagatttaaggaagatgggtgaggaagaggtttacatcagcattgcggttatagcccatgttgactctcggaagtccactaccactggccacctgatctacaagcttggaagcattgacaagcacgttattgagagatttgagaaggaagctgcttacatg

SEQ ID NO: 39110 - DNA, 351 bp, Glycine max
  unsure (1)..(351): unsure at all n locations
cccacgcgtccgcccacgcgtccttaatatataataccgtacttgaccacatagggtggatgagcctcaatgtgcactcacgaangatgccactgactcggtagggaataccccaatggtatttctaaacaacattgtcgtctggtgtgtagcccgtattgctgctaaactggagtacatgcacgcctgctgtagtgtcaaatataagattgctttgagcatcattgaagatgctgagaaaaaaggccttattactcctggaaagactgttctggttgagtatacaagtggtaacactcgcataggattgacattcatagcaccattgaggggctataaacttcaagtgac

SEQ ID NO: 39111 - DNA, 433 bp, Glycine max
acgcgtacgcgtacattcacacgtacagtaacaatgcacatcctacaattaatgctccttcatcctatgagccatggactccagtctaaagcgtataaatggctctccgcttcttgcggtaggctgctgctatgtacatgttcgcatgactgctgatcagatcggcacatagcacaatactcaggggacatcttcgttcagcagatagatttgtacggatcatgtgctgccaggagccgaccatcatctcgtccacgcctctgccaaagagctagcagaacttgatgtagacgctgtaactgcgtgccacctgacactgctgctaaccaagaattgtgaccctgctatacaagtttgactactcatagaggcaaacgcaagttcccttagacttaattggaccactaatccatgcatgcctatgacttatatt

SEQ ID NO: 39112 - DNA, 409 bp, Glycine max
cccacgcgtgcgctaatttgctcgttgtcttttaagaggcgaatccttaccattggtcgagatgggtgaagaagtgaatgccgcggttgcagagtatgttttgaagatgcatacgagagagtacgaatgggcgtttgtcatgaagcaagacctcgaggctgcgaagaagaagagagcctacagccgtatactcatgtacaacatagctaagcagaactctatggagtacgatcaccaggagaaggaattgattcagctgaaacgcgaggccaagctgaaaggtggattttatgatcatccagacgctaagctcttgatgattgttcgcattcgtggtattaatgccatggatcctaatgtaatgaagatcctgcatgtgttgcgattgatagagaatttcaatggtgta

SEQ ID NO: 39113 - DNA, 386 bp, Glycine max
atccatacatacatcctagtacaatgttcataacacttgcaaagattatctctatcgaggggtctcatatcacactcagacgcataaagtacatcattagctaaacgcaataaatcaggaaatgataaacatgctttacagtaaacacgtgcctacaactgtatcttacccaaaaaatcaacttgcgtcataaaccttcaaatcaaccaccccaatttacctgcgcacttcaaggaacagttgcagagccaaaatctacatgtgctgatgaaccgcttttgctacatgcatttcgcgagaaaaatgtcgaaagactcaaggatcggctcatgaggcaagcatggaggtacatgaagagttaccaaaccatatgtgataaatatcct

SEQ ID NO: 39114 - DNA, 417 bp, Glycine max
gcaaaggaatgggcggcttattttcttatttatcacttcccgaggaggagagtcctgacgtgaaagcattccactccgcggagagctggcagagccacttgaaagagatcaaagagtcccctaagctaataaataaaaatcaggttgtgatatatttcacggcgtcctggtgtggcccttgcaaattcatcactccagtgtttaaccagatagccgcagagtttgcaaacgctgacttcgtcaagatcgacgtggactaattatctgcgattttctcttccatattctctcttttctttattcaatccaattacttttgttagtttcccttggctcagttcgatagagtggatagaagactaatgaaattttgaattaaaatatactggaaaagcattgatctcatcagattatttt

SEQ ID NO: 39115 - DNA, 406 bp, Glycine max
cccacgcgtccgatgccttagaccctagtatctaagatatggattagacaggaggttattggggatttggtggagcagtgtcgaacttacaagcagagagtggtacaccttgtcaactcaactttggatgaatcactgctatgccaaggactagccctgaatgatgatcttcagcgtgtactggctaagcacgaatctatttcttctggaacttctaccaaaaatgaaaatcacacacagaattcgaaacctgcacctgctggggctcttgtagatattgatgctcctttggttgatactggagatactagcaaacaaactgatgggagatcctcttctaatgtcgaagcagggtcccaaacactgaatcagttactgctttctgcaccttcaacttctaatggat

SEQ ID NO: 39116 - DNA, 402 bp, Glycine max
cccacgcgtccgcccacgcgtccgcccacgtctccgtgaaaatttagccttgcttggagatgaggggtaccagacgaatatatatcaggatgaacgacccttcatcagatctagaaaggttttgatggaattggggccacctataagcaaggaagttcagcttatttcttttcactctgtgtcaaaaggttattatggtgaatgtggacagcgaggtggatattttgaaatgaccaacattccttcagagacagttgatgagatctacaaggttgcatcaatatcacttagtccaaatgttccagcacaaatatttatgggagttatgctcaatccaccttaacctggatatatttcttatgacaaatttggtagggagagcaccggaatacttgaatcact

SEQ ID NO: 39117 - DNA, 346 bp, Glycine max
cccacgcgtccgcccacgcgtccggccacgcttactgaagattttgggaattgacaagagggctaggttttcacattcgatggcgcttgaaggtggaagcattcatgtggatggagaaggaacttgtcttaccacataagagtgcctcttgaacatgaacaggaaccctcactcgagtaagaaccacatagaggctgaacttaagacatattttggaatcaggaaggatatatggttgcctcgtggattatatggagatgatgacacaaatggacatattgataacatgagctggactgtgaggcctggtgcggatatgctgcctaggattgatggtcaaactgat

SEQ ID NO: 39118 - DNA, 372 bp, Glycine max
gttgagaactaagaagaaggaaatggcttcttcaatgatctcctccccagctgttaccaccgtcaaccgtgccggtgccggcatggttgctccattcaccggcctcaaatccatggctggcttccccacgaggaagaccaacaatgacattacctccattgctagcaacggtggaagagtacaatgcatgcaggtgtggccaccaattggcaagaagaagttcgagactctttcctacttgccagacctcgatgatgcccaattggcaaaggaagtcgaataccttctaaggaaaggatggattccttgcttggaattcgagttggagcacggtttcgtgtaccgtgagcacaacaagtcacctggatacta

SEQ ID NO: 39119 - DNA, 415 bp, Glycine max
atttgatgcagggcatagtgctgatgttcttgctgatgaatgcttcttagaatcagtaggaaaggctcttcgacccggaggagtgttctctgctccagcagacagcctgtggcataagaactttgtggttgcagacaccatagcaaattgcaagaagatattcaaaggctccgttaactatgcttggaccacggttcctacatatgcaaggcatttcttatctaactatatgtttacttttctaaattttatatattaagagaagcttttggtaacaagtgtttctttgtttttgtttaccagtggggtgattggattcatgctttgctctacggagggtccaccagtgaacttcaaacatccaataaataaattgaatccagagaaaaatggggtggcaaagggacctactaag

SEQ ID NO: 39120 - DNA, 348 bp, Glycine max
  unsure (1)..(348): unsure at all n locations
gtcgaaaggagttagtaaatccttaaatagatctcgttggtttcgagaaattagtctttgggtcacgacaaagaatatttgggataaccaaaataaataataaaaaaaaaggttaatgcatggttgttttgtgtgcaggacttggagccaagttggagacttgtgttggcaacggttattgggtttcttggatcagcatgtggaaccgttggtggggttggaggtggaggcattttcgttcccatgctcaatctgcttcttggctttgatactaagtctgctgctgctctttctaaatgtatgataatgngggcatcagcatcatncgnttggtataatgtgagagtg

SEQ ID NO: 39121 - DNA, 373 bp, Glycine max
cccacgcgtccgcccacgcgtccggtgagaactgagaatgcaggcatccaaggaggagatgattgatgctctatacaagccattggaaaatgagagtgatgatggtattatcaggcctatcaacatcttggtgaggttaatgttcccaagttcactgtgattgtggcacaataaaatcatcataccaagctgtttctgcctaatggcccagaaaatgttcctcctgggacggctgtggacacaacaatcacacatccaaaattatgatttttacatgtgtgctcatgcagggatgcttgaaccaaaggagcacaattgcaacctcaggtgtggcacccaatatgttatgctcaccatgctgcaacttaaaatg

SEQ ID NO: 39122 - DNA, 345 bp, Glycine max
cccacgcgtccgcccacgcgtccgcccactcttccgcaatatagcccaagccctatacaggcaaaccctaacacacacccatttgattcagtttccatggctagcctcaaggttgcatttttggctgcagtgctctgcatggttgtggtgagtgcacccatggcacatgcagctatcacgtgcgggcaggtgacgagtagcctggccaattgcatcggttacctccagaagggaggaacgccgtcgtcgggatgctgcaacggattgaagagcctcaatgccgccgccaagaccaccgccgaccgccagacggcgtgcatctgcctcaagtcggccgtcagccaa

SEQ ID NO: 39123 - DNA, 343 bp, Glycine max
cccacgcgtccgcccacgcgtccgcccacgcgtccgaccaggtctaaggcggaaatatccatttcatgaatatgtatctgctgtacttctggtgattgggttgatcctattcacactagcagacgcacaaacatcacctaatttcagtgccattggtgttcttatgatatctggggctttgatcatggactcctttttgggaaatctgcaagaagcaatctttacaatgaaccctcagaccacacagatggaaatgcttttctgctctactgtggtgggattgcctttcttgattcctcccatgcttttcacaagagagttattcaaagcatggacatcatgc

SEQ ID NO: 39124 - DNA, 413 bp, Glycine max
agaacacgtacttgagaactaacaaggagtttcatttggccatctcaatgatactcatccggagcggttactatcgaagaccggtgcaacaactgcagccacaatcactgttgtggccatatgcagagttgccagcacaaaaagaaggtagcggaatgtgcacttcatcagaggtttgaattcctttggagggttgaaggctcacaacagtgtgacatcactaggtcttcctgtgtgcactgaacagtgttttgcaaaggtggtgagctcattgaaatatcaatcatcatctaaggtcagatgtggaggtgctgcctcttcaacatgcaatgctgctggtgagatttttcagattgcagccatcatgaatggtctcgtgcttgttggggtaacaattggatttgtccttcttc

SEQ ID NO: 39125 - DNA, 205 bp, Glycine max
tcgcaaactcacactattataatttactttttattttacatggctgaacaatccttcatgatgggctagctttatgacgtgcatggatgccttattagtctgatcattaacacatttgagaagaaaggtttctacttgaaaggtttgaatcttgctactgaagaccgtccttatactcataatcactatacttatatatctgcca

SEQ ID NO: 39126 - DNA, 434 bp, Glycine max
ctcacgcgtgcggctcatcatgttattgcttttcttatctttggaagcactgcctcaaatggcgggctctgtgacgaccactctggcgcaattcagcggtcttagaccccaattctcagctgcccctgtgaagaacttggttgctgtgcaacccatgagtcgcaaggggaagggtgcattgggagctcgatgtgactacattggttcatccactaatctgattatggtggcttctacaaccctgatgctgattgctggaaggtttggattggctccatcagcaaacaggaaagccactgcagggctaaagctggaggtgagggactcaagcttgcagactggtgaccctgctggcttcacccttgctgacaccttggcctgtggatctgttggccacatcattggcgttggagttgttcttggtcttaagaaca

SEQ ID NO: 39127 - DNA, 319 bp, Glycine max
  unsure (1)..(319): unsure at all n locations
gttgttgttaactgaacttttctgagcaagaatgtctgggcgtggaaagggaggcaagggtttgggaaagggaggagcgaaacgacaccgtaaggtgctgcgcgataacaatcagagcagcagccgccgacgagaccacagaggcaccagcaaaagtagaggctgcaccggtcgggttcaccccaccagaacttgacccaaacaccccttccccgatcttcggnggcagcaccggcgggctcctgcgcaaggcacaggtggaggagttttatgtcattacgtgggactcacccaaagaacagatctttgaaatggccaa

SEQ ID NO: 39128 - DNA, 411 bp, Glycine max
aggacttcctgaaggcacaaatagccaatcattggttaaggaggccatccatgttataagctgtggctatgaagagaagactgaatggggcaaagagattgggtggaatgctaataagactctgtggagaggccatgttgatgtcccaatgataagagttaattgcacttgtgtgcatgcttttattttcttactgctattgagtggtttgccttaattagaagagttatctgtgtacatagtcttaaaagaggaaagttgggtctgattggaatgtattcatttgatgatacaacaaaaccatatattgtagtatagccattgtcattgtttgggaaaacatgttctgtgttttgtgctactaagatgattttcatctattgagaataggatatatatttttgccacttc

SEQ ID NO: 39129 - DNA, 231 bp, Glycine max
cccttcaaaggatccttacaaccaactctggttaaaaaaagaatggctgccaacacatgggtgatttctgccatctcagccttcccatctttcctttcctcctcaaaaaccagattggccccagcagttcctctttccagctttgttggcaccaaggcctctttttttcccttttccatgattgctaatgggatgcctgcccagcctagacccccctaccttgatggttca

SEQ ID NO: 39130 - DNA, 427 bp, Glycine max
gaacatcaccttgtcgataacgatttatattgacacggcttccttaaagatcatcgctggacatcataccaccgtatagcgcacctttgcctccacataagcaacattaaccactctcaaatgcatgtgctggcttccccacgaggaagaccaacaatgacattacctccattgctagcaacggtggaagagtacaatgcatgcaggtgtggccaccaattggcaagaagaagttcgagactctttcctacttgccagacctcgatgatgcccaattggcaaaggaagtcgaataccttctaaggaaaggatggattccttgcttggaattcgagttggagcacggtttcgtgtaccgtgagcacaacaggtcacctggatactatgatggacgctactggaccatgtggaagctgcctatgtttgg

SEQ ID NO: 39131 - DNA, 278 bp, Glycine max
  unsure (1)..(278): unsure at all n locations
accgacgcacgcgtccgccaacacgaccgacaaccccaagtttgttctaaagaacacgcccaagagggncagggggagttgaaagaaaagcctggggggcaaaagatgcacacttgtgaagagatgattgaagcctcggccaccctcatatggatcgcttgaggccttcatgcacctgttaactttggacagaatccatatggaggcttaatcttgaacaggccaaccattagcaggagattcatgcctgagaaagggtctgctgagtatgctgcttt

SEQ ID NO: 39132 - DNA, 237 bp, Glycine max
catagatacataatcttcaagatcgatgagaagtcaaagcttgtcaccgtcggtgacgaggctgatccctgcgagagctattgagatctcaccgtcttcttgcccgacgatgattgcagatatgccgcattcgactttgatttcaccaccgtcgattactgccgcatgagcacgaacttcttcattgcatggtctgcaacagcattcaggataagagcaaagattctctacgcaaca

SEQ ID NO: 39133 - DNA, 271 bp, Glycine max
attagataaccaataccgttgtcattattatatttggcaataccaatttcagaaggggttattagttgatgcataatgtaaatgatggagtaatatggagttggaaatggaaaaaaaaaaaaaaaaaagaaaaatgttggggggggagaaggagatttttatgccatcaacaaaggaaaaaaaatcatggggacctctctttgcgagattgttctttgcattgtgggtgaaacaacatctctaccccttcttgaaaggattgcttgggccc

SEQ ID NO: 39134 - DNA, 404 bp, Glycine max
cccacgcgtccgcccacgcgtcctttccattcgtccggggatcgatctcaaggccggagggaaaagcaaaaaaaccaaaagaacagcacccaagtccaatgatatctatcttaagctcttggtcaagctttatcgcttccttgttcggagaactggcagcaaattcaatgccgttatactcaagagattgttcatgagcaaggttaacaagcccccattgtctttgtcaaggttgattaagtataccaaggggaaggaagataagattgctgtggtggtgggcaatataaccgatgatattcgtgtttatgaagttccagccttaaaggtcacagcactcaggtttacagagactgctcgggcaagaattgagaaggcaggtggggaatgcttgacgtttgatc

SEQ ID NO: 39135 - DNA, 319 bp, Glycine max
cccacgcgttcgacttaaactacattctatttgtttaagctttttgagactacaggaggctgtttttatggattccgttttacgacttaaatggaaattcatggatgagaactaatgaataatgctatacgtattgtattgctatgttgtacgatgaactacaatccaactaaggacatgcggttcactggctccgtctatttgccccacatccctggtcccatgatgaaaatctgcatgcttgtagatgctaagcatgtagaataggcagagaatataggactggactggatcgatctagatgccttgacaaaactaa

SEQ ID NO: 39136 - DNA, 259 bp, Glycine max
  unsure (1)..(259): unsure at all n locations
agaggtgatttcagtgagtgatcgggttcacttgatctcatcataatcgcagcgtgatggaagaagatgccgatcagaaacatcgccgtcggaaggcctgaagaggcgactcaccccgacacgttgaaggcggctttggctgattcatctcaccttatcttcggttcgccggctcggctccggcatcgctacaacagctcccgacnacgggcttgccccctgcggcctatcttcgcttcattgccatgcattcgccctt

SEQ ID NO: 39137 - DNA, 425 bp, Glycine max
attaaacattcagcctgtgcgttttggaagcagagaccggattacttagagatggcccgtacaaagcaaactgctcggaagtcaactgcaggaacagctcccaagaagcagcttgcatcctaagctgcacgtaagtctgcaccagcaactgctggagtgaaaaagcctcatcgttatggatcttgaactagtgctactcgtgagactatgaaataccagaatagcactgagctcctaatcacgaagcttgctttacagaggttggttcgagaatattgccactatttcaagactgatctgcggtaacagagccatgctgagctcgcattgcaagaggctgatgaggcatgacccgtatgagctcttgaggacactaactcgtgtgccattcacgccaagcgcgtgactattatgcccaaggatat

SEQ ID NO: 39138 - DNA, 337 bp, Glycine max
tcgcaattctctgtgaactttctagaatctcgatcttcctttcttctctcagattccccctttgcctgcttcttcaaccccttttctttctctctctgtctttcgcactttcattctctcttaaaaatctaaatcccttttgggcttcatccttgcctctgacccaagtatggcttctaaacgcattcttaaagagctcaaaggttttcaaaagggtcctcctacctcatgcagcgcaagtcccgttgcttaaaacatgttttactggcaagcccccatcatgggacctgctgattacccatatgcaagtggtgttttcttaggttcaattcatttt

SEQ ID NO: 39139 - DNA, 402 bp, Glycine max
cccacgcgtccgaaaaaaaaaaatttaaaaaaaaaaaaaaaaaaaaaaaaaacaagaaaaataaaaagatcccaaccttaaaatacgacatccattctaccatcgcaaatattctatgtgtcacttaactacaatttactctacatccatttacatcgccgtcactttacaacccctagacttacaaaactcaatcgcctctcatcatattcccctttcaccacatgccattttacccaactggcatactcccaacgaccttcccaacaattgcccttcctaaatgttgaacagtacgcaccctgaatcggaccctccatttcgcggcacattaagctcacccgctgttttacctacacacttagcaaccccttaactcaccatccttttactttcttctct

SEQ ID NO: 39140 - DNA, 390 bp, Glycine max
cccactcgtcctaaaaaaaaatatatataatacacaaaaaaaaaaactcaaacacgaaaaattaaaaaattctccacaaaccccacacctctcttctatcccaaatcctatctatccctccctaacaactctatccacctcaaccctctatccactcgcccttctctctacctcacgctcccctcacacactcgcctctccttagtcttcaaagcctccttcatctagcttccactacttgtaaacacctcaccagatttctaatcacaagctgcctttgaccaggattttatcaacgtctaactatctgattacattctcaaaaaatttgtttagctcttcttctacccgtttgacttcactttttgttgtcccacataaatcacttct

SEQ ID NO: 39141 - DNA, 252 bp, Glycine max
gaaaagggtagtgacattgatccacaagaagcacagcaaactcttgaaatagcagaagctaatgtgaataaggcggaaggcaagagacaaacaattgaggcaaatctagctcttagacgaactaggacacgagtagaggctatcaatgtgatttcataacaagttgatgcgtccgaatatcggaataactaaaaagataaaaaatgaaaaaaaataaaagaagaaagtaaaacgtaaaaaaagatacaacat

SEQ ID NO: 39142 - DNA, 353 bp, Glycine max
cccacgcgtacggtagaagatgatgtcaaagtcgttgtgagccctactttcgcgtgccttcatttagtaaaaagtttgctgcgccctcatacacatgtctaggcccagaatagttgtgttcacaaacgtggtgcttatactggacaggtcagagctgaaatgctagttaattactgaatcactttggtcattattggtcactctgaactgagtcagcttatgaatgaatcatattagcttgttgaatataaagttgcctatgcacttcaacaaggtctgaacattatagcatgcattgaggaaactatggaacagcttgaacctgttacaacaactgatgttgatgctgagca

SEQ ID NO: 39143 - DNA, 418 bp, Glycine max
cccacgcgtacggccccatacagctatacccctaacacacaaccgtactgactaatgcagacgaggagacaaaccacctcgtccgcgtcaaacatctccttcacaagactctccttcagcaccatgcactctatcagcacatacttgaaaccagtgtacatccaacatagcacgagtgctcgaaagacatccgcatgatgactcgacaacacccactgaacatcacggcatcaccagcctaccaaccacaacttataagcatgcttgccaagctgacgaattcaaagaacgccttgcaaactgctgccttaactgcgtactctatgctctccactgcccttagttttccctctgatgcaaagatctcggctcttaatgagacatctcgaatactatcagctctgattgccaattattt

SEQ ID NO: 39144 - DNA, 428 bp, Glycine max
gcgcccacgcgtccgcccacgcgtccttccactcgtccgacaaaattgagtaatcacggtgccgaccacggttgctgtctccgtacctcaaaatcaaaacactaaccatggagtcgaatcccccaagaagaacaaaattcaggtttctaacaccaagaaaccccttttcttttacgtcaatcttgccaagaggtacatacaacagcgcaatgaggttgtgctttctgctcttggaatgggtataaccacagttgttacaattgcggagattttgaagaacaatggacttgctattgagaagaaagtttcgacatcttcagttacaatgaaagatgagaccaaaggtcgcctggttcaaaaggctaagattgaaattgttctggagaaaactgagaagtttgacagtctgacggcttgtgcaaacactg

SEQ ID NO: 39145 - DNA, 445 bp, Glycine max
agtttgctgtgagctataagctagtttatcgtgaggagaatatgaagttgtttgttttcttggttgctgcagtagttttggtagcatggccatgccatggagcaggctaccaaaggttccctctccgaatgaaaactggctatggtgagcgttcttcggaggtaaaatgcgcatgttttaggcttgctgtggaagcacacaacatccgagcctttaaaaccatttctgaagagagcgtttaaccaacacaggactacattaatggctaacaatttacatcagactctaaaacagttaaccaacaagctttcttttatgctagtgaacgcgaagtctatcacaacgacatatttatattcggcatagataacaccgtacatcataatatcccatactatgaaaaacatggatatggcgtggatgaatttaatgaaaccctatatga

SEQ ID NO: 39146 - DNA, 403 bp, Glycine max
cccacgcgtccgcccacgcgtccgcccacgcgtccgcaggtgaattccttgtgctgttggatgtgtcagctgataataaggtactgcctacaacatatggtgaattgagacctacgcttggcaagcaccacataattagagcaactggtaaagatggaaaactgttcatttgcaaagctcaagctggagacaagaggtggttcaagggagcaagaagatttgtggagagtgcagcaagttctttcagtgttgcttaaaaatcttcaataatagctggttatatatatctgctatgcgtaaatctaccttaagtgctatctatgtttgaagttgtctaaaaaaaagactctgatgcatgctcacactgagcttgaagctgttttaaatcgcctctctgctgatg

SEQ ID NO: 39147 - DNA, 416 bp, Glycine max
gcttttccttatcccgacctaccaaagtaataccaatccgctctcatctctgtctctgtctctatgtctctatgtctcgaatcttctccgcatggagcaagacgaagctgcacctcatcttaatccccactcttttctcttcttcccccatcaacttcaatagcgggcttctacagcaatggggagttaccagaggattggcctcacgatcacgacgctgcttcggctatgcaaactccaattggaccctgggacgacatcaaagctgggtgggtcggagggtccaatttgcgtacggattttccaactccgaaggaaatcttcaagggtctcgacaagtttgttattggccagcacatggccaagaaggtcctctctgtagctgcttataaccactatcaaagaatctaccacgg

SEQ ID NO: 39148 - DNA, 350 bp, Glycine max
actacgtggcagtgagccatcctcagacctgcgtgttaagaacgaaaggactcgattgcttctgtggtacaatcttggtagcatgcggatgccatgcctacgatatgctgcctctgtcgacgaacactgcctatggtgcccggactccgcgagggcaatgcgcaaggtcgaagcttgctgggggaacacacaacatctttggctttgttaccattcctgaaaagtgcgcttaagcaactaaacgtttcattcatggcgatccatatgagttcgactccataaccattaaccaacaagcttacttttatgccacaaacctcttcttccatgcccatgacacatttgtgttc

SEQ ID NO: 39149 - DNA, 405 bp, Glycine max
agaacatagccaagcgaccgttctccatgtttggtttctttgttcaggctattgtcactggcaagggccctattcagaacctttacgaccacgttgctgatcctgttgccaacaatgcttgggcttatgccactaactttgtccctggacaatgaggatgcctacatgcaatgcaatcttctgctcccttttgcagttcccttgtgtttaactccattttcactaatgtaactacacctgtgtagcagaaaaatctgtatgagaaccattatatttttataaaaaaaaaaaaaaactataaaatcaaaaaaaaaaagaaatcaatgaaacaaaacccttgagagaaacttggattggaacaaaaaaaaggggcggccgttttaaaggatccaagtttacttaccc

SEQ ID NO: 39150 - DNA, 492 bp, Glycine max
taccgatctcccaattccaggtacgcgtcacgcgtacccattgaattcactctggaatcttccatctgtgtatcgttttccttccttgtgtgcccgtcctaattcactttacagggctgtaccagatcctttctgcttaaatcctcgtatggtcgatcatcatgcagttctctatgaagtgaaattatcactgaaagaattgatagagaggcactgtggaagtattcgaggaggatgggataatctacttgcactgattccaggaggatcatccgctactatgattccaaagcatgtatgtgatgatatcttgatggattatgatgcattgaaggctgttgcaacagcgtcgtatactggtgccgcatttgctgatggataaacctacggatgttgtttatgctattgcaaggctatcctatttctacaagcatgaatactggtgtcagtgcaccccatgcatagaggggactggcttgctttggaccatca

SEQ ID NO: 39151 - DNA, 261 bp, Glycine max
acattaacaacatggctcacgggatacaaacccttattcccaattccaatttccataatccgcaagttgctaaatcttcaagtgttcttgattttgcatcttataaactgaaaaattcagcacattgcatgttggctttgaaaaatgatacaattgttatgcccaaggttcgctcctctaggacttgagcatccatggctacagcctgcatgcttcacggtgcaagctgccggaccgtatgcggccgaaaatgctttgggc

SEQ ID NO: 39152 - DNA, 419 bp, Glycine max
acacactatagtagcggccaggctgctgtatactatggagctggttatgtagaccttccggatatcttcaaaatgggcttcatcatggcttttattaatgctatcatctggggaggtgttggttctgtctggtggaaatttttgggattgtattgacatctcatttccttgtaagtaaatagcacatttcccagtttcagtaggcctttctttttcccggccgaaagaaaaaggtccttcaattgatgacagttgagctcagtcatcattttgagatgaaaattttctttctgcttctggctttgtagttttagacttttagcaatattgttgccctttttatttctctctttagtttacatacactcattaataatatatatttataaaggtttctgaggaaaccttttttatttgat

SEQ ID NO: 39153 - DNA, 309 bp, Glycine max
aaaaaaaaaaaaacatacaaaaaaaaaaaaaaagctataaacaaaaaaataaaaaaaaagaaaaaaaggacgaacagatatataagatgctagcttaaattctgcatgcatgcgacattccatggtacaagcataccgaaaagttacctctccgaatgaaaaactggctttggtgcgcgttctttgggggtaaaattgccctgcctttaagcttgctgtggaagctcacatcatccgatcctttaataccattcctggagagtgcgttgaaccgacaaaggactacatcaatggcgaacaacttatatc

SEQ ID NO: 39154 - DNA, 428 bp, Glycine max
acgaccacgcgtccgagaggttgttgcgagctatgctctagatgatcgcgaggagaatatgaagatgcttgttttctttgatgctgcattactaccgatagcatggccatgccatggcgcctgctaccaaagggtccctctccgaatgaaaactggctatcgtgagccgcacttcaaggttaaacgcacaacctgcaggcttagctgggaagcacacagcatacgagcctttacaaccattgctgaagagtgcgttgcaccaacaaaggactacattaacggcgaacaacttagatcagactctaaaacagtttaccaacaagcattcacttatgactttgaacgcgaagtgcatcacaacgacatatttatattctgcatagattacaacgtactgtctaatatgccatactatcaaaaacacggat

SEQ ID NO: 39155 - DNA, 426 bp, Glycine max
cggacgcgtgggcggacgcgtgggttgggattggattcaaaatctgtttcagacagattcagttctgatcataaacagatagatatgatgtttggatttcttaatctgtctctctataattttttacagaatgataaaacagaagcatgcatagcttttgacaaggctaagagtactgctagttttggaggtttagaacaatgtatgaagacatatgtgatgtttctggcttatgatgcgtggagcttgaaggaggatggttctgatggtgccatcaagaggattttggagttgtatgcagatggttcctctcaggcattgctagtccccaaggtgttgaccagaaaatttgttgacaacatcaagaagccaagagtacagcatcttattggtaacatattaagtccagtttcatttgactgttct

SEQ ID NO: 39156 - DNA, 345 bp, Glycine max
ctccattggtgttgtcaaatagtgacaacatggagattcagaaaatgaataatggtcacagtgttgttactgctactgttactgctactgctactcctactcctactactactttcgttgctgctgctactgctattactactactccttcttcattgagttctttatcttcttctaggtggccaaagacagaagttcatgctttgataagactgaggacaagtcttgaaaccaagtaccaagaaaatggaccaaaggctccattgtgggaggatatatcagcaggaatgctgaggctcgggtacaacaggagtgccaagagatgcaaagagaaatgggagaaca

SEQ ID NO: 39157 - DNA, 429 bp, Glycine max
tgattttgttgggttcatattctttgacttcaattccctcatctcctatatctctccgcccccagtcctctgttgcccatggaagaatggtgcagtgttcgcgcagatgcgagcttttcgatctgcatcaggaactgatcccttatgacgtggcatggtcttggcaaaaagacatcgtcagggaaaagaaatcacagattgagaacgaaggagattgcagcgacacacttattattctgcaacacccttctgtttacacattgggtaccgctagtacacaccacaacctcaactttgacatcgaaaatccaccctttcctatttatcgcactgaacgcggcggagaagttacgttccacggccctggccagctaattatgtaccctattatcaacctccgaagacacaagatggatcttcattggtacc

SEQ ID NO: 39158 - DNA, 415 bp, Glycine max
  unsure (1)..(415): unsure at all n locations
agatttttgacttatttgatctcaagcgcaatggggtcattgagttcggggaatttgttggatcattgggtgtttttcacgcaaatgcagctttagaagacaagattacttttgcttttaggttgtatgatctgaggcagacagggtttattgaacgagaggagttgaaggagatggtattggcacttttgcatgaatcagatcttgagctttcggatgatatgattgaaaccattgtggataagacttttagtgatgctgatataaacggtgatggaaggatcgatcaagatgagtggaaagaatttgtgtccaagcatccatccttgataaagaatatgacacttnncatttttaaaattttttttggggaaaaaagggggggaattttaaattttttaaacccccctttttt

SEQ ID NO: 39159 - DNA, 392 bp, Glycine max
  unsure (1)..(392): unsure at all n locations
cacaaacacctcgtccgtcacaatgcagctagctgtggcggccaacgctgtcgtttcaccgtcgccgttccgacctcatccccttctccggtcatccttctccggcgtctccgttaagctcactccccaatccataacgttttcacgcttgaagcccctcaccgtcttcgccgccaccaagaaggccgtcgctgtcctcaaggggacctccgccgtcgaaggcgtcgccactctcatccaagaagacgatggcccgacgacagtttctgttagcatcactggccttactccggggcttcatggttttcacctacatgagtatggtgataccacanatgggtgtatatcaaaccaaagggggggaaaaggccccaaaccccaaattttttttt

SEQ ID NO: 39160 - DNA, 424 bp, Glycine max
  unsure (1)..(424): unsure at all n locations
gtttgtggaatctagtgagagagagcagaggaaaaggggaagaaaaatgttgagtgcgacggcgatcggcgcgttattgggtttgggaacccagatgtactccaatgctctccgcaaactcccctacatgcgccatccgtgggagcacgtggtcggaatggggttgggcgcggtgtttgtgaaccagcttctgaaatgggaggcccaagtggagcaagacctcgacaagatgctcgaaaaggccaaggccgccaacgaaagacgttatatagatggagatgatgattaatgcatgtcttcatggattgtggcagttggtgaaaataatcatgaaatatgttgnaaccccttttttggggttttttgggcccccctttttttttggggttttttttttcccttttgggaaaattttttttttggg

SEQ ID NO: 39161 - DNA, 452 bp, Glycine max
tcggaaagccaccaaatggatcggctttcatcagcagctacgtttgaaagcatgcactatggcagtgcaagccaaatgggtttgatttggcaacaagccagggcacccctggtggttccattgatgaaattgctagtggttttgtgcctagccatgtcacttatgttatttgtggagagagtttatatgggtatagtcataatctttgtgaagttgtttaggtacaagccagaaaagaagtataaatgggagccactcagggatgaccttgagtttggaaactctgcataccctatggtcttggtgcaaattccaatgtacaatgagaaagaggtgtatcaattgtcaattggagctgcatgtgggctatcatggccatctgatagggttattattcaagttcttgatgattccactgacccaatcattaagaatatggtggaggtggaatg

SEQ ID NO: 39162 - DNA, 444 bp, Glycine max
  unsure (1)..(444): unsure at all n locations
cgacgcagaaggttcatccaatctccgaatcctttaatcgcattgcaaccatgtcgaggagaaaggtcagagagccaaaggaggaaaacgtgactcttggcccagctgttagagatggcgaacatgtctttggcgtcgctcgcatatttgcctcctttaatgataccttcattcatgtcactgatctgtctgggagggaaacgcttgtccgcatcactggtggaatgaaggttaaggctgacagagatgaatcatctccttatgctgctatgcttgcagctcangattttgctgccagatgcaaggaacttggcattactgctcttcatatcnaagctcgtgcccaaaaccgggggggggtttttggggggggggaaaaaccccacaaaaggggaaccccataattaaaaaaaaaaccccttttttttcccccgcggggggggg

SEQ ID NO: 39163 - DNA, 391 bp, Glycine max
  unsure (1)..(391): unsure at all n locations
cccacgcgtccgggaacaagaacaagaacaacaaagtaacgtgaaagagagagagatggaggcgattgttccagtggtggatttccagaggctttcagaggaagaggagcgcatgaagctgagaaaaacatgtgagaaaccagggtgtttcagaatcatcaaccactcaattccactaacactcatggctgacatgaagtcagtggttaaatacttgcatgaccttcccacggaaatcaaaatgcgcaacatacccttcgtccctgagagtggctatagngcggcaatgcaacaagtnctctatacgagggcatgggaatatatgacatggcattgcttaccacaaggcccccccttttttttttgggggaaaaagggggaaatttttttt

SEQ ID NO: 39164 - DNA, 433 bp, Glycine max
  unsure (1)..(433): unsure at all n locations
ccttcacaagattctcacaaacaactcttgagaaagaaagaatggctgccaacacattgaggagttctgccatctcagccttcccatctctcctttcctcctcaaaatccagatttgccgcagcagttcctctttccagctttgttgtcaccaatgcctcttcttctcgcttttccatgagtgctgattggatgcctggccagcctagacccccctaccttgatggttcagcacctggtgactttggattcgaccctcttcgtcttggtgaagtaccagagaatcttgagaggttcaaagagtcagaactcattcactgcagatgggccatgcttgctgttccaggggatttttttttggggggtttttttccccccaaagggnaagaggggcccccattttttggggggggggcccctttttttaaaaaggg

SEQ ID NO: 39165 - DNA, 316 bp, Glycine max
tgcacgcgttcgaacgagcgtaccactctgcgaacattccgtaccctggaataaacttagcgagccgatgtccactcaccgggagaccctgttacacaatctcccctagaagcgcgcagactcccatactgtcaacaggaactagattatgacccttttgtaaaggatcgtaactcaaggcacaggcaccctgctacaccaccacatcattgcttagtttgacggaatgcctgacgataacaggctgatgcttactgataaggcctttagagaagtcttgacatactcacacgacgccatagttgtgccaccatgg

SEQ ID NO: 39166 - DNA, 278 bp, Glycine max
cttggatattattgataagttccatgatgtttttttgacctcaatgtcggatgatcttcacactcctgttgtattggctggaatgtccgatccattaaaatcaatcaatgatttgctgcatacccgtaaggggaaaaaacaacaatttcgaattgaatcactttcagctttggagaagagcatcagggatgtccttactgttttaagacttatgcctgcaagttactttgaggttttgcagcagcttaaggaaaaagctttaaagcgtgcaaacttga

SEQ ID NO: 39167 - DNA, 427 bp, Glycine max
cccacgcgtacgtggacgcatgggcagacttttggacccgctacgtcaataagaagcacgtgaaattgtatgaatggcgtatcaaacacaaaagaaacagaattgctacatagcaaaaactccttcaaacttctacggttatggcgtgcacgttgagcacttcttaaattgcgattctgactctccgctgtatatcatgtaacacttgcaagccttgcattcacacactctctctaacttcagggcagagctatgggcggaaattttatggaggaattggaattcatggcatcaagggaaggtctcagctctcagttgccaatgttgccactgaagttaactctgtagaacaagcccaaagtattgcttctaaagaaagccagaggccagtatactcatttctgccatagtttgacaagatgagatg

SEQ ID NO: 39168 - DNA, 378 bp, Glycine max
gagatgcgattgaacaatggtgaatgctgtttctcaacttggcactcagaaatgggttactggaactattcacttagaacatgatgcgggtggttcaacaaccaggactagatttcttactgggcttaatgcaggtctacatggtttacatctccacacgtggagggacactaccaatggttgcctcttatctggatcacatgtcaatcctgataacaaggagcatggtgcccatgaagatgagaatcgtcatactggtgatcttgacaacgataatgtcggcgatgatggtactgtcaagttcactattactgacagccagattacgctcactggaccaaacaacatcataggaagggcgggtgttgacatgctgat

SEQ ID NO: 39169 - DNA, 384 bp, Glycine max
actcacaagagacaggctcaactaccagactaattttccaattccggcatgtgctccaaacctacggaccgcagataccctaaatgcggttcatacacataacacaacacaacctcgttcctttgctgaccaactcggatgtggctttgttctttcactttaacctatggttatggcttcgttgattcagtatgaccgaagtgccctctcctatgtgaccatcactacccgcttcagacggacccacaagcctcgacttcgttgctccttagatgctaaagtatgcgacatgagcgataacgcgcctaagggggggttttcttctgatccagaacattatcgaggacctgaactgaaagtggcaattattggagctggacttgc

SEQ ID NO: 39170 - DNA, 303 bp, Glycine max
  unsure (1)..(303): unsure at all n locations
gaggcacgcgtcacgccacgcgtncggatagagacgacacagtgccttatggtaagtggattcataaattatagtcaacaaacagtccgagctgcaaggtacattggtcagggtttcacgattaccctatctcacgcaaataggttacccgtaactattcaatatccttatgaaaaaataatctcatcagaacgtttccgcggtcgaatacattttgaatttgataaatgcattgcttgtgaagtatgtgttcgtgtatgtcccatccatctaactgttgttggttgggaactagaaactgat

SEQ ID NO: 39171 - DNA, 347 bp, Glycine max
aaaaaaaaaaaaatgaaaaaacaagaaatatatgaagaaaaaaaaaaaagaaaaataaaagagggatggctcagtaccatgggcatgaccattgctctctcctgcctaattttccctctgtttttgttaactggccatggtggccactactttccggaggtgtcatgccaaagcttggaggcttggtggggattctcacccctttcatttactggaaaaccgttcctcaagattgccagggatatatttggaactacatgcttggcgaacattctttatcagactccgaaatagttaaccaacatgttgatttctatgctggaaccctcaatatcactgctcaaacc

SEQ ID NO: 39172 - DNA, 421 bp, Glycine max
caacagcaacaacacccttatcctctcaccacaacgaccacctctgaccataagcccctctcagtttccacactgcccagaaagttgctctgtaaaccacccaaaggaaagtacgtcagagaggactatcttgtgaaaaagttgtcagctcaggaaatccaggagctggtaaagggagaaagaaaagtgcctcttattattgatttctatgcaacttggtgtggaccatgcattttaatggcacaagaacttgaaacacttgcagttgagtaccaaaacaaggcgctgattgttaaagttgatacagatgacgagtatgaatttgcacgcgacatgcatgttcgcgggttggctactgtgttccttaatagccctgatctgaacaaagaaactattcgaaccgaaagacttcttccaatac

SEQ ID NO: 39173 - DNA, 412 bp, Glycine max
cttacgcgttcgatactatggtttagaccaaagcttcatcataggaatcatcctcagtggatgccactgaggtgatcacagagttgaatgctctgtgggacgctctcgcaatcatgtccactggacttggttatggaggtgctgctttactagctgctagtctatcgagcactcttgagtgcgccatctactttgcaaagttgcttgcaaagattatgctattggtcactctagggtacactgaatggtacgtctaccgataccttatgattaagtctatcgctacagacctagctacactcattgagtcactgactgagactgtttctggagctgaatacagtggcgatagcaggtacatagtctaggagctctactgggagcatgagttctgtttatcggacggattata

SEQ ID NO: 39174 - DNA, 274 bp, Glycine max
cggacgcgtgggcggacgcgtggggggttatatgccacaaaccacaagatacactggaacaagagaagctttgttgaagctgcaatagacccgtgtttgggtgtaatcttagtcctattcctagtagttaattttgtaactgttctttgtgtgattgaacgaaaatttgggaccaggtattgatgtaatgttgccagttgccatcttactaatgtctcatgacttaaattgttttcaagaaagtttttttgttaaattttgtcgtaagacattt

SEQ ID NO: 39175 - DNA, 405 bp, Glycine max
accacgcgtccggctcgatcggacaggtctgccaggtcatcggtgccgggttcgatggcagattccacgaggttttgcctccgatcatgaccgtgctggaggttctgtatcactactagaggctcgggcaggatgtggataagcatatcagtgatagcgacagctcgaaccattgcacatggatgccaccgaacgggtcgctagagggatgcactcactcaacactgtctaacttattacctttccagctggaaggactaccctgtgacgtatggtatatgtctgtggcgagcctatagatgactggggtgacatcaataccgagcgttatttgcccattcatagagaatctatcgcttatagctgagcatgactctcgacagcacgattcttgttactggaatc

SEQ ID NO: 39176 - DNA, 374 bp, Glycine max
gaagaaacttaatcgatcatcacttcacttcactaatacatcatggcagactagacccagaacaagtatgagagctctgaggttgaggtccaggatcgtggtgtttttgactttctcggtaagaaaaaggatgaagaagacaatcctcatcctcaggaggaggtcatcgccaccgagtttcaaaaagtcactgtctcagaccaaggagagaacatgcacagcctcttagaaaagcttcaccgatctgacagcagctctagctcttcaagtgaggaggaaggagaagattgagagaaaaggaagtagaagaagaatgaaaagaaagggctgcaagagaagatcgaggagaaaatagagggtgatcatcatcatca

SEQ ID NO: 39177 - DNA, 399 bp, Glycine max
gttgagaactaagaaggagaagcaaatggcttcctcaatgatctcttacccagctgttaccactgtcaaccgtgccggtgccggcatggctgctccattcactggcctcaagtccatggctggcttgcccaccaggaagaccaacaatgacattacctccattgctagcaacggtggaagagtgcaatgcatgcaggcgtggccaccagttggcaagaagaagtttgagactctctcctacctggcagaccttgatgatgcacaattggcaaaggaagtagaataccttcttaggaagggatggattccttgcttggaattcgagttggagcacggattcgtgtaccgtgagcacaacaggtcaccaggatactacgatggacgctactggaccatgtg

SEQ ID NO: 39178 - DNA, 257 bp, Glycine max
accacgcgtccgctgtaaccaccccactttgtttgttgtacttaaactacattcccatttgcgggggcgtttattagatttcatgggcgctgtattcatggcttctgttttcagacttcaatggaacattaacggatgagaactattgagcaacagtggaagagtacaatgcatgcaagtgtggccaccaattggcaagaagaaagtcgagactctttcctacttgccagacctctatgatgcccaattggcaaagg

SEQ ID NO: 39179 - DNA, 331 bp, Glycine max
tacttacacttgataaattattggtctctctctttttgtaaaaataaaataaaatagacaagatgtttataaagagaactgtgtttgatgtcagattagttggaaatgggatcttatgtttttgaattttgtagttgagtgagggagaggatgtctggtggcacacagaagagtctgagaaaagcacttggagcccttaaggacaccacaacagtctcgttggctaaggtcaacagtgattacaaggaattggacattgctatagttagagccacaaatcatgttgaacgtccggctaaggaaaaacatataagagctatattttcagcta

SEQ ID NO: 39180 - DNA, 315 bp, Glycine max
cccacgcgtccgtggagcgatatattaggaaccaacacaggccttaggaccttgaagttgcctgatcccatgtactacattagtcgacgactctaggctcttatgaatgaaatgagatatgtagtaactaataatggagagacttaacctaggggcactcgttattgctatgattcatatgtatgtgactttgtgtgagacagtagttacgtgagactgcacaagctcaactgaacgtagttttatctttcgtggttttagtatgattttgattttcagaattgattatgcgtctataatcaactttaggtctag

SEQ ID NO: 39181 - DNA, 428 bp, Glycine max
tcggaatgtcctattcctggcgaaaggagggaggcgataagacatgataatcaggtgcttaggagcctattggagtgaccctggccatcccaagctatacaaacacgtgtatatgactagttagcatagttcctatgaaccgggacagagctgactacgaggaagcatgagaaagctatgacgttaaaagattatataaggaatattaagatctgcatacacactagactctaccagtttggatattacactgccataaattgacgctgctacttatcttatagataaactagctctgaaggctggcaatgagaatgatgatgatgaagctgataccgttggatactgcacattcatcgtccagaatgtgacatgagtacccgacaactgacttaagtttaactttcttggtaaagaatctatcaagt

SEQ ID NO: 39182 - DNA, 444 bp, Glycine max
cccacgcgtccggggagaaagttaatatttctcctttcaaatccttcgtaacaatacaaggggaaggtgcagataagaccatgggtcaatggggtgacactgctcaaagccagccattaggaacctatggttctgcaacttttgctgtgaattcaccttatttcatagccaagaacatcacattcaaaaacactgccccaattccagcaccaggagcagttggaaagcagggagtggcattgagaatttcagcagacacagcagtattcctaggctgcaaattcttaggagcacaggacacactctatgatcatattggtaggcattactataaggattgctacattgaaggctctgttgatttcatatttggcaacgctctctctctctttgagggatgtcacgtgcatgccatagcacaacttacaagggccttaacagcgc

SEQ ID NO: 39183 - DNA, 438 bp, Glycine max
atttaatttcatatgaaaatgatttcatctgcctccaacgaaaacaagacggtggtggacatggacgaccacctcgccggcctgggatacaaagtccgttcatcggagctgtgtcaagtggctgcaaacatggagcgtttagaaaacgtgatttcatccaccgacctatctcaactcgcatcagacacaaccctctacgatccttccaacatagggttaggttcgtgggtggacacgctcctctccgagttcgaccaaacggcgtcgttaccgttacaatacgatttcgccacggatccaaaccataacaagcaattagcgctggtcaccaccgtggaagaagactcggggataagactggttcacatgctgatgacgtgtgctgattccgtgcaacgtggtgacttctcattcgctggctccctcattgggaacatg

SEQ ID NO: 39184 - DNA, 433 bp, Glycine max
gtcagaatcagaatcagaagaagcgagcaaagatgtcgggtcgtggaaagggaggcaagggtgtgggtaagggaggagccaagaggcacaggaaggtgctccgcgataacatccagggaatcacaaaacccgccattcgccgtttggctcgcagaggcggcgtcaagagaatcagtggcctcatctatgaagaaacccgcggcgtccttaagatcttcctcgagaacgttattcgcgacgctgttacctacaccgagcatgctaggaggaagactgttaccgctatggatgttgtttatgctctcaagaggcagggcaggactctctatggtttcggtggttaaattttaaggttttgatgggcttagcagctggttatttttgtaaatggtcgtttgtttgggaggatttgattttgtgcttttttgttttt

SEQ ID NO: 39185 - DNA, 369 bp, Glycine max
cccacgcgttcgagaggcggttaggtggatctgctcttgcccaggcgtttgaccaagttggagatgagtgtcctgatcttgatgatgttccttaccttaaaaaggcctttgaaggtgttcaagaccttctttctgatgaattgatatctgctggtcatgacatcagtgatggtgggctgctagtttgtgccttagagatggcatttgctggtaactgtggtcttagtttggacttggcgtctcaaggtaccagccttttccaaacactctatgctgaagagcttgggttagttcttgaggtaaacaagaaaaatctggctttgggtatggataaattgagtaatgtggggagtttaactgaaatcattg

SEQ ID NO: 39186 - DNA, 424 bp, Glycine max
attgaataaagctcagcgtaacgtcctcacgcacatcacattacaacacattgcaggcacctgaattatggataatgcaattgggggacacagagttctgattgaacatcttcaaccaatttcttacacgagaaatgtctcctctcaaacgcatcaatctacagatctctgagctatcattatgtaatgctgggaattctacgcatggtcaaacaagtggatcagatgaagaagtggagatagaacatgcatatcggactgacatctgcaaagcagagcgtgggggctttaaggatacccttccatatgacctgattgacacaactctcaacgctgtactacagaatacaaatgttgaccctgcagaagaaggagatattgtcgccggcacagtactggcacctgaatcagatagacgaatcga

SEQ ID NO: 39187 - DNA, 383 bp, Glycine max
tcgtccacgcgttcgtccacgcgttcgtccactcgtccgatgcggtacataagtagatgatgctgtcctgcttgtggggtatggtacagaaaatggtgaagattattggatagcaaagaattcatatagtgataaatggggagataatggctatatcagaataaaaagaaaactgagcacttgtaaatttggaatcgagggttactatcccattataagagtcaccgatcaacaagcccccaaatattcgtgacaatggcatcggctaactgagcccattgaggctttggaagtcattaataacgaggccaaagtttgatggagactatctttgagctattttatctttatacaagtatcgtaatttctgttccctaaatcat

SEQ ID NO: 39188 - DNA, 197 bp, Glycine max
tcgtccacgcgtccggttgagaactaagaaggagaatcaaaatgcttgctcaatgatcggttccacagctgttaccactgtcaaccgtgccggttcctgcatggctgcaacatgtcactgtgcctaaatgcatgtctgtctgttgaacgaggtatacccactatgacagtaccttctgtgctagcaacggttgatga

SEQ ID NO: 39189 - DNA, 339 bp, Glycine max
  unsure (1)..(339): unsure at all n locations
agcccaatgtcaattattttttccaaatagaacataaattgtatcattaccaatcaggaacataaaattttcaaattaaaaattccttacaactacaaaaatatgagtacaaaccccaagtcaataatcatcaagggtggatggataagtgagatttatcaatttgcaaaagtcagctggctctactctgctgttggtacttaaactacattcccatttgtttttgctttttgagatttcatcatcctgtatttttgggttctgttttcggacttcaatggaaattaatggatgagaactaatgaataagctctcncncaaaaaaaataacaattaggg

SEQ ID NO: 39190 - DNA, 308 bp, Glycine max
catcatcatgctcatgctgctgcggaacaccatcaccatcacccccaagttgacactcctcctcctactgctgctgatgctgctgctgctgaggaggaggaggaggaatctcaagacactccctttcaagaaacaaaccccaacatgaacacagggctagatgaggaaagcgcggatggcggcggggacaagaagaaaaagacacaactacttacaccaataaaagggcggccgatctagaggatccaaacttacttacccgtacatgcgacgacatagctcttctataagagcacctaaattcaatt

SEQ ID NO: 39191 - DNA, 247 bp, Glycine max
tcggatagagataactagaaacagcgcgatgaacatgaaggtgcttgttttcttcgttgctacaattatggcagcatggctgtgccattcgtactatctggcacctgttcggatgaacactggctatggcgcccgtactcctgacgtgaaatgctcagattggaggcttgctggggaagctcacaacaactcttgctttgagaccatttctgaaaactgccttgaagaatcacatgaatacacacat

SEQ ID NO: 39192 - DNA, 439 bp, Glycine max
  unsure (1)..(439): unsure at all n locations
ggatatgctcggaatgggtttggtgaagaggccacaagcttctttcgattaatgaagatgaaaagaatacatgttaataagttgacagttttaagtgtcttgatggcttgtggcacaattaagtctttgctatttggaagagaagttcatgcacagataattaaaagtaatatccataccaacatatatgtaggaagcactttggtatggttctattgcaaatgtaaagaatactcctatgctttcaaggtgctccaatatatgcctttcagggatgttgtttcatggactgccattatctctggttgtgccaggctcgggcttgaacatgangctctggagtttttgcaggaaatgatggaagaaggcgtgttgcctaattcctatacttactcgtcagccttgaaagcttgtgcagaactggaagctccaattcaag

SEQ ID NO: 39193 - DNA, 385 bp, Glycine max
ctcacgcgtacgtactgccactaagaaggatgccgctggatccttgctagagctgctacgtgcagcccttatactcatgcgctgaagggctagctacttactacataccagttaagaagccaccagtgtacaaggctacagtgtacaagccatcagtgtacagaaccaccaggattatgagccagaaccaccggcttacaagcctgaaccacggtgttactagccaccatatttgaagactccatactggataccaccgtatggaacgtaccctgcattttaggacagcaaccattcctaaagcatgcaatgacgtctattatctactcaattgataagaagaactgctttgagttttatagcatcgtgatttacaacttcttat

SEQ ID NO: 39194 - DNA, 380 bp, Glycine max
accacgcgttcgggaaatggcttcctcaatgatctcctacccagctgttaccaggggcaaccgtgccggtgccggcggggttgctccattcaccggcctcaaatccatggctggcttccccacgaggaagaccaacaatgacattacctccattgctagcaacggcggaagaggacaatgcatgcaggtgtggccaccaattggcaagaagaagtgcgagactctttcctacttgccagacctcgatgatgcccaattggcaaaggaagtcgaataccttctaaggaaaggatggattccttgcttggaatacgagttggagcacggcttcgtgtaccgagagcacaacaagacacctggatactatgaaggacgctact

SEQ ID NO: 39195 - DNA, 440 bp, Glycine max
agcgtcctagtcgcaaccctaataagaagaaccacagcttcaagcgagtgacatccaccagccatgggtcgtatgcacagccgcggtaagggtatatcctcttctgctttgccctacaaaaggacaccccctagctggctcaagatctcttcgcaagatgtggaagaaaatatctgcaagtttgcgaagaagggtttgaccccgtctcagattggtgtcattcttcgagattctcacggtattgctcaggtcaacagcgtcactggcagcaaaatccttcgcatcctcaaagctcacgggcttgcgcctgaaattccagaggatctttaccatttgattaagaaggcagtttcaattaggaagcatcttgagaggaacatggaagggaccataagggggggaacctttttttccccccaaaaaaaagggggttttttttt

SEQ ID NO: 39196 - DNA, 440 bp, Glycine max
tcgtccacgcgttcgattctcttcttctcactcaaactttccctctctgcgccgttcctctcaaatggatgcaccaatggagttttggggtgttgaggttaaggttgggcagactgtgacggttgacccaatggatcctgtggattcatacatacacatttctcaggttgcgctcggagaggcgaaaaaggacaaacctaatgaacctgtggttctgtacttgaaagttggtgaacagaagattgttttgggaaccctttctagggatggcatccctcacctatcattggatttggttctggactccgattctgagctttcccacacttcataaagtgccagtgtctttttctgtggatacaaagttctaactggcaattgaacaaaaatttggccctttttttcccttttttggggaaaaccacttttttttttttttt

SEQ ID NO: 39197 - DNA, 379 bp, Glycine max
  unsure (1)..(379): unsure at all n locations
cggacgcgtgggcggacgcgtgggcggacgcgtgggcggacgcgtggggttaatgtgtctggattatcattagtggctgccaaattggttgacttccggagacagagtggagataccacatccatattttgtatgactagactcatgcttaattcttataacaatagtattctcttttccgaaaaaaaaaaaaaaaaaaaaaaaaaaaaaaaaaaaaaaaaaaaaaaaaaaaaaaaaaaaaaaaaaaaaaaaaaaaaaaataaaaaaaaaaaaataacaaaaaaaaaaaaaaaataaaaaaanggggggggccgttttaaaggatcaaattttactcccccgggtttgcaaagaaaaaatttttttttaggggcaccaa

SEQ ID NO: 39198 - DNA, 342 bp, Glycine max
gtaaagaagaagaaaagtatcgtgcgtttagcttaggaagatgaggctgcatactcttgtgtgaccaaaaagatgagtgaagacgtggagatgaaagatcaggcaacgccttcacactcgctttcttcagttcctccatctgcattgcagcatttgaaggaaatagcatcaattattgaaaccggttcgtactcaaaggaagttcgtcgaattgctcgtgccctgcgccttacatttgcattgaggcgtaaattgacagcaccagttctctcatctttcctcgattatgttcttccttccgcttctgaaccctacactaagttatcctcttttcttcctaat

SEQ ID NO: 39199 - DNA, 451 bp, Glycine max
gtgattgttgtgactcgttcttcttcgtcgttatcttcttcttttgttgtttgtgtgtttgttttttctctcacctgaaaatgtcttgctgcggtggtaactgtggttgcggaagcgcctgcaagtgcggcaacggctgcggaggctgcaagatgtacccagacttgagctacaccgagtcaaccaccaccgagaccttggtcatgggagtggcaccagttaaggctcaattcgagagtgctgaaatgggtgttcccgctgagaacgatggctgcaaatgtggagctaactgcacctgcaacccctgcacttgcaagtgaggtgttggagagctaaagcttcaagcagagatggcccttagaaataatgataaaaactatatgtagtttcaaaacttcaaaattatgtagtatgtattatgttgcactctgggtgtttgtgtctaaacaaa

SEQ ID NO: 39200 - DNA, 406 bp, Glycine max
ctcaaggaaagtgaagaaaaaaatgtttatttttgttttttcacgagagagagagagggagagagagaaataattcaattcaggtgctatgttttctcatgcatattttgtagtatggtctatagaaagtatctacctttcatagtttcatagagttgtggcaagtgagaatgaaaaactaccattgttaaattatggtcttaaattcacttctttgggtactttttggaattcttgaaaaggtgtcaagaaatattgatctggtttatggaggaggaagcattggtttgatggggttggtttcccacgctgtttatgaaggaggtcgccatgtaattggagttattcccaagacactgatgccaaaagagattactggagagacagtgggggaagtgatggcagt

SEQ ID NO: 39201 - DNA, 415 bp, Glycine max
cccacgcgtccggtttcttagtgcacttttttttggcatcaaagaggttaaatccatgggttctgattatggtattcccagggaactctcacatcttcaaaagattcggacggtgtaccaaacagagctaccttcttgacttcaatagatgactgactacagatcatgagaaactcaccatgctgtgagaacattaatgaaattgacatgtctggatactttttaaaaatcttgaggatgaccctataaatatttatgcttcatgaaaccactgagacgttggaatttggtgatgcaaccaccactgctgaccccactgatgcactcaccattagcagggcgtttcctaacacctatggacaccctttggctcactttctcagggcaactggcaaagtccctgatgctcacatca

SEQ ID NO: 39202 - DNA, 390 bp, Glycine max
gtgagttgaaatccatggtgcagctatgtcctcgctgctacattataatgattgccatgtcaaaactcataaggagcttagcttacatttgaattttagtctttgtcagttctggcatgctaagttctttcatgttggtatggtgcatagcaaaactattcaaattgggcaataagatttccatatgtggccgatgaatttctttctgtcagtaattatgaatttgttctccccccaccatcttgtcagaacttattgtctgtgcgttgccaaatttttttggctttgcagttggaatgcaacatatgaaagtttacttgggagcaacaagccattccatcagcctatccctcttgctgaaatggtagattttcttgtggacatatggga

SEQ ID NO: 39203 - DNA, 401 bp, Glycine max
  unsure (1)..(401): unsure at all n locations
cccacgcgttcgnccacgcgttcgnccacgcgttcggaacttcttaaagatgttgataccccggcaggattggcatcaaccaagcgactggcatttaaggacagcttacaacagagaattctcaaagctgagaagattgatgtctcatttgaaactttcccatattatctaagtgatacaacaaagaacgctttgattgcttctacatttattcatttgaagggcaaaggctttggaaaatatgcttcagacctcccatcagtgtctccacgaatagtgttatctggtcctgcagggtcggaaatatattacgagactttgtccaaagcacttgtgaagcattttggtgccaggctactaattgtggattctctttcactgcctggtggatcaccatcaaa

SEQ ID NO: 39204 - DNA, 346 bp, Glycine max
cccacacgaccggtgagatctctggaaggatcgtgcgaaagatagaggggacaatggtggtgacgccgaagaatgtgccggactatgacgccgtctcctacgccataaaatgcagtgctaaaggcaccgctaccgacttcttgggcaaatgcttggacacatgatggcacgcatttggtgctgtcactgactttgttagtgatttcatttgccttcagattatcatggctactatcactgctgctcatactgaaggaaaaggtaaaagcaaagcctatttcgaaaaacattttgcgacccttcctacgatcgtagcaacgctggaagcattgcatgataactttga

SEQ ID NO: 39205 - DNA, 371 bp, Glycine max
cggacgcgtgggcggacgcgtgggcggacgcgtgggcggacgcgtggggaggaatccaaaagctcctgatttcaaacacaaagatacaggggaagctctgtggatcgaaggcagatacaatccgccatgggtcaagtctcaactggaaatactagactcaagaatggggtcgtttgctagtcaaaatgctaggatgcctgtaggtatggtagctgcagatgaaattgtgtctttctaatggctcatgccaaatctcgcccatgtaatattcaattttaactgtgaaacttctttgtacagtttgcattttgcccctaattttaaattgtatgtatgtcagtactgataatggttaagtttgcccttgagct

SEQ ID NO: 39206 - DNA, 410 bp, Glycine max
  unsure (1)..(410): unsure at all n locations
tcgcccacgcgttcgcccacgcgtncgcccacgcgttcgtgagaacaaaggagatcaagaatgggggggtggccatgttggctgtgatgggggcatggttccagcacatttacactggcactggtcctattgacaacctctttgctcaccttgcagatcctggtcatgctactatttttgctgctttcactcccaagtgagaagggttggaacaactctatgattgccagccttggagaaacattgggaaacttgtttaactaagttgtaaggcttaaatgtctttaggggggagtttttatgttggtgaaagcttgtaaaatggtacttctattgtcatgcacagattgattattcaatgtacacatacctatttaagtttagatgcatttaatgtacattcaagaagt

SEQ ID NO: 39207 - DNA, 394 bp, Glycine max
  unsure (1)..(394): unsure at all n locations
ctnttgttcctctcacttcggatgaacatgataatcgtctcactcaatggactaatccatccgctcgataccctccacacttgagggatataattaaagagtatgttgaagagatggaaaagctgtcctttaagttgatggagcttatagctttgagtttaggccttgaggcaaagaggtttgaggaatttttcatcaaagatcagactagctttcttagactcaactactatccttcatgcccttaccctcaccttgcccttgggtgttggtcgacataaggactctggtcccttaaccattcttgcacaagatgaagttggaggacttgaagtgagacctaaagcacatcaagactggataagagtgaaacctattccaaatgcttatatta

SEQ ID NO: 39208 - DNA, 419 bp, Glycine max
gtaggcagtgaactgaacatttcagattttgttagatgagacaggggaaagaagctactgaatcttgtgacgaatggtgtttgaatactctaaggagaataagagaagcctcccctttgagtttgaaagttactttacaatctatacgtgaaggtagatttgaaactctcgataaatgtcttatacgtgagtaccgcatgtccctacgtggaatttctaagcttgtctcctctgatttcttcgagggtgttcgagcacgaatggttgataaagattttgcaccaaagtgggacccacctagtttaaaagatatatcagaggacatgattgaatactatttctctcctttaagtgaagttcaatctgaactagtgctgccaacggctttgcgagaaccttacatgtgaaactagcatacc

SEQ ID NO: 39209 - DNA, 413 bp, Glycine max
cccacgcgtatgcagacgcgtgggcggacgcgtgggtttcttgaaaagggcttgtatgtatgtggagggcttacgagaggaccgactggaattatctccacaaacctctattgtgcagaagaaactgtttcgagcatatcagcagaccttgaaaacggagggttgatttcgtcatcaaccttgcccaaacctggcagggacggacttctccagcttctgcatgatagaaatgtcagagtactttcattaagtgattgggaaaagatagactcttaagaaaggaggcttggaagttcaaggaacaaacctagggaaaaactagccacctgggatgaactatacaaaactacctcataatgaatcaattatttcacatgatacttcattattttagcttgataaacatcttatcg

SEQ ID NO: 39210 - DNA, 387 bp, Glycine max
cccacgcgtccgttattattattattattggattagcgtggtgatcagagaccctcaggtagagagccatgtcaagggagggaggcttggattggaggagaactaatggggtgtgtgattagccgagaagtgtcatcgggaatagtctccgaggtgaaggaggagaagaatttgagtgttgggtccaacaagaaagttgatgaagcgtccacaagcggagctgatgagaacgcggtagtcgctcagaatggtgagaaggataaggaagagaatggtggcggtgatgatcgcgttctgcggccgaagggtgaaagaagaagatcaaagccaaatccaaggttaagtcatccaccaaagcatttgcacggggagcaagtagcatctggc

SEQ ID NO: 39211 - DNA, 409 bp, Glycine max
cccacgcgtccgtccacgcgtccgcccacgcgtccgctctctttctctctttctagttcgtgttcttcgtcgcaaatccgaagtttttcgcgatggcgtcgaagcgaattttgaaggagcttaaggatttgcagaaggatcctccaacatcttgcagtgccggtcctgttcatgaagatatgtttcattggcaagctacaattatgggtcctccagacagtccctatgctggaggtgttttcctagtgactattcatttccctccagattatccctttaagccacccaaggttgcattcaggacgaaggtgttccacccaaatataaatagcaatggaagcatttgccttgatatattgaaggagcagtggagccctgctctaaccatttccaaggtgttgctctcaat

SEQ ID NO: 39212 - DNA, 327 bp, Glycine max
gcgcgtggatcgagataactagaaacagcgcgatgaaaatgaaggacctcgctttcttccatggtacaattttggtagcatggcaatgccatgcatacgatatgttccctgtccgaatgaacactggctatggtgcccgcactccggaggagaaatgcgcaagtcggaagcttgctgaggaagcacacaacatctttggctttgagaccattcctgaagagcgcgttgatgcaacaaaggaatacatccatggcgaacaatatagatcagacttcaatacagttaaccaacaagcttacttatatgacagagaacttgaagtccatt

SEQ ID NO: 39213 - DNA, 474 bp, Glycine max
atcaatgtatggataaaaataatttagtcaataagcaaaccataatgtacatgttttgctgggcctcgattggaaaatggacagaactgtagctggtggatggtggatcttggccaagatcatcaggaaaatcgatgaatgcagcttatgtgcaactactatactctgaggcaggacggttctaatgccttcccgagatgttggaatgttcagggctcacttgacggaaagagctggacaaacttgatagttcatgaaaatgatcggagtatatgtaaacctggccagtttgcctcttggcccataattgggcccaacgctctgcttcccttcaggtattttcgggttgtgctcacaagaaaccaccaccgatgccaccaatttcctggaaatttctgcatttgttacttggaattgtatgggtacttcctttaaaaagcctaaccatgccaataccataccttcttaaataca

SEQ ID NO: 39214 - DNA, 375 bp, Glycine max
agattatccacgcgttcggtttagttttatcttccggttgcttaatctttagacatgagtatcaagcagcaatctttatggatggtgactaggatgtaaattgttgacgaatttgcctctaaggattgctaggtgtgttcgtatagatgtataaaaaaaatgtttaaatgttgatatttgcatttctgacaagtggctagagtgtaaaagccatataattagttcaaattgatactttgacaattattgtttgcgattaaaacagttgcattcttcataactattcatcctgattgggacttttccttactcattactcaagactatcaaaattgattatgtattaacttcagataaatatacatatttctttaa

SEQ ID NO: 39215 - DNA, 153 bp, Glycine max
accacgcattcgacatactagtactcatacatgaactgagaaggctaaagagacctgtacgtcgtgctgtacgcctagaccgagccagagcttcgtcttggccctggattactcactgcagaaccaacaccagtcacaactgacaccgtcact

SEQ ID NO: 39216 - DNA, 286 bp, Glycine max
atgctgtccacccgttcgcgaacagcgtgggcggacgcgtgggaaaactttctatagcattaagttataactcatttgaggctctgtgagaattgagaaatggctaaagatgttgaggttcaagagcatggatgagagtactctgccaaagactaccatgacccttcttcagcacctttgtttaatccagaagagctcacacaggggtccttctatatagccctcatcgctgagttcatagcaacccttgtctttctttatgtcactgttgctaccattattggct

SEQ ID NO: 39217 - DNA, 301 bp, Glycine max
gcaggtcgagcaggcgtacgcttcaaaaccgtactcagtcaatatgtctatgtttacggtactagatttgaccgtaacatgacacaagaaggtaatggcaacaccaacttctgcgtgagtgttaacaacaacggctacattagcgctaatgacccgttgaactgtggcgcggcagcggatgcgatagccggtagccacctcgacaaggtcaagcgcatggtgtaggagtacctgaggccgttcgtgaagctcggccgctagaccctgacgatctctcatatggcgacgatcgcggtgcacg

SEQ ID NO: 39218 - DNA, 365 bp, Glycine max
accacgcgttcgttcactcgtccgagatactaataccacactttactgagataaatacgacaccactgacatacggcactaacgaatcagtccgatatggcgtgcacgaagcacaccgctcgaaagacgaacgtcggcacggaggcacgtcagcagctcgctaccaaggccggtcgaatgaacaagccggagaccttcggactgaagaccgcggagctgttgaagctgagaacgcgccagatgagggacatgctaatgatccagaagatcacagagcatatgatcgtgagacatacattgcagaagctcatgacagatatgcggcaccagagcaagactgatttgcgtctccagaacactgctga

SEQ ID NO: 39219 - DNA, 478 bp, Glycine max
gttgagaactaagaaggagaagcaaatggcttcctcaatgatctcttccccagctgttaccactgtcaaccgtgccggtgccggcatggttgctccattcactggcctcaagtccatggctggcttccccaccaggaagaccaacaatgacattacctccattgctagcaacggtggaagagtgcaatgcatgcaggtgtggccaccagttggcaagaagaagtttgagactctttcctacctgccagaccttgatgatgcacaattggcaaaggaagtagaataccttcttaggaagggatggattccttgcttggaattcgagttggagcacgggttcgtgtaccgggagcacaacaagtcaccaagatactaccatggacgctactggaccatgtggaagcttgctatggttggttgcactgatgcttctcaggtgttgaaagagcttcaagaggctaagactgcataccccaac

SEQ ID NO: 39220 - DNA, 306 bp, Glycine max
acgcgcacgcgtacgccttgagggtttttcttctatagagacacacggagagagtgtcacagcaatcaaggcccttgaatggctaccactggggcttacattgcctactattctacgtacggacatgttgagaaaggagctgaagagattaagaaagggagctggttccgatgaacgcgtggaagcagagctatggcatgtacctgaaacactttctgaagacgtgcttgggaagatgggtgcacctgcagagagtgatgcaccgattattacacccaacgagctacctgaggctgatggcttatt

SEQ ID NO: 39221 - DNA, 426 bp, Glycine max
acgcccacgcgtccgcaagatccatagttggtgccttgtagtatgctaccattacacaaccagaaattagttttcgtgtcaacgacgtgtgccaattcatgtcaaagccctctgaacaacactggctagctgtgaagagaattctaaggaggtccacttcaggagccagcatttctcttggtcctaacttaatctcttggcgggctaagaaacaatcggttgtggcctggtcaagtactgaagccgagtatagaagcatggctctaattgctgcagaatcgacttggattcaaactcttctttatgaacttgaagctgcttacactactgctttaattctctttgacaataccagcactgtctcttttggctcataatcctgctcttcactcttaaacaaagcatatggagctggatctgtttttt

SEQ ID NO: 39222 - DNA, 311 bp, Glycine max
acgcccacgcgtacgcccaacagcaagaacgaataatttaacttgtaaaccatcccattcaatatcagttgagccggggtatctatctacgacgcctagggggtcgatttcttcgtacaacactacacatgccccaatggccccgcagggtactaatgcaagagcccagcaaaggtcacagtggacgacttcttatactcctgccttgataccgccggcaacaactcaaacataattaaagccgcattgacccctgcattcgacgcacaattccccgaccttaacgggcttttaatattcattgcacgcct

SEQ ID NO: 39223 - DNA, 409 bp, Glycine max
  unsure (1)..(409): unsure at all n locations
gaaggtccggcgaagatcgtggccacgcctcatgctaagaagctcgcaaagcagcacaaggtcgacattgcaacggtcgccgggaccggtccgttcggtaggattactccggcggacgtggaggccgccgccggaatcgcgccgtcaaagagaaatgtggctccggcggcgattcctgctccggcgactccagctcctccatcgaaagctgcttctggttctgctgcaccggctccgattccgggttctagtgttgttcccttcactactatgcaatctgcggtggcgaagaacatgatggagagtctatctgtgcctacgttcagggtggggtaccctgtgactactgatgcgttggatgccctgtatgagaaggggaaacccnagggtgtgacaatgacggctattt

SEQ ID NO: 39224 - DNA, 371 bp, Glycine max
cttgagttaaaaaatggcagcagcttcttccatggctctctcatccccatccttggctggcaaggccgtgaagctgggcccatcagccccagaagtgggaagggtgagcatgaggaagaccgtcaccaagcaggtctcctcaggaagcccatggtacggcccagaccgagtcaagtacttgggcccattctctggcgagcccccgtcctacctaaccggtgagttcccaggcgactacggctgggacactgctgggctttccgcagacccagaaaccttcgccaagaaccgtgaactcgaagtgatccactccaggtgggccatgctcggagccttgggctgcgtcttcccggagttgcttgtccgcaacg

SEQ ID NO: 39225 - DNA, 370 bp, Glycine max
aatacttaggatgcacttccatgattgctttgtgcgaggttgtgacgcttctgttctcatagccggtgctggcactgagagaacagcggggccaaaccttagtttgagaggatttgatgtcattgacgatgctaaggctaagatcgaggctctgtgccctggtgttgtctcttgtgctgatatccttagccttgctgctcgtgattctgtagttctgagtggtggactaagttggcaagtgcccacaggacgcaaagatggaagggtttcaattggatcagaagccttaactttgcctggtcctaatgataccgtcgcaacccagaaggataagttttcaaacaagggccttaacaccgaagacctcgtc

SEQ ID NO: 39226 - DNA, 458 bp, Glycine max
  unsure (1)..(458): unsure at all n locations
cccacgcgtccgcacgcttagtgagattgagattgttaatcttgagagagttggactttggcagaagaannttcattgggtagttattatttatgactgcaatctgtatttaatggtcttttcttgtattttttccaatttattagatagcttgtattatttgtttgtctttataaatatttttttttttttgttcttgcttttttttattttgttttaataatcttttattattatttcttttttactcttataacatattatttcagtttgttgttatgnattttttttgtttttttttgttttctttttttataatttgatttcctatttttatattttttaatgtttttttatttttttttatttgctaattagaattttaattttcgttgtattttgtttttcttattattgatttttttattatgatgtttattttttttattttgatggta

SEQ ID NO: 39227 - DNA, 470 bp, Glycine max
gtgactgcgatcatcgtagttaaatggtctcattgagcgcaaagcgcggaagatccataggatcattgctgctaccatctgacaacttggcagcatgggacgcagaaatcacatcatgggtgtcaacggagccctcatgcaagccgatggtggcagagaacccatcgctcacccattcggtatgatcactcttaaagttgactgtgtcagagaggccatctaacttcatacatctgacattaatgtgacaactgaaaaatgtgatgacgacctagctagctagacgctggtgctactaataatggtagaccgattattactatataatacgtgatatactacgtctagacatactgatgctactaatgatgatgatgcatgacatgcggacgagcttatattcgcctctcattaggttgtcaacataactccgactgataagaagtctatcactgactatggttcacccg

SEQ ID NO: 39228 - DNA, 467 bp, Glycine max
gctgcaacagcttcaaggtttatcaagtgtgtgacagttggggatggagctgtaggcaaaacttgcatgctcatttgctatactagcaacaaattccccacggactatattccaacggtgtttgataatttcagtgcaaatgtagttgtggaaggcacaactgtcaatttaggcctctgggacactgctggacaagaggattacaacagactgaggcctttgagctacaggggggcagatgtctttgtcttggctttctctttagtcagtcatgcaagctatgaaaatgtgttgaagaagtgggttcctgaactgcagcattttgctcccggcattccagtggtgctagttggcaccaaattggatctccgagaagacaagcactatttggctgatcatcctggtctggtgcctgtgacttctgagcaaggtgaggaattgcgtaaactggtgggagctacatatta

SEQ ID NO: 39229 - DNA, 444 bp, Glycine max
tcgtccacgcgttcgcccactcgttcgcggacgcgtggggtttgttgttgtaactcgttcttcttcttttgatgttctgtgttcgggtttgcaacttctctgacctgaaaatgtcttgctgcggtgagaactgtggttgccgtagctgctgacagtgccgaaacggctgatgatgctgcaacatgctcccagacttgagctacacttgagtaaccaccaccgagaccttggtcatgggagtggcacctgttaaggctcaaattgagggatctgaaatgggtgtgcccactgagaacgatggctgcacatgtggaccagactgatactgcaacccctgcactagcaagtgacgtgtttggagagcaagcttcaagcatagatagcccttaattaggaataatgatcaactactaacgtgtagctaaaaacttatgtattatgtct

SEQ ID NO: 39230 - DNA, 457 bp, Glycine max
  unsure (1)..(457): unsure at all n locations
tcgcaggcagctgcctgtgatttgaaagaattggtgcgcaagttcatccctgaaatgattggaaaggagattgagaaggcaacatctagcatatatcctctacagaatgtgtttattcgtaaagttaagattcttaaagctccaaagtttgatctaggaaaactgatggaggttcatggtgattactcagaagatgttggtgccaaggtggatagacctgctgatgaaaccttggctgaggaagcaactgaagtagttggagcttgatccggctgataatgcatttttgtttggttagaattcctgttgcttttacaaatatttnatttttcaagttctggttttgacactttaggaaacacactttggtttttgcaaatctaaatcctggttttttggcaaaaagtttattggtacaacccaattaccaagaaccggtgaaaggcgtaattttctt

SEQ ID NO: 39231 - DNA, 384 bp, Glycine max
cggacgcgtggtcggactcgtgggcggacgcgtgggcggacgcgtgggcggacgcgtggggaatgcattgcacgtatagaggcaaaggcatatgggttgttaaaggagctaggagcaacccatgtagacgaagttttcacagccggtggaggagctaaaaatgagaagtggataaagatacgagagagggtgattggtttgcctgtgagtcgtgcaaatcaaacagaagctgcatacggagctgcattattggcaatgaagggcgatcaacaaaatattttgtgaaaatattattacaccacctgtttgatcatgatgcgtttgaagagtaattcgtcatttgaaatgttatgagagaaaaaaacaattgaatttcttgggagc

SEQ ID NO: 39232 - DNA, 285 bp, Glycine max
tcgcgcacgcgtccgacgatcgcatggaaactagctggatcaaatcagtgctctatattgcaggctgttcaagtacacacccctccggaagttctgcttaaaggaaagccaataactacgttcttcttcaagggcaagtcatattttcgtagaaaaccgatgccggcaaccgggcttgaagggttgcggcaaaagcctctagtagaagacaaacccttgattttatggaacccttattgtggaagggtgaaccaattttcagaatctggcaccccatttccctac

SEQ ID NO: 39233 - DNA, 426 bp, Glycine max
aaagatatcacataggcatatggcttccaccttttgttgctcggacgaccatgctgtgcaccatcacagccagatactcatcacatcacatcatggttagcaccaatccttaccagcttctttgagaggcacaaaacacagaggatattgatgtcagcccaatctctcaccggattgctctaaccgtgctcattggtgctgctgctgttagctacaaagttcaacctgctgatgcagcttatggagaaaccggcaatgatgttagttaaggctattacaaacacatatttcctgccatacaatggagatggattcaaactatcaattcgctcatagtggaacccaagcatataggtttaatacacaagtcaggttgttagatatgaggataactttgattcaaccaccaacgtggttgtcaacatc

SEQ ID NO: 39234 - DNA, 344 bp, Glycine max
ggagaagctaatggcttcctcaatgatctctttcccactcttgggactgtaaaccgggccggtggcggcatggttgctccattcactggcctcaagtccatgggtggcttcccgacccgaaagaccaacaatgacattaccttcattgctagcaacgggggaagagtgcaatgcatgcaggtgtggccaccacttggcaagaagaagttggagactctttcctacctgccagaccttgatgatgcacaattggcaaaggaagtcgaataccttcttatgaagggatggattccttgcttggaattcgagttgcaacaccagctccatgttccgtgagcacaaca

SEQ ID NO: 39235 - DNA, 310 bp, Glycine max
catcagctttccagggggcaagtgactgtcctatccaatgttgcttcttgctgctctctctgggggaacaactgtggtatacaacctgttgtatagtgaggatattcatcacatgctttgtgcattaaagacccttgtactgcgtttgggaaactacaaatcatccaaacaatcaattgttgttgggtgttgtggatcgtttcccactactcaagtatgttaagatgaaattaacttattccttaggaatgctgcttctgcagtgcgaactttgacagcatcttcggtttctgcacgtggaaatgcaagc

SEQ ID NO: 39236 - DNA, 159 bp, Glycine max
gcgaggctatccttgaggattaaaaatggcatctgcctggcccagggctctatctttccaatccttgggtggcaaggccattaaacttgtcccatcttcccccgaagcccgtagggtctgcctgaggaagaccgtcaccaagcgtgccttctaccggag

SEQ ID NO: 39237 - DNA, 397 bp, Glycine max
agtaaactaacgcaggcaggaagagtgagcgcgctagatgccttgggtgaggctttcagagtctccaaggctcgacgttgctattgacatgggtaatccatttctcaatctcactgttgatgggttccttaagatcggagctgtcgcagccacgcgatcagctgctgaagatacttatcatattatccaacaggggaatatcatcccttcctggtcaagctctgatgtcgaggagttcattgcttctgatcctgttcatggacccgtcctgaaaagtgctagagaagcagtgcaatttggcctcacaggaagtgctttgggagcattatttactgcaggctatgcctggaaatattcaaagagtttacatggcgcttgactgtcacttttagctgga

SEQ ID NO: 39238 - DNA, 332 bp, Glycine max
ctccctctgcgcatacactgtgctcgcagggtttatacaccaagagggaaatgggtgccgagccgactatttcgggtgggtgggttggactggacaaaggttacgtcgtcaccaacaaagaattgccttcacacccctcacatcgttaggggaaaacaagcaatatggtgcactatgtgcggaaccttatatgagatggagccggatttgcaccctatgaatagcgtctaactcagttggtgaatgatgagaacgataaaacggcactcgacgttgcaaaaagaaagctcggtacacacacacgcgcaaataataagcatgaggaaatgtcc

SEQ ID NO: 39239 - DNA, 442 bp, Glycine max
atttccttagcagatgtctatcatgtagtcactgccactgttccattatatgtcaccatgtttctagcctacatctctgtgaaatggtggaagctcttcacaccggaacaatgttcaggcataaacaaatttgtggccaatttctcagtcccaattttgtcattccaagtcatttcttccaataacatttacaagatgagcctcaaactcgtatatgccgacgttgttcagaaattgcttgcatttttagtcttcacggcaatcattaggatcaaggacagggggggtttgaagtggatcataactggtctctcactatcaacacttcccaacactttgatcctaggaatcccactcatgaaggctatgtatagggatgaagcttctcttctcctaccccagattatcttccttcagagcatggtgtggtacaatttgttat

SEQ ID NO: 39240 - DNA, 394 bp, Glycine max
cccacgcgtccgcccacgcgtccgcccaattccatagctgcctcagtaattgggacctgaaaaactttctcttttaatcactgaggcatacaaggatgcacaccaaaagagtgtccaggccatgaaggaaaggatgaatgatcttgcacagagcttatgaatgccaccagggcttagtgaaggattgaagtgatgaatacttttattctagacttaggacttgggcctcaggtttgcacaaacatggcaggatagacttatttgttttcttcatttactatggctgttaatttgcaatcttggttattaagaaagaaatgtaatcctggaattatttgaaatggtggtggagcttcaattttttcacattttactcgtgttatttttgtttgaa

SEQ ID NO: 39241 - DNA, 216 bp, Glycine max
cacggacttgcgtactcaacttaggggtgctgctggggccattgcttctgatgaaaagatcgtcttgctgggtgccatgcaggctttttttgaccgttcaacgtacacctatgtgtttctatggactcctgcattgagcctaaatgatgaatagattctggatgagactcatattgtaacatttatgttggcttcaaagatgagaagctcgcttga

SEQ ID NO: 39242 - DNA, 359 bp, Glycine max
ctcataagatcgctgtataacttgacatagtgtggagattctaaccatgtttgttttttgcgtagttcgcaaaggcttggtggcttgtacatactataggacctatcaaaccaatgcatgtctgcctgacgaaaacagactatgtggagcgctgctaacttgttaccacgcgcgggtcaaatgataagtattggaaccacaccacattcgtgtcttgtaaaccattcctgaagagtgcgttgaaccaacaaaagactgcctgtctgtctaacaatccagattaaactctacaacagtgcaacaacatgctttcttttatgctagagaacacgaaaatcatctgaacgacatatttatat

SEQ ID NO: 39243 - DNA, 370 bp, Glycine max
atataactagaaaccgtgcgatcaaaatgaaggaccctgttttctatgttgctacgatctgggtagcatgacaatgctatgcgcacataatgtccactctccgaatgaacactgtcaatggtgcccatactactgaagtgaaatgcgccagtcgaacgctatctttggtagcacacgacatcataagctttgagacccttcctacagagtgcgtgtgcagatctgaggaataccttcgtggcgaactgcatacatcctactacaaagcagtttaccatgaaccttactttcatgccaaaggcctcgacgtgcatcccaaggacacatgtgtgctcagaatatatggcacggcactttataatattccata

SEQ ID NO: 39244 - DNA, 401 bp, Glycine max
gccagtcgtgcgctataagctactttatcgtgaggagaatatgaagactcttgccgtctgcgttgctaaaaaagatccggtggcatatacatgccatgtcgcatagctacacaaacgttccactcttagaatgaagactgtctatcgtgagcgttcttactacgtataaagcgcaacctgtatgctcgatgcataagcacacatcaatcctagcctgaaaaaccattcctgaacagagcgactgaccaacaaaagactacatttgtggcgaacattgtagatcaaactctataacacctaaacatcacgctttcttttatgctagcgaacgcgcacaccatcacgacgacactattatattcaacatatattacaccgcactctctaatatgccatactat

SEQ ID NO: 39245 - DNA, 223 bp, Glycine max
ctgaagaagtgaaagaagaagcagaggagcctaaagaaactactgaaacagaatcagcagcagcagcaccaccagcagcttgctcacttcaatacacaactcccagaatttctcatgtcaccacgtggcaagcacgctgatgtggagccaagtgttgtgcttacacgtaggtgtacccttcataatacaaccaaagacttaagcatcatataataatattaat

SEQ ID NO: 39246 - DNA, 303 bp, Glycine max
tgttgatcgacatacctagaaacagtgtgatgcacttgaaagcgcatgcatacttcattgatacaggaatcggcagcacgtcggatgcgaaacttacaatatgttacgtatcgaatgaagactggctatggtgcccgtacttctgaagacatatgcgcatgaagaaggctgggtgtgaaagcacacaacatgtatggctcttataccaatcctgattagtgctgaggagccacacagggacacatacatggggaacaaggtgcatcatactccaaaacaggtaatcaacaagcttactgttat

SEQ ID NO: 39247 - DNA, 445 bp, Glycine max
cccacgcgtccgcccacgcgtccgccattgcaccacataaggccaaagctattaaggccactagttcggggtgacgtgaagatgacaatcaattctccttaccttctttcacctggttttattgttgttttgcttttttcctgcatccttgctttcttcctgaattacagtatttttctgaacacaactctcaattcagctctggcacagacaatatgtggtaatcttaaggatctatttactattggctttggctggataatttttggtgggctaccatttgatttttggaatgtagtaggacaacttctgggttttgcgggctctggtttatatgcctactataagctcatcggcagataactcactgcgtttgatgtctttatggatttcggactaccattgcttcggtcatctgaccttcactacatcaaggagaagaatc

SEQ ID NO: 39248 - DNA, 441 bp, Glycine max
cgttgatcgacataactagaaacagtgtgatgaagatgaacggccttgtgcaattcgttgatacagcaaacggcagcatgtcagatgcgcggcattactatatgctaccctctgcgaatgaacactggctatggtgcccgtactccggaagggatatgcgcatgatgaaggctagctgggcaagcacacaacatgtgtggctatgagaccatgcctgatgagtgcgttgaagcaacaaaggaattcatacatggcgaacaatatacatcagactccaaaacaggtaaccaacaagcttacttttatgccagagacctctacatccatcccaaggacacatttgtgctcagtatagatggcacgcgcctctctaatattccatactacaaaaaacatggatatggagtggagaaatttaactcgaccttgtatgatgaatgg

SEQ ID NO: 39249 - DNA, 438 bp, Glycine max
cccacgcgtccggcacatatgaacttggggattgtattgagttattttaatgctcatttctttcgaaactcactggatataagggaccagtttgtgccacagatgattttccttaacagtctatttgggtatctttcccttctcattgttatcaagtggtgtactggctctcaagcagacctttatcatgtaatgatatacatgtttttaagccccacagacaatcttggcgagaatcagttgttctggggccaaagacctcttcaaattgtgttattgcttttggctgtaattgcagttccatggatgctctttccaaaaccttttatactaaagaagcttcatactgagaggtttcaaggtcgtagttatggctttttaatttaaagtactaatgctattgtatgaataagtgatcagctcctgtatttatcagtg

SEQ ID NO: 39250 - DNA, 456 bp, Glycine max
  unsure (1)..(456): unsure at all n locations
gcacaaagcgggttactgtctgttcaagctaccatctctctctctctttcttagtgcctccttgccagaagttaaaatggcccaagaaactttcctattcacatctgaatcagtgaacgaggggcaccctgacaagctctgtgaccagatctccgatgctgtgctcgatgcatgcttggaacaagaccctgaccggaagggtgcctgtgaaaccttgaccaagaccaacattgtgaatggtttcggagagaatacaaccaagggcaacggggactattaaaagaatgggggacacatgcaagaacattggttttggctctgatgatgttggtcttgatgctgacaactgcaaggtcctcgtcaacattgagcaacagagtcctgatattgctcaaggtgtgcacggccacctcacaaagaggcctgangagattggtgctggtgaccaaagtcata

SEQ ID NO: 39251 - DNA, 335 bp, Glycine max
tcggccacgcgtgcgatcacgcgtccaatcgagatatctagaaacagcgtgatgaaaatgaaagtccgcgatctcttcgttgctacaaggttggtagcatggcaatgccattcgtacaatatgtatcctctccgaatgaacactggctatggtgcccgtactccggaggtgaaatgcgcacgttagaagctttctatgctagcacacaacatctttggctatcagaccattactgaaaaatgcgttgaagcatcataggaatacatacatggcgaacaatgttcatcggactccaagacaagttaccaacaagcttacttttatgccacagacct

SEQ ID NO: 39252 - DNA, 354 bp, Glycine max
cccacgcgtccgctcagacactgcgttgactgatatgttaagaaaatcaaatgatgagggaaaattggctataaaaaaaaaaaagggacgagacaaaaaaaaaaaaagaaaatgaccggcacaaacaaagaaacccaaccgaaaagagacaataaaggacaagggcgggccctccttaggcccccatcaaggttgaaccccagccggcatagaggatacctggcttggccaacccaacttacttcaatggcacacttcctggagacaatggatgtgaccctcagggactagctgaggacctagagaactagaggtgggacattcaagccagttcgcagaatggacgttgggcca

SEQ ID NO: 39253 - DNA, 370 bp, Glycine max
acgcgaggatggtggcagatgctgacgtgacggagactgaggctgctgagacggccgaggtggctcgagacgagccgatgtgacggtgggcgtcagagagaagagcatacttctccggtgtccagacgagtatacttgtacacgtccggactatatctatgcttgcggaccttcacctatctacaagtcagctcacattgtgaaagcaccattcatgatgaatcatgacctaatatgcatcaaaggataaaggcaatctctatgttgagccagatgaaacatctatcttcctgactaagctctttgaacaaaagtctgaacgtgtcatgtttatgctacaacgcttatgactcacatcaaggtgaatgta

SEQ ID NO: 39254 - DNA, 446 bp, Glycine max
cccacgcgtccgagcgttatgagactatgtgagatcagagttattgcataatttcaagtgtgggagtggacagatttagtttaaggggcgtaaatagtgagcatataaagaaaaggaatctgaggaataggggagacaaagacaatggatttgcatttgaagagtttgtataacagatgtctggagcaatttgggtctggtcctggtcttggccctggatctgggacatgtatgatgaaagtggatggcattgctccaaatttcattaaatctatatacaaagcttctgcagctttgtatagagctgagccgtggaagaggctgcttccagagcacttgtttggcgaccggattgagaaagattctgattggcctggcaagaaacaactctttccatgtgttcagttcattgtaggggatggatgagatgttgaattttacatgtt

SEQ ID NO: 39255 - DNA, 390 bp, Glycine max
gtgagtgtgagtgagtgtatcaatcggccacacagaattgggcagtgctactatgattccagggtcctggttgccttggcggccgcgttatcctttcaagggatcggtgcaaaccttggtcgcaaaaccatggctgaagaagattcatcatgcatgacccttcatttccgtggttaacaaggctgcctatctatcttccgtcgtgacatgcacccagcgtcagcgctaggtttctgctggacactttggggccgcaacctgtttctaggaattgggctaagagaaagggtcgaggaatattcgcatggcaaggggctcgttgtcgttttgggatgagaggtcagaaatctcgatcttgacctggcgttattaaaggtatcgaaggttgtc

SEQ ID NO: 39256 - DNA, 333 bp, Glycine max
catatgcgagcgcccatgcgtcgggatatacatcgcgagcgtcggctctagagcttccatgcttacctaccccatcatgcaacggcgtatcgcaactatagtgctaactaatatcagttcgatgcccgtcgaattacaacgtcgggactggcaaaacgcgggtgaaaccgaacctactcggaaggcctaacattcgactttgagacgctagcgtaattgcgaataggcccgttacgatcgctcttgctaacagtggcaccaacggaatggcgtatggtgctcaccctgaagcagatcattaagcgcgacggatgaactaggtacgcgcagtat

SEQ ID NO: 39257 - DNA, 395 bp, Glycine max
ctcgcagatgtcgagcctacggcgtacgcgtgcgctcacgcgctcgatcagccgagatgacaagtattcataatgtgctcaaaaaatgcttggagcgatgatagtgcacgtacaggaacttgttccacagcaagctacctcaagtgcatgggcgacttcagcactaggtagacccacactgacgcatgaactattgttatctacataggaagcttgaaatggatgcttatgctggacgaattgtcaagaagaagatcgagactattttctacttgactgacctagctgatgcccaatcggcaatggacgtcgaatcccttctgaggaaaggatggattccttgcttggaattatagttggagcatggttttgtataccgcgagcacaaatgttca

SEQ ID NO: 39258 - DNA, 452 bp, Glycine max
tcgcccacgcgtccgcaagtagttgagaactaacatggagaatcagatggctccctcaatgatcgactgcccagctgttaccactgtcaaccgtgccggtgccgtcatggctgcttcattcactggccttaagtccatggcatggcttccgcaccagagagaccaacagtgacattacctacattgctagcaacggtggaagagtgcaatgcatgcaggtgtggccaccagttggcacgaagaagtcagagactctttcctacctgccagaccttgatgatgcacaattggcataggaagtagaataccttcttaggaagggatggattccttgcttggaattcgagttggagcacggtttcgtgtaccgagagcacaacacgtcaccaggatactacgatggacgctactggaccatgtggaagctgcctatgcttggttgcactgatgct

SEQ ID NO: 39259 - DNA, 445 bp, Glycine max
agataactagaaacagtgtgatgaatatgaacgtccttgttttcttcgcagctacaatactgggagcatggcaatgccatgcgtacgatatggtccctcttctaatgaacactggctatggtgcccgtactcctgaagtgaaatgcgccagttggaggcttgctgtggaagcacacaacatctttggctttgagaccattactgaagagtgcgttgaagcaacaaaggaatacatacatggcgaacaatatagctccgactgcatagcagataaccaacatgcttacttttatgccagagaccttgaaatccataccaaggacacattcgtgttcagtatatatggcaaccgtactctctaatatgggatactacaaaaaacatggatatggggaggagaaaattaactagaccttgtatgatgaatgggttaacaagggcaatg

SEQ ID NO: 39260 - DNA, 363 bp, Glycine max
accacgcgtgcgaccctctctactccttctttttccattttaccatcgtactatgccgaatcggctcatgcactcattaccattatggtgatatgcgccgctcttcttagcgtacgctccttccgcagcaagttcgagcgcatgaagccccacgtgaacatcgtcaccatcgtgcacttggaccacgggatgactaccctgaccgtcagcacaatttgtttgtttgaacttaaccttcattcccttttgttcatgatatttgagatttcatcatcctttatgcttgggatctgttttctgacttcaatggtaattaatgtatgagaacttatgcgtgtgaaaattctatgctgccgttccttc

SEQ ID NO: 39261 - DNA, 398 bp, Glycine max
agcacacttgcgaccgcgtgaaggcaatgcaggtccttgctttcttcgcagcgccagctatggcagcatgagcattgcatgcgataggatatgcaaatacatctgaatgaacactggctaacgcgcccggactttacccttctaatgcacgtggtggatgttggcttgggaatcacacaacatatattaactacacaccgttcatgaaaagtgcgttgtagcaccagaacattacatgcatgtagcacaatataggttagactaccaatgacttaaccaaagagctgacatgtatgcctgagacctgactacccatgcgagagacacatttgtgggcaagatcaatggtgacgtacttagctaaatgtgcatactacagaatacatgcctatagagca

SEQ ID NO: 39262 - DNA, 250 bp, Glycine max
atctgcagtacgattagaccttggtcctggtgttgttatcccactccaaactcacgctgttgcgcttgaactactcggtgttctgcatggtcgcattcttgttggattcatatctttaggtaacatatgtttatcagatggtgctaaaaaagggagagctcatggttttcccacaaaggttggtgcactttcaaatagctgttggtaagagaaaggctcttgcttgtactgtcttcaggattacttttgc

SEQ ID NO: 39263 - DNA, 410 bp, Glycine max
cacgcgttcgaccacgcgtacgaccacgcgtacgctagaaatattgtgatgaaaatgaacgtactgggtttcttggctgctacaattggggtagcgtggcaatgccatgcgtacgatatgttccctatccgaatgaacactggctatggtgcccgtactttcgaggtgaaatgcgcacgttggaggcttgctatggaagcacacaacatctttggctttgagaccattcttgaagagtgccttgaagcaactcaggaatacattcatggcgaacaatatacatcagacttcaaaacacttaaccaacaagcttactcttatgccagagacctctaagtccattctaaggacacattctgtgttcaatatacatggcacctgcatttcataatattcatactgcatataac

SEQ ID NO: 39264 - DNA, 369 bp, Glycine max
aatgctaaggcacttgtgactgctctaacccgccgtcagaaaggaacttgcgttccatcaagtgttttaatgggcataccagatgggagtctatcatcaaaggaaacaggttcattgactccttttggtgatcctcgctcaagaagagatctgactgcaatacaaaattttggaaaacgtatgctacaaagatgatgaacgtgttgcatatgagctgtcctttcaaatgttgacaagatacatacatgtaactctagattctacaaagctaggcgattctgcattccatgctagagacttatccacggccattgactgctctacacaattcatcgatggtggaaccatggtatcacctactgtgtatgc

SEQ ID NO: 39265 - DNA, 331 bp, Glycine max
gtcgtcccactcatacgcccacgcgtacgtgtctatgtcgtttaggagtatcatccttgaaaggaatgcatttgatgtgaggtttgtatatagcgggacatgcacgtcacagtcacacagtgattctattgcccatgatagtttggtggtgcttgatggattgaatcatatttgttgggctaacatgccccctgagctttttagggatgtgctcatgagaattgacgcctcttatgatttctggcctgtccagaaacatgtcttctcctgcgccggagtttgccgcaatttcagataaatcatgattgaaattttcaaagtcccttaacta

SEQ ID NO: 39266 - DNA, 366 bp, Glycine max
tccacgcgtccgggcgagtgagaaatgccagaaggagaagagaaagacaatcaatggagacgagttgctatgggccatggccactttaggatttgaagactacatagatccgcttaaggtgtacctggctaggtacagagaggctgagggtgacactaaatgatctgctagaagtggtgatggatctgctacaccagatcaagttggccttgcaggtcaaaattctcagcttggtcatcagggttcggtgaactatattggattgcaggtgcaaccatagtatttggttatgccttcaatgcaaagccatgaatagtttagatgcttctacgcatcttatttatgtgtctttaatgcttgtacgca

SEQ ID NO: 39267 - DNA, 414 bp, Glycine max
cacatttggaaagtgatgtagcgctttttatcattcgcattgcaaagcaaacaccttgcaaattgcaacggcttccaacaaggttgttgccaccatcttggatctttctctccttgcctactcaacatcattcaccaatgcatgtggcacatgccacccaaaacctactccttctgcccctactccatacatggaagtgccccaaggacacatctaatctaggggtgtgtgctgatgttctaggacttggtaatgatgatgctggttccactgtctctagcaagtcttgtgcattgcttgaaggtttggctgattctgaggctgcactttgcctatgcactgctattaacgccaatgctcttggaatcaacttgcatgtgcctatcacactcagtgtgctactcagtgcttggc

SEQ ID NO: 39268 - DNA, 440 bp, Glycine max
cccacgcgtccgctcttaccctgctgttccaggtgggaatagcaactcttcatcttcaggtgcgagtaaaagttccagtggtcagattgaaggaccacctggtgccaatctatttatttatcacatacctcaagaatatggagaccaagagctcacaactgcatttcaaccgtttggtagagttttgagtgctaaaattttcgtagataaagtaacaggagtaagcacatgttttgggtttgttagttatgatactccagaagctgctcaagctgccattagtacgatgaatggttgtcaattacgtggcaagaaattaaaggttcagcttaagagggataacagacagagtcagatttactgatgaatgtggatacttctcaattctcctgacccatcagatgtcaatacaatttgtaattttcatgttacagaaaatt

SEQ ID NO: 39269 - DNA, 456 bp, Glycine max
agcacgcgtccgatcacgcgttcgcacacgcgtacggtctgaaacgatcgctgccacggcgaccacgaccctctcttcaaacccggaactcgcatcttgccacggacagcccgctacatattcttagcgcgtcgtacccaccaccaagttattctcattcaaacaaggcacaatctgcatgtccctaacccaacaccccatacgacctgcaatccttcaaattccaacccatcgtagaatccatcgtctcacgcgaaatgacgcgccggtacatgaccgacatgataacctacgcccacaccgacttcgtaatcgtcggagccagctcggcggtgctctcctgtgcgtacgagatcagcaagaaccccgccgtgagcgtcggcataatcgagcagaccgtgagcgcccgcagaagcgcgtggatcggcggacaactcttatccgacatggtggttc

SEQ ID NO: 39270 - DNA, 282 bp, Glycine max
cccacgcgtccgaatctttatataataatataaataagactaaaaaattaaaaaaaaaaaacgaagcgttttgggtttaaaattaattgtttaaggccaaattgtaaatcgaggcacccattttatgataaactctccttacattttgtgtcctctagtaggccaaatatttccggcaattgcaatggcttctatatttctatatgttcaaaaacacaagtttttttagattcagaaaacaatataaaaatctggggttttttattccccaaattatatact

SEQ ID NO: 39271 - DNA, 481 bp, Glycine max
ctcaagctccctcgcgacttcaacatcgttgcagaactcgttgccgcgcttctgaatcttgcacggcggcggcgattccctggctccatggcggcgcgagtccactcctccgcggcagcggctccgccttcgtgcctcagcgaacgtctgaatcaaatccctcttaataataaacaaattcgcatggcgcatcataagcataagagcgcgcacgcacaggatgagggtatcgaacgtaacgagtttggagcttccattgtgattttgacttgcgctcaatcaggcacgatttggcatattatgcacaagcatgctctatggaactcggtgacaggcttaagcactggagtacagtaaacgagccagtgctatataactacggaggttatgagatgctccaagcgttctgctgactgcactgctggcgatactactaccgaaccctatgtcgttacacaccacctcattcttgctcatgttg

SEQ ID NO: 39272 - DNA, 306 bp, Glycine max
gagactgcatatccgtttaccaacaggcttactgttatgccatacacctgcaaaaggagcatgctattccagttcgtcactttgctaaagagtctgcccctcctgcccttaagggagatcagatgctgaagaacatttttgtggaggtgaagaacaaatttgagactgccataggaatattaaagaaggagaagatcaccattgacccagaagatccagctgctgcttctcattatgcaaaggtcatgaaaacagttagagagaaggcaagcttgttgtcggagtcccaagacatactatccacca

SEQ ID NO: 39273 - DNA, 243 bp, Glycine max
gtacttaaactacattcccatttgtttttgctgtttgagatttcatcatcctgtatttttggtttctgttttcggacttcaatggaaattaatggatgagaactaatgaattaaaaaaaaaaaaaaaaaaaaaaaaaaaaaaaaggcaaacaatataaaagaacaaaagaaaaaaacacaatgcaagccacctcttaaatcattgggggcgggctttaaaagactagcttggtcacctttttt

SEQ ID NO: 39274 - DNA, 246 bp, Glycine max
catggctgcacaagctcttgtatcatcatcttctcttaccttctcagcggaggctgcaagacaaagtcttggaccaagatcactccaatctccatttggcttctccagaaaagcctactttcttgttaaggcagctgctaccccccctgtcaagcaaggatcagacaggcctttgtggtttgcatcaaagcaaagtctttcttacttggatggcagccttccgggtgactatggatttgaccctct

SEQ ID NO: 39275 - DNA, 460 bp, Glycine max
atcattagagagtgaagtgttcttccctcacttgcttaagatgttggaaggaaaagctgtggtgagagagacagacatgccagagggaatgcagagctatgttatggaattagcacaccaagctctcgatgcacatgaagtttctgattgtcagtccattgctcatttcatcaaacagaaacttgatgaagcatatggacctgcttggaattccgtggttggaaaagactttggatcttgcatcacacatttatgtggaagtttcatattctttcgtgtggagatgatggaatttctgatcttcaaagatgggaagaatttcacagaaagcagggaagaagctattggagtgctgcagaaggctagaaattgtgattagtaaattccaaaattgttagttgttatagaacaacctaaactctttaatattcctaatgaatctaagctaaacatgttcaaa

SEQ ID NO: 39276 - DNA, 308 bp, Glycine max
gtaattgagggtttgacgtatgacgaaacttaagttatgagaaaaagtgggttgaattcaggggctgtgctgaaactcactagggggggggtctatgtgaatgtggtggcgagggttagggacgcttttaagacttaggagtgcgagaaactggactgtgtgcatatggaaactatctgtctgcaaacagataggagtgaagctaaaggatttagcgccatgcgtccctatcttgcttaaggattatcatctaatactctggagaggaaattgctatgaagagcaaccttcataatcatattgttttc

SEQ ID NO: 39277 - DNA, 160 bp, Glycine max
atcaagggggccacgaccaccactcacttgtacacttgagaccaaaggcttcttgacgcgagccaccgggacctgaggcgttcaaggggagtactgcttatcatatggtggacttcaacatgagtacaaaaggttgtggccctcgtgcttctaaccctca

SEQ ID NO: 39278 - DNA, 462 bp, Glycine max
acgcgcacgcgtgcgatcatcttttgcagaagcttatgcataggcagagcctagtcctacctataaatcggatgaacaaattacagggtttgacttaaacacgggactatttgctatataagtcgggttggatttgtaggatcgaagttagaaaacacagcacgaatttgattgcatagtgttatttcgagcatcaacatcaatggctccaattgcagtgggaaacgtgattccagaccgcattttggctcacttggatgaagaatacaaactccaaactgtcttcattcactctctcgccagcggctagaaagtcatcatctttgtggttcccggcgacttcacttctacttgcaacttgaagcacgttcctggcttcattgagagagcagatgagctgaaagggaatggtgtggacgaaataatctgtatcaccgtgaatgatacatatgtgatgaactc

SEQ ID NO: 39279 - DNA, 338 bp, Glycine max
tgagaaacatggctttcttaagctccttagtgctgctccttgccgctgtaattctatcccgtcaaggtcttgcacactatgagaatccgacagagtacatgcctaccactgagaaaccaccaggttataggcccgcagttgagaagcctcctgtttacaaacctccagttgaaaaccctccagtttataagcctgcaggagagaagccaccagcgtacaagcccgcagttgagaaacctccagttgataagcccccagttgagaaaccaccagtgtacaagcccctaggcgaaaaaccaccagtgtacaagcccccagttgaaaaacccccagtgtac

SEQ ID NO: 39280 - DNA, 448 bp, Glycine max
  unsure (1)..(448): unsure at all n locations
agaagggctacacaaacacaatctctaatggcactcaggatgtgggcttcttccactgccaatgcactgaaactctcttctgtctccagacctcatctcttgcctcctttttctttctccagatgcttatcttccgtcttggatggacttaagtacgctgattcacatgaatgggtcaagcacgaaggctcagtcgccaccattggtatcactgaccatgcccaggaccatcttggagaggttgtgtatgtggagctgccagaaccaggtggcacagtttccaagaagtctggcttcggagccgttgaaagtgttaaagcaacaagtgatataaactctccaatctcggnggagatcgttgaggttaacaaaaagctcacagaaacgcctggcctggtgatcaattctaacccttaccctatatctctgtactatatatatatatttg

SEQ ID NO: 39281 - DNA, 471 bp, Glycine max
gcattggcagctaatgctactccctctctggccttcgcttcttcctccttactgaaccacaatccccaatttggtgctgctcccaaacgattcgtttcttcttcttcttcttctttgtgccttgccgcggggctcagctccaaggctagggccttcagtttctctgcctcggctgcggcccttgacggagaagaactcgcggtggaagaaacgtgtaatctagcgagaccaaccgaagtgtacgtctgcaaccttccacgaagctgtgacactgagcaactacttcatatgttcaacccttacggaaccgttctctctgcccaggtttgccggagtgcggaaactggtgaaagtagagggagtgcttatgtcacaatggcttctattaactcggcaagaaaagcaattgctgcattggatgcatcggagtttggtgggcgtgaagtgcgggttagattttcagctgagatg

SEQ ID NO: 39282 - DNA, 471 bp, Glycine max
acgacatatggttactagaacttgcagcagcagcggttctactacgaatgcttcttgctcgcttcactgcttagatggatgagagctgtcatcgacacaggtggagatcgtgggggtaggacctttaacagtggtgccatgtcctgaggaaagttctctagggctgtcgacacactcgatcacaatctttgcgctgagtctcacagcgtgtctgtcgggaacagagctggatttgatatcttcatgactccaagaggatccgaagagtataagcatatgtcatgtcacatcatacttgccaagggacagaactacttcatcagcaattatgttggtctctgctagtctaggatgaaaattgtcattaacgctgcctgagtttaataatatggttaacttgccatacatattgcattgtaatgcagatttgacccattattgcgaagttaagctcccttaaatagtgcctat

SEQ ID NO: 39283 - DNA, 296 bp, Glycine max
ctgacgcgtgggaaaaaatataagttacaaggaaattatcatgaatccaattattaatagctgctgctgatattgcatgctgagaaggccgaaaggcatagcttctattggacctgagagtagatcaaagcactgatggggggcaagctgtttaaaggattgcacgacaaccggatgcacagggaaaaatacgaggtactttattgcttagtatggcttttaaggaagctctaacactccatggactggttgtagcattagcacttatatccgctaatccttttgggaatcctaaa

SEQ ID NO: 39284 - DNA, 474 bp, Glycine max
tcgtgcatgtgtggatctctatcataaaggaactattattgaaatttacagaatgagtcgcaacaaaatgcagagaccttggcgtgtggatgattttgatgcctttaaacaaagaatgttaggaactggggacaagaaaccacccccacatagaagagctttactttttgtggacaatgcaggtgctgacattgttcttgggatgcttcccctggcacgagagctcctccgccgtggaactgaagtggtcctggttgcaaactcccttcctgctttgaatgatgtgaccgcaatggagctccctgacattgttgctgaggctgccaagcactgtgacattcttaggcgagctgctgaatctggtggcttgctggtggatgcaatgactaataccttggacagtcctagagaaaattcttcttctgttcccttgatggttgttgagaatgggtgtggtagtccatgtatagactt

SEQ ID NO: 39285 - DNA, 496 bp, Glycine max
cccacgcgtccggagagagagaatggcagcacttggtggcaatcgtgatgtggcaggaagccagaacagccttgagatcgatggtttagctcgctttgctgttgaagaacacaacaaaaaacagaatgcccttttggagtttgaaaaggtagtaagtgcaaaacagcaagtggtttctggtaccttgtacaccatcactttggaggcaaaagatggtgggcaaaagaaggtttatgaagccaaagtttgggagaaggcatggttgaacttcaaggaagtgcaagagttcaagcttgttggagatgcacctgcatagtctagtgcttaattaggttgcagaagagtgaagagtgagacagcctggctcgaaggggaaagcctaaggatatatcaaagcatgctatatgtataaaataaatgtagcttttctaccttcggtattgatatttgaaatcgtgatttggcatcttatatatgatctctgtgtttgtctaaa

SEQ ID NO: 39286 - DNA, 403 bp, Glycine max
cagaaaaacaagtagttcagaactaagaagacggaaatggctatctcaatgatctcctcccgagctgataccaccgtcaaccgtgccggtgccggcatggttgctacattcaccggcctcaaattcatggctggcttgcccacgaggaagaccaacaatgacattacctccattgctagcaacggtggaagagtacaatgcatgcaagtgtggccaccaattgtcaagaataagttcgagactctatcctacttgccagaccttgatgattcccaattggcaaaggaagtcgaataccttataatgaaacgatggattccttgcttggaattcgagttggagcacggattcgagtaccgtgagcacaacaggtcacctggatactatgattgacgctactgga

SEQ ID NO: 39287 - DNA, 390 bp, Glycine max
gccagacgtcggatagcttgccttgatgcattcattgccacccacgcgggtgtagcttctacggggatccggaataacaccaaggtccaatacaaagctggacactctttcccaacccactgcgcctcatagagactgatggagacaaaattctctggactaagatccacttcatgtgtgacatatgctcacgatgctaaagaatctttgcttcgtgatcttgtatctctccaactcactcccattaccattgagatcatcaacccctgcgaacttatagacaatggacatcatgaaggtggcaatcaatggtatcacactcattgttagacacttgcttcgctgcttgcacatacgaaataactcaccccttgacgtcgttgatatcaa

SEQ ID NO: 39288 - DNA, 432 bp, Glycine max
  unsure (1)..(432): unsure at all n locations
cccacgcgtccgcccacgcgtccgcccacgcgtccgcccacgcgtccgcactgctgttctggtctccatcacaatctgcctcctctatatgcattcaatcactttcttgtaattgttcctgtcgcggttcttgtttttactgtttagatgcgaagtctttgattatgtttatggtgttgtagccaatgatgaaagtcttcaatttggctgaaatgcaaaataatttattgcatttctctgttgaatatcttgatctaggacggtctgaggctacattttgtttttcatactgaatttgttagtgttgtatttatatgtctgcacagtgctgtgggtgatgagaataattactttacagttatccctggctgatgtagcagctgctgaaaatttgtaatctgacatgcactgntaagctgaatacaacccttt

SEQ ID NO: 39289 - DNA, 415 bp, Glycine max
aaaaaaaggaaatagaatacgaggaggatgattaataaaaaagagaaaaaaatactaaaaaaggggaaacaacgaaggaggggaacatgctaacaagaatcccacaaactcattgcacgatagcggctagcccggagacagggttcagttcacagagtacattcagaagaacgttgccttgtatcagatccgtaacggcatccctcttaccaccggcgtcgccgactatttcacgcgtggcgaactcgccactgttctacgcaagaacccatactctgtggacattcttcttgctggttatgacacagagaccgtccctgaactatactatattgactacattgcaacgctttacaagcttgaaaagcggacttttggttatggcttctatttttcactggccatggatggacag

SEQ ID NO: 39290 - DNA, 394 bp, Glycine max
atcgagatagctcgaagcagcgtgacgaaaatgaacgtccttgaattattcgatgctacagtcttgggagcatggcaatgccatgcgtacgatatgatccctgtacgaatgaacactggctatggcgcccgtactccggaggtgaaatgcgcatgttggaggctagctgtggaagcacacaacatctctggctctgagaccattcctgaagagtgcgctgaagcaacagaggaatacatccatggcgaacactatagagcagactccatagcagatcaccaacacgcttacttttatggccaaagacctcgaaggccataccatggacacatctgagttcatgatagacaggaccgtactctctaatatttcatactacaaactacatggatat

SEQ ID NO: 39291 - DNA, 405 bp, Glycine max
  unsure (1)..(405): unsure at all n locations
atgacctnccatgtccgcgttcctaagctggcaattcctacctccccattcctgacatttttttacgcccaggttttatgacccttccgacgggggcgctcttaaggagcttgtgactacattgcaaattggatgtcagccgttgaaatcgttgatgatgacatatacctaggtgcagaaaacagttttaatctgatcactgttcggaaaaatagtgcaggtgctactgatgaagagcgacgtcgtcttgaagtggttggtgagtatcacctaggagaatttgtcaatcggttccggcatggctcccttgttatgcgcttgccagattctgatgtgggccatattccaactgttatctttggcaccattaatggtgttattggagtaattgcgtctctttcacat

SEQ ID NO: 39292 - DNA, 387 bp, Glycine max
tgcgacgccatcgcgtacgctcacgcgtccgctcacgcgttcgatggaaaccaaaataataaatgcaagtacattcagccactgcaaatacataacttaaacatacacaactgatgaacgagacaaggttacaattgacggatatgaaactataataatgtcagatgagagtacagaatgagagacagagcatgcgttcttaagcgccatccttgagcaaccaattagtgtctgcattgatgcaaaagattttcatttatacaccgaaggaatttatgatggagataactgtacaagtccgtatgggattaatcactttggtttacttgggggttatggttcagcggatggcgtatattactggatagggaaaaattcatgggaaga

SEQ ID NO: 39293 - DNA, 413 bp, Glycine max
gtacaagcctccagtgtacaagcctccagtgtacaagccaccagtgtacaaaccaccgcttcataagcccaagccaccgctttacaagccgaagccaccgttttacaagccaccatataagaagccaccatacgggaagccaccttatggaaaggaccctacagatgaggacagcacgcatgcctgacgcttgccttgtggactattatctagttcagatatgagaggaactgctttgtgatttatagcatcgtgatttagaacttcctagcactgcgtatgcacgactatcgcatgcactttaaacgatcggagcattaatgatgtagcctagtcatcatgagcatgatactgattaccatgtgaatgtgaatcaaaatgatgctatagaaactggtgcttctgtacttcag

SEQ ID NO: 39294 - DNA, 350 bp, Glycine max
ccagaagtgactagtggtggaattgcattgaagatctttgcgtcggtgttgctagaaggtcgggctgcaggtaagataacgtctgctaaaggagatgaagaaattggccttaaagttcggttaagagtccaaaagatcatgggttcaaggccatacaaaatagctgaatttgaaattatatttggagagggtatcagtaaggtcggatgcattttagattgtgccgaaatgacggatattgtctcaaagaaaggctcttggtacagctatggagatcatcggatgggacaatgaacggacaaagcaatacaggacttaaaagagaatacacatcttttagaagaaattga

SEQ ID NO: 39295 - DNA, 443 bp, Glycine max
gtgagctataagctagtttatcgtgaggagaatatgaagttgtttgttttctttgatgctgccgtagttttgagtagcatgggcatgccatggcgcaggctaccaaaggttccctcttcgaatgaaaactggctatggtgagcgttcttctgaggtaaaatgctcaagttttaggcttgctgtggaagcacacaacatccgagcctttaaaaccattcctgaagagcgcgttgaaccaacataggactacattaatggcgaacaatttacatcatactctaaaacagttaaccaacaagctttcttttatgctagtgaacgcgaagtccatcacaacgacatatttatattcagcatagataacaccgtactctctaatatcccatactatgaaagacatggatattagggtgagtgatctaatgaaaccttatatgatgaat

SEQ ID NO: 39296 - DNA, 296 bp, Glycine max
tgagaaaattattccctcgctcatggaagagttctcctacaccaactaacaccaggtgcctagaattgagaagattgcggtgaactgtggtatcggagatgctgcacaaaatgcaaagggtttggacgcggcaattagtgatctagcactgatcacagggcagagacctattaagactcgggccagggcttctcttgccacctttaagatcagggaaggttaaccacttgggatttctgtgacactaagaggacatatgacgtactcattcctagaccgagttgccaacttgggac

SEQ ID NO: 39297 - DNA, 206 bp, Glycine max
tttcttgaatctcacatagctattgactccattactaaaccaagtaataccctgaaatcatcaccgaattccattgttactctttccctctctagagactactattgcatacaactcaaccttcgtatagttaattcctaactaggacacttgaaaagtccacttccttatttataaaataattcattaattattctaacccttct

SEQ ID NO: 39298 - DNA, 368 bp, Glycine max
ataaattctcacaaatttaacacattacataggtacagggctgtaacaagtgcatactacagaggtgcattaggggcaatgcttgtctacgacataacgaagaggcaatcgtttgatcatgtagcgagatgggtggaggagctgcgtgcgcacgcagatagctccattgtgatcatgttggttgggaacaaagctgatcttgtggaccagagaatggtaccaactgaggatgcagtggagtttgctgaggaccaaggcctcttcttctccgagacttcagctctcagtggtgacaatgtggagagtgcatttctcaaattgctagaagagatcaataaggtagtgtccaaaaaggctttggaatgtgg

SEQ ID NO: 39299 - DNA, 436 bp, Glycine max
  unsure (1)..(436): unsure at all n locations
gctggatcaattacagcggtcgtgatccccatctttggaagaaaagtctcaatgaatattgtagtcttactgtaacaatccgtagtggtcacaagatgtccaccagctggaaccagtgccataaataggactacgctagcacacattccagatgccattatcacagttgattcagccccctccaatatacttatcttctcctccagaaccacagtcgttgggtttccatagcgcccgtattcataactcacttgacgattctcctgccaaatgatggaaaaatttagccacaccaataactgacatttatccactcattatgtcatgaggcgaataaatcttttaacaatccaaccttgaaatcaatgacatcagcggttntcttaagaaagtatgcagaagtgttcagcacaggggtggtaattccatcagtctc

SEQ ID NO: 39300 - DNA, 421 bp, Glycine max
aaacaagtagttgagaactaagaagaaggaaatggcttcctcaatgatctcctccccagctgttaccaccgtcaaccgtgccggtgccggcatggttgctccattcaccggcctcaaatccatggctggcttccccacgaggaagaccaacaatgacattacctccattgctagcaacggtggaagagtacaatgcatgcacgtgtggccaccaattggcaagaagaagttcgagactctttcctacttgccagacctcgatgatgcccaattggcaaaggaagtcgaataccttctaaagaaaggatggattccttgcttggaattcgagttggagcacggtttcgtgtaccgtgagcacaacaggtcacctggatactatgatggacgctactggaccatgtggaagctgcctatgttt

SEQ ID NO: 39301 - DNA, 375 bp, Glycine max
  unsure (1)..(375): unsure at all n locations
ggcatctcttgagaccaatccccactcaaccgccagaccactctctctggtcttctgctacctttcaagtttttaaagtattaagatggcacagacattcctatttacctcagagtcagtgaacgagggacaccctgacaagctctgcgaccaaatctacgatgctgtcctcgactcttgccttgaacaggacccagacagcaaggttgcctgcgaaacatgcaccaagaccaacttggtcatagtcttcntagagatcaccaccaaagccaactttcactacgaaaagatcttgcgtgacacctgcaagaacatcttcttcctctcaaacgatctgcgacttgattcttacaactgcaaaggccttgtaaacat

SEQ ID NO: 39302 - DNA, 266 bp, Glycine max
ctacgcatacgaccacatacggcgacttattttgaaagaagatagcatgaaacacagtgcgacttgtaacgctgaatggaggacacaaaatgccagttataggcatggtaacttcagtggagaatcgtccatcaaatgcagacccttgcttctatctatgttgaaaacattgactatggttaccgtcattttgacactgcttcagcatattgaacacatgaagccatagccctaaacatggtcaaagccatacacataagccttat

SEQ ID NO: 39303 - DNA, 302 bp, Glycine max
gaggaggtatgcattcaatcatgctaacgtcaagagaggacatgctcaattggtgtatgagtccaaaatgtacacaattctccagggaggaactggaattccaaatgtcagatggattctagtcggatggagattacaacgtactagtgatcgatctgcttgaaccgagtcctgaaaatctttttaacttctgcgatatacagctatcactaaagacagctgatcatgcttgctaatcaaatgatcaaccgagttcatacattcattcacaatcgatgctgcatctgtatatcaaacccgat

SEQ ID NO: 39304 - DNA, 273 bp, Glycine max
gaattcccgggtcgacccgcgcgtccgacacaacgggacggcataagacaacacgacggtgagatgcttccattgatgctctcaacaaaggcgggaatgataaattggtctgctggttatcaactcgtgctagaggtcttggtattaatcttgctactgctgatgttgtcattctgtccgatagtgactggaaccaacaagttactttcaggcctcagatcctgctcataggatttgtcaaaagaaagaaggtcaaggtttcccgttttggac

SEQ ID NO: 39305 - DNA, 185 bp, Glycine max
aactccagcgatcacactacaggatccaatcttacttacgcgtaccttcaacatcatagggctggtcttcctcaacctcagtgcgattcaatgtccatcataatacaacatcgagactctgaaaacccagacgttacacaacttaatctccttgcagaacacactcctttagccatctatcttat

SEQ ID NO: 39306 - DNA, 350 bp, Glycine max
gaatatctatatcttggtgcccgttgattatgtatccaagtgaggggaagctataaacacccctaagaatgatgccatggtagtgataaaattcttaaagtacagagagccctaatcagtgatgggggaacacacttctgcaatgcataattgaagaagtttctggagtattacaatgtcagacataaggtggccacaccttatcatccccagacaaatggctaggcaaaagtttcaaatagagaactaaagcgaatccttaagaagactgttgcatcatcaagaaaggattgagctttgaagctggatgatgctctctggcttacaagatacgaacttaataaatttgt

SEQ ID NO: 39307 - DNA, 364 bp, Glycine max
  unsure (1)..(364): unsure at all n locations
cggaattcccgggtcgagccacgcgtnncgccacgcgtnccgccacgcgtnccgggcactttaaattgcatcaaaatagttcattcttgtgcgcaattcctacctctgctttcaagatgcagatcttcgtcaagaccctcaccggaaagaccatcacccttgaggtggaaagctctgacaccatcgacaacgtcaaggccaagatccaagacaaggaaggaattcccccggatcagcaacgtctcatcttcgccggaaagcagctcgaggacggncgtaccctcgccgactacaacatccagaaggagtcaacccttcaccttgtccttcgtctccgtggtggcatgcagatcttcgtcaagac

SEQ ID NO: 39308 - DNA, 360 bp, Glycine max
acaagggctggatgtaacttcttccttacgaggaggacttcaaattccatgattatagagccgtcatcaaatgtgaagacccaaatgcaaatttgtattcatttgttgggagcatggagtttggagagcaaaaatatcctctttctgcccaacaacttcttctgagagactctaagcttcgtaatacagactatgtgtttggagcagtcatctttactggtcatgacacaaaggttatccaaaactccactgatcccccttcaaaaagaagcaaaattgagaagaagatggataagattatatacttcttgttttgtgttttatttctaattgcatttgttggatctattctctttggca

SEQ ID NO: 39309 - DNA, 395 bp, Glycine max
gttcatcgtcggcagaagcatgtcattgtgatgatcaagcaatgcctacaacgtgccatgggtagaaaagtatcgtcccatcaaggtcgccgacattgtcgtcaacgaggacgccatctccaggaaactgttctcaaactaaacgcttccgatgataggtacgtttttgttatttctcgattcagttttcaattctgcacgattttctgttaatttatcctttcacttttggttatagatgatttgctccatggttgaactaacaggtggagaagttgagggaaatgagtccactttatgaatttgtcaaggaaggtatcaacatcaaggacattcaatgggcacagcactgattattatcaagctctcagattgcaatgcaagtgatgggaaga

SEQ ID NO: 39310 - DNA, 393 bp, Glycine max
caatatctaagcaacagcatttcaaggaatagtatgtatactctgctgcaaccacggcttgatgtccttctttttgaaatagtgttcccccttatgtgcttcaatgataatgatcaaaagctttgggatgaagatccacatgaatatgtaaggaaaggctatgacattattgaagatttgtatagtcctaggactgcttccatggattttgtgagtgagttggttcgaaaacgtgggaaagaaaatcttcaaaaatttattcaattcattgttgaaattttcagaaggtatgatgaagtttctgcagaacacaagccctatagacagaaagatggtgcgcttcttgctatcggggcactttgtgacaaattgaagcagaccgagccatacaaa

SEQ ID NO: 39311 - DNA, 376 bp, Glycine max
ggcacatttggaattggagcaagatgttgccacggaggatgagcctaatcaggtcattgattttcctggagggaaagtgggatttacttctgaaatgagattcatttctgagtctcctgagaaaagggtgccctgttatcgtgttcttgatgacaatggtgagatcgttaaatacagcaactatgtacaggttagcaaggaaatgggtgtgaagatgtattctgacatggtcactcttcaaactatggacaacatattctatgaagtgcatatgcaaggtagaatttccttctacctcacccaaatgggggaaagaagcagttaacattgcatctgctgctgcacttgcttctgatgatataatattgcctcagta

SEQ ID NO: 39312 - DNA, 196 bp, Glycine max
tcatcctagaacaaccctgcctattcaaaagaagtacctcacctcacttacgaagaagtagtgggagctgggctctagattcagttggatagccagtctacctaagtaagagttacgttgaccctgcaaggtatcctagaggggcacaatgcaagctggagatcatctggttaggataatccccaggctttagata

SEQ ID NO: 39313 - DNA, 430 bp, Glycine max
ctataggctggaccctggcagacattcctggtattagccgatccacatgtatgcatcggataaatttagaagatagggctaaaccaataagacaaccacagagaagactcaactcgatgattcttgatgtagtgaagaatgaggtaaccaagcttttgcaagctagaatcatttatcctgtctccgacagccaatgggtgagtcccgtctaggtagtctcgaagaaaaccggcctcaccgtgataaaaaatgagaaggaggagctgatttctactcgggtgccgaacaattgaagagtctgcatcgactataggaagctgaaccaagttaccaaaaaagaccattttccactgccattcattgaccaaatgcttgagcgcctggtaggtaaatctcactactggttccttgatgggttttctggttatat

SEQ ID NO: 39314 - DNA, 262 bp, Glycine max
cggttgcaaaaaaccaccaaaaggggccggcaaaaaccgaccccaaaattggggttgcgttcctttaaaactttcaatttttttttctttttccaatcaagggaataatttttttaaaaaattttccaaaaccatggttaaccccaatcctatgattttggtggtgggaattttaggtaacctggcctccttctgtggctttttagcaccagtcccaacattctatcgagtttgtaagaaaaaacccacggaaggtttcaat

SEQ ID NO: 39315 - DNA, 407 bp, Glycine max
ttgggggtttgggggcggactttcactgctgcaagcacaagattgagccaaagtgggaggaccctatctgcgccaatgggggaaagtggactatgaccttcccaaggggaaaatctgataccagttggttgtatacgttgttggcgatgattggagaacagtttgatcacggagatgaaatatgtggagctgttgtgaatgtcagaagtaggcaggataaaattgctatttggactaagaacgcttcaaatgaagctgctcaggtgagcattggaaagcagtggaaggagtttcttgattacaatgacacaattggctttatatttcatgaggatgcaaagaagctggacagaggtgctaaaaataaatacgttgtatgaagtgtatagcgtttttaactgggtagc

SEQ ID NO: 39316 - DNA, 394 bp, Glycine max
cgttcccctcttagctggtggatcaccaacgctgagtgcccgtacaccttgagtagcttgacattggagtcaatcgccgcctggacggccagggcacatgcttcatactcagccatattgttggtgcaatcaaaccccagcctggctatgataggcatacattgattgtctggagagaccaatactgctccaatgccatggcctagaatgtttgacgctccatcaaaccatacggtccatttgtcccggtcctcatctagtttttcctcaaacaaggccatgatgtcgtcatccgggaattcgggatgcatgggctgatagtcgttgagaggctgctaagccaaataatctgctaagatgcacgagaaatgcaatatgtattgggtatatatat

SEQ ID NO: 39317 - DNA, 381 bp, Glycine max
gaccataaccactttttgtctcttgaatttcttttggcttggtcctttttgttttttcattgacatgttgaaggggtcttctttatctagctggagaaacaataatggttgctgtctagttctgtgaaattcaaccccatcatggatcttgagtctgtgatccacaggaacacaattaaggaagaatcatggaagacagttttgactttggcctatcaaagcttgggggttgtgtatggagacttgagcacttccccactttacgtttacaaaagcgcttttgctgaggatattcagcattcagacaccaatgaagaaatctatggagtgttgtcttttgtgttctggacacttacactgatttcactgctcaagtatgtg

SEQ ID NO: 39318 - DNA, 357 bp, Glycine max
  unsure (1)..(357): unsure at all n locations
gatcctgcagaaattccagagggatatgaggagaagtggatggttaatatccacgccattgatacgcgcggcgtggtggataggatggggtgcactgagtgtaggtgtgacctttacaatgttacaaagaaagaacatggggagcctctaagttcagactataaaggaggttattattgttgttatgatcaaacccagtgcaggttgagggaaggctttgagggcccaaagaggagcctctacctaagatacacagtgaagtgggttgaatggaacaagttcattgtgcctgtaaagatttatatacttgatgtcactgatactttnnannnntcagatgattctagtggaatgatc

SEQ ID NO: 39319 - DNA, 359 bp, Glycine max
cggtcttgaattcccgggtcgaccgcacgcataccgtgcgaattacgaatgtctgatgtctatttgttgattgtgttctataatttgagtgggcacggtgtaactcagatgcattgatacaagaacattctgtattttgttgactatgatataaaatttttagtacatgtaatatcaattaaaattattctcaacaagatcactgtccagcctgaaggttacggatttgcgtaatttgtatctcatgctccagcatatataattttgcagacatacaatggaactcagatgcctgtaacataacaaactattagattgaattgggccttctttggaattggagaaatgcgccctgatac

SEQ ID NO: 39320 - DNA, 420 bp, Glycine max
  unsure (1)..(420): unsure at all n locations
tatcacaaagttattagttagatggattaaacttggatgaatgcaagtcgcatgagccctgcatatgaggaaggcattgaagagttcttgtcatttgcctctgaaagaagtcgactcgataaggatggaaaatatttttgtccttgtataaactgtttgaatgcgagacggcaagtactagacgacatatgggaacatcttctgtgtgaagggattaagaagaattatacaacatggataaggcatggtgaattgatagacatgaatatggggtctaaaactaaaccgattgatgtagaaatgggagatcgattagaggatatgatttgtgatcttggacaagattcatttgagcaagaacacgcncttatgtgtgatacattggaaagtgattcgaaagagcctttgtatcaggaatgc

SEQ ID NO: 39321 - DNA, 380 bp, Glycine max
ctgggggctttacagagagtgatttcagtgagtgatcggcgttcactggatctcatcatcatgagccctgcctattgaggaagattccgatcagaaacatcatctgcctatggcctgaataggctacttaccgctacacattgaatgcggccttggctgaactgatctcaagctacatcttcatgttctacacctcatactccaacatcttctacgtcaagctaaccgacagcagcactcacatccattacggcctgatgtactgatatatatgccattcgtttgtactactaaaccccgtgttcgacaactccaacatctactgcaggctcttaaaccccatcgtcaacttcagtgccttcatcaacaacaccatcatc

SEQ ID NO: 39322 - DNA, 305 bp, Glycine max
atattatactacctatgttcctacagtgattttgacgaacactatgaataatcctgcttcgtatacgtgaaattactcgagatgaagcatgtgattacacatggacgtatagaatcagtgcttaattatcacactttaatgacagatctgactggtctgcctaagcacaatgcttaatcgcttgattaaagaactgcatctgctgaatctctggcaatgtgtaataatatactaatggggaactagaaatctgttgttattttcaaataattgccacctgcaaactattgatatttcatgttact

SEQ ID NO: 39323 - DNA, 125 bp, Glycine max
ggaacctttgcattctattcattcaagattcaggaagtgcgttttggaagcagagaccgaaatacttcgagatggcccgtccaaagcaaactgctcgtaagtcaactggaggaaaagctcccagg

SEQ ID NO: 39324 - DNA, 204 bp, Glycine max
tatgggggaaccttagcattctattcattcagggttcagggagtactttgggtaagcagataccaatatacttcgacatggcccgtgcaaagcaaactgctcgtcagtcaactgcaggaaaatctgccaacccgcagcttgcaaccaaagctgcacgtaagtctacaccaacaactgataaagtgaagaagcctcatctctatc

SEQ ID NO: 39325 - DNA, 415 bp, Glycine max
ggttggcatttggcattgcgtacttttttaatccaagttccacagacaccaacaacgctttagctctctcgttctatccgtcaccgctaccggcgatatacatctgaacccgttccagacactagatctcatatatccaaatggataacctaatctattaggtcaacaaagtgcagagacgcttgtaccgtcttatgcgaccacggtgaaaacagtgcactccccacactatgggactctgttaccgacattgacgttatcagaggtcaatactcatgaaagtacctcgtcttggatagcactgtccttaaatatttcttacgttgtggatcaagccttgttgcgctacaaccttttgtgttgcaaatgaacatgatttactggggaagcaacgtgtacgcagagttactgcatc

SEQ ID NO: 39326 - DNA, 255 bp, Glycine max
gatcaacaactacaacttgagacacatgactcacttaatctgcttaattctgatccttgcagctctcattctatcccctcaaattcttgcaaactatgagaatcccccactgtacaagcctaccactgataaaccaccactttataagcccccagttgacaatcctactgtctacaaaccttcagctgaaaaccccccaatctataatcctccaatctagaacccaccagcttacaatcccccagttgataaacc

SEQ ID NO: 39327 - DNA, 330 bp, Glycine max
ttggaactgcctgaactagatgttgagtgtgggaactcggggttagcagggttctcagtcaattctcttggacaagatgccttgtctttcttcaaaaagatgctactactcggcttcttcccttctgagttttcttttgctaccgtaatgagctcttgtgcaaaactctcttccttatttcaaggtcaacagttttatgctcagatcgtaaaagatggtattctagattacatatatttgtggagttctcttatagaaatgtattgttaatgtgtgtatttaaacagtgcaagatgtttctttgacgtgatgcctgttataaatactgat

SEQ ID NO: 39328 - DNA, 348 bp, Glycine max
gaacgaggggcaccctgacaagctctgtgaccaggtcttcgatgctgtgctcgatgcatgcttggagcaggaccctgacagcaaggttgcctgtgaaacctgcaccaagaccaacatggtgatggttttcggagagatcacaaccaaggccaacgtggactatgagaagattgtgcgtgacacatgcaggaacattggttttgtctctgatgatgtcggtcttgatgctgacaactgcaaggtcctcgtcaacattgagcaacagaatgctgatataactcaaagtgtgcacggtcaccttacaaagaggcctgatgagattggtgctggtgaccaaggtcatatgtt

SEQ ID NO: 39329 - DNA, 318 bp, Glycine max
cccacacatcgggtgtaacaatacgacatatcggggctccgcttgagcatacttaacaacagggcaaggggtgttactgtggggttgaagctaccatctatctttctctttcttaatgccttcttgccagaagttaaaatggcccaagaaactttcctattcacatctgaatcaatgaacgaggggcaccctgacaagctttttgaccagatctcccatgctgtgctcaatgcatgcttggaacatgaccctgacagcaaggttgcctgttaaacctgcaccaagaccaacattgtgattgttttcctagagatcaca

SEQ ID NO: 39330 - DNA, 405 bp, Glycine max
ggatttcactcagttgcctcagggaggtaggaatactctagaggaagctggatggaaggtggggcgctctcctattttcgaaactgtaactgcagctgatggaactgttaagttgttgttgaagttggaggacaatagattgattgaaactgttggcattccagttatggttgataaaggcttgactcgcctcacagcatgtgtctcatcacaggttggttgccctttacgctgctctttttgtgccactggaaaaggggggttttcaaggaatcttcagagacatgaaatagttgaacaggtcttggccattgaagaggtcttcaagaatagggtgacaaatgtagtgtttatgggaatgggtgaaccaatgttaaacctgaaggcagtacttgaagcacacca

SEQ ID NO: 39331 - DNA, 425 bp, Glycine max
gttctcaatccaaggtcaaagctatccatgtgccaagcgatttattgttctctattccattttgaagagacaccaataaaaaaaaagtgatggtttttttctcttcatgcaactcactcaaatttattttttctcttcattttctcttcgtgttattgataaggagttgtatgccttagtgagagcgttgaaaatatggctacactatctttatcccaaggagtttgggatccatagtgaccatgagtccctaaaatacttaaagggacaaggcaaactaaacaaaaggcatgccaaatgggtagaatttcttgagtaattcccttatgttattataaaaagggaaaaggaaatattgttgcggatgccttgtcaaggaggcactttttgctttctatgcttgaaacaaaaatgattggatttga

SEQ ID NO: 39332 - DNA, 256 bp, Glycine max
gggccgacctacgcgttcgcccactctttcgttctgttacagtatgggattacaacataataggcgtgtacaggggtccatttcctaacatatcagggcctgtttacataacatgtctagatggtggaaatcaataaggtcttgcttcatggtttttggatccacagccagaatattctgttattcgagaagcatgctactgtcattccacactggagatatataataggacccatgctatctaccactggaatcg

SEQ ID NO: 39333 - DNA, 479 bp, Glycine max
gataccaaaaacaaaacacaagccaagtgaaagtgagaaaaaataaaaatcaaagagcataatgtcagggatcattcacaagattggggagacccttcatgtgggagggcacaagaaggaggaggagcataagggtgagcaccatgctggagaatacaaaggggagcaccatggtgaacacagtattgagtacaaaggagagcatcatggtgaacacaaagctggagagtaccatggtgagcacaagccagagcacaaagaggggttcctagacgaagtcaatgacaagatccatggtgagggcggcgccgccgagggcgagaagaagaagaaggagaagaagaagaaggagcatggccatgagcatggccatgacagctgcagcagcagtgacagtgattaaactgctgcatcacctatatatttaaaatgtttatgggaccatagtagcgagggctgtgcctaaattgatctctctc

SEQ ID NO: 39334 - DNA, 283 bp, Glycine max
caggggttgcacttctgctgcgtgtaagaatccaggaaacggagatatgggattcgctggaacaactcataagtgcatggattgtgacacaacagcatatttggctgattagtcaacagcagataaccgagtgtaccataaggcttgcttcagatgccaccactgcaaaggaacactcaagcttagcaactataactcttttgagggggttctttactgcaggccacacttcgaccaactgttcaaaagaactggtagtctcgacaaaagcttcgaagggaca

SEQ ID NO: 39335 - DNA, 270 bp, Glycine max
gatggatttaactggactcatttacaatatgtgggtaccatttttagtgcacctaacttctgttaccgatttttgaacatggcttacatatcggaggttgattattgcaagggccacacatttattcagtttgaacctgctcctatgagaggtgaaccttatgtcactctgagaacgccctattacttcttataatgtagctgacgaatgtcatactgctatatcaaggtttcctctactgcacttattttatgttgtttcgcattctta

SEQ ID NO: 39336 - DNA, 295 bp, Glycine max
tgggccaaaggagtgatattgggatggagcaaactaataagaacatgacgcaacggtggagggtcaacgacaacaccttcacgcgttttgctccgaaggcttgcgagcacatcggttccatcccaagtgcttgacccgacagcaccgaataacctgtgatgttcgcgaacgccattcctagggaccctgctggcagttctaactcttccaagtgtgccaagaacagcatcgataccatggaacgcgcgtagaatatcaacgccgttatttctatcggaaacgccagcttcaccac

SEQ ID NO: 39337 - DNA, 415 bp, Glycine max
atatcaaacatatataatttcaacaagtacccttcagacattgggtagcacacttaatgaagaagagttggctgatataaaagatcaatttgatgctatagatgtggacaaaaatggttctattagcctggaagagatgagacaggtagcatttaatttactggctttgtgactaacttaaatctatatacatcgcttacttattggtatttagcaaattattcccttatatatcatttccctactttagtctaaagggaagattttgtgcatgctcttgccaaagatcttccttggaaattgaaagaatcacgtgtactatagatattgcaagcggttaataatgttgatctttttacaaaaaacacacattggtttgattgctggttctcaatctatattcaaagtctaaatt

SEQ ID NO: 39338 - DNA, 272 bp, Glycine max
gtgtgcatggttgtgatgtgtgcacacaacactgtgcaaggcattacatgtgggcatggtcacggtaacctaacaccatgcctagggcttctacataatgggggggctgttaccataagatgctgcaaccgcctcaggagtattgggagcaatgctaggaccactgatgatcaccgtcgtgtgtgccaccgattgatgcttgctgctgatgctgttcgtaggagcaacacttacaatggttaagctctccccgggtaatgtgggggctacat

SEQ ID NO: 39339 - DNA, 416 bp, Glycine max
ggaagagtgaagagaatggctcccaagggtttaacctttctggctgtgttaatatgcgtttcaacactgtcactgagtccttctgttgcgggggaagggcaaaataatggccttgttatgaacttctacaaggaatcatgccctcaggctgaagacatcatcacagaacaagtcaagcttctctacaagcgccacaagaacactgctttctcctggctcacgaacatcttccatgactgtgctgttcagagttgtgatgcttcactgttgctggactccacaagaaggagcttgtctgagaaggaaacagatagaagctttgggttgagaaatttcaggtacattgagaccatcaaagaagctttggaaagagaatgccctggacgtgtttcatgtgctgatatcctcgatctctc

SEQ ID NO: 39340 - DNA, 494 bp, Glycine max
ccggaatcccgggtcgaccgcacgcgtccgccacgcgtccgcccacgcgtccacggacgcgtgggcggctgcaagaacacggcagaagtgtatagcagcatcatacggggcattcaattcaaaaactaagttcatttcttgtgctttgccttattcctcaaaaccaaacatgtcgaacacatgcggcaactgtgactgcgctgacaagactaactgcaccaagggaaacagctatggtgttatagtagagactgagaagagctacatcgagactgttgacatggatgttccaccagctgagcatgatgggaagtgcaagtgtggcactaactgcacttgcacggactgcacttgtggccattaaggaatatgtatgaaaatgtaattgccatgtgtttggcaatacaaatctccaaataatgtaatcttcgcatgaataaatgtgtgctgttatcctacttcagggtctgtgtagtcatgcagtctgaatcatg

SEQ ID NO: 39341 - DNA, 398 bp, Glycine max
cttcagtttcaagacctaaatgagcacaaaagaagcatacatttggaggttattcgagatggtagaagagtcgagatctccatatatgatgttgttgttggtgatgttataccccttaacattggtaatcaggtccctgctgatggagttttgatcactggtcactctcttgcaattgatgaatcaagtatgactggggagagcaagattgtcgaaaaaattctagtgatccttttctgatttctggatgtaaagttgcagatggcagtggaactatgctggtaacagctgttggtattaatactgaatgggggcttctaatggccagcatttcagaagacaatggtgaagaaactcctttgcaggtacgcttaaatggtcttgctaccttaattggt

SEQ ID NO: 39342 - DNA, 298 bp, Glycine max
gataccaaatacaatacacaagccaagtgaaagtgagaaaaaataaaattcaatgagcataatgtctgggatcattcacaagattggggagacctcttatgtgggagggcacaagaaggaggaggagcctaagggtgagcaccatgctggagaattcaacggggagcaccatggtgaacacaggaccgagtacaaaggagaccattatggggaacacaaagctggagagtaccatggtgaggacatgccagtacacaaagaggggttcctagacaaagtgaaggacaagatccatggt

SEQ ID NO: 39343 - DNA, 422 bp, Glycine max
  unsure (1)..(422): unsure at all n locations
ccacgcgtccgcccacgcgtncgaagacgacagaaggggaccgcgcgctcattctgagtattctgatcgctcggtgagagagctcgtcgcggaggttgctgaaaaagattgcatcgatgaagttcaacatcccgaattccaccactggattccaaaagaaagttgaaaaccgccgcgaaccttaactgtgaaccattttggaacaaaagattctcacagaaggacttcgaaaacgcactcggtgaggaattaacggactatgtcttcaaaattaccggaggtggtgacaaacaaggatttccagtgaatcagggagtgctgactcctgatcgtgttagacttttgcttcacaggggaactccttgcttccgtggatatggaaggcgtaatggagagcgtaagaaaaagtctgttcgtgggtg

SEQ ID NO: 39344 - DNA, 397 bp, Glycine max
ctatcaacaccttccaaagatgaaaccgttatctcttggggaagaagctcaacatcactatcaccaaatccttattttccaagtacatgcccaaatacttaccacttcttgaactgtaatcactcacttattcccttaagccattcacattattacaaatcatgtaaaccattctctacattcgctcaaaaaacacttgaatatcctctctaattcacaccatacatgaccaaaactcaaatagttgaaaaatatcatccgtgcgttacttctattgaaacttcttttctatttattttacattctaattcgtcgggtgctcttttaccttgtaaaatcatacaattacctaacctttagatagcttcacccacatattatataaatactatccgtt

SEQ ID NO: 39345 - DNA, 368 bp, Glycine max
tgggttgtcttatgtatatcctcgtctgccgttcttactttattataaccacttctaatatccattttaaaaaaataacatgccccatttaattcattcaacaatacctatattagtgacataagaaacctatttttgatggaaaacgcattaactctcctgaaatctgtgcaacacctccaaaagtcattcttctttcttacgaacacctactaataagcataataactactccttctccttatatatcctgttaccaataaatcctgcacttgattatcaatctcttcttttgggacattaagatatctataggctttccatcagacagatgtgtcattgattatatcgatcttatcatcacattc

SEQ ID NO: 39346 - DNA, 480 bp, Glycine max
ccggtccggaattcccgggtcgaccgactcgtccgtccacacatccttacagatgtgataagcgtcttattgttcgctgataccattcgggtagcgtgatcttcctgtgctgtgaacctttcactctctctctaatttcacattcaaatgaataatattccttagagatattacgaaaccattgctcactccaatcctatgatttttgttgctaagaattctaagaaaccttgtctccattccgttgctttctatcaccaataccaacattctatcgagtatgtctgaagaaaaccaccgaatgttttcaatcacttccttacttggctacactcttaactccattgctctgaatattttatgcttacataaagacgaacgatactcttttaatcaccatttacgcattagatttgtttatagacacagattacctcgtcatctatatcacttattgccacaagaaagctaaattcttta

SEQ ID NO: 39347 - DNA, 336 bp, Glycine max
gccagagtaccatttgtggacaaagagtttatcagagttgcagggaacattgatcctgaggggaaaatgataaataaggacgaaggtcgaatcgagatatggacactgcagatgacctttgatgatgaagatcatccttatatggctaagcacatcttatataatcataacgaacaatccagtgatggagtaggctatggatagattgatggccttaaagcttatgatgaacaacatgcaactgacagatttatgctgaatactggccacactatcacctgtaacacttacaccgccaatgaactataccactacagaatgatatcagagagggtc

SEQ ID NO: 39348 - DNA, 412 bp, Glycine max
tcagttctaattattttaggcaggccatttatgaaaacagctcgaaccaagatagatgtttatgctggcacattgtctatggaatttggtgatattgttgttcattttaacatgcttgatgccatgaaacatccatctgaggatcattctatttttcgtgctgagataattgatcagattgttgatgattatatgtttgattttgattctattcttcatggtaggaaacatccatttttatctgatctgcatacttgtcattccttatgcattgaatctgaatctgagtttgaatttgatcctatatataatttttatgctgagagtgaatttgaatttgagtctggttctgattttctgggtgttgcacctcttgatgttgattttttagagtcagaatgcactaaccatg

SEQ ID NO: 39349 - DNA, 414 bp, Glycine max
cgcgacatcttcttttacgtattgaatctcacaattggctaaattagatcttttggtgctctttgaataaataaagctcttttctttattttgtacatatctctgctctcatatctcatcaaccttaacctctcctataccacctacaagctgatcgcatagtacatattgatctatagatcacgaatggacctttcgtgcaatccaatgactatatcattaccacttaacaacccttcacatcttcccaagtagcactatcattgtaccatcacatgtcaatctactgttgaaaacaatgaaatgattttatacccacatgccattttcatgcatccattcacaagtgctaacaatattctagttatctgtgatgcctacactccttctggaaaacctatttccacttacaat

SEQ ID NO: 39350 - DNA, 374 bp, Glycine max
gaaggtaagatcgattgcagaaaaggaaaaaatgacgatggacgatgatagctgcatatatgtagggggtcatccctacgacgccaccgacgaaaccattcgcaccgtcttcaatttgtatggcgctatccttgatgctaagataatcaacgacccacgcaccacgggcaagtgctattgatttggtacattcacaaatgctaggtctgcaattgatgccatcaacgacatgaatggcaaaaccattgactgacgtgtggttaaagttaacggggtgaggactcgtggaggcaggtcaaacttttggcagataacgttattactatcataatgattagaggaatggtaattgggatcgcattaagtatctaaac

SEQ ID NO: 39351 - DNA, 417 bp, Glycine max
  unsure (1)..(417): unsure at all n locations
tctcttgcatctttggcccaatcttcgtggagtctgctatccaatgcccttggggggtaggattgcatcagttgccttacccctcttgcgtgcgagaggttcgttcttttcttggtcatgcagggtttataggcgctttatcaaggattttagcaaagtggcccttccactatccaatctactgcaaaagaatgtggagtttgattttgatgaccggtgcaaagaggcttttgattgcctcaagcgtgcagtggctaccacccctatcattcaggcacctgattggacagccccatttgagctaatgtgcgatgcattcaattacgcattgggggttgtccttgctcaaaagattgacaagctatctcaagtgatctactatgctttcagaactttggatgctgnccaagaaaatta

SEQ ID NO: 39352 - DNA, 417 bp, Glycine max
gaagagggtcttaagcagttgcaaaaggcagagagaatacagaaaaaaggagggatggttatgtgtgcatcaacgcttgttataatgtgctttgtcatgctagttctcttgatactcaaggagattctcttctagtcgttactgagcactttactggccggcatcatgttaattcttccgttcaatgataatcatgatgccggtatcattggggcactatgataatgcgtttcaggtttggggatttgtttttgaagtgccatgggctaaaatgattggctccttattgagaggcaaattggggatggcactggacagcatcccttcgtgctaacattgctattagttttaacaaatcctgtaaggagggattttcagcaagttcatcttccagtggccaatttttttagaaaaagg

SEQ ID NO: 39353 - DNA, 405 bp, Glycine max
gattcttctaactggtaagcaggtgatcctcctcttgctgctctctgtgttctttgctgtaatttctaatttttgaggatccacagaatggaactgttggttctcgatggtatcatcagtaccctgattcaagtcatactctgacctgagaaacacgttcaactttcaaaggcagatatcaagcagctttttgcgacttgcatagatatctttactatacagcccaatctgttactactggatccaccaattaagatatgtggagacattcatggtctatattctgaccttctgagactttatgagcatggtggattgcctactatgtccaactacttatactcaggcgattatatcgaccgtcgaaagcacatctctgacactatatgtattcttttggcatac

SEQ ID NO: 39354 - DNA, 330 bp, Glycine max
ttttctaacgtatgtcattgatattaccgccgcttcttaatcacgggctgcttcttttgttctttgtctgtttgttttttctctcacctgaaaatctcttgctgcggtgataactgtcgttgcagcagcccctttttttctccaactgcttcccatgctgcaatatgtacccacacttgatctacacctagtcaaccaccaccgacaccttggtcattgtaatggcaccacctaatgctcaattccaaaagtctcaaatgggtgttccccctcgaaaccatggctgcaaatttttatcttacttcaccttcaacccctgaactttcaaat

SEQ ID NO: 39355 - DNA, 362 bp, Glycine max
gagttgaaattgttgcatcacctatttcaatggagactcaacaaataaaagtaaaatgaaagcaaaagcaagaatcttgatccttggcaaaattacttttgcttcaaaagtcactttgtaccggattgtcaaacatgctctcagttagcggcatctatttattccttgcctatgccttctgcttttaatttcctcacaacttctctgcttccctttctccctctctatcgaggaaacatggtatttttgggtgttctcttggtggggtttctcttaagtgcttatggggacagtgatggttggatggatgctcatgctaccttctatggagggggcgatgcctctggcacaatgggtggagc

SEQ ID NO: 39356 - DNA, 153 bp, Glycine max
agcacaggcttatctttgcgggtaacatctagaagagggacgaaccctttcaaattataacatccagaaggaatctaccctgcacttggatttgaagcttcgttgtggcatgcaaatctttgttaatactttgacctgaaaaacaataacttt

SEQ ID NO: 39357 - DNA, 409 bp, Glycine max
agaaggggtggaaagagttttagactaaggtggcttaattatcttagggccaacattaagcgtgggcggtgctctgaagcagaagataaaataatctgtagcctctttgctagcattggaagcaggtggtccataatagcatctcagttgccggggaggactgacaatgatatcaagaactattggaacaccaagcttaagaagaaaatgatggccatgaatccttcactccaaaagaagcctcaacaaattacccttttatccatccttcaaagttcagcatattcatcaccatcgtcattcagagacagtaacaacatctcatactaccaccctcacgggtccttttcctactcgtcaaatcttctgagtggtaacaacacttctgcttctgcttattccttctttt

SEQ ID NO: 39358 - DNA, 393 bp, Glycine max
  unsure (1)..(393): unsure at all n locations
cccacgcttgcttacngataaaacaacacaacttaatttattcatccaacatcacacacatctggtacgtttactttcttacaatcaaaaccaacaacaactactacaacttatcacaaacactaccattatcaaagacacacagcttactaatattgcaacgatcagaagcaaaccgactaatacatctaccttctccatgctactattgtcacctatgtacacaccaaaactactgctttagcttacagacataacattcataaccaacattataccaccaatgcctactccattaacactgantaacaccattctacttgctgctacgaatgtcacactaataaacatcatataactacttgtgcccttaatgataacaccaataaacat

SEQ ID NO: 39359 - DNA, 296 bp, Glycine max
gacatatgatcttgagtctgccgcatttgccatatcacgacggttcctaccaattggtccattgattgcaagtgacagcaacaaaagttcactctggcaaggagacacaactttcttagactggttagatcagcagccacctcaatcagttatatatgttgcctttggtagtttggcagtaattgatcacaaccaacttaaggaattagctctaggactcaatttccttgacaagccttttctttgggttgtacggccgagtaatgataatgaggcaaacaatgcatgctctgatg

SEQ ID NO: 39360 - DNA, 452 bp, Glycine max
cgggccggccgacgcgtacgcaagaagactacataaggccatatactttttgatttcacttggaaaaaaaaatgtccggtctgatggattcggatccacagcgatcggttcaaatgtacgagatcttgtatcacttaccaactaggccctatcgattagtattatacaaaaaaaatccatcatagacactaatataattagatctgttcttcatagacaaacttgtgatttccgatctcacgtaagatcggttcatgatcatgggatccttttctatcagataggaagggctgtttcacaaaatgtacttttaagtaattgctccatagatcctatatctatctatatgaagaagaaatcatgtgacgggggggattcttatttgtacaaatggtacttctaacttgtaacgagtatgaagaaattaacgatacttctttaccttttgagtt

SEQ ID NO: 39361 - DNA, 343 bp, Glycine max
taaaatcatcttactttctgtttcgagaagactatttaaaggattaattctatatctaatacgtgcgacatactcctacttttggaagggatgcatttattatactaaaattcaacacaggctcttcctgttacttttactactcaagataactcctctgatcatactaccttttttctctctacacattattcaaatttctcccctatcaacttttcattgttctatagttttctaccatttttgttacagttgaccataaattatatttctattcctgtaacgtaacctgacaaacgtctaccacttccaatttatttcatcatactccccaattacccat

SEQ ID NO: 39362 - DNA, 335 bp, Glycine max
aaatataatattgaaaacgggggatctgcaccagagggaattacttacaatatatattaaaacacaacaacaattaatgagtacttgattgcatcatatctgccagatgtgtatattaccacaacatgtgttacaagctatacagtcccttaaggaccatttgatgttgaggtttttgattcagcaattgattatatataatataataattcaatttttgatttttaatttatcatgaaactgctgtcatcttataaattcacattctttttattatgcacttcattaggttttttgtagcatattcaaatattatattttttgattaacttttt

SEQ ID NO: 39363 - DNA, 373 bp, Glycine max
ggattctacaggtgctttataagagattttagcaagggagggcgtccactatccaacttgttgccaaaggaggtggaatttgacttgaatgataaatgcaaagaagcctttcattgcctcaaaagagcattgactaccacccctatcattcaatcacttgattggacagccccatttgagctaatgtgcgatgcatccaattacacattgggggttgtccttgctcaaaagatctccttacttcaactgacttcttttccaccatgacttagggagtttttctttttctatctcctttcttacttttatcacaatttgtcgattctatttgattggttaattgcttttaatctttaaattgggctacattgag

SEQ ID NO: 39364 - DNA, 394 bp, Glycine max
cagggtagtgaaactcatttgtaagtactggtaattgttgattgccgaacttcattttgtgttttatattttggtaggagactttggagggcttcatcttgttgaatacctgcaaaacgagaaaaaatatcaacaacaacattattaactccttttatatgttcaaaatttatctttattccgttatcataaacatattcttggaataaaagccatcttttctgagattttttatcggtatttatttgttggctactattacttcgcaatcagttcttatggtgatttcacttttattaatcagaaagagtttaaatccttctagagcgtttatcacaacattgacttcataatctgtagaagttgagtatacctatggtttcgtgtgatattt

SEQ ID NO: 39365 - DNA, 381 bp, Glycine max
tgcgggttggagaacactagcttaccttacacctatgggtagcaaataattcaaggttcccaagacatgtagcttaattcagttcttgaaccctttgtactatagagttctatcaaagactggacatcacggatcaccaactatttctttcggacacaacgaccaggagttgacattcccaccaatcatgaaccatttgcagcaccaaagggttataatgcacctcaacaagtgcacataacacacggcgactattatgtaaaagcacaatattctcatacctgaccccagatgaaccaatgactcgacatgtgcaatatagcacatcaaaggataagtttcaaactattgccgaaagcacaactgcaaactacactttct

SEQ ID NO: 39366 - DNA, 340 bp, Glycine max
tccggaattcccgggtcgacaggcagcctgcctcgttttcgacgacgataccgtagacggccagcattaacgacccggttacggtgatctcgggggggatgtcaatccccgcggggcctgtccgcgcgcgcatttgcagcagcagcgctgcgcacattgcttagaacgcgatgccgatcggcaagttgacgaggaagatccagtgccacaacagctagctcttgaacagccccccaagcagtacgccgatactttcggcgcctgtgcatacgaaaccgtatacgcccatcgggcgcgcccgtttgcccggttttgggaacaagtttatgatcagcgacag

SEQ ID NO: 39367 - DNA, 254 bp, Glycine max
tgacgacctatcggacaacaattcaaggggctgtaagtgcgtcatctttcgtcaatatgatccttatgtgcattaagacgtgctgaaatttgacaacggaggttagtcccataatcattatacctttggaatctaacgacagccttctcctgtctgccaggatatgaccattggttgcacaatgtgtacagattgcattacctatgctcattctactgtacattacacaacagcatttgtcactcttacatcat

SEQ ID NO: 39368 - DNA, 347 bp, Glycine max
gactcataatctgagactactgagtggttcaaaggtgagaagtcgccaagatgggtccattcagtcacaagggtcaaatgataaagggcactatggtggttatgcagaagaatgtgttggatatcaacagcatcaccagtgtttaccggatccatggctccgtcttaaactttttaggcattgcacttgattcagttacttttttagcctacttcatatgcatccaacttattactgctaccaaagctgatggtgctaaaggaaaagtatgcaaatgcttcaaatttgagaggaaagataacattacccaccatatgaactaacgaagaagcatactatgctcaatt

SEQ ID NO: 39369 - DNA, 338 bp, Glycine max
agggatcactcattaatcgtgttaataagattcaagtgaggagctactgaatgcagaggtagtctactaaacatgccttgctgcgtctcgcacttcaatttctcgcggatgtctcccccatggctgacgctttgacatgcaccccaacagagtttagtccgtgtctaacagcaatcactttcggtgctaaacctttaaatgcttgctgcactaaactgaagcatcataaaccatgcttatgtggctacctcaaaaacgctagcttgaagcaggatgctaactctcctaatgcccgtaaaaccgctgcttctgcgggattccctttccaacttgttaat

SEQ ID NO: 39370 - DNA, 408 bp, Glycine max
ggagtgagcaagagtgaagagcgaagagaatggctcccaagggtttaatctttttggctgtgttatgcttctcaacactgtcactgagtcgttgtcttgcggaggataatggacttgttatgaacttctacaaggaatcatgccctcaggctgaagacatcatcaaagaacaagtcaagcttctctacaagcgccacaagaacactgctttctcctggctcagaaacatcttccatgactgtgctgttcagagttgtgatgcttcactgttgctggactccacaagaaggagcttgtctgacaaagaaacagatagaagctttgggttgagaaattccaggtacattgagaccatcaaagaagcctatggacagggaatgcccaggatttgttatctgggctgatatt

SEQ ID NO: 39371 - DNA, 431 bp, Glycine max
  unsure (1)..(431): unsure at all n locations
tctgtccagttacaacataccgttggtggctgatgttcattttgctccctctgttgctttgcgggtagctgaatgctttgataagattcgtgtaaactctggaaattttggtaagcatctcttcttaattcattagtcttatgtttttttctatcatttttttttcatgtgttggctttcattctgattccaagatgttggtcttctacagctgatagacgggctcaatttgaaacattagagtacacagaagaagactatcagaaagaacttgagcatattgaaaaggttaaatcatccatctgttagttttataactcaaatttcagtgaagagcatgctgtatgctaatttatcagtacttcttttgaggtccctcttctgtcatacacatatacatncctncttagtccttactgaagatgtgggaa

SEQ ID NO: 39372 - DNA, 368 bp, Glycine max
actgatttatacgggtcacaccctgtgtacatggatctcagaaatgaaggtggcaagccttatgcacatggtgttcttttgttgaatagcaatggaatggatgtgttctatagaggaacctctctcacgtacaagattattggaggggtgctcgatttttacttctttgctggacccacccctctcaatgttgtggatcagtacacttccttaattggcagacctgctccaatgccttattgggcttttggattccaccaatgcagatggggctatcacaatctatccgttgtagaagatgttgtcgagaattacaagaaggcaaaaatcccggttgatgtgatctggaatgatgatgatcacatgga

SEQ ID NO: 39373 - DNA, 383 bp, Glycine max
tgactcgtgtttatcataaaaaaatggaagatctatctactgcttttatgtggacaacatgttcatagcatctcaaaatttgttggtaattcaaaggttgaagtcactacttaatggtgaactttagatgaaggacatgtgagctattagaaagattatgggcatggagatcaagagggatcaagtctaaaagaagatctttttgtgttagaaagaatacattttgaaagtgtttaatcattttgggatggcattcacaaaatcagtatgttttcctctaacaccgtccattcgtctatctgaactcaatactactcgatcaaaattagagaaggaatacatgttttgttccttatgcaagtgttgtaagttggctcatatat

SEQ ID NO: 39374 - DNA, 138 bp, Glycine max
ggcagttcaattccagaatagtgcattctctctgcgtatatccctacctctcccttgaaggttgcagatcttcggcaagaccctgaccggctagaccatcacccttgaagtggaaagctctgacgccatcgactacga

SEQ ID NO: 39375 - DNA, 273 bp, Glycine max
  unsure (1)..(273): unsure at all n locations
aggagaaaacgaagacgaaagagaacagggaagcagcagaagncnaggaagcaaggccaagccanggcgcaggcaaccaaaggaacccacnccgaaagaaaaccggccacggngagcgnncnncggaggaaaaaagcgcaagnanaaggcacgcagaggaagcacacaacaaccgagcccngaaaaccaaacccgaagagngcgnngaaccaacaaaggacnacaanaaaggcgaacaanngagaacagacncgaaaacagggaaccaacaag

SEQ ID NO: 39376 - DNA, 186 bp, Glycine max
accaactttttaccaaatctacaagaaataatctacgggtgggtttcaatcactaccttaggttgttgcactattcacttcaatgctctggatttattactcactcttcaaaaaggatgctagcctccttttcattactattaacttctttgaatgtgtgatataaactatataccttacaatctt

SEQ ID NO: 39377 - DNA, 345 bp, Glycine max
ccggcgttgacagcgcggcacctgacggaagagcagtgggaggactactgatatatctcggagctggcgatccaaggggactatgaaacgcgcctgatggacacggaggagatgaaagagcggagcgtgtagcagaccacgcaggggacggagtgtatggaacagctggcagcgatggaagggatgagtgaatggctgaggaaggctgaaggagcggcggaatacggctcggagatatgacggagacttgtctatttgtcacgtgcggcacagacgccaggggcattgaccaggcgtaagacatgaacgccattcaccggctggaggaaaagccttcagtgaggg

SEQ ID NO: 39378 - DNA, 289 bp, Glycine max
gacaattgagactagagaacagggaggtgcttgtaccctagtcgtgagaagaaaggaaagggataagaggaaaatggtgtgcataacgaaagcgacggttaaagaccttatgtcgatgcacgcatgcaacctgttctgccttcctgagaactaccagacgaagtactacctctatcacatcctgtcctggccccaactactctacttctgcgaagactacaacgggcgcatcgatcgctacgtgctcgacgagatggaggaagaaaccaccgactgccacggccacatg

SEQ ID NO: 39379 - DNA, 415 bp, Glycine max
gtgtgaattattgtacatttcctatataatgtgtgtgttttaatttgacagatatgagaatagcttgccgagagtggacatgtttgtgttcacggcagacccaatcattgagccacccatgatggtgattaatacagtgttatctgtgatggcttatgactatccagcagagaagctcagtgtgtatctctcggatgatgcaggctcagacataactttttatgctcttttagaggcttctacctttgccaagcattgggtgccattctgcaagagatttaaggtggaaccgaggtcacctgctgcttattttaatacccttgtatcaacaaactcacacgaccataaccatgccaaagacttagatgccatcaaagtgcggagtaatcacatttttttaggctcatgtcacttg

SEQ ID NO: 39380 - DNA, 416 bp, Glycine max
tcaaaaaatggagagtaatccgtatcatctttcggggggacgatatactgatgtatactatggctgaagttcgaacaacacgcaattcattttgggccgttttcactttgttagggtcattggctttaatgttcgttgcaatttccacctatctagctatggatctcgctctttatttctgagaaaattaccgattacctcttctattactgactctatttatactacatttattccacaaggggccacgatggctttatatggaatcgccgctctctttagtagtttacatttagcgtcaattattttttgagatatataccgtggttttgatatcttcaattaaaaacggaaaaaggcactttttgatcgatggggattacctgcaaaaaactgttggattattctcgaaatac

SEQ ID NO: 39381 - DNA, 418 bp, Glycine max
tgattgttcaagagtttgttgcgagctataaggtggtttatcgcgaggagaatatgaagttgtctgttttctttgttgctgcactaattttggtagcatggccatgccatggcgcatgctaccaaaggttccctctccgaatgaaaactggctatcgtgagcattcttccgaagtaaaatgcccacgttttaagcttgctgtggaagcacacaacatccgagcctttaaaaccatttctgaagaatacgtttaaccaacataggactacattaatcgctaacaatttatatcagactctaaaacagttaaccaacaagctttcttttatgctagtgaacgcgatgtccatcacaacgacatatttatattcggcaatagatacaccgtactctttaatattccatactatgaaaaaca

SEQ ID NO: 39382 - DNA, 420 bp, Glycine max
tataaagatggcagagacattcctatttacctgagaggcggtgaacgagggacaccctgacaagctctgcgaccaaatctccggtgctgtcctatacgcttgcctggagcaggacccacacagctaagctgcctgcgaaacatgctccaaatccaacttggtcatggacttcggagaaatcacgaccaaggccaacgttgactaccagaagatagcgcgtgacacctgcatgaacattggcttcatgtcaaatgatgtgggactggatgccgacaactgcaaggtcctcgtgaacattgagcatctgagccctgatattgctcacggtgtacacggtcaccttaccaaaaaacctgaagaaattggtgctggtgaccagggacacatgttaggctatgccactgatgaaacccctgaatt

SEQ ID NO: 39383 - DNA, 359 bp, Glycine max
acaccacatatggtataaatattgcagagacattcctatttacctcagaagccgttaactaaagacaccgtgccaagctcttcaaccaaatcttcgatactgtccttgacgcttgcctctaacaaaacccatacagcaaagtttccttcgaaacatgcaccaaaaccaacttgctcattgacttctgaaaaatcacgaccaatgccaacgttgactactataatatagtgcgtgacaccttcaagaacatctacttcgtctcaaatgatgtgggacttgatgcctacaactgcaaagtcctactcaacattaaacatcataacccttatattgctcatggtgtacacagtcaccttacc

SEQ ID NO: 39384 - DNA, 407 bp, Glycine max
caaatggatacatccatctatggcggactggtccaccaagtctagcttcatatgcaaaatgaataggcagatgctccattaaatcaaaaaacccaaggggaaatattttctccaacttgcacagaattaatggaatattttgttccattctactcaagtcatccttcatcaaagttgtagaacacaaatatttaaagagatgaattatttcaataagtagatttaagacatgtggcgaaaataagccaaaaacaataggaagtaagcactccatgaatacatgacaatcatgaattttcatcccatgcacagttcccttatcaacattggcacatatggtcaagttagaagaataaccatttgacattcatagttcttttatccattgacatactaactttgtttgg

SEQ ID NO: 39385 - DNA, 386 bp, Glycine max
ctgttcatggctagcgacactagaggtattgcgctgttgtcagattcgcctgatgagggaggaaatttcagctgcgtggattagctcaggacataaaccttgcccgtgcaactatcgggtacacgataactgcttcaattcctatgggggcatggaataggtcgaattcgctatccaagcctgggcatcatgttaagtgctataccgtgaacaacccttgaatgatcctttttgcctgcatgacagatcgacgcttatccagataccagcatggtcataagctctggtggctctccattgctgcagatttatgtgttgtgcacagtcttccattggcctaaggctctcaaaatctaacttgtcacctgggggacagccttgtctgt

SEQ ID NO: 39386 - DNA, 296 bp, Glycine max
  unsure (1)..(296): unsure at all n locations
tttcttcnttnctacaattttnntagcatggcaatgccatgcgtactatatgttccctctccgaatgaacactggctatttttcccttactccggaaaaaaaatacgcaagttggacgcttgctgtggaagcacacaacatctttggctttgagaccattcctgaagagtccctttaatcaacaaaagaatacatccattgcgaacaatatatatcacactcccaaacagttaaccaacaatcttacttttattcccacaacctccaaattccatcccaaggacacatttttgttc

SEQ ID NO: 39387 - DNA, 399 bp, Glycine max
gataaaacaacacaaagggaaattaaatatttaaattaataaaattaatcatccgcgattctattttatgaatccctttttttttacaatacctaatcctaatcaccgaacttacacaatcagctagaatgggttataaagatatctatagatatatatagatttatttatctatcgatatctctaaaaaaaaaaaaactaaaataaacaaataacacctctcattttatttatactaaaggggaattatgagacaaaaaataaatccgcttggtttcaaactttgtacaactcaaactcatgattctatttagaatgctcaaccaacaaaatattccgacaatatacaaaaagataaaaaaatacgatattgtatcaaaaattatatacaaaaaaata

SEQ ID NO: 39388 - DNA, 446 bp, Glycine max
  unsure (1)..(446): unsure at all n locations
ggccgaatcccggtcgagcgaggctccccaacctcctccggttcaaaaaaccacaagggcctcaaaataacccaagcgagcacaacacagcgcagcacttcttaattcccttcacactctanacagatttacangtgcttacacttaaatggctttgaagctcttcaatcacccaccacagccactccatcgttagtccctttgaagaaaccagtctcagttacttagagacaccgtggacgaaaggaaagcgttctaagcgtagccgcacggagcaacaactgcaacacccttcatgcaccgaggaagagtacctcgctctttgtctcatcatgctcgctcgcggcggcgccggcagtgtctccaccgccaaacccgctgtctccgacaacaattctgcgccgctatccgccgccaaactgagctacaaatgttcggtttgcaac

SEQ ID NO: 39389 - DNA, 463 bp, Glycine max
  unsure (1)..(463): unsure at all n locations
gcccgaaatncccgggcggccgcgggcttccgtacggttgcaaaaaaacaacaaaagggggccatcattagaccaggaatgaatcattcctcgtggtcctgatcctaagtagggttagggttagggtttatgcaatcgaattcctgagacggtgcatttgtacgtaatcgatggcgaatcgcacggatcctgcagctaagatcataaggggcacgaaccctcagaacctggtggagaagattctccgatcgaagatataccagaacacctactggaaggagcaatgtttcgggttaacggcggagacgttggtggacaaggccatggagctcgaccacctcggcggcacctacggcggaaaccgcaaacccacgccgttcgtgtgcctcgtcatgaagatgctccagattcagcccgagaaagaaatcgtcattgagttcataaaaaacgaggattacaagta

SEQ ID NO: 39390 - DNA, 428 bp, Glycine max
  unsure (1)..(428): unsure at all n locations
agaagggggaaaaaaagagtgaagaaaagaacgcataaactgaggtaaaatatggcagggcgcgagggttaaatacnatcgtcaactcaaaatatggggtgaacaaggacaggcagcccttgagaagtctagtattggcttacttaactgttgttctactggttctgaaacacttaagaatcttgttcttggtggggttggaagcatcactgtagttgatggatctaaagttgaagcgggagacctcggaaacaattttttgggtacatgacttcttgttgtacactggttatgtgtttgtaaatgtcttttggttctgatttttgtcccatgtttgtagtggatgaagcaagtcttgggaagtcaaaggcaaaatgtgtatgctcatttcttcaagagctgaatgatgcagttaaagcaaaatttgt

SEQ ID NO: 39391 - DNA, 334 bp, Glycine max
ctattatacgcagtgatggaaaagtgaggagtgagggcaaatattgtttgaaagattatgtgggccgtgacaataagaatgagacttcaaccttacaacgtcatatggggaaatgtgatgtatatttgaaggcattctaatagtgatgttggaaatattattcttgatcatgctgggagattaagaaataaaaaaattgatcaaagtgtggtacatgagatgatatctatgatgattattgagcatgatcttccattctcttttgttgaacataggagggttaaagagttattacaatatttgcatcttgatatgaaagttccctttaagcatg

SEQ ID NO: 39392 - DNA, 211 bp, Glycine max
acaagaggtctttcaagtatgcctgggtgctggacaaacttaatgctgagcgtgaaagaggaatcaccattgatattgctttgtagaagtttgaaacaactaagtattattgcacatttattgatgcgcctttacatatggatttcattaataatatgattactgggacatcccaagctgtctgtgcttttcttatcattgattctaccac

SEQ ID NO: 39393 - DNA, 235 bp, Glycine max
aagcttggaggcattgacaagggtgttattgagaggtttgagaaggaagctgctgagatgaacaagaggtctttcaagtatgcctgggtgctggacaaacttaaggctgatcgtgaaaaaggattaacatttgttttggcttggggaaatttggaaccaccaaatattattggacaagtattgattccccttgacattaggatttcatttagaatatgatttctgggacattcca

SEQ ID NO: 39394 - DNA, 298 bp, Glycine max
tctgaaaggggttctagtgtgtgattgtctgttgctgtaactgtatgttcttctcgcggtgttctgtgtttgagttagctttttctctcacctgaaaatgtcttgctgctgtggtatctgtggttgctgaagctcctgctagttcttctactgctgctgaggctgcaagatgtacccagactagagctacactgagtctaccaccaccgagaccttggtcatgggagtggcacctgttaaggctcaatttgagggtgctgaaatgggtgtgcccgctgataacgatggctgcaaatgt

SEQ ID NO: 39395 - DNA, 427 bp, Glycine max
gtgcgcctacgcccatcgcataccttcaggtgagcccattcatgaaggccgagcctactagtgacggcatgatcaccacggaggcaggctctatcaccactggtggcctcgtggtgatcctcagcctatgcctcacaatctatgggatttcatcgttctaacgaacgacacccatccactgacccgacactgaccttgacaggccttatgaaggagcccgatcagctccaaactgctgatcagtgggccacactcaccggatgcttactctagccaggcatttcagatgctattaccgtctacttgcttctgtacatgccgaaccttacttactacatcgcctgattaacgtgctgattatctagaaagacatgtatggagaatccattgtgtatgaatggacaatgggtctaaaatgatcctcact

SEQ ID NO: 39396 - DNA, 245 bp, Glycine max
tcgggagttcaattccaatatatgaccactctctctgtggaatggcctaccttctacgttcaagatgcatatcttcgacaatacccttaccggctagaccattacccttgaagtggacatgctctgacaccatcgacaacgtcatggccaatatccaggacaaggaatgaatccccccgatccatcaacttctcattttctcctgaaagctacttgatgtactgccgtaccctttctgactacaa

SEQ ID NO: 39397 - DNA, 290 bp, Glycine max
gagatcacaggcaatgtctacgtggactatgagaagattgtgcgtgacacatgcaggaacattgtttacgtatacgacgatgttgtgtcttgatgctgacaactgatatgttgcttttaacattgagcagacatgatcgcttatatagctcaaagtgttcactgcaacctaacagagatatctaaccagatttgtactacctaccaaagtcttatgttcggatataccactgtcgatactccagagctcatgcaatttagcaataaactttcctcgaataccggattcaa

SEQ ID NO: 39398 - DNA, 423 bp, Glycine max
tgcattcaaaatgttagttaattttattagcttatcatttaattgttgacaactcttaaaattgcctatatactagagttatgtctaaaattattgcatttattttctttgatattttaggtctacactagtttgcttttttaatctcttagtgctattgaatctttgatgagtacatacattggcattgatatttctttgttcaggatgcatgacagtgtgacatatgtggttctaaatctggaaggggatttggtaagtatattggaaattaaaatattgagtcctatatggtttgagaaaacccttttttttttatcttcatttcctgttctcataaataattacagaaatgtcactttgtttcctgtttccaaagatttgtgtaagaaactataaattggagattttttggttccacta

SEQ ID NO: 39399 - DNA, 383 bp, Glycine max
ggaccaacacctgtgcagcaattctctgtcaccaaatttgagcgttctatctttctgactttggcggcaatgacagaaacggtggtctctgataattccaagggcttaatactggcaatgggttctaatgcattcataggatccagattcatcttgaagaagaaaggtcttaagcgcgctgctgcacgccgtactagtgcaagagttggtggatatactcatctactagagccgctatggctggctctcatggcgacaatgataattggagagattgcatactatgatgcttatatctatgctacggcagttatgggtactgcccttggtgcacttactattattagcactgcatgattggctcactacttgttgaatgaacg

SEQ ID NO: 39400 - DNA, 325 bp, Glycine max
caaagggtccgattggattaaagcggcgattaccacaacatgggatgccgacagtgctgatcctatcatagcatcaatacctgcaacatgggaatctcaacttcaccaagatggtcaagaacaaacacatgctctgaacgaattcaccatagtggtaactcatatgatttactactgcaacaaactggatcctactacaccaaagtggagttacaacaaggacaatcacacctgggatgaggcatcttcatacaggataaagatgccatctatctgtgctcacaaaatcttacaattcaccatataattttgccacaaacatcat

SEQ ID NO: 39401 - DNA, 429 bp, Glycine max
gaaccaattccattattaaagggataagcctcaaccttgcaacccaacacaaccaaaattcgctacttgttaagggctgcactataccagaatgtctcagggaagaggcagtgcatctttgcctattgtggtcactgtggtttcactactgtgccttttggaacgtgctaacgcagcaacttactccgttggaggacctgtgggatggaccttcaacactaatgcttggcccaatggaaaaagattcagagctggtgatatcctaagtaagtaaatttaattatttttttatcatcattttcatttattagttttgttacaaatattacttaaagaattcaaattcacgatttctctctccttcttttttccttaattatttttcaatcacttatcaatttcatatctcataactaattaaatttaatc

SEQ ID NO: 39402 - DNA, 157 bp, Glycine max
gagacctcaggtcaggcggggctacccgctgagtttaagcataccaaaaaaaaaaaaaaaaaaaaaaaaaaacaagcggtctatataaacgatccaagcttacgcacgcatgcaagcgacgacatatcttatatatagagctacctaaaatcaattg

SEQ ID NO: 39403 - DNA, 427 bp, Glycine max
ggttctagtgtgtgattgcttgttgttgtaactcgttcttcttcttttgttgttctgtgtttgtgtttgatttttctctcacctgaaaatgtcttgctgcggtggtaactgtggttgcggaagctcctgcaagtgctgcaacggctgcggaggctgcaagatgtacccagacttgagctacactgagtcaaccaccaccgagaccttggtcatgggaatggcacctgttaaggctcaatttgagggtgctgaaatgggtgtgcccgctgagaacgatggctgcaaatgtggaccaaactgctcctgcaacccctgcacttgcaagtgaggtgttgggagagcaagcttcaagcagagatagcccctaattaggaataatgatcaactattaatgtgtagctaataacttatgtattatgtctgagat

SEQ ID NO: 39404 - DNA, 356 bp, Glycine max
ctggggcaccgcttgagcagacttaacatcagggcaaagcgtcatactgggtgctcaagctaccatgtctatatctatctttactagtgcctccttgccacaagctaaaatggcccaagagactctcatattcacatgcgaatcaactaacgaggggcaccctgaccagctctgtgaccagatctccgattctgtactcgatgcatgcttggagcatgaccctgacaagcaacgatgtctgtgaaacctgcaccaataccaacatggcgacggaattccgagagatcacaatcgaagccaaagtgtactatgagaagaatgtacgtgacacatgcgtgcacataggcttagcctct

SEQ ID NO: 39405 - DNA, 345 bp, Glycine max
  unsure (1)..(345): unsure at all n locations
ccacacgtgtggtctanaactagcctatgctcgtgaagcttgtcgacgaattcanatcgacgcgtttagagattggtggggccgactaaattcatgtcgcgcgatagtggggtttatcgccgatagagatggcgatattggaaaaatcgatatttgaaaatatggcatattgaaaatgtcgacgatgtgactttctgtgtaactgatatcgccatttttccaaaagtgatttttgggcatacgcgatatctggcgatagcgcttatatcgtttacgggggatggcgatagacgactttggtgacttgggcgattctgtgtgtcgcaaatatcgcaggttcgatat

SEQ ID NO: 39406 - DNA, 198 bp, Glycine max
  unsure (1)..(198): unsure at all n locations
ccaaaacccaaaanacatggatacctgctctaaattctcaatctaaacaacacctatggcaccacctgctcagacaaattcccgaacacaccaatatcattttgccacaactcctgaatctgcctttacccacttccaaacattgcatccgtcttgcttgctatgctcccccaaagctcctggaacaaaagcttcaaa

SEQ ID NO: 39407 - DNA, 396 bp, Glycine max
gataataaatcacattcatacctccgctatgttttacatgatctttggcagggagagagaaaaaatgcagaagcatggttttgcatcaaagcgtaacgtgttgccgtatcaaacgccgaggctaagggaccactacgttctggggaagaagctgggacaggggcaattcggtacgacgtacctgtgcacccacaaggttacagggaagctctacgcgtgcaaatcgatcccgaagaggaagcttctatgccaggaggattacgatgacgtgtggagggagattcagatcatgcaccatttgtcggagcatcccaacgttgtccagatacaaggcacgtacgaggattccgtgttccgtgcaccttgtcatggagctctgtgcagggggagagcttt

SEQ ID NO: 39408 - DNA, 436 bp, Glycine max
ggaatcgccgggtcgacaccacgcgtccgggggagttttgcggggcggtttattgtcaaatggccgccagtataaacacggctgctttgacaaaatacttgggagggcgcgtcgacgctcttacccgcaacactcccttaaccctggcttccaactttatgattcgccgcttatgtgaacacgttacgggttgatgcctggacaaggatgaagtcacagatcgcgtcatttgctgcgtcaaaaacttacagaaaggtgctccttcaaagggtaaccctactgctcacttccagaatgaccttggattggagagtttaaaatcggcagagaacgtcatggctcttgacgaggagtttgtgttcgacattactgataatgacgcagacaagatcaactgcattaaacttgcagtggacttcattgcatcttatcctca

SEQ ID NO: 39409 - DNA, 283 bp, Glycine max
acccttgggcacaacataactcaaccttcccatggccaatggcctcattttgttccacacataatatcccaatcctttgtccaagcaccctcttttctacacctctatccttccattcattccttattttccggctttcatatttgaactgcaccctctcagacactctatttaccctcagtcatctacggacaatcttctcaacctcctcagaccatatttcctctttccccttactataatgataacttagagctcctttttgaaatatgtcatttctgat

SEQ ID NO: 39410 - DNA, 212 bp, Glycine max
gatccttctgtgcggggaagggcaaaaaatggccggggtgcaacttctctaggaatcatgcccccggctgaacacatcatcacacaacaagtcaagcttctctacaaacacgcaagaacactgctttctccggctcaagaacatcttcatgactgtgctgttcacagccgtgatgcttcactgtcgctggactccacaagaaggagcttgtc

SEQ ID NO: 39411 - DNA, 159 bp, Glycine max
ccaatatgaatttctgtgtaactgatatccccatttttcccaaagtcattttttggcatacccgatatctttcgataacccctttttttttttacttttcgatccgatagaccactttggtgacttcgaccattctgtctctcccaaatatctcacttt

SEQ ID NO: 39412 - DNA, 263 bp, Glycine max
ggccgggagctcgggcccccacacgtgtgggctatactagcccattttcgagaagcttgtcgacgaattcaaatggggagccctgctaccatgcctgcagcgactcatggtcgctcggcagcttcttgctcctaacagtggaggccagacttaggcacagcacgatgcccaccaccaccagtgtgccgcacaaggccgtggcggtagggtatgtgtctgaaaatgagctcggggagcgggcttgcaccgctgacgcatttgga

SEQ ID NO: 39413 - DNA, 338 bp, Glycine max
cggggcaccgattgagcagacttaacaacagcacaaagcgggttactgtctgttcaagctaccatctctctgtctctttcttagtgcctacttgtcagaagttaaaatggcccaagaaactttcctattcacatctgaatcattgtactatgggcaccctgacaagctctgtgaccagatctccgatgctgggctcgatgcatgcttggagcaggaccctgacagcaaggctgactgtgaaacctgcaccaagaccaacatggtgatggctatccgagagatcacatccaaggccaacgtggactatgataagattgtgcctgacacatgcaggaaca

SEQ ID NO: 39414 - DNA, 304 bp, Glycine max
gactgccagagatcgagaaaacggggaaactatcgggattagtattgatcatggctattgcttgtattagaggttcgaacactgatctctctacttgttatactggccacatgctaaggagccttactgtcctgacaccattgattacataaaatttctggatgctgcagaagacataaatgacaatgatagtttcatggatgggaccttctttgtaaatagtgctgatatccttagtatatcagccatgctgcttctgaaaggtgcatacacgaggactcactatgtttcatcttatgaagca

SEQ ID NO: 39415 - DNA, 289 bp, Glycine max
  unsure (1)..(289): unsure at all n locations
tggactctttaactgtaagtcaaacaaatgatttaatagaatattgttatatctataagctctataacttgttatacaactcatgcttgatacataggttattatcatatatacctgactaatgagatgaagttgaattcattaaatcacgactaaaaattactttttttaatatatatattcaccttctatatactacatctatactcttttatgccctgntgtatactctttaacatttaataatcatctccaatcttggtttattgatctatcgaatactacgcta

SEQ ID NO: 39416 - DNA, 402 bp, Glycine max
  unsure (1)..(402): unsure at all n locations
tacggtttggaagcagaagtatgagaagattactgcgaagaaaggttctacttctattgactctctctctcnntactatccctcataatttgcttcatacttccattactgccggtcactgaggtttgatgataaaccagattatgcttatttgaaaagacttctacgtgaccttttcattcgtgaaggattccagtttgattatgtctttgattggaccattttgaaatatcagcaatcttcaagtgccactgcccctgcccgtgctattgtaagtgatagcatgctatcttattgtattagctgattgattgttgagatttagattatttagtggaagtgacatttgcagggtccggccgctggaccaagttcaggtgtgccaccactggttgcaaatgg

SEQ ID NO: 39417 - DNA, 450 bp, Glycine max
ctccaaagacgcataccaaaggtaccatgcccatcactacacaaatggaacccggtgcgatgtcacaaaccaaccacgagaaactgaggttagatttgtttgctcaaagccacccagagccatactcaattgtatcacagaactatcaacgggcaagtatgcacttacggcgcgatgcccgacactttgcaagcatatgttatttgaagaagagagaccagtgtggtacatcattaactgcaatgagcttccagatgattacaaggaaacagagaggagtgaagaatcaacagatgagattgtcatggttactgacatcaaatatccaaaaaatgaatctgaagattaatgtgaatatatctttatatgatagaagttttatcaaccaaactaaccttacacacaaagctttttcctatgtagatttttctttttcatattcaaattata

SEQ ID NO: 39418 - DNA, 298 bp, Glycine max
acgcgcagacggctgccaagacgacagattgagaggtgctagtgccaatggagctacacgcactatttgacattattatacagcacagaatgaacataatgtcttagtctgaatgatggaccatcgtgaagctatcatattccacttaacttgaactatcctaattatggcgtaccatactctagcactcaatgtccataatgatgacacgcttgattttggcacttccgcgatgcaaatgttgatacagactatatttgcccatttgatacaactcagctcatggtgaaacttacta

SEQ ID NO: 39419 - DNA, 353 bp, Glycine max
gtgacatcaaatccttttttgctccttctggtgggacctctgtccatgccgattccttcttgcagctcaatttgtctcgccctttgctccgggcttgtgaggccttggggtattctaaaccaacaccaattcaggcagcttgtattccattggcattgagtggtcgtgatatatgtggtagtgccattaccgggtcagggaagacagctgcatttgcactacctactttagagaggttgttgttccgtccaaagcgcatgcgtgcaataagggtcctcattcttactccgaccagagagttggcagtccaagttcacagtatgatagagaagcttgctcagtttactgatata

SEQ ID NO: 39420 - DNA, 363 bp, Glycine max
cctgaatgcctataagtggagacctctgcgagagcagagtgaggcctacgcaagaggtaggcacaggttctacaccacaccattatatctacgtgcaagtcaaagccggctttcatacgagttacaaacatcagcgaacttccgcataaattgtcttgtcttaccacattattactgtatgaggaacagaatagtccacgatggcacagaagagatacatcatcaacgtcgcgaacgcgcacgatgccagctactgaaggccttacacaggacctagctatcgtagcacttttgtcaaggatggaatgtctgatcctattgacgtgatcaatagctgctgggacgtttatcgacagtctgttg

SEQ ID NO: 39421 - DNA, 379 bp, Glycine max
ggagtgcgcaagagtgaagagcgaagagaatggctcccgagggtttgagctattcggctgtgttatgcttctcaacactgtcactgagacgttgtcttgcggaggataatggacttggtatgaacttctacaaggaatcatgccctcaggctgaagacatcatcacagaacaagtcaagcttctctacaagcgccacacgaacactgctttctactggctcaaaaacatcttccatgactgtgctgttcagagttgcgaagcttcactgacgctggactccacaagacggagcttgcctgagaaggaaacatatagaagctttgggttgacaaatttcaggtacattgagaccatcaaagaagctttggaaagggaatg

SEQ ID NO: 39422 - DNA, 260 bp, Glycine max
ccagtcgtacgaacagatgcgataggacgactgagctgggagtcaatataaaggtacagtgttaacgttggaactgtggccaccatctgaatgtagcgagtgcactgtgcctatacctctctggacgaagcattccaaatatggaaagacgcttttcatgtgcaacagtacagtcagatttacttcgcgcgccttcattcgatgcgaacacttttatattacctcgttactcattggaaacccaatttttccgtgtgcac

SEQ ID NO: 39423 - DNA, 335 bp, Glycine max
  unsure (1)..(335): unsure at all n locations
gaacatggcctataactatgggaaaggggctctgtgtgtgctttcagccttggccggaaaaaatgatggtgtagttgctggacttgtggggtgtggcctgataaaatccattgtttcaattcatctgatttgatgcatgatttcaagactggccatctcactttcactttccctcgttcgatgcttctaagccaagcaattgggacagcaataggttgtgtagttgctcctctcacattcttcctttnttacaaggcttttgatgtggggaacccagatggtgactacagggctccgtatgccatcatatatagaaacatggcaattcttggtgt

SEQ ID NO: 39424 - DNA, 313 bp, Glycine max
acattgggaccttacagacatcaacatatctcatgtctctggctaagaatcgaaacagagagctcacacattggcatcagtgtatctaccaagagaacatcaattatcagtctctttcctctattgcaaaccccaaaaatgttctggttattcatccatgatatcgtcgacacctggggtactcaccttatcatgcctcactacaaaatatcaaactttgtaccattgacaatatcgttgactaagtctttaatcaatctttccctgacatatcatcaggatttgactacccacatctaacacttactggtct

SEQ ID NO: 39425 - DNA, 375 bp, Glycine max
aattcgagcgaccgctttctttctttcttttgctagatgactactcttaataaatgattcggtgcaaagggatttttttttagtgaacgtgtcacagttaattactcctttttcttgtaaagacgaagaaacacttgctatttactgtactatttagctcgacgaccaagaatcaaattatcactatatttcttcctttttctacttctttttccaagtgcaggaaaaccccaaggagttgcgggtttatttctaccaattggggccctcccttcaccacccccatgcggatggtatacggggttcataactactcctgtaactacaggacgcttacttagccaacattaaaatccggtttaacctaaattttcc

SEQ ID NO: 39426 - DNA, 241 bp, Glycine max
gacacacgaaggcttgatgggtttccttgaaccattaatcaagccgaaatatttgaaagggttaccggcattgacctggggggcaatctgaagcttccagaagaagcactggttgcaaaatgccttggtagaaaaatttgtgatcaatgtggaggaaattttaatattggcttcattatcgtcaaaggtgagaatgggccttccggaatggtcatggcttcacttctttcttctgcacact

SEQ ID NO: 39427 - DNA, 177 bp, Glycine max
tgggctcgtagagcatatcttccgactcaaagcttattgcctctataggatattcctttcatacttcctctatcttgtatactaaatctatctatttgctgattatacctgatggacgctattaaatcccatatatattacccaaccttacatgacattcttaactatcacgactct

SEQ ID NO: 39428 - DNA, 424 bp, Glycine max
gaaggtgcaagagtttgttgtgagctataagctggtttatcgtgaggagaatatgaacttgtctgttttctatgatgctgcactagttttggtagcatggccatgccatggcgcaggctaccaaaggttccctctccgaatgaaaactgtctatggtgagcgttcttctgaggtaaaatgcgcaagttttaagcttgctgtgcatgcacacaccatccgagcttttaatcccattcctgaaaatgcccttgacccaccaaaggactacattaattgctaaccatttaaatcagacttttaaacacttaagccacatgctatcttatatgctaatgaacgctgagtccatcacaacgacatatttatattcggcatatataacaccgtactctctaatatcccatactatgaaaaacatggatat

SEQ ID NO: 39429 - DNA, 344 bp, Glycine max
gaactcgttctagtgtgtgtgatggctgtgactcgttcttcttcgtcgttatcttcttcttttgtcgtttgtgtgtttgctttttctctcacctgaaaatgtcttgctgcggtggtaactgtggttgcagaagcgcctgcaagtgcggcaacggctgcggaggctgcaagatgtacccagactcgagctacaccgagtcaaccaccatcgagaccttggtcatggcagtggcaccagttaaggctcaattcgagagtgctgaaatgggtgttcccgctgagaacgatggctgcaaatgtgcagctaactgcacctgcaacccctgcactcgcaagtgaggtgtt

SEQ ID NO: 39430 - DNA, 425 bp, Glycine max
agaagactacataagggggttctagtgtatgtgattgttgtgactcgttcttcttcggccgcatcttcttcttttgttgtttgtgtgtttgttttttctctcacctgaaaatgtcttgctgcggtggtaactgtggttgcggaagcgcctgcaagtgcggcaacggctgcggaggctgcaagatgtacccagacttgagctacaccgagtcaaccaccaccgagaccttggtcatgggagtggcaccagttaaggctcaattcgagagtgctgaaatgggtgttcccgctgagaacgatggctgcaaatgtggagctaactgcaccttgcacccctgcacttgcaagtgaggtgttggagagcttaagctttaagcagaaatggcccttagaaataatggataaaactatatgtagtttcaaaac

SEQ ID NO: 39431 - DNA, 348 bp, Glycine max
gttagacacagtcactccagtagagagtagcatggtggggactacaacgacacccctttcccacacggttcgcgtgtccaacatcccccaatccgcgaccgcgaacgacctcctcgacttcctcgaatcgacgttgggttcctccacggtgttcgccctcaaaatcttctccgacaacctcaactggaagtcccgcggcttcaggcgcgtccagttcgagactctcgacgccaggtcccgagccctctcgctctcccaactcaaccagctccttttcaaccgccactttctccgcctatccaaaaccgactccgacatcattttccgcccccaacaccgacttcaaaa

SEQ ID NO: 39432 - DNA, 310 bp, Glycine max
tacggtttttataatactacagattggggtctccattcgggactgtaactatcccgagcgcgaggagcaaccttatgaagaaaaaaatttctcacaagaagttcgagcacccaacgcacggttcactgggatttctttccaagaaacgtgctgctcttcacaagggaaaaaagaaagcattccccaaagatgacccattcaaggcacccaaactcactgcattttttggttacaaagccgggatgactcacattgttagagaagttgagaaaccacgatcaaaactttacaaaaaagaaacttgtgagcc

SEQ ID NO: 39433 - DNA, 459 bp, Glycine max
  unsure (1)..(459): unsure at all n locations
gaagaaagaccgacccacgccacccgtccgttcctataatactacatacagattttctaacacctgngctactatctcccacgcccggttctttttttactcatcctcaattgcccttcattgtggctgctctctaccttattatctatatgaagcaactggctggggtttggaaatacctgtactcaataaacaattggaggctcccaaatctaatggcatcaattttattgcttaatgtgttatatatcctttctatccaacatgtcatccttttagtgattcatattttttatatatattataattttccatctaaaaaagttttgctcttttaacttcttacttattttataaataaagcttattttcctttacattaaattttaattcttttaaaaaaattttttccttcccttcttattattttaataaattattttcatctttttatttttt

SEQ ID NO: 39434 - DNA, 153 bp, Glycine max
agcgtttaatgaagaaacaaccacttctgactattggtcgctcactgtgaccggcttgatgcagcaaatatatgcaaccagagatctatccgattacttgtgggactccacagatgttgcgaacaatatcaatgacagattatagacgaatgc

SEQ ID NO: 39435 - DNA, 315 bp, Glycine max
ataagacaacaacagaaagcacgtctaacagccggaaactctgtcttttctgttcggtctttctccgatcgcatcactcccaacccccatcacgccttcccgaagaagaactcttttgaaggtcatcattctcggtgacaacattgtggagaagacagattcgatgaaccaggctgtcaataaacattttagttattaatgcagagcaaccattggagcggattgttctaccccagaagtgcaatttggaaataagcttttcaccttacacatttgggatacagcttgccaacaaagatttcaataccttggagt

SEQ ID NO: 39436 - DNA, 334 bp, Glycine max
aattctcggatcggccgactcgtacgcccagaatcccccttttcacctcttttaatgtctgatcctaaaaatgaacgctcccattcgcaaacttttaacagacctgggggtcattctgatgatctttcacttaaaatgagtgaaacaaatgatgctaggcatctaaaacaaccctcagttcggatgctatcatatcttaattttacaaagtggctttatgctttgttatgaagcatatgtgctgctatctttggttctttcaatcccctatttgcttatgttattggcctctttgtgacatattactatagaattagataatctcatcacttac

SEQ ID NO: 39437 - DNA, 420 bp, Glycine max
ggcacttctagatcagacttaacaacagcacaaagcgtgttagtgtctgttcaagctaccatctctctctctctttcttagtgcctccttgccagaagttaaaatggcccaagaaactttcctattcacatctgaatcagtgaacgaggggcaccctgacaagctctgtgaccagatctccgatgctgtgctcgatgcatgcttggagcatgaccctgacagctaggttgcctgtgaaaccttcaccaagaccaacatggtgattggtttcggagagatcacaacctatgccaacgtttactatgataagattgttccttacacatgcatgaacatttttttttgcctctgatgatgtatggtcttgatgctgacaacttcaaggtccttgccaacattttatcaacatattcctgatat

SEQ ID NO: 39438 - DNA, 329 bp, Glycine max
gcacttgatccaaacttcaataagctctcaatggatcacatattttcagcttacaagcttacggcaactatagcaatccttcttgactatgatggtacactaatgcctcaatcatccaccattgataatattccaagcattaaatccattgaaattcttaatagtttgtgtatagataagaacatcatagttttccttgttagtgctataaacccaaagattcttttccaatggtttttcttccttgttaaaatcttgttaatttcatcttatcatttttactttcttaataattaaactaaaattaatatattttaaacacatttttt

SEQ ID NO: 39439 - DNA, 254 bp, Glycine max
tattcattctctattgtcactttgctaccggttctttcaagattcatatcttcttcaagaccctcaccgtaaagaccattacccttgacgtggaaagctctgacaccatctacaacctcaattccaatatccatcacaattaatgaattcccctctatcatcaacctctcatctttttctaaaatcatctctattactttcgtaccctctcctactacaacatccataatgattcaacccttcaccttttcctt

SEQ ID NO: 39440 - DNA, 348 bp, Glycine max
ttcaactctgtcacttataaaggatcttttgctactgtttatcggcataaaacccttctctctgttattaatataatttcttcatatcttaaacttcacacttttgaagaagtggcaaatcacaaccataccaatgattgctgtctcatcatttctttcaatgtgtattatgtcacccctttcatgtatgatcatcccttatgtgatgaagttttgttatctgcaacatttaaatattcatccaattacttttaatattttattcacatttattctgctataaatattatttaaaaatactacattttttaatatttattccataaccctttccactaaaacgtacct

SEQ ID NO: 39441 - DNA, 396 bp, Glycine max
  unsure (1)..(396): unsure at all n locations
accggttcggaattcccggctcgacccacgcgtggntccggctagacgacagcaagntagaaggagttgatctctatctttaatcaatgagaagagacactaactgacaaacccttttatggggatgacacgtttggctttgttgatctttgtttgatcactttctctagttggttttatacttatgagacatatgggaacttcaaaatggaagaagagtgtcctaaactcatggcttgggtcaagagatgcatggagagagagactgtgtccaatactcttcctgatgctaagaaggtgtatggtcttattgtggaactgcagaagacacttgaatcgaaatagaagatttcaataaatcaacccattaaataatattttcatgttaaatatgtt

SEQ ID NO: 39442 - DNA, 345 bp, Glycine max
cacccgcccaccttaaattcactcttacattttttatatctaattaaaaataacttaacatacatataaacatttttatcgttatttctactcaaccaaatcttactcttattcccactatcaaagacctaattgaaaacactctctcttctcaccataacaaactcatttctctcctctccacgtatttatctcaacacaaaacatttttcaaccccataatttcattaatcaacttgacaacatccttttcgatgatcaatcaatatttgatcttaaaaatattctcttttcttaaatctttaatttcttaaactaaaccatacttttacctcctttttttac

SEQ ID NO: 39443 - DNA, 439 bp, Glycine max
acggattcggaattccgagccacgacccacgcgtacgcgcgggtgcttgcaaaaaagacgacagaagggaaccatgaagagatatttgaagttctggcagcagtggctgcatctttgggggatgtaatagatgatgtgaacactttgcaggtaacacctttaaagggggcaatgaccaatgaggtttttgaggtaaattggccaaccaaaagtgatggtcatcaaagaagggttcttgttcgattatatggtgaaggtgttgaggttttcttcaacagggtggatgaaatccaaacctttgagtgcatgtcaaagcatggacagggtccacgccttcttgggaggttcaccactggcagagttgaggagttcattcatgccaaaacactctcagctgcggaccttcgtgaccctgaaatatctgctttgatagcatcta

SEQ ID NO: 39444 - DNA, 314 bp, Glycine max
  unsure (1)..(314): unsure at all n locations
cccacaccttcntctgctgctataaactacataaggggcagttcaattccaatacagcccgcnttttctttttatttccctacctttctcttcaagattcanatcttcttcaagaccctcacccgcatgaccatcacccttgatgtgcaaagctttaacaccatctacatccttatatccaacatccattacttttaatgattttcccctgaccatcttccttttatttttttccttattagcaatttttatggacctctcctaattcttttctttatctacattcatttcatttatttatattttactttttt

SEQ ID NO: 39445 - DNA, 370 bp, Glycine max
gatctcagggaggcaagaaacaaggcattatggagaaacttgatttagcgacagaatcatcatcatcgtatcctagtaatttgtgggactgtggcagcacgctatatgactcgttcgagctcaactccttcaaacgccaactcgactcagccatagctaattcccctataataagtagaaccctttccatgcctcatttaccggaacgttcacttcacgcgccgccggagcaacctcccacggtcatgtcccgaaagtccttcaaattttctcgctcctttcacaaactccttcgctccgttttcaagtccaacagtaaatccagcaccactaccaccagtttgagtttccaagtgccagagaaatactc

SEQ ID NO: 39446 - DNA, 365 bp, Glycine max
  unsure (1)..(365): unsure at all n locations
tactacaaaatgtggctttttttcttttctactcattatccgggcctcgttgttctttcgtgttaganaaacttaaacaatggtaaattgccaagccgttgacactgcaactctagtgattcatcaacccaatgccaaagtataaaggttatattggcctgttagtcctaatgaagtgatcaagaccaaccctgatcactatattgctcttcttatcttcaccacattgttctcatccacagacaatgaaaatcgctcaaataagagtgacaacaccaacaccaccaaccctgttcgccttacccgcattaagcttcttaatccaacagatacccttgtgcttgtccaactttatagactaatct

SEQ ID NO: 39447 - DNA, 255 bp, Glycine max
  unsure (1)..(255): unsure at all n locations
aaaataaacttaaattcacaatgcatatgacccttcttcccttcaacttgnntacattggcatatctgcgttctatggtcctcccaaacctgacccccatatgattgctctcatccaccaccctgttcaaactggtgtcacttttctttacacttttcacgtctatggtcctcacaccaacgaactccttctataaaaacctcttaaggcacgcgtgagagatgacctttaattctctacaaaattttgaatcaa

SEQ ID NO: 39448 - DNA, 413 bp, Glycine max
acccacgcgtcacggactgctacaagaatacaaaaaaaggcttttaattatcagaccaaaaaacaacacaaacgttcccgctaaattttcaacctaccatttctttttcaattaattaaataatatttcttagaaataaaaataaaccatgaatcactcctatccaaatatttatcattttacaattctaactaacataatctccttctcttaatttctaacaccagtaccaacattttatcgaatttttaacaaaaaaaccacgtaacgtttccaatcactttcttacataacttcactctttacttcaatgctttggatattttatgcttacataaagactcgcgaaatacttctcatcaccattaacgcattttgtttttttataaaaacaatttaccttttcatctata

SEQ ID NO: 39449 - DNA, 378 bp, Glycine max
  unsure (1)..(378): unsure at all n locations
aatgcagttttttatgccaagtcatttgctgacaaaggtggggctaaactatatgttccatctggcaagtggctcactggaagttttaaccttaccagccacctcactctctttcttgaaagaggcgcaaccatcatcgcatcacaggattatgcacactggactgcaatggatcccctaccctcctatggtcgaggtattgatgttcctgttgggagataccgcagtttgatttatggacagaacttaagtgatgtggtgattacagggttctgtttggtgggacctaatcagtactcattccttaaattatagccgaccacatattatagaactngttggttctgataatatcataatctcaaatttgacattttt

SEQ ID NO: 39450 - DNA, 423 bp, Glycine max
ggcaagagtttgttgtgagctataagctagtttagcgtgaggagaatatgaagttgtttgttttctttgttgctgcagtagttttggtagcatggccatgccatggcgcaggctaccaaaggttccctctccgaatgaaaactggctatggtgagcgttcttcggaggtaaaatgcgcaagttttaggcttgctgtggaagcacacaacatccgagcctttaaaaccattcctgaagagtgcgttgaaccaacaaaggactacattaatggcgaacaatttagatcagactctaaaacagtttaccaacaagctttcttttatgctagtgaacgctaagttcattacaacgacctatttatattcggcatatataacaccgtactttttaatatcccatactttgtaaaacattgattttggg

SEQ ID NO: 39451 - DNA, 414 bp, Glycine max
  unsure (1)..(414): unsure at all n locations
gaaggtgccagaatttggtgggagctttaagcttggttatcgggaaggggatattgaagttgttggtttccttggtgctgcaatagtttttggtagcatggccatgccatggcgcangctaccaaaggttccctctccgaatgaaaactggctatggtgagcgttcttcggaggtaaaatgcgcaagttttaggcttgctgtggaagcacacaacatccgagcctttaaaaccattcctgaagagtgcgttgaaccaacaaaggactacattaatggcgaacaatttagatcagactctaaaacagttaaccaacaagctttcttttatgctagtgaacgcgaagtccatcacaacgacatatttatattcggcatagataacaccgtactctctaatatcccatactatgaaa

SEQ ID NO: 39452 - DNA, 382 bp, Glycine max
ggagtttgtctaaaggataagctgaaactgaaactgaaactgaaacatggaagaagaacggtgctagtgtgaggcctctgttctgtgccctcaacaacaataacaacaacactgccttgcagtacagaaccctcggcgactccgacctcaacatcagcgaaatcactcttggtactatgacctttggggagcaaaacactgagaaagaagctcacgacattcttaattatgcattcgaccgtggaattaacgctctcgacactgctgaggcctacccaattccaatgaagaaagagacacaaggaagcactgatctctatattggtagctggctcaagtctcaacctcgtgacaagattattttggctaccaaagtatgtgg

SEQ ID NO: 39453 - DNA, 404 bp, Glycine max
gtctcgcttaaattgaagacatttattattgtttatatgataagatttgaaatgatatgaaatccacttcttgaaatccaatccattacccactctattctatagattattgcttgagctgtgaaaatttgatttttgtgcagaacgtttacttgaagctgcatcaatcgaggagggattcttcttcatctttggattcgcttttgatgcctcggagtcagagctgggatgaaagctgaattttggggaaaatggcaactctagttgaacctcccaacagaattaagccaaagggcaagcattattatacaatatggcaaacattgtttgagattgatacgaagtatgttccaattaaacctataggccgaagaacgtatggcgtggtgtgctcttcgatcaac

SEQ ID NO: 39454 - DNA, 433 bp, Glycine max
caacggagcacaagtgagtctgatgatcgagataactagaatcagtgtgatgaacatgaacgtgcttgacttcttcgttgctacaattttggtagcatgtcaatgccatgcgtacgatatgttccctctgcgaatgaacactggctatggtgcccgtactccggacgtgaaatgcgcatgttggaggcttgctgtggaagcacacaacatctttggctttgagaccattcctgaagagtgcgttgaagcatcaaaggaatacatacatggcgaacaatatagatcagactctcaaacagttaaccaacatgcttacttttatgccagagacctcgaagtccatcccaaggacacatttgtgctcaatataaatagcaccgtactctgttatattccatactacaaaaacatggatattgggtggagaaattta

SEQ ID NO: 39455 - DNA, 432 bp, Glycine max
ccacgcgtccgagcaagaagacgacagacgggcagtggaaaaattacgccaatccattgagatatggtgtgctacaagtgaatattttcgacaagaaatgaatcctaattttaggatgaccgacccctttaatccagtccatataatgtccttttcgggagctagaggaaatgcgtctcaagtacaccaattagtgggtatgagaggattaatgtcggatccacaaggacaaatgattgatttacctattcaaagcaatttgcgcgaagggctttctttaacagaatatataatttcttgctacggagctcgtaaaggggttgtagatactgttgtacgaacatcagatgctggatatcttacacgcagacttgttgaagtggttcaacacattgtttgacgtcgaacggattgtggtaccattcaaggaat

SEQ ID NO: 39456 - DNA, 399 bp, Glycine max
  unsure (1)..(399): unsure at all n locations
gattgtagaactgaacaagggtttctctttctctttctctgtctgcttcttcactttctctcgtttcaatcgaaaaaaatcatgggcagaaaattcttcgtcggtggcaactggaaatgcaatgggaccactgaggaggtgaagaagattgttactactttaaatgaagctaaagtccctggagaagatgttgtagaagttgttgtgagccctccttttgtgttccttccttttgtaaaaagtttgctgcgccctgatttccatgtctcggcccaaaattgttgggttcgcaaaggtggtgcttatactggagaggttagtgctgaaatgcttgttaatttgggaattccttgggttattattggtcactctgaacggaagcagctnttgaatgaatca

SEQ ID NO: 39457 - DNA, 309 bp, Glycine max
caacaaagaaagaaaaaaagctttctccaagaaagcgttctatcacgccagggtccggggtatgcttcttcattgagattgggttggtgttcactgagaatgcatttcccgcgtgattaattatttcgagaaaaaatcattcggtttgcggccgctctaaacgatccaagcttacatacgcgtgcatagcgacgtgataagtgatttatagtgtcacctaacatcaattaacctgccgatcatttacagccctatgactgcgacaaccctgtcgtgacccaacttaatgctgttgcagaacatacccct

SEQ ID NO: 39458 - DNA, 341 bp, Glycine max
gactctgcagctcgcaacttgtaccacgaaaccatggacttgagaaaattccacgaagatgtgaagagcaagccataaacaagcacaaagatgcacacccaggtttttcttttgctcatgatttgaagcagtagcacgtaagaggaaggtgatgtgtgaattggtgaagtgggttgttcctcttcttccacttttgccatggacatgacaacaaaaacaacctcggaaaactagccagtaccaattaccgaacaaaacaccaatctgggtttggtttggtttcttttcacaagtggaaaccttttcatactaattcaatggtctgggccgtttgggtcttt

SEQ ID NO: 39459 - DNA, 390 bp, Glycine max
gagggaagtgcggtgtccactcatcatctatctttcctcggtcccgaccacacacaataacaatgtcaactctttgttctgcacttcctccatcatcatcatcatcaccctccatagcaaagttcatctccgaccaaccatgcctcaccatgctccaaacccaatgcaccaacatgaaagacctccaaaagatccatgcccacatcatcaaaaccggccttgctcaccacaccgttgctgctagccgcgtcctcactttctgcgcctcttcatctggtgacatcaactatgcctacttgctcttcaccaccattccaagcccaaacctttattgctggaacacaatcatcagaggcttctctcggagctcaacccctcatcttgcaatat

SEQ ID NO: 39460 - DNA, 415 bp, Glycine max
tttcagccttagttttaataggaaatatccaagggtatctggaaaaagcatcaataaaagatacataatacttgaaaccagaatgagagggtagcctatgagactttcccatgcaacaggaagcataaaagtctgaaaaaaatttattagatgaagaaatattacactggttgaagactagcttcattacttgactattgggatggcctaacctagcatgccaaagactaacagtgctaggaggagaaataacagaactggaagctacactagaatttttattaacagtaggagctgggattgaagtagagatggaggttgacaacaactgaggagagtgatcttgaagcctaatgttatgaaatgaatagaggccatcaacaccaacaacactttgaagaaggatcttattggt

SEQ ID NO: 39461 - DNA, 407 bp, Glycine max
ggaagtaagtacgaggtgagaagaggcgacgaggcgagaacattcccatgtagcgtggagaagcaaggccatcgatgggtctataatcaggcacgatgaaagcctcgcgttcctcgcgggccccagcagctctgctttgtccaattccattgaaggttccatacctgaccaacctccccacccaagacttagacttcttattattagtggtgggactttgatgtccggcgttcatcttctggcacaggtactccttcaccgcatgcaacccctgctccaccagctgcggcggcggcgaactcagagggttcccttccacgctaatcttctgcagcttcttcaggcatccgatggagtccggcagggccctgatcttgttgtagcttacgtcgagttccacgagggac

SEQ ID NO: 39462 - DNA, 395 bp, Glycine max
ggacctagtgtgtgattggatggtgttgtaactcgaccttcttcttttgttgtgctgtgcttgggtttggtttttctctcacctgaaaatgtcttgctgcggtggtaactgtacttgcggaagctcctgcaagtgcagcaacggctgcggtggctgcgcgatgtacccaaacttgagctacactgaatcaaccaccaccgcgaccttagtcatgggagtggcacctgttaaggctcaatttgagggtgctgaaatgggtgtgcccgctgcgaacgatagctgcaaatgtggaccaaactgatcctgcaacccctgcacttgcaagtgaagtgttgggagagcaaactctaatcagagatagcccttaatttggaataatgataaactattcatgt

SEQ ID NO: 39463 - DNA, 309 bp, Glycine max
gctcaaaaacagagtaccctacacctatcagatagagaaggttttctgtcgtgcgggtgcagaaaatagctcggagctccacatgaatgaaatgggtctctatcttgacactcttattactttcccactcgcccctcacaatattcgcaaaagatgggctagtggcaaacggagattttgaggctaccccaataaacggggtcccacactacgctattgtggagggccccatcacagtcccaaactggaagtcacactgcaacggtgagcttgaggaatcatggcaaaaacaggctgggatgatcctta

SEQ ID NO: 39464 - DNA, 393 bp, Glycine max
tgcattatgttagtttaatctatttatgtatttagtccataatggtgggtaatgtcacatgagtcaagtgcgagaatgctagaattaatgtctcatgtgagagacatgtgacttatatataaactaataaataaataaataaataaataaataaagactaaattgtaattggattaaatatgagaagtttctaaagataactgctacttaataggagtggtgattataaaggggttaatactcactaacgtgaaacaagtccccttcttgacagaaaggattctctctaatctatagtcatcacaaatgttgacaagaaagaatatttaagaaagcaaaatcttgtttctctcctcttccaaggaatcaaagtgtaccaaagagaagtctcac

SEQ ID NO: 39465 - DNA, 384 bp, Glycine max
  unsure (1)..(384): unsure at all n locations
gaaacagagtagagatagcaaagggataatgtgggtgacaaccatggctaacacatctcttcttcccaaaccatattattaccgtaatttccattatcaacatcaaagatgcttcaagatcaacctcccaaaatggacaactagagcttcctctgctgcccctggggtcgacctcaacactctcgaatctgccatttccaagaaagacagtgatgctgttaaagaggcacttaatcagcttagtgaagttggttgggccaagaaatggagttctcagccatatgtttcacgtcgtacggtcagtctccaattacaaatgtggcaaagtgacaactaaacattaagctctcatcaaccattcttggacatggcatncatcataca

SEQ ID NO: 39466 - DNA, 374 bp, Glycine max
acagaaccaatcttacaccagacattacttattttatctttgacacttcaacaatgtttaaaaccttcaaatacatcatactctttggtagagattccgctggttattcggcgaggcagtttgccaaacaaggcgttaaaccatggtagttggctatcatttctaaagaagcggtagcaccttatgaacaaccttctctcaacaatgcttacctttttccacagtcccctgctaaactttctcttttccatgtctgtctttcaaattgatgacaaaggtttcttcctcattcgtacacacagaaaaggatagtattaattcttatcacacaaatagttaatgtataccttcctgcaaaatctcttatcattgct

SEQ ID NO: 39467 - DNA, 253 bp, Glycine max
gagacctcaggtcaggcggggctacccgctgagtttaagcatatcaataagcggaaaaaaaaaaaaaaaaaaaaaaaagcggccggtgtacaggatacaagattacagactccggcctgcgacatgctacgtcttatatagtgtatcctgaaaccaaaatacaggccactggtcgacaacgtacaaactgggaaatgggtaaaccttgccaacttaaaagtttagcagcttataccacattcccctgttggcg

SEQ ID NO: 39468 - DNA, 303 bp, Glycine max
agaataatatgactatgtaaactactctgccatgggactcttgttctgaacgacttttcaagagaatcaaaccatggcagtcaaagtatacggtcctcactgtgcttccaccaagcggttgctgatttgtctggtttacaaagaagtctaatttgaagttgtccctgttgatgtcactaacggggagcagaacgatcctgagtacctcaaactacacccatttgcagttgatcctgtcatcaaatatcgagattataccttatatgaatctcgtgctataatgatgtattatgcattaaaata

SEQ ID NO: 39469 - DNA, 383 bp, Glycine max
gtacattgtctattccaaccatgttattcccatgtttagcttatctactggtttaactccaaataggaattaatcattatatgttctaaagttgatatatcattagtagggttgatgattcatatactctagtacgctattgatacagtagatctttgtatcattcttcacagtatttttgataacttgagaagcatgttattttttcaggctttgactccctacatgcagtctccagttgggaactcttcaaataaatccattgggaagctgatgggacctgctcttggtgatcacaatcaaggaaacttttccatcaatctctggagaaatgctttccaagatgcttttcaacgactctgtcctgttcgagcaagaaggca

SEQ ID NO: 39470 - DNA, 180 bp, Glycine max
tatagagaccgaaaggctcgctgggttccctccgacaattaatcaagcagagggtttccaaggggttactggcatttacttggtggtcaatcagaagcttcaagaagaagcactgcttgcaaaatgccttggtagaagaatttgttatcaatgtggaagaaaatttaatattgccttcat

SEQ ID NO: 39471 - DNA, 215 bp, Glycine max
tgaatgctcttgctactgttaatcgatcttcttcagggaataggtccaatccaaggataggtataatgccttgaagttctttgtaacgttctaaaattagctcaactttttaaacagcctcataatattacttaccaacaattcgaggtaagagcataattgacgtcgattctaaaggatctactaattgatagatacctattgccactaattct

SEQ ID NO: 39472 - DNA, 418 bp, Glycine max
ggttctagtgtgtgattgtttgttgttgtaactcgttcttcttcttttgttgatctgtgtttgtgtttgttctttctctcacctgaaaatgtcttgctgcggtggtaactgcggttgcggaagctcctgcaagtgcagcatcggctgcagaggctgcaagatgtacccagacttgagctacactgagtcaaccaccaccgagaccttggtcatggtagtggcacctgttaaagctcaatttgagggtgctgaaatgggtgtgcccactgagaacgatggctgcaaatgtggaccaaactgctcctgcaacccctgcacttgcaagtgacgtgtttggagagcaagcttcaagcacagatagcccttaattacgaataatgatgaactattaatgtgtagcttaaaacttatgcattat

SEQ ID NO: 39473 - DNA, 359 bp, Glycine max
agaaaatatttaactttctttgggtatcattccaaactgtcgccgtgagcttcaacgggctgcttattaacaaagatcaacaaattaaagatacgtcatggttctaaaattgcaacaacaaaaagttcctttctcttgaaatcacattttgaattcttctgctaaagtgacttaattttattcttatctaaaagctgtacttgaaataaaatatatttttgaaactcccaccggtcttggatccactctctagcactacacacttctcaaacatgacttacaaaaaaatctacttttaataatttgatcacgttcatttgatacatatctaatagaaattgcttcttattaaaatataa

SEQ ID NO: 39474 - DNA, 432 bp, Glycine max
  unsure (1)..(432): unsure at all n locations
ggttctagtgtgtgattgttgttgttgtaactcgggtctcttcctttggtggtccggggttggggttggtttttctctcaccctaaaatgtcttgctgcgggggtaactgtggttgccgaagctcctgccagttccgccaccggttccggggcttctagattttccccaacctgagcttcacttagtcaaccaccacccagaccttggtcattggagtggcacccgtttaagctcaatttgagggtgctctaatgggtgtgcccgctgagaaccatagctgcaaatgtggaccaaactgtttctgcgacccctgcactttcaaatgaggtgtttggagagcaaacttcaagcacagatagccctttattatgaataatgatgaactatttatgtgtngctcaaaacttatgtattatgtctgtgatgggttt

SEQ ID NO: 39475 - DNA, 382 bp, Glycine max
acgaagacgaccgaatgggggagagctctacaagtgtcgggctgctaggacaaccaacagatactgctgcaccataactggcgagagtccaggactctaaagcatcactagcttacgctctgaccatagttgaatgtggcacgcataatcccgtcgtgaatcacaaaggactacattgcaaggataaatactaccatgtgacctatcgcgaagtagtaccagaagataaggctgaaaaaaacataaatcgaagagtgaaacacaacataaagctgtcatctcccaagcagtactatgaggctcattactcttacctcgttcctgttgaataacaatcctgcgactaatatgcatctgtttgcctaatggaaacacaccacat

SEQ ID NO: 39476 - DNA, 392 bp, Glycine max
gagggaagaaaaacaatgtaacagagccttttagagctagtacatacaagttctcatttgcaagctcatattttcttttcaataaccctttctcttaaaattagaagcaaaaatggatagggtaagagagttggcatcaaagaaggcagcagttatattcaccaagagttcatgttacatgtgccacagcatcacgcaactgttctatgagcttggagcaagcccagcagtgcatgagctagacaaggatgcatatgggagggaaatggagtgggctttgaggagcatggggtgcaacccttcagtgccagcagtgttcattggtggaaaatttgtaggctcttcaaaagatgtcatatccctccatgttgatggctctctcaaacaaatgc

SEQ ID NO: 39477 - DNA, 291 bp, Glycine max
gaaaagacgacagaaaggggcacatgtgactttcatgatcgatataactcgaaacggtgtggtgaaaatgaaggtgcttgtaaactaccatgctacaattttggtagcatggcaatctcatgcgtacaatatgttatctattcaaatcaacactacctatcttatccttacttcgcaagtgaaatgctcaactaactatcttactgtcttaacacacaacatttttaacttttagaccattcctcactacaacaagcaagctacaatggaatacatccactttttacaata

SEQ ID NO: 39478 - DNA, 432 bp, Glycine max
tacctacattatggagcctaaatacaaggcccaaaaataatgaaatcctgatctaatatgtacaaagataaatgggttcatacttagcccatgggtccaaaatctatcctgaggctcatgagaaccctagggtcttctcttgccactatggcctaatcttcttggagtcttctatccaatgcccttaggggggtaggattgcatcattccctcccccttgaaagggatttgaccttaaatccagaggttcttgaaactcagggattctttcctcaacacctgtaaaaagaataaaaacatatgtattagtggtgttaggtatgttagagtaaggtaaggactgaaagcccttttccttgccatttcccatgagagaacatggttcttcaccaactcaatgagtggtgctacaagtatagaaaaatatgggat

SEQ ID NO: 39479 - DNA, 239 bp, Glycine max
ggcgaagagtgaagagaatggcttataatggtttaaccttgatggatgtgataatatgcgtctcaatactgtcactgagtccttcagatgcagtggaagggcaaaataatggccttgttatgaacttctacaaggaattatgccctcaggctgaagacatcatcacagaacaagtcaagcttctctacaagcgccacaagaacactgctttctgctggatcatgaacatctttcatgac

SEQ ID NO: 39480 - DNA, 206 bp, Glycine max
gaggaccccaagtgagtcagatgatcgagataacttcgagcagtgtggtgacaatgaaaggactaggaatgttcgtggctacaatgttggtaccatggcaataccatgcgtacgatatgcgtactatacgaatgatcactggctgtacagtccgtactgcggacgtgatatgcacgagaaatacgcttgctggaggatcactcaac

SEQ ID NO: 39481 - DNA, 279 bp, Glycine max
tcttttcttgatagcgggtcacatgtataggactaactggggtataggtcacagtataaaagacattttagaggcacataaaggtccatttacgggccagggtcataaaggtctatatgagatcctaacaacgtcatggcatgctcaattatctattaacctagctatgttaggttctttgaccattgttgtagctcaccatatgtattctatgcccccttatccatacctagctactgactatggtacacaactgtcattgtttacacatcatatgtg

SEQ ID NO: 39482 - DNA, 335 bp, Glycine max
  unsure (1)..(335): unsure at all n locations
tcggccaagccttccgaccggttgcaagaggccaacagagggggaatgaaatcttattggaactgtccagttcacccttgggaaccatatcacatccgggtttgatgaaatgggtgaatgaaacgtttttgtaggacatattatcttggataattcactatntctttattttccgatcgcctggaaagaacaagatgtttcttttgttctttcttcaacaatttctgatctctagtagacctctcagtaggattcgaactcagatgaagttctgaccatctgtcagagaaaaaagaacgagtagctctgtatcaatggaatctcatcatccatac

SEQ ID NO: 39483 - DNA, 329 bp, Glycine max
  unsure (1)..(329): unsure at all n locations
aggaccacaaagacgacagactggcggnccgggtggatccgcgagctctccttccgctccgagaaaaaagaaaacagaaacaacgcgaccgctttggaggtctactcgtccacaagatcttcgtgtacaacttatcctatcttaaggtgccccaaaaaatagtgacgagtgccaaccctaaaggcctttggcgacctttcacatgtttccgccacgatggtgttggcgtgccccacattgcacattgggcaccttgcggttgagcactacgcttccaagaggaccaagttcatcatggctcatgattcccgaatcgcgtgttttgcact

SEQ ID NO: 39484 - DNA, 295 bp, Glycine max
gggaccttgggggggtggatgcttggtgtgttggatatcatagtgaagcggatgctcctagacgccggcttgctcaaccgctaatcttttggagaactgagagtgactgcccgactggaaatggctatgcacgtccagctggacgaatccatatactcgtagacatgcagaatatggcaattcttgagcttgaacacctgcaactaactccccttccacctgctgatccattgataaattatacttgtggtgaaactaggggaggagttgatcgaagcgatgtgaaaccattaca

SEQ ID NO: 39485 - DNA, 381 bp, Glycine max
  unsure (1)..(381): unsure at all n locations
tcggccacgcgttcggccacgcgttcggccaagccttcctaccggttgcaaaaaaacaccaaaagggaaggaggtcaacctacatatattctttggatgggttaagaaaactttcccaagcatttgcaccggttaatgcttgttattggggaacatatattttgaataaaccttaatgccaaggaaaatttgattaagaaaggaaagtttgtggtgttacatctgaaagggaaacttgcaaatggaaaaaagttgtttgtgatccatcatatttgcctggcaaggtgaagaaagttggtagggttgcaagggcgatagccatcatgagccacccaatccccagcactgatgattcccattcagtgcanattattttaccac

SEQ ID NO: 39486 - DNA, 426 bp, Glycine max
ggaattcccgggtcggcccaacccttccgaccggttgcaagaggacgacagaggggggagaaccaaggttctattttttctgcatccaattcatcacactttcaatttccgttacctttttttgatttggttttttttttttttttgcatttgttttcgttgaccaccgattcattggggttacattaggtaatcactgcaggggtactatcagcgatcagcgatgttgtgtctcagaaacttaccgggatacagaaaattcaactcaaacgacttcttttcaaagtgatttttggagccgcttatcttggaccctttggacacttttttcatttaatactggataaaattttcaaaggaaagagagattcaaaaactgtggctaagaaggttctgattgaacagttaacatccaatccttggaac

SEQ ID NO: 39487 - DNA, 407 bp, Glycine max
  unsure (1)..(407): unsure at all n locations
ggacttattacaaataaattacattctcctctctagaagaatggaatggaaacccatagaagaattttgagtttgaaggacagttctggcaggagtgttgaacttacattgcaagagatggtgaatgctagattttttttccttttttttttgtttcccacatgtttccttctttgaaggcaagacaattacactaacagtatgtttggatagagaattttaactgaggaaagtaatttatcaaagaatttaaatttctgtaatctagaattcattgtttggatgttttttttttgaataatttaaaattttttgaattttaaaacagaattttaaacaactaanaatctagaatttcaatttctttctaaaatgtgagaaaatgaagttctcttcttacagttttt

SEQ ID NO: 39488 - DNA, 271 bp, Glycine max
gaaaagacgatagtgacttatgtacatattcacaatggatcattaacgcaacttacataaggaatggtgagggaatagatactacccatggctctaccggatgctcagacataacagaactaactggaaattctgtaagtgaattaattagtatgcccagaaagataactggtgcacattatgttcaactggtaaccatattgcatgatgtatttgacgctgacttcaatgctggcggagctcagatcataatcgatagcgcatatatatg

SEQ ID NO: 39489 - DNA, 423 bp, Glycine max
atggggttatgtttcaaatgatgatcggcccagggaattcttcttgagtcttctaaagtgtttgcaacccggggaatatagtgatatgtccgagagaagggagagcgacgaagaactgaagatgaaggtgcgagaatgcttgaataaaagcggaaagtacttggtggtggtggacgatgtttgggaaacccaagtgtgggatgagattaaaagcgcttttccagatgccaacaacggaagcagaatattgataacaagtcgttcgacaaaggtggcttcttatgctggaacaaccccttcctactcgcttcccttccttaacaaacaaaaaagttgggagctacttttcaagaagttgtttagggacgaagaaagtgtcccccagaattagtggaactgggaaaatccatagccgaaagatgt

SEQ ID NO: 39490 - DNA, 468 bp, Glycine max
cggaacgaccgcatcgtccgaaccgttcgtcgaatacgacagaacgacattatggggctcaaatgaatttggtgatcgagagtgcttggaacagtttgatgaaaaggaaagtactagctctcttcgttgcttcaattttggtagcatgtcaatgccatgcctacgatatgttccctctacgaatgaacactggctatggtgcccgtactcacgacgtgaaatgcgcaagtcggatgcttgctgtggaagcacactacatctttggctttgagaccattcctgaagaatgccttgaatcaacaaaggaatacatccatggcaaacaatatagatcagactacaaaacagttaaccaactaacttacttttatgccacaaaccttgagatccataccaaggacacatttttgctcagtatacatggcaccgtactctctaatatatcatactacctaaaacatggatatg

SEQ ID NO: 39491 - DNA, 433 bp, Glycine max
ggttctagtgtatgtgattgttgtgactggttcttcgtcgtcgttatcttcttcttttgttgtttgtgtgtttgttttttctctcacctgaaaatgtcttgctgcggtggtaactgtggttgcggaagcgcctgcaagtgcggcaacggctgcggaggctgcaagatgtacccagacttgagctacaccgagtcaaccaccaccgagaccttggtcatgggagtggcaccagttaaggctcaattcgagagtgctgaaatgggtgttcccgctgagaacgatggctgcaaatgtggagctaactgcacctgcaacccctgcacttgcaagtgaggtgttggagagctaaagcttcaagcagaaatggcccttagaaataatgataaaaactatatgtagtttcaaaacttcaaaattatgtagtatgtattat

SEQ ID NO: 39492 - DNA, 331 bp, Glycine max
taaggtgtaagagtttgttgtgagcgataaggtagtttatcgtgaggagaatgtgaagttgttagttttctttgttgctgcagtagttatggtagcatggccatgccatggcgcatgctaccaaaggttccctctccgaatgaaaactggctatagtgagcgttcttcggaggtaaaatgctcacgttttaggcttgctgtggaagcacacatcatccgaacctttaaaaccattcctgaatagtgcgtttaaccaacaaaggactacattaatgtcgaacaatttagatcagactctaaaacatttaaccaacaagcttttctattatgc

SEQ ID NO: 39493 - DNA, 397 bp, Glycine max
acgcgacaacactacatcaggttaccgatgccagaacacgacagcaggtggagtgatcatcattcacgatcagcgagaatgtctcccaagggttggatctttttacctgtgttatgcttctcatcactgtcacttagtctttgccttccttaggataatggacttgctatgaacttctacaaggaatcatgccctcaggctgcagacatcatcaatgaacaagtcaagcttctctacaagcgccacaagaacactgctttctactggctcatacacatcttccatgactgtgctgctcaaagtcgtgatgcttcactgatgctagactccacacgaaagagcttcactgagaaagaaacacatagaatcttctggttgacaaatatcacgttcattg

SEQ ID NO: 39494 - DNA, 275 bp, Glycine max
catgcatagtgtgtcagacatatgagatcttttaatgtgcccgttctattgctcgggggaggtggctatacaataagaaatgtggcacgttgttggtgttacgagactagcgttgctcttgggattgaactagatgataagatgcctcaacatgagtattacgaatattttggtcctgactatactcttcatgttgctccaagtaacatggaaaacatgaactcccgacatttattggatgaaataagagcaaaacttcttgataatttatctag

SEQ ID NO: 39495 - DNA, 413 bp, Glycine max
catggaagtcgtcacgggagatgtggtgtttgtgggccagttttcatcaacaagctgcatgaggatattgtgcttcgtggactgtaggatcagatctctggtactgcttgatcacatatatgttggacataagtctgctggctaatgtatcatatacatgccaagatcgattggaaaaattatgtgccactggtatggctatgacacttctaatgatgtatcctatttgatgcaccaacatattgcaaagtgagaggtcatacaactacttttgatgggccaaatgatgacatctgacacaaattgctaggtactaaatgtccagaaagttgctaatgctgaggagacttacctggtcatcatgatcaatcacgtttaaagcgacaatctgatcatcaaagtaaacatgagtg

SEQ ID NO: 39496 - DNA, 422 bp, Glycine max
acagaacagtttctagggccaacgaatatgcataaatacaacgagaaatgcgaatactgattccagtgagtataccgtaatatagcataatatccatcctggatatttacattatatctatatatctatctatatatagatagatatatagatagatatatacatatattgctaatatatatctaacggacttatttaaaattctttaatataatgtttactaaacaaatattccatttgaactaatcctctgaatctccaccatcgactaaaaattagctatcatgattactagataagccgctatcgtgaaattactacacacgctgctcttaggaagcagtgcatgagcatcttgggtcgagacctagtagcggcatgacatcttatcttctaaaaaataagtcctataatgaacctca

SEQ ID NO: 39497 - DNA, 280 bp, Glycine max
ctttgactcaccggcgagtccatctatcgccagcggcgacggcgctccggccaccggtccggccaccgcctatggttccctcactttctcgtccttcttcttctcagaaatatgccttctcagaaagttgaaacaggtcatcaagacaccgaccatgatgttgcaatggattactatggtaagaggctggccacggcttcatcatatcacacaattaagatcattggggtcaataatactgtctattaccatcttgcaacatttactgctcaccaaggac

SEQ ID NO: 39498 - DNA, 208 bp, Glycine max
ccactcctacaaccacacatacggaccctgctaaactaccactcttctgcatccacagtgacacaccagtatactggttccaaccgggcgggacgaaagaaacgactagctgatcctagatcactaactaaaactactttaatactaattcaatatactaatagaatagagataacactgtcattatatatagatatcccttcaacac

SEQ ID NO: 39499 - DNA, 405 bp, Glycine max
gacaacacatcacatcacagcacacttacacacgactaagggtgctcagttacgcattgctacgcgatggacaaaatggaactggctgagacacctatacctttgctttcactaaaccacgtttcttttgcatgtaagagtgtgagcgagtcagtgaaattctattaggatgtccttggatataagctcatcaagatgtcatcttctttcaaatttgaaagggcctagttattcaattatgtcatatgcattcacctgttagagtcagaaaaggtttctgagaaaaataagagagatcaacccaaatgataatcatatatcgaattcaatgcttagacatgaaagttatgatgcataaacttgatgcaatgaacattgagtatgtgacagcagttgctgaataaa

SEQ ID NO: 39500 - DNA, 205 bp, Glycine max
aatccctaattccaggcaggagtcacgccacccttccgttccgataccacaacacaacattaaggttaatgtgtaacagtttgttgttagctgtaagctagcatatcgtgaggagaatatgaaattgactctttactttgctgctgcagttataatactagcattgccatgccatatctcaagctaccaaatgttccctctccaa

SEQ ID NO: 39501 - DNA, 214 bp, Glycine max
aaatggcaatcagcaaggaccacctttcatggctaagtactcttggataaccgggggtgaattattaccgtcagggaaaggttaaaacaacccctatctgttagtgaaatataacatgaaacctttagctcccaatcaatgtgaggagtctcaaaactattaccgcgtgccctttgaataaataacctacgactcataggcaatggcttggtta

SEQ ID NO: 39502 - DNA, 334 bp, Glycine max
ggctgcttttgcttttcactccttggacaacacaacggcagtccttccccctgaggtttgtatctgacaaaccgctgctgacactttcatgaaaaccataggatcccgagagataacaggtgccaatgatgtcaaaaatgatcgaggagtgacacgccctgattggcgatttccacttaaagtttgacgtatttacaacttcatggctgttcgtagagtttgacagatcttcaaggagatgccggactatttctgactcaactgtgtcatacccagggaaaaagcaagtccttggaagattaaaaagagcagccaaacttcttttttaaggaac

SEQ ID NO: 39503 - DNA, 365 bp, Glycine max
ggatgcaatcaagaatacaatggcgtggcatagagtgagaagttatataataataatgtcaatctacatacttattgaactaatatttataaatagacagtgattagtgcctgttttcaactatctagattaaatgattacacccgctactgatgacgttataatgattaatgaaaactcgtctaatcacactgtctttcttgcggttgatgctgctaaaagagcctttttccataacaaaagcaaagattggtcttcagctcctggctctgttcgagctcgctatctattagccattcattccaagataacagataaaaaagatgaactattaaagcttgaaacaatttattgttgaaaatcac

SEQ ID NO: 39504 - DNA, 428 bp, Glycine max
gcccgcagttaaaattaggcctgcttgcccaggactgggtcgtgtgcctactccatatcgatcaaagttgaatcgtgatcctattaatggagcacattcaatgaaacaccaactagcaccatagagaagcggacataaactgtataatcttgaccaattcaaaagatcatttaaggcagttgaaataactgaattatcgggtgttagatcaactatgggaaactaaatggaattcataatcgtctccatatttttagatagcggtctaatctaaatgccttaatatgccaggaattcagaccattctaatgccctatattgccatgcataaactgcactaacatgtaggataagcacgcatgttaaagctgttataaacacggtgaccgctaattcatccaaactcattgcccaagaattattaaaat

SEQ ID NO: 39505 - DNA, 347 bp, Glycine max
tctcgcattggatatatagatggtgcaggggatctcttgcatactgggcatgttgagattcttaggattgctggggatcatgtagatcttctttttgttggaatacacactgatcagacagtgaatgcatctagaggatcggatcgttctatcatgaatcttcattaaggaagtataaatgttttaacatgattctatactggattatgtaataaatggggccgaatggtatcatttctcaagatttgcttactacatttaacatgtcattaattgttcatggaaccattgctcttagaaatgattgtctcaaagtaaaatgcaatccatgtgctgatactattagc

SEQ ID NO: 39506 - DNA, 320 bp, Glycine max
cgaccctctaaaatctaaagttaacacccgctcatctcgttcattacgcgacaaaggcattcactccaattctctcataccttaacaatatacaattgtttaactcataacttccctcgcatgttacttttcacacccttctctcctcggtatacaccctctatatgataaatattacaactctgaagtgatcaagtgcacggatggatcaaaatacttctccagagaccgtctcaatgacaatttctatgattgtcctgatgacacttatgagcctcaaacttcagcttgccccaacggaaaattttattgcaaaaacc

SEQ ID NO: 39507 - DNA, 364 bp, Glycine max
gagcgcaacgggatacacgcattgaattcaaactctaagtacattccgtgtgttgcgctttcttactaaaaaccacacatgtagaacacatgcggaatctgacactgctctcacaagactatctgcaccaagggacacatctatggtgttattgtagacactgagaagagacacatcgacactgttgacatggatgttccaacctctgcacattatgaaaagcgcaagtgtggctctaactgctcttgcacagactgcacctgtggccattaaagaatatgtgagaaaatgaaattgccatgtgtttggctatacatatatccaaattgtgttctcttcgtgtgaataaatgtgtgctctgata

SEQ ID NO: 39508 - DNA, 433 bp, Glycine max
gatatccatgagttacaagaagctgcctgtccacttgaagcctggaaacaccatattgtgctctgatgggacgattactctcactgtcttatcttgtgatcctgatgctggtactgttagatgtcgttgtgaaaacactgctacgttgggtgagagaaaaaatgttaaccttcctggtgttgttgttgatctccccacacttactgagaaggataaggaagatattcttcaatggggtgtacccaacaagattgacatgattgctctttcatttgttcgcaaaggctcagatcttgttaatgtccgcaaggttctggggccacatgcaaagactattcagttgatgtctaacgtatttttttgttgaacttccttaataactagaggttttattattcatgccggttctcagttgctctggcaatggctgtgt

SEQ ID NO: 39509 - DNA, 429 bp, Glycine max
ggttctagtgtatgtgattgttgtggctcgttcttcttcgtcgttatcttcttcttttgttgtttgtgtgtttgttttttctctcacctgaaaatgtcttgctgcggtggtaactgtggttgcggaagcgcctgcaagtgctgcaacggctgcggaggctgcaagatgtacccagacttgagctacaccgagtcaaccaccaccgagaccttggtcatgggagtggcaccagttaaggctcaattcgagagtgctgaaatgggtgttcccgctgagaacgatggctgcaaatgtggagctaactgcacctgcaacccctgcacttgcaagttaggtgttgtagagctaaagcttcaagcagaaatggcccttagaaataatgattaaaactatatgtatgttcaaaacttcaaaattatgtagtatgta

SEQ ID NO: 39510 - DNA, 439 bp, Glycine max
  unsure (1)..(439): unsure at all n locations
gtgttctttgatgaactctatgcatgttttgtagggattggattttgtaattgcagaagcaggaaaaaatggggtacgactgatactaagtctagtaaataactggaatgattatggtggaaagagtcagtatgttcaatgggcaagagaacgtggtcaatatgtaaacaacgacgatgacttcttctcacaccccattgttaaggaatactacaaaaatcacgtcaaggtaaaaattaattatatgagttgagaatatttaattataactattagattaaaattaattatttacattacgtatttaattataaaatttacatgttttttccttaaagattacatgagatctgtaattaaatacgtaatatcaattgttaattaatataataattgtgattgaatgtttntatttacataataaccaaaaactctgaac

SEQ ID NO: 39511 - DNA, 424 bp, Glycine max
ggagctgcaggcattcgatccactaaaatgctgcacgcacacgaggactgtacacgaaccattatgactcctgtcgacatcgtctcgtcccttagcttcgatcacatcatatgactctctgtgctttgaacacaatccagcattcaaaggggatcgatacatgacatttgatagcatatagtgcgacggaaaaaacgacgctaacggaatccgagcggcttaagagaggtggggagtggactttcagatgacaaatatgctgtggtgaacttaaactcggactggatttaaagctgtgagtccagatctggtcagacgaaaagttggcctacatagtgcataatccctacatttgtttgatggtcttgaatcggacagtgctgaatgacatatcaatgcttcaggtaactggcttaatgcaaat

SEQ ID NO: 39512 - DNA, 400 bp, Glycine max
cacctccgatagggattataattggcatgtcttgtgttggagcaatggacggtgttgtattcgatcacactggtcaattggttaaatgtaatggcatctcattcgctataggtgactatggatattactttgcacgacattccgtgttcccaaatatttaccagtctatggctgacaggacacaatttaccacaacactactaatatgtaatggcttgtgtgtcaagatatatgcaggcactgcaataatgggatatctacatgtttggtgatggcactctgacatagataacattgtatatgccaccagactcatttgcttccaaagctgcattgaggacaacaactattaacccgccgtctaaatctgctcagttgatgaacaaactgtcatctagtt

SEQ ID NO: 39513 - DNA, 400 bp, Glycine max
acaatatgaaaaagaggaaaaagattctaacgaaatataactaatgttctttagaataatcaaaaagaatattatactcaaataaattttagatagaaaaaagacttaaaatggaggatctgaaatgcgagatctaaaaacatatctttacgttgcaccagtagtacgtactctatggttcggggctatggcgggtctcttgatagagatcaatcgttattttccagatgcatcagatataccctttattttcattctagttattgacacagaaaggggtcaagactattatagatccagtttagtatttactctatcgagttaatatgtcatgaatcttctgatctttattttgtcagatatctcttcttggttttacaattctaatagcatctgtttt

SEQ ID NO: 39514 - DNA, 315 bp, Glycine max
gttatggtttataggtttcatgaggatgagcatggggaggttgttgctgagactaagaggcctgatttggagccttacattggattgcattatcccgctactgatattcctcaggcttctaggtttttgtttaagcagaatatggttaggatgattgtggattgtcatgcttctgctgctagggtggtgcatgatgaggctcttgtgcaatctctgtgtttggttgggtccacgctcagggcgccttacggttgccatgctcagtatatggctaacatgggctctactgcgtcgttggtgatggctgttattatc

SEQ ID NO: 39515 - DNA, 434 bp, Glycine max
ccacgcgtccgaattcgaccggccgctttaccttttgtcattcttttctactttttcatgggcatcacctcaactgtcggatgagtaaaattcttacatgaactctgcatgctttcaaaaaataataccatggtatgcaatcaatcagtcctatgtaattaatgtccaaacaaacctacgggggaggaatattaccaatgaagaaattggaaaatagctaaaccttccacaccaagaaaattccacttaatagacaatgataataatatccacataactttgtttctcgcatttgcatatcatcttatgttttccaaacaacatcatccaagcttgttgaaagtttcttgcacaacttatggaactccaatgtatctccttttgccttccgtacctctaccatgtgaagagaaagtgccacttgaaatatctct

SEQ ID NO: 39516 - DNA, 328 bp, Glycine max
tggggttctagtgtgtgattgtttggggatgtaactcgttcttcttctgatgctgttctgtgtttgaactagttctttctctcaccctaaaatgtcttactgcagtggtaactgtggttgcataagctcctgcaagtgctcaaacactctgacagatgctgcactatgtacccacacttgatctacactgattcaaccaccaccgataccttgctcatggtagtgtcacctgttaatgctcaatttgacggtactgaaatgagtgttctctataagaactatcgctacaaatgtggaccaaactgctcctgcaacttttgcactttca

SEQ ID NO: 39517 - DNA, 412 bp, Glycine max
aattcaagcggccgctctatggggtgtgttagatcatttacctttgcaaagggacggggaagggatttattacatgatcgaaaacagaaaatgttgagaactattcaaaactcataagaattaccggaaggggccattgaacagcttgaaaaagtgccaagcccggttaatgaaagtcgaaaccgaatcagttcggtttcaggtgaatggctattctgagatccaactacataaatttaatttaattaattcaatttataccactttggatcaatgtgaaaattacctaaacgaagccattcatttttaacaataataactgattaatcaagatcggcaacaggttttacaacatgccttacagggagctttaggaactctttggagttgctggaacaacgagttacattta

SEQ ID NO: 39518 - DNA, 448 bp, Glycine max
gaaagacgtaacaatgggtggatgtaagggacctatcaccacatttattgtggaacccttcatgccgcaccaggaaaaatgctatttcaatattggcttaaaaagacttgggtgcgcaattaacttcttcgaagtgtggaggaatggaaatcgaagagaatggggataaggttaaaaccatatttatccccacacgagtgtccctcacttcagaaacatgcgccgagctggtggcaacccttcctttggagatcaaaggagaaatcgcggcgtttatcaaggcaggtgataccctattccaagatctggactttactttcttggaaatgaatccttttgcgcttgttgatgggaaaccctatcctttggatatgacgggtgaactagatgatactgctgctgtcaagaacttcaagaagtggggaagtattgaatttccaatgccatt

SEQ ID NO: 39519 - DNA, 400 bp, Glycine max
  unsure (1)..(400): unsure at all n locations
ccggaccggaattcccgggtcggcccacgcgtccaaaaagaggtaacaatgggtggatgtaagggacctatcaccacatttattgtgaancccttcggtccgttcaaaaaagaggactatctcaatattgtctcacaaagacttctgtgcagtattaacttctccgagtgtggacgaattgaaatcgaagagaattgggataatgttaaaaccatatttatccccacacgagtgtccctcacttcagaaacatgctccgagctggtggcaacccttcctttgtagatcaaaagagaaatccacgagtttatcaaggcaatttataccctattccaagatctcgactgtactttcttggaaatgaatccttttgcgcttgttgatgaaaaaccctatcctt

SEQ ID NO: 39520 - DNA, 324 bp, Glycine max
aattcccgggtcgacccactcgttcgcccacgcgtccggaagactacagatggggatggtgcaagagtttgttgttagctgtgggctattttatcgtgaggagaatatgacgttgtttgttttctttgatgctgcagtttttttgatagcttgggcatgccatggttcatgctatcaaaggtatccctcttttcatgaaaactggctatttcgagcatgcttaggaggataaatgctcaagtcttatgcttgctctgtaatcacacaatcatcccatcctttaaaaccattccttaagagtgcgttgaaccaacaaaggactac

SEQ ID NO: 39521 - DNA, 449 bp, Glycine max
aactgaacagccttttgggtctgccgaaaacccattcttgttttttaaatccgacttaatagagttaagagagttcataaaaaaaaaaaaaacaacaattaaaaaaatggagaacgaagtattttcgaatatttttacgtttaagaaaaaaggtttttagaaaaattaatattgcaaaagaaaaatgggtcatcaaacccattttatttataaaaaaaagaataagagaattctggcaaagaaacccaattctattattgcaattgaaagaaatatacaagttgactgaagctaaaaaagaaaacaattcaataataagtaatggaatgatccaaagctcgtctgggtctatagattcgataattttgtcattgagagaacgaaagatgaaagagttgactgatagaataaacaccatgctaaaaataattgaaaaaatgaaaaaagac

SEQ ID NO: 39522 - DNA, 324 bp, Glycine max
  unsure (1)..(324): unsure at all n locations
gngatggcgattgacagaggctatatttctcctcagtttgtcacaaaccctgaaaagttaattgctgaattggagaatgcacgcgtgttgattacagatcagaaaatttcagctataaaggatataatccctatattggaaaaaaccacacaattgagagctcctttgcttatcattgcagaggatgttactggtgaggctttggctactcttgtcgtaaacaagttgcggngtattctaaatgttgctgccattaaagctccaagctttggggaaaggaggaaggccatgctacaagacattgccattttgacaggtgctgag

SEQ ID NO: 39523 - DNA, 364 bp, Glycine max
ataaaatagtggtgtcaactttacacactaaactcatcacccgaatctcttcaacaatgtccaattccttccctctctaccaaaaattggccatcaaaaaacccatacaaagatctgttgaacttctcattttgattctcgccatttcccttcttctttaccgtctcctttacctccaatcccatgccctcctttcgcttctcgccttcttctccgaactctgtttcaccttcgactggtttctctaccttcttttaaattggaatcccgtcgactacaaaacataccctcaacacttcaaacaagttcatgaggttcctgcggtggacgtgttggtgacgactgcggattggaagcttgagcc

SEQ ID NO: 39524 - DNA, 278 bp, Glycine max
gggataatttatagaaaaaggaagaaatatagcggtaatgcgattctacggggacgtactaaatagcatagaaaatagaaattgtttcttccacattacaagaataacgagtaatttactgttacacgaacactaaataaaaatccttttgttgcaaaacattcattaagaataatacataaacgtaacacatattcggactaagatataaccataacttggtccaaaacttctaccattatacctacacataatcgcccataccatgtctatccaca

SEQ ID NO: 39525 - DNA, 408 bp, Glycine max
caatcctgcagttctcgtttctccctccgagcatcatcactcatgggaaagagcattctggggactggtggagctggatacatcggcagccacaccgttcttcaacttcttctcggagggtacaacgccgttatcgtcgataacttggataactcctctgagatcgctattcgcacagtcagagatctcgctggagatttagggaagaatctcacatttcacaagcttgatttgagggataaaccggctcttgagaaggtttttgcttcgacgaaattcgatgctgtcatccactttgctggacttaaagcagttggcgagagtgtccaaacaccactgctctactacgacaacaacttaattgggacaattgttctgtttgaagacatggcttcccatggatgcaaa

SEQ ID NO: 39526 - DNA, 451 bp, Glycine max
aacttgcacactgttctggatgtcgcatcgattggcttcaaagagacggaattcttcttcgtggagctagatagattgcttagacctggtggttatttcgcttattcatctcctgaagcttatgcacaggatgaggaggatctgagaatttggagagaaatgagtgaccttgtgggtcgtatgtgttggcgaattgctgccaagagaaaccagactgttatttggcaaaaacccctaacaaatgattgttatctgcaaagagaacctggtacccgccctccactttgccgatctgatgatgatcccgatgctgtttggggtgtgcagatggaagcttgtatctctccttactctgaccgtgatcataaagccaaaggcagtggattagctccttggccagctcggttgacttcacctcctccacgacttcaagattttggctattcaaatg

SEQ ID NO: 39527 - DNA, 347 bp, Glycine max
cggacgcgtgggtgctccgaaacccttttcgattaattcgcggcaggaacgtacgaactttgactatttcgtggaatcatgggcaggtctccaccgccgttttcagatattggcaaaaaggccagagacctcttaaccaaagactacaactttgatcacaagtttaccctgttgctgccgaactccgatggaatgggactaactgcaaccggtttgaagcgggatcaaatttttattggtgatatcaagaccctgtacaagagtgggaagacaaccggcgatgtgaaaattgatacggattcaaacgtttctacaaaaatgaccgtgactgatattttaccaactac

SEQ ID NO: 39528 - DNA, 442 bp, Glycine max
cctatcgtaaatcaactgcaggagttgctgaagagctgtatacatggaggacaagaccagcggatgatatgaggaggtaggtagcagatagtatactattaacctgcacaaacgcctccatggctgcacgtgtaataagaaggctctcaatgccattaatgagatcacgaagtttgctgagaacgccatgagcacaaatgatgcgagagttgatgtgaaactgaacaagcatatatggagcatgggaatcatgagtgtgcccagaagaatcaaagtacgcattgctggcctgagagacgctgatgaagatgccaaggaagagttgtactctgtcgtgacagttgcagaaatcccagcttaaggactgaacggacttgggactaaagtcattgtggaagaggatagatttgtcatctgttctcgagaagaggtggtacgatga

SEQ ID NO: 39529 - DNA, 417 bp, Glycine max
ggcaccgcttgggcagacttaacatcagcacagagcgggttactgtctgttcaagctaccatctgtctctctctttcttagtgcctccttgccagatgttaaaacggcccaagaaactttcctattcacatctgaatcagtgaacgaggggcaccctgacaagctctgtgaccagatctccgatgctgagctcgacgcatgcttggagcaggaccctgacagcaaggttgcctgtgaaacctgtaccaagaccaacatggtgatggttttctgagagatcacaaccgaagccgacgtggactatgagaagattgtgcgcgacacatgcaagaacattggctatgactctgatgatgatggtcatgatgctgacaactgcgaggtcactggcaacattgagcatcagagacctgatat

SEQ ID NO: 39530 - DNA, 217 bp, Glycine max
gcttcaacctatgtggttgaggcatgcacggggggcaatattgcagggatggatggtcgattccctacaaaagaacgtatggacaggaacgctgtgatgacttacaacgtctacatttacaaggcctaatctcatgcccttgaaaagcatactgcttgcaactgaaaaggccctgctgtttctaacctaacaaacaccaatgcatttatcttgaaag

SEQ ID NO: 39531 - DNA, 482 bp, Glycine max
  unsure (1)..(482): unsure at all n locations
ccggaccggaattcccgggtcggccgacgcgtacggactcttgtaacatcacctttgctggtgttgttagggattgctggtaaaaatagcaaggctcgatttcaagctacagttggaaccactaaatatcctanagagattccacctttgccttggtaccgtgggacgattccacagatggcaatggcaggatttctgcctttcagtgccatatatattgagttatactacatatttgccagtgtgtggggccacaagatttacaccatatacagcatcttgtttattgtgttcatcattctccttatagttacggcattcattactgtggcattaacatacttccaacttgctgccgaggaccatgaatggtggtggagatcttttctttgtggtggttcaactggcttatttatctacgcttactgtttgtactactactacgctcgctcagatatgtctgggtttatgcaaacatcatt

SEQ ID NO: 39532 - DNA, 369 bp, Glycine max
taattctaaagaattttcattttaaagttctctaattattactagccatgccgatccgtaggattgcaattggaaggcccgaagaggctactcatccagatgctttgaaggctggattggctgagtttatctccaccttgatttttgtttttgctggccaaggttccggcatagcctttaataagctcaccaatgacggcgctgccactccagctggtctcatctccgcctccatcgcccatgcctttgctcttttcgttgccgtctccgttggcgctaacatctccggtggccatgttaaccccgctgttacctttggtgccttcgttggcgggaacatcacccttctacggggtatcatctactgga

SEQ ID NO: 39533 - DNA, 450 bp, Glycine max
  unsure (1)..(450): unsure at all n locations
ccatttttctcaccatcgattcttagcggtgaaaatggtgaagtgtttctctctcatcgtcgttctctctctcctcgcagcatcggcgatcggcagcgaggtcatttccggagaatcggatggagatttcataatccgtcaggttgtggatgacggaggagtcaacgaaggaagtaacggcgacgatctcctactcggagccgaccatcacttttcggtctttaagcaaaagtttgggaagtcgtatgcttccaaggaggagcatgatcaccgattcagggtattcaaagccaatctgaagcgagctcaacgccaccaggctcttgatccctctgctactcatggcgtcactcagttctctgatttgactccttcggagttccgaagatcgtttctagggcttanaagtcgtcgtcttggactccctgcagatgctaataaggcccctat

SEQ ID NO: 39534 - DNA, 299 bp, Glycine max
cggacgcgtgggcttcttgttcattcttcatttctctcttcccctctttacgcgttcttctggtctgtttcataatcgagctatcacaacttttatcttgataaatcccaccggcattgccatttacttctcccattccttcaaaatggcaaatcccatttcccccattgctctctttatcctacttctagccccctctgccctacccggccatgattactgacaagctctcaccaagagccttctcttcttcgaagctcacagatccggctacctcccccacaaccagcgcgtcaatt

SEQ ID NO: 39535 - DNA, 448 bp, Glycine max
acggaaatccattgaagttttaatttggaaggatggtgagagttagtgttttgaacgatgctcttgagagcatgtacaatgcagagaagaggggaaaacgacaggtcatgatcaggccgtcttctaaagtcatcatcaagtttcttctggttatgcagaagcacggttatattggtgaatttgagtttgtcgatgatcatagatctggaaaaattgttgttgaactcaacggcaggctgaacaaatgtggggttattagtcctcgttttgatgtgggtgttaaggaaattgaaggttggactgctaggttgctcccttccacacagtttggattcattgtgctgacaacatctgctggaattatggatcacgaagaagcaagaaggaagaatgttggaggcaaagttcttggtttcttctactgaacatggttttgagcatccattat

SEQ ID NO: 39536 - DNA, 288 bp, Glycine max
ctagtggaatttcacgaggggtcctttggaacacatgccaatggacatgccatggcctggaagattatgagggcagggtattactggctcaccatggaaaacaattgttgtatccatgtgagaaagtgccataagtgccaggcattcaccgacaatgtcaatgctctgcccgtgcctttgaacattttggcagcaccttgtccattctctatgtggggaatagatgtgattggggttattgagcccaaagcttcgaatgggcattgctttattttggtcggcattgac

SEQ ID NO: 39537 - DNA, 369 bp, Glycine max
ggcttctggtcaagttcagtccagtgcccgcacggcatcgcaaatttttctttttcttctcccctttagatgagtaacgccacagactccgccggcaaaatcccaccggagacgaggcccgccgagagcgacagtggtggtgatagtgggccccggcccacgatcaagatcaatgttatgcacggatcctctcaacacgagttccacctcccggcccaatcaacttttggggatgttaagaaactccttgtcaataaaactggtttagagcctgtagagcaacgacttctcttcagagggatagaaaagggtgataacctacatttgcacctttgaagtgtaaaggataagtcaaagcttttgcttttg

SEQ ID NO: 39538 - DNA, 388 bp, Glycine max
ttttaagggggagcaagagtgaagggcgaagggaatggctcccaagggtttaatccttttggctgtgttatgcttctcagcactgttactgagtctttgtcttgctgaggataatggactcgttatgaacttctacaaggaatcatgccctctggctgaagacatcatcaaagaacaagtcaagcttctttacaagcgccacaagaacactgctttctcctggctcataaacatcttccatgactgtgctgttcagagttgtgatgcttcactgttgctggactccacaagaaggagcttgtctgagaaggaaacagatagaatcttttggttgaaaaatttcatgtacatttataccatcaaagaagcttttgaaagggaatgccca

SEQ ID NO: 39539 - DNA, 337 bp, Glycine max
tcgccaaaacactacaacaggtggcacaagagactttatggatcgagatcactagagccagtgtgaggaaaatgaaggaccttatactttttttttctacaactataataccacagaaatgccatgcgtacaaaatactacctattcgaatgaacactatctatggaccccggactccggaggtgaaatacgcaagatggatgcttgctgtagaagaacacaacatgtttcgctttgaaaccattcccgaaaagtgcgttgaagcaacagacgactacatgcatgaccaacaatatagatcagactccaaaacagtttaccaacatgcttactttta

SEQ ID NO: 39540 - DNA, 415 bp, Glycine max
gacattacaccgaaatttgaatgctcataaatctcctcactccttgcgactagaacagaaatcaaacaaacgaaggagagaaagcttaaactcgtgagttcgtgcactgcttcttcttcttcttctttgcgagcgtcttcgaagaaacaacacgaaaatgtcggtgctgatcgtgacaagcttaggggaccttgtcgttgatttgcacaccaacaaatgccccttgacctgcaaaaatttcttgaagctttgcaagattaagtactataacgggtgtctatttcacactgttcaaaaggattttactgcccaaactggcgatccaactggcacgggaactggtggtgattctgtttacaagtttctttatggtgatcaagctcggtttttcagtgatgaaattcatattgatctg

SEQ ID NO: 39541 - DNA, 436 bp, Glycine max
  unsure (1)..(436): unsure at all n locations
gaggaaacaaggcatnggnnaatatctctagcaagggcgagngaatnagaaacaacatcaagatgtcgtctctgatagcagaagatgtgaagagcagatcagaggtgtaccacggggacgaaatgtgccaagtgaagtccaaggagcttctcaaggaaatcgccctccccaacggccttcttcccctcaaggacatggaggagtgcggctacgacagacaaaccggcttcgtctggctcaaacaaaagaagagttacacccacaagttcgacaagatcggaaagcttgtctcctacgcgcccgaggtaactgctcatgtccaacaaggtaaaattaccaaactcaccggggttaagaccaaagaactcttgctctggaatggaggcaactgctgactgtgaactctcttctcttcactaccttgaagggannagac

SEQ ID NO: 39542 - DNA, 446 bp, Glycine max
gatctcacgtaatacattttctcatatatatctcacatggctattctttacacattaaattccatatggcaaacctaaagacacaccttgtccttaatatgaaggatgttgtgatagttaaaccctccaagcccacaccatctgaacttctttctttgtccaccattgacagtgatccagttctcaacattctgtgtcaaaccatttacgtctacaaagcaaatcttgattccccaaatgatcaactagaccctgtaaatgtgataaaagaagctctctcaaaggccttggtttactattatccacttgctgggaagatagtaacatttgatgatggaaaacttggaatcaactgcaatgctgatggagttccattcttggaggcaactgctgactgtgaactctcttctcttcactaccttgaagggattgatgttccaactgca

SEQ ID NO: 39543 - DNA, 421 bp, Glycine max
tgtgtgatctgattggatcaagctcaacctaactggggggtgcatttactatctgcgatttaaatatgtcaacatctgataagccaaaagtggtggaaaggggtagcagggatgaaaaacacaaggaagatgatcaagaggaggggaagggtggattcattgagaaggtgaaggatttcattcatgacattggtgagaagattgaggaagctattgggtttgggaagccaactgctgacgttactgcgattcacattccatcgattaatcttcacaaggcagatcttgttgttgatgtgctcatcaagaacccgaatccggtgccaatccctctgattgacatagattactttgttgacagtgatgaaaggaagctagtttctggattgataccagatgcgggtaccattcgtgcacatgg

SEQ ID NO: 39544 - DNA, 299 bp, Glycine max
  unsure (1)..(299): unsure at all n locations
ggttctagtgtgtgattgttcgtcgatgtaactcggtcgtcttctttggacgttctgcgtttgtgtttgttatatctctcacctgaaaatgtctagctgcggtggtaactgcggatgctgcagctcctgcacatgcggtaacgtgtgctgatgctgcaacatgtacccagacttgacctacactgagtcaaccactaccgagaccttggtcatgggagtggcacctcgtaatgctcaatntgagggtgctgaaatgggtgtgctcgctgataacgatggctgcaaatgtggaccaaact

SEQ ID NO: 39545 - DNA, 446 bp, Glycine max
  unsure (1)..(446): unsure at all n locations
ggttctaaggtgtgtgattggtttgttggttgtaacctcgtgtcgtgtcttcttttgttggntcttgtggtttggtgtttgtttntttcttctcaacctgannaaatgtcttnngctgcggtggtaacctggtggttgcggaaagctcctgcaaagtgcggcaaccggctgcggaggctgcaagatgtacccagacttgagctacactgagtcaaccaccaccgagaccttggtcatgggagtggcacctgttaaggctcaatttgagggtgctgaaatgggtgtgcccgctgagaacgatggctgcaaatgtggaccaaactgctcctgcagcccctgcacttgcaagtgaggtgttgggagagcaagcttcaagcagagatagcccttaattaggaataatgataaactattaatgtgtagctaaaaacttatgtattatgtct

SEQ ID NO: 39546 - DNA, 410 bp, Glycine max
atctcatgcatctaaatttgtcatactctcagatcaggggtgacattccctccacaatctctcacttgtccaaattacggtcacttcatctcggtgactaccagagcatgatgagagttgatccatacacatggacaaaactcattcaaaacgcaactaatttaagagagctttctttagatggcttggacatgtcttctatcggagagagctctttgtcattgctaaccaatctgtcttcctctctcatctctcttactctctcattcaccgaattgcaagggaatctatcgagtgacatcctctctttacccaatcttcaacaactagatttgagttttaataaagacctgggaggtgaacttccaaagtccaactggagtactccactaacctactttgatctcgct

SEQ ID NO: 39547 - DNA, 409 bp, Glycine max
ggtgtgagttcattaacatatacaaggtctctgtgttgtgttgagtgcttgtgttaattgtgttggtgttgtaggaaatttaagtgaagagagaatgatgatgaagtctgctatgtgtgcattggtgcttgtggcactggttgtggatgaagaggggcccatggctgaggctgaggggactcgcaacccaacacagttgactgcttgtgttccggcaattaattcaagttctgcaccttcgagtgcttgttgacagaagctgaaggagcaaaagccatgcttgtgtggctacctcaaaaaccctagcttgaagcagtatgttaactatcctaatgccaaaaaaaaccgtagttcttgtggtattgactatccaacttgttaagcacctcttatatatatatataaaatg

SEQ ID NO: 39548 - DNA, 438 bp, Glycine max
  unsure (1)..(438): unsure at all n locations
gggggcgnncaggcgtncgaccactcctccggaagattacagattggcaaggggctgattcnagacgaagataggaaagcgcaagagagattgncacaacaagtctcttcatctgaatcatcagaagcctcacaacaacagtatataactattaggcaacaagtgcaagaaaatccaatgaagaagcctaagttggttattctttctagaagtggttcaagagctataactaatgagaatttgcttgtgaagatggcaaaggaaattgggtttttggtgcaagttttgaagcccgacagaacaacagaaatggcaaagatttatatgactctcaatgcaagtgatgtcatgattggtgttcatggagcggctatgacacattttctgttcctgagacctggttctgagtttattcaagtggttccttcttgtaccaca

SEQ ID NO: 39549 - DNA, 242 bp, Glycine max
gattcaacatttcacacaactactacaagtactgccttacgatcaataccaacagcaactattccaagttatcaaaagcactaccatgatcagggtcgcaaggttgactagtatttctacgttgagaagcaaaccgactaatactgcaaccctgttcatgctgctagtgtcacctatttaaccaccataacttcttctttttgtttacagcgattacatttataatcaacattataccacca

SEQ ID NO: 39550 - DNA, 256 bp, Glycine max
gtttcttgtttttgctcatctcaataactatggccacgtgtatttatatgaagggccttgacttattcattgctacaattttctttacatgtcaattccatccgttcgatatcttccctttccgaatgatcactgactttggagtcctttctcccgagttgaaatgcgcatgtttgatgctatctattgaaacacacaacatttttgtcttttagaccatttctgaagagagcgtttaaatctacaaatgaataca

SEQ ID NO: 39551 - DNA, 446 bp, Glycine max
  unsure (1)..(446): unsure at all n locations
cgcgtccgcccaggcgtncgtacacctccgaaaggacctcagattggggcccttcattgaattcatggtattaggggctagcgtaatggagctgagaataaattttgcaatcactgccacgggacataaaagaatcgcccaaaaacgcctacatctacacatgagcattacgcccttatctttcttagagagagctgcttctggccaccccaccataaactccctaattcacggatcttcgtcttacacgtggcaacatacttaccaccgttgtcgtcgattcacctccgctctttctaataattccattggtcttggaaaacactgtagcatttattgtacccaacattacagctacttatgaagcttacttttggataccaattgtaggggctgtgttaaacccttgttattttaaggttaattgcattcacggttgctttttt

SEQ ID NO: 39552 - DNA, 415 bp, Glycine max
gggaaaaacaaaggaagtctaaagcaaattccaaatatgtgactgactgcaaagtatatggaattaaattcttaggccaactagcttgactaattttgtgaactttcaaatgattgactgtttttgagacttgattgagttcagagtgttaaaatcaccataatatgttgattttgtaattcagacacaccgtgtaagggctacaatacaaaacatagaagagggaaatcagaaactctgcgtgttcaatacataaatacaaaggaactgagggtaacaattggcacatggaatgttgctggaagagctccaagtaaggatcttgacattgaggactggctttgtaccaatgagccagcagatatttacattattggtttccaagaggttgtccccctgagtgctggaaatgttc

SEQ ID NO: 39553 - DNA, 355 bp, Glycine max
ggataaagtttctttttcaataaaaaatcactgtggatgggttatgtgtcaatgggcttttcttatctcattaagaaaaaaaccattttagattcaaatcttaacgaataattcataaatgaatagttaacggctgcgaattgtctcgatatttttttttttttcaatagaaaaaaaaggggtattctcatatacttcatatatttatatatctatatctatttggcggcatggccgagtggtaaggcgggggactgcaaatcctttttccccagttcaaatccgggtgtcgcctaagcaataatacatttgaaatgaaatatttgtttacgtttttttataaaaacttttttcc

SEQ ID NO: 39554 - DNA, 400 bp, Glycine max
  unsure (1)..(400): unsure at all n locations
cggagacnacaaaaggttaaattaacaatttaatacatacatggcaaacacgctanttcgtacttttaaacaggtaaccggcacactaacttttatgccataaacctctaagtccatcccaaggacacatttgggttcaatataaatggcaccgnactctctaatattccatactacaaaaaacatcgatattgggtggagaaatttaactcgaccttgtatgatgaatgtgttaacaatggcaattcacctgcactgcccgaaacttttaataattacaacaagctcgtttctattggctttaatataatattttttttttgaagaacacttgacaaacatgccgttacataaacaaacttaaataatgtttgtttccacacattgaaaaaataatttt

SEQ ID NO: 39555 - DNA, 364 bp, Glycine max
cgattttcttaacaatcaatcaacacgggcaattgcaatattcacatactcaattaagccataaatttctctaagcttatccttgctttccttcttgcctcgcttcttctccttaatcttgatgatgctgatcaatcagcacatgtacaaactcaagggtctcttatgaagaagataaattgtaatggaacatctgctactaagtgcctgttatcatctcgaacacgtctgtgcaaaaaagcctgtggaacttgatgtaaacgctgcaactgcttaccaactgtcactgctggaaaccaaaaaaagactccctcctatgcttatttgactactcatggaggcaaacacaaaagcccttaaactt

SEQ ID NO: 39556 - DNA, 338 bp, Glycine max
agtcatggaaacgttcccaacgggggggtactccaccgtaaagagcctcaagttagggcgcgccacgctagaatgcgccgagtgccttaacgagttcgaggaggtcgaaacgctgtgtatcattccaaattgcagccacgtgttccactccaagtgcatcgacgcgtggatcgccaatcactccacttgtaccgtgtgtcgcgccaatctttttcccaaacctgatgaccacgattttgatcctatccaaattccggatccagaacaacccgttatatcatcaccgactcgagccgaaactgggggctctaattctcggtctacgaatttgattgatc

SEQ ID NO: 39557 - DNA, 354 bp, Glycine max
  unsure (1)..(354): unsure at all n locations
tgctatattgttttcagagattgagtantanaaggctatttgtgcaatttttcctacactantgctcatatcaaagtatgtagtgtattttgcatttgttcaccaatctctataccttaggaatcataaaagctaatgtcagaatcactaattttttggcctctacttggtctcctgatcttgctatgtattatgtacagaggaaatttatcaattatttataaaatagggcgttattttgacataaaaaaaaataaatataaaaaatattttgcggccgctctataggatccaagcttacttacgcttgcattctacttcataactcttctatagttgcacctaaattcaatt

SEQ ID NO: 39558 - DNA, 439 bp, Glycine max
aacagacgacagaacgggtcttacaagacgttatgaaaatcgtgtggaactcatttttcgggattttgtgaaattcaattacacgggtttccatacaccattttaatgtcttcccattcgtacaaaggcacctgcttctacacgcgatgccctcccttatcgttccacattggggcttatcactcgacccgttgcatcctccgatgaaatccaattgcacatctatccctgtatcaacttccacgactaaatcaccagacttcgtggtcaaattaaaaaattgaaaaatgttgcttaacagatacgctcataaatcatgtttcaaacaaattatcttgaacacgcgcaaatggttatgatacaagctcaagctctggtcaagaataacttaagaagattgaacactagcatctttaaaaatgcttccaacaatattgtt

SEQ ID NO: 39559 - DNA, 348 bp, Glycine max
ggcccgaaaaaccgggtcgaaccaacccgtccgaccggttgcaaaaaaacaacaaagggggattttgcgttagaactttaaacacccaaaggtgattctgtcttcgaagggcttcaccggattgcaaccatatctgggggaaaggtgagagagccaaaggaggaaaacgcgactctgtgcccacatgttatagatggtgaacacgtttttggagtcgctcgcatatatggctcaccaaatgacaccttcattcatgtgactgatatgtctgagagggaaacacttgtcctcctcactagcgggatgaagagttaagctgccagatatgaataatcatcatattctgct

SEQ ID NO: 39560 - DNA, 271 bp, Glycine max
cgaatgtgcaaaacttcgtaatgagctgtaaactgggttattgtaaagcgaatatgacgtcctacgaacactatgacgctgcatcacatgcggtaccatggccatgccatcgcgcacgctaccaactgttccctttccgaatgaaaactacctctggttagcattcttgcctggtaaaatgcgcaaggtctatgcttgctagacaagcacacatcatcactgccctttacaaccattcctgacgagtgcgttgaaccaacacaagactaca

SEQ ID NO: 39561 - DNA, 390 bp, Glycine max
  unsure (1)..(390): unsure at all n locations
gcctttcctgatttcttggatgatttgtcctataggataatttgtgaaacaaccaagcccgcttatcttgtttcataagatgatgttacacgngcncgnaancagnngaaatttttactttttcttctcttattttgaacatgcccagnggctgtttatattgtncgtcagctttttttttaccgncgaagaattctaaccgcngaatttttttctataattgatgctttttattccacnacaatttttctttttgcgaaccgatttatctttgacaaggatgtttttattgcttccacgttttctattcattgnnngcctttttacaactttttcctactctttacccactggaaccgctattaatttattatatttttttttgcctca

SEQ ID NO: 39562 - DNA, 351 bp, Glycine max
acgaacgacagagaagactggctccaggctaacgctattcgttatcttttgggagactggggggcgtacatacgaggagtactgcatatactaacttattatattaactcaagggatggctggactcgcacctgttgtatcacaaggcgatgctcgagcatatgaatatagaacgagagacttacttttatatgatggacatgactggcacacatgctatgactagggtaatgatagctattacactatctgtctgcacgataatcttagcaagtgaatggacacatatgattgttagaagccatttttcattcagtaaacggggatacttccctcttgcaagggacttga

SEQ ID NO: 39563 - DNA, 411 bp, Glycine max
ggtttaaatgttttcgctaatcgagataacttgggacagtgggaagaaaataaaggtccttgtcttcttctacgctacaattttggtaacatgacaatgccatgcgtacgatatgtttcctctacaaatgaacactggctattatgcccgtactccgaaggtctaatgcgcatgttgtaggcttgctgtggaaacacacaacatctttggctttgagaccattcctgattagtgcgttgaagcaactaaggactacatccatgacgaacaatatagatcagactccaaaacaattaaccaacaagcttacttttatgccagagacctgaaagtccatactaaagacacatttgtgttcaacatagatgacacacgactctttaatattccatactacaaaacacatctata

SEQ ID NO: 39564 - DNA, 338 bp, Glycine max
aaaaaaacaacatatgggtttttcatatagaatacaacatagggttacagtggaaatattacaaccgctcgggacttctaaaatctaaatatcatcaaagtacacaaattagaacggattgcatgattgcattctataatgatatcatcatctatacagtaatctctacaacacgcaagtcactaaacttaaactactatgcaaaaacatgccctaatgtctactatattgtggccaaggcatgaaaagatgccactgataggaacaaaacttttccagtagcaattctgcgaatgcacttccattaatgattacaaacctggtgctatacctctctg

SEQ ID NO: 39565 - DNA, 309 bp, Glycine max
gtcgggagaaaactaacgacggaacgttttcattatagatggaaatcgattggtatatgggggtgttttcggatgtatacctccaatcaagcctaccgacatccaataacctttatcagacatagaaggactcaaagttgttcaaaaggaaaattgagggctaggccaataggtacaacacaattgggctaatgattttttcgctgtgaatgagatttagatgcaatttgttgagtctatgcgcaagcatatcacacatgaacttgaactacattaacaaccacaacgcccttatgaagatgtaagtta

SEQ ID NO: 39566 - DNA, 303 bp, Glycine max
cgttcgcttattttgggaacaaattacagaccagggctttgattcaaggctccagaccttctttgacatggtggacaaaaatgccgacggaagaatcaccctagaggaagttcaagagattatggccttaagcgcttccgctgataagctgtctaattagataacaactacttaaacttttgcggcggatctagaggatccaatgttacgctcgcgtgcttgcgacgaactagatcttctatattgccaactaaatacaatttactggccggcgttctacaacgacttgactgagaaaacctt

SEQ ID NO: 39567 - DNA, 362 bp, Glycine max
tcgctgagctgcagcacttcagggcctgggtgttcttcaagctcaatctcacttcacttatcgccagggtttaatctgaatatctctcgcgcagtcactgagggagttatatttcttccaaaatggcgacgcttatgcttaaaatcaaagatatctaagatgctatggctaacacccaaaaaaacaactctactgctcatcatctgggcttgctgaactctaaactagccaagattgcgggggtactccttacaccttcataaaaaggagctggtggtgctggtgaaagctttgatcttactacatgtggagattcaagaagtggacttgggggcttcccttcagttggcaaatctactcta

SEQ ID NO: 39568 - DNA, 490 bp, Glycine max
ggatatgtgcagaatcccagcacactggcggcctttactagtggatctcttccgtcgcgacctcggcggggaagtcggggcctatcatgaagtggcgcgccgccttgccctgttcccggatggcgacgcctccgacttgctctacctcgagacacaccgcaggaagcgggggaagtaaacttcggttcgcgcagcacggaattgaaggggctcgccaccagcgtgcccctatcctatccgccttccatgcacttccaacgcccttcccgaacgatttccgattgctagttcgcccccgccgcgccataagcgcgcccatgatactgcccatcatcgtcaccttgaagaacggattgctcgatccgcatggcaaggccattcacaacgcgctcggaggacttgttttcgatggcgattaggatatccgcgccgtcaggatcttagagctggacgttgatgattcaaccagcgacgcctgcatcgacgagat

SEQ ID NO: 39569 - DNA, 487 bp, Glycine max
  unsure (1)..(487): unsure at all n locations
ggaccacccacgcgtgcggccacgctgtccgcgcgagagttaccacattttggatgatcacccganacccaaacagaaaaggcgagagaaaaattcttaaatcataatttaattgattccatgatcttattgatctattccacatcataatgctctacatacattataataacttatctactcgagccgtacccatataaaacttcttatacctttctagacggcgggtgcattaattatctatctctatccccaagaacctattatcgaatccctgcaatccacgttagatctccaacacagacaatagatccttcgaaagtgcttctttatgatccaataaagatatcaacctatttaaatattccagttatactatatttactacaacgacgcgctcatcctacaggaacagctcaggacattacataaaaggcttgtgttttatggaacttatcctttatcaacacactaaattccttttatt

SEQ ID NO: 39570 - DNA, 487 bp, Glycine max
  unsure (1)..(487): unsure at all n locations
gagacgacagaaggggactccttgtgtagcattctgatgccaattgttctaaaaaatttgctgaccctggcgacctcaactatccatccttctcggttgttttcggaagcaacaaggttgttcgatacacgcgcacgttgaccaacgtgggggaaccgggatccgcgtatgacgtggcggtgagcgcgccatccaccgtggacataacggtgaatccaaataagcttgagtttggagaagtaggggaaaggcaaacgtacacggtgacatttgtgtcgaataggagtgttaatgattccgctacgtctggttttggtagcattatgtggagcaatgaacaacaccaagttaggagcccggttgcatttacatggacctatttttgaggtaatgctagagtgaaatgaaaaagaaaagctgcatgactntagtctctagtcacattgccgttgccatcagtcgagattgtaaaagcaacattgacagt

SEQ ID NO: 39571 - DNA, 466 bp, Glycine max
gaacccggttagtacattgggtccagcaatagctgcaaacaactacaagggcatatgggtctatctcatagctcccatacttggaactctatgtggggcaggtgcctacactgtggtcaagctgcctgaagaagaggcaacaaagacaccttcttctgctcctaatgggagcttcagaaggtgatgatatatatatgattaatcattttcatgcatccccagcaattcttcatcacatgatgcaccttagaaaaacatacctcgatcagaatcagccatatgggatatgagatatttgtgcatgcatgatgatatagatattgccggaagaagcaagcaaaattgagcacttgttggtgcatgcacgtacgtatactagctatattagatatcgatctgtgtacttcagatgcatcgatgtgtactggtaaatatcccaggacgacaaaatgatcagtgattttgt

SEQ ID NO: 39572 - DNA, 248 bp, Glycine max
ccacgcgtccgcccacgcgttcgtactgtttctttatgacacataagggcagaacaagtgtggcagggggtttattaactaagatctgtggccagagagatggttagattgatagaaacagccactgttacaatatttgctgaagatgtcgatggccacgtaaatgtttggaatgcacaggtttcagaattaacaggtctgcaaattaatgtggctattgggaatgttttgattcactatcatgactt

SEQ ID NO: 39573 - DNA, 456 bp, Glycine max
attctagtttctcataagatgacatttgatagaaattgttagaacttgcctatcatagaaccagtctagtaaaatgattacctctggtctttcatttaacctatcatcttcattcttcacagttaagaaggatctttattaacacaaatgactttttatttgaatttcagattcctataaatgctgctggtttgattgagtataggtgccaccccttttggtcgcaaaagtattgtccatctcatgagtatgataatacagctcgctgctgtagttgtgaaagattggaggtattaatttaagcactccagactatttaatgattcgtattttcagaacaggtatttatctgaatcttttttgctactggtgtgtttcgcttgaagcctctgaacataaaatactatagactataagatggacggagtttgtgtttagagtgcatggaatctgcta

SEQ ID NO: 39574 - DNA, 265 bp, Glycine max
cgctcgagttggccgccagtgtgacggatatgtgcagactgccagcacactgccggccgttgctagtggatttttgacgtgcgtgctcatcgacagcgtcttggcgggcggccccagcgcgccggcgacggaccgcggacggccgtacttggcctggcactcgtccacaatctgccgcacgagcttgtctctcttcatgctgatctcgcgggccaaacgctcggcgccgtcatcagcctggctgctccggatggcgtagaaggtg

SEQ ID NO: 39575 - DNA, 354 bp, Glycine max
tgtgggaatagttttcgaaaagtaattagcttctctctctgacttggtcacaagacaacagaggaacactcccaaacaaaccatggacgtgggtcagacgcagagacagtgtatcgactacaccaaatccatatatcttgagggcttgctggatggccagtgtaatgctactccagcagcttcaggatgagaacaaccctgactgtgtggtacaagttcactatctcttctttgacgattctgaaaggcttctgaaagagctcacctgagccctagatcagaatggcgacgtattcaaaaaagcagatgcacatgtgcaccacttaaagggccgcaattcaagcatacgttcac

SEQ ID NO: 39576 - DNA, 390 bp, Glycine max
tacgggttttcattatatcacaccacacaaaaaagcagaggagagggtacaactgttactcacacacgccatgggtaaatgaatggttttcgagcaacagcatttaaaatagaaaagggattcatcgaagatgacatcggttggtgtggcaccaactattggtttgagagaagccattgtgcatggaacagacactgctgatagattgctagaggagatgaacgatctgaaaattagtgatgatcgagaaatggagtccgcaatcttttgtggctactgaacggacacaggacatatcattgtgactactattgggggttgaaatggtcagctcaagctgactataaactgcattgcacatcgtgttgtaatgcatggatcatttggagt

SEQ ID NO: 39577 - DNA, 410 bp, Glycine max
gggtcgcacccacgcgtccgcccacgcgtccgcttacgcgttcgcactgttgctttatgacgacagaagggaataactgtgaatggagcagaacagttgggaaatattcaagtacctaaaagagccagttatatccgagtaataatgttggagttaagtcgtatagcttctcacctactatggctaggaccttatatggcagatattgatgcacaaaccctcttattatatattttcagagaaagagaattaatatatgatctatttgaagctgctacaggtatgagaatgatgcataatttttttcgtatcggcggggtagcgactgatctaccttatggttgggtagataaatgctatgatttctgcgattatttcttaacaagaattgttgaatatcaaaaacttat

SEQ ID NO: 39578 - DNA, 254 bp, Glycine max
ccagaaaatgtctggttgtggccctaaccgggtttgctgaagcccctgcatgagcggaaacttctgtctaggctgaaaaattaccccacacttgccctacactgattcaccccccaccgatccctgggacaggggaggggccccagttaaggctcaatctgagggggccaaaaggggtgtccccgctgaaacacaatggctacaaatgtggaccaaactgctcctgcaacccctgcacttcaaagtgaggtttt

SEQ ID NO: 39579 - DNA, 453 bp, Glycine max
atgtttgtcatgtattgcttgtctgtgttgttcgaatggtgcgttctgcggttgatagtgcaagacaagaggatactcctgggatagtgaaccttgtgttgcggtgctgtgtaaatgcattgctgacagcagttgattttcttaacaagtttaccataaactttgctgcaataactggtgaagcctactgctcttctgcaaggatgacatatgaacttctaagacgcaatcttctctctgctgtttttgtggagaccatctcatctcgcatcctggctggaattgtctttgttttttctgcatcatacacaatagtggcctgtgttatcttaaaagctggtaccaatcttgggtctgactcatattttgtggctgcgatggcatgggtgctactgatggtagtgctgggttacctcgtgcatgtgctagacaacgtaattgacacaatttacg

SEQ ID NO: 39580 - DNA, 355 bp, Glycine max
cacactaccacacattgctgttctagtttgtgactgtttgatgccgaaactcgcccttgggcttttgttgccctgtgtttgcgtttgtttcttctctcacctgacaatgtcttgctgcggtggtaactgtggttgcggaagctcctgcaagtgcggcaacggctgcgtaggctgcatgatgtacccagacttgatctacactgagtcaaccaccaccgataccttggtcatgggagtggcacctgttaaggctcaatttgagggtgctgcaatggctgtgcccgctgagaacgatggctgcaaatgttgaccaaactgctcctgcaacccctgcacttgcaagtgaggtgttgga

SEQ ID NO: 39581 - DNA, 293 bp, Glycine max
agaagtggatatacatagatgctcgaaggaaatcttgggtgctcttactgagaatttcgatgacgccgcttccgctggagatcaggtaactcagagtctaggatcagctatggcgcagcttgatcgaagcttcaagcgattcaagaaaaccgtgtatcactcgagtggcctattgcccagctcaaacggtagcatgaccgcaattccgtcgcttgcggtagcaactccttttgcaactcaacagcttattgatctgatgaattttttgaatttatagaaattagttagatgac

SEQ ID NO: 39582 - DNA, 180 bp, Glycine max
tgtcttgcaaatcgttcgtctgactcgggtgtgggggctgaaagactaatctaacgcgtctagtatctggttacctccgaagcttccctcaagatatctggagcccgtgggcgaattgtatagcatactgcctatgatcactaggcatatacggcccctcgacatggacctattatgaaa

SEQ ID NO: 39583 - DNA, 105 bp, Glycine max
  unsure (1)..(105): unsure at all n locations
cgtattaagcgaccaaatgcttcngggagttgagggaaatttatatccggggatgcccgatataagtcaacctttcgaactgctgctgaatccacgggcaggctt

SEQ ID NO: 39584 - DNA, 428 bp, Glycine max
ccaacccgtccgaccggatgacagaagcctacaaatgggtatctctctaatcctaacaactgtgtatacggggtgcattcattaatgctttcgattgttaaaaaactttgcatgaaggataacgcaaacgctagcatcaagctgttgagagctgcgtatgtggaccatcaccggatcgcatccaataatcagctgtaaattcctcttgcggtaaaagaagatccaggacacgctttatcacggcctgcacatacattctttttaggtaaccacaatattctgttaccacaataatctggatcctctatctatcagggctttctacgatgatctgacgagtcaaggagagaatcaacccaaatcgtggaggagtgataacagaggaatcgctgcggtgattcttgatgccctcacgaggcgacaatggg

SEQ ID NO: 39585 - DNA, 260 bp, Glycine max
gaaaacccggcccggaccaacccgtccgaccgcttgcaaaaaacttacaaaagggaatatatattactcatcaacatacgatctactgaggatatacaaccatgcacaatattgaataccatagtctctaccaacaactactatggcccaaaaaaaaggaaaaacatgaacaaaacaaagcggccgctctagaagatccaagcttacaaacgcttgcatgcgacatcataactcttctatagtgacacctaaatacaata

SEQ ID NO: 39586 - DNA, 144 bp, Glycine max
gtttcttacttggactgagagcaagaaaatcgggttggttacgccgcatccaccagcatctgataaaaggtcactgatgacatgtgactgctggccatcatggtgttgctgttgctgaggtggttcacggacgctcacgtcaaa

SEQ ID NO: 39587 - DNA, 255 bp, Glycine max
ggggggtttttacagcttactgaacatatcaaacagcggaccatttaggatgaacttgcgccgatataattaagatagcaaagcgaaactagaggggcatgctgaaacataacaaatccaggggccgtgagccacaatgagattctcgagatgtacacggattacatagatccaagctacaagtgtactaactacaatcttgaagagcaagccaaggcaataattgctccacgcatcaacaatgagatggattca

SEQ ID NO: 39588 - DNA, 412 bp, Glycine max
tttctgacggcgaaagagcgtattagaggctgagttgccaacactcctcaattctcggtaatcatatgacaactaagacccattttattttgcataaatcatatttctgcatttcaaaatttagtcatataaacaatgaaatgataaaatccaaagaataagccatctgcggacgcttgggcaaaaaagcttaagagctcttcttttttggatcaacattctaatacctcttttgattgatcatcctgattgaccactgcgatgccaatcttgttgatcacgtcggattatcagttttcaggatactcctgcaagttacaaggcctaaaacagtaatgttggggaacatacctgcgacaaccacatattgaaatattcatcattatcatgaagctacaagaatacctggttt

SEQ ID NO: 39589 - DNA, 169 bp, Glycine max
ccttaagatggggttactacaacctgatcaacgccgcagcaaggcggcagctcttctaaaacgtcgaggagtaaatgttaaaggcttgttgaaagctgctccagagcgggaagaaccccaaccccacatagattgcacaggacatctgcaggtttggcatgtgaatgga

SEQ ID NO: 39590 - DNA, 411 bp, Glycine max
tgttgtttgatcgcggaatttctttgtttctgggtttccggaatatgagtagtgcggcttgttttaatggatcctattgaaagtacagaacataaaatggatctgtcatcttgatagagatggttttatcccgtcagatatttattctagtatctggagcacggaatatagaaaatggattctaaaaatattagaactatgattcatactaaatatttagacctcgcaaccggacttaaaaaacttttcaaagagttttaaaaataaattgaataattttcattcttttaagtttccggagcttatctttattttgatcaaaggacaaacgtttcctttaatttttttcattatatctattcattgaataagggatgatccaacagttcttactcagggaaatttttggac

SEQ ID NO: 39591 - DNA, 461 bp, Glycine max
cccacgcgtgcgcccacgcgtgcggacgacagattggggtgcacagatcaatacagccccacgtgggctgggattaattgcactcactcctattgttctccgctcttcaccttcactctgttcaatatcataatcaatcattgatcataaaagaaacaacattcagctatttctctgaactaaacatgttacaatctatggaagtgcctgattgtgtctatcggcggcaaccactgatcattcctccaagtgctcctaccccaaaacattctctgtatttgtctagcctcgatgaccaacagtttctaagattctccattaagtatttgcacctcttcgagacagcttcgagcttgaatatcatgaagtcttctgtggccagaggtctagtggattattaccccgtaactggaaagatgaggagtgtggatgatcacactcacaaacttgaggtggattgc

SEQ ID NO: 39592 - DNA, 367 bp, Glycine max
gatctatgtgatcattgttgtactaaaaaaatgtatcctagatctaccctctattccttcattcattgatggtttcaagagcagcaatagtgttactcataggtcttgtgggaatgttttaccagggcactcaactcccccctccaaacaacagtgattcatcagatgatggtgttccagtttcaccaccaagagtcagactcagagatgggaggtacttggcttatagagaaaagggtgtccccaaggaccaagcaaaacacagcatcatcattgtacatggctttggaagctccaaagatatgaattttctggcaccccaagaactaatagatgaattgggtatatatattctgcaatatgatcg

SEQ ID NO: 39593 - DNA, 425 bp, Glycine max
tgtgattcaatccaattgaattctccagagagaggaggaaacttaatcgatcatcacttcacttcactaatacatcatggcagacgagacccagaacaagtatgagagctctgaggttgaggtccaggatcgtggtgtttttgactttctcggtaagaaaaaggatgaagaagacaagcctcatcctcaggaggaggtcatcgccaccgagtttcaaaaagtcactgtctcagaccaaggagagaacaagcacagcctcttagaaaagcttcaccgatctgacagcagctctagctcttcaagtgaggaggaaggagaagatggagagaaaaggaagaagaagaaggaaaagaaagggctgaaagagaagatcgaggagaaaatagagggtgatcatcatcatcacaaggatgaggacacaagtg

SEQ ID NO: 39594 - DNA, 359 bp, Glycine max
  unsure (1)..(359): unsure at all n locations
gggccgacccacgcgtccttcctccnattttacaacacaactttgaatttncagacacagaaatnaagctngggctagtttttttttttcttttgtcaccttccatctctcccttcacacaagggacgaaaaatcatacacagatatagagatagtgagagaaattccaaaaccatgtcttcccacagtcatctaaatttctcctttggggttctaggtaacatctcctacttcttgttcttactggcaccactaccgacattttatagaattcgtaagaagaaatcaaccgaatggttccaatcaataccatatgtggctgcactcttcactgcaatgctttgtatcttttataccta

SEQ ID NO: 39595 - DNA, 422 bp, Glycine max
gccttaatctatgtttttagccctaagcaggatggggcggtggtctgaaaaattcctttccaagatgaattgggtgcagcctggccatttgttgatccattcatgggagacaaaaaatctgtctaatttgctcgtagcagccccatttggtttgaaccatgtgaattttctccccacactaagtatttcttcaatctctaggtcagctatccattcattgaaatcaatgatattgttggcttccattcccctatgagacacaccctctctttcagattgatgtctgatgctgttaaaatctcccaggaagcaccacaatccatcaagaccatgatgtcttagttgcttgattgattcccataattccctcttattcagattatcacatggggaatatatgtttactatagttgctttttgat

SEQ ID NO: 39596 - DNA, 285 bp, Glycine max
gatgcatagcaattcccggttcgtaattgtttaaacctaattctcatttcttcatcgttcgattcttctcctcctaaagatgcagatcttcgtgaaaactttgaccggtaagaccatcacccttgaggtggagtcctccgacaccatcgataacgtgaaagcttagattcaagacaagggagggatcccacctgaccagccgagacttatctttgccggttaaccgcttgaggatgggcgaacccttggcggctaccacattcaaaagggattcactcttcacct

SEQ ID NO: 39597 - DNA, 417 bp, Glycine max
ggctccgcttgagcagacttaacaacagcgcagagcgggttactgtctgttcaagctaccatctctctctctctttcttagtgcctccttgccagaagttaaaatggcccaagaaactttcctattcacatctgaatcagtgaacgaggggcaccctgacaagctctgtgaccagatctccgatgctgtgctcgatgcatgcttggagcaggaccctgacagcaaggttgcctgtgaaacctgcaccaagaccaacatggtgatggttttcggagagatcacaaccaaggccaacgtggactatgagaagattgtgcgtgacacatgcaggaacattggttttgtctctgatgatgttggtcttgatgctgacaactgcaaggtcctcgtcaacattgagcaacagagtcctgatat

SEQ ID NO: 39598 - DNA, 403 bp, Glycine max
aattggaagatggtctgctttgtgatgctggatatgaatttcctcaatctttagaaagtgccagaaacaatcagatggttgaagaagctggcacctcaggatcgtcctcagacagtcaaagagtgagacagatagtatctccatcagtctcctctcagaaatttggatccctctctgcattagatgctaggccaagttccatttcaaaaaggatgacagatgagttagaggaaggggaaattgcagtatctggtgattctcacatggaccatcaacagtctggaagttggattcatgatcgtgatgaaggtgaagatgaacaagttttgcagaaaccgaagattaaacgtaaacgcagtcttcgtgttcgaccttcccatgccactgaaagacctgaagaaaa

SEQ ID NO: 39599 - DNA, 426 bp, Glycine max
  unsure (1)..(426): unsure at all n locations
ttcgctttaggaaagtctcatggtatagctcgatagggggtctagataagcacacccatacaatgattttctttgttgttttaatgctctccaaaaaagctggtctccatcgctaaacaacaacgtcatgatcggccaccatccatgacccctcaaacaaagcatgtctataatctttctccgatgtgaattgcaccagatagtaataatctggcatgtctacaattcgaattttaccatattgggcccaaccttgttgtaatttatactccaacatcttanaccccactgtctttctaagaacatgtaccacaagagaacccttccatggtgcacaccagacaacacattcagaatccagaatattcacaataggacaagagataaaatccttctcctcttcacttttgtcccttgacattttat

SEQ ID NO: 39600 - DNA, 460 bp, Glycine max
ggtcgacccacgccttcctaccggttgcaaaaaaccaacaaaggggtttttttcttggaaaattccaaaccagggtcctggggagctgatccaagtttcatggttggaggtatccggcgtggtaaacttaccaggtgtcaagaaatatagggttgaattcgaagtgagagttaaagacgatgggttcggttggagtggcacggacgtgctagtgatggctaagattgggaaaacgggaaaatatacgtataaggtgacgaaactaaaccctggtgaaaccttgaatattccaaaatcaactgacccacttgagattcaagtgaacaagcaatctgaggaccttcactttggattatatgaagtgtggagcggaaaatggaagggaggccttgaaattgtcagagccctcatcaaacctttaacttaattgcatgcaactcatcataccatatatcgtttt

SEQ ID NO: 39601 - DNA, 413 bp, Glycine max
  unsure (1)..(413): unsure at all n locations
acccacgcgtgcggctttaaccaacagatgggattcaagttcctgacgaanncngcaacagcgcgcatggagggtttaacaagctcgcggagttattggaggtggagagggttggcgtctgccatcaggctgggtctgatagtttactcacttcttgtacatttagaaagttgagggatacgttcttcagtggctccacggagaaatatgctggtgtcttgtatggtttaggggttgagagtggacagactaattgaaattgaaagagaaaaagaaaaaaggaaagaagaatataattggatgtagagtacgttttaagtgtgagtctctttttacttcgtgtacacttctgccaaaaaatggttgttgtttacttgtaacattttcatcatcatccttgcttgaactgtaac

SEQ ID NO: 39602 - DNA, 441 bp, Glycine max
  unsure (1)..(441): unsure at all n locations
tgtttttattttacttcagaattttaatgtgcacgagcnngnngngagctatgggctggtttattttgaggagaatatgaacttgttcattttctttgttgctgcagtagttttggtagcatggccatgccatggcgcaggctaccaaaggttccctctccgaatgaaaactggctatggagagcgttcttctgaggtaaaatgcgcatgttttacgcttgcttgtgaagcacacaacatccgagcctttaaaaccattcctgaagagtgcgttgaaccaacaaaggactacattaatggcgaacaatttagatcagactctaaaacatttaaccaacaagctttcttttatgctagtgaacgccaagtccatcacaacgacatatttatattcggcatagataacaccgtactctcttataatccatacttatgaaaaca

SEQ ID NO: 39603 - DNA, 390 bp, Glycine max
ggacttagtttcatacactccctcctgtttgattgcgaaaatgtggaagagaaggggatttgaagaagaagcagttcaattgataaactcagatttcagagacctaagtctagctggcataggctttggagcctctttcttcggattctttgctgccattgctgctatttatctgttgattttggatcgtacaaactggaagacaaatattctcacagcactactcattccatacattttcttcagcttgccttcattaattttcgacgtcttcaggggagagcttggaaaatggattgctgcagttgctgttgtattacgacttttcattcctagacacttccctgattggctggaattgccaagtgctttgattcttcttatcgtcgt

SEQ ID NO: 39604 - DNA, 396 bp, Glycine max
  unsure (1)..(396): unsure at all n locations
gacaaccaaaatcattgacatcctaaagcattcgtagttcaaaaattccatcttcaatttacaagtctttttggacactctgtccctaatttcaacacatacaacaatgggttttcgtttgcctggtatcagaaaggcatcattttctgcaaaccaagcatcttcgaaagccgtggatgtggaaaagggctaccttgcagtctatgtcggagagaaaatgaggcggtttgtgatccccgtatcttacttgaacaaaccctcattccaggacttgttaagtcaggctgaggaagagtttggatatcatcatcccaacggtggcctcacaattccttgcagtgaagatgtcttncaacataataacttctttcttgaattaatanatggcaatttttt

SEQ ID NO: 39605 - DNA, 426 bp, Glycine max
ttgtttccttttcaattggtgtatgaaaaaggatggcatttaccagttgaaatggaacacaaggcatattgggctctgaaatttctgaactttgatgagaaggcatccagggagcatagaaagatccaattgttggagctaaaagaaatgcgattaacagcttatgaatcctcacgactttaaaaagagaaagtcaagacatatcatgataagaaattgttgaagaaagaattcaaactgggacaagaggtactactttttaattcaagattgaaattatttcctggtaagctgaagtccaaatggtctggaccctttgttatcaagaaagttcgatcttatggtgcaatagagctatatgacccataaatctaaacttcaaatagaacatgggttgtaaatggccagaggttaaaactgtaccat

SEQ ID NO: 39606 - DNA, 311 bp, Glycine max
agctgtttcctttaagaagaagatggatatgtatcaccgctggattcttaggatagcgtggggagcgttcgcgtttgttctgcttttcctatcggcctcagcatacgacgtcgttgtgctctctgaagataacttcgataaggaagttgttcaggacagaggagctttcgttgagttctatgcttcttggcgtggacactgtataaagcttgctccataatatgaatagcttgttaccatcttcaagaaagccaaatctgttttaatctgcataggttgactgtgatgagcacaataatttttgcatcaaa

SEQ ID NO: 39607 - DNA, 448 bp, Glycine max
  unsure (1)..(448): unsure at all n locations
ggtgtattgtttgttgttgtaacctcgttncttcttcttttgttgttctcgtgtttgtgtttcggttttttctctcacctcgaaaatgtctntgctgcggtggtaacctcgtggttgcggaagcctcctgcaagntgcggcaaccggctgcggaggctgcaagaatgtaccccagaccttgagctacanctgagtcnaaccaccaccgagaaccttggtcatgnggaagtggcacctgttaagcgcttcaatttgagggtgcctgaaatgggtgtgcccgctgagaacgatggctgcaaatgtggaccaaactgctcctgcaacccctgcacttgcaagtgaggtgttgggagagcaagcttcaagcagagatagcccttaattaagaataatgataaactattaatgtgtagcttaaaacttatgtattatgtctgggatgggtttc

SEQ ID NO: 39608 - DNA, 190 bp, Glycine max
ggagtggatttattgctgatgtgcatgacacccgtggagaggtgtttgcacaatgccaacctggttcaaacttccgaacatgatgttggactagagcggggatctactaggattgccaaggactaacacgtggcgccggacttattcaacagaaaggaacttatgctgaatatgaacccaaacgaaactg

SEQ ID NO: 39609 - DNA, 267 bp, Glycine max
caaacaaagggagggttgcctttgaaaagccgcatgaaactaagcgggagggttaacatggctcaggtagctgatataaaagaggtgtaaggatgctaacagtcaccatgctcaagaggctctgcgcagggccaaatataagttcacccggccgacatatgaacattcgttagcatataatggagatttacaaatttcaatctaagtgagcacacaaagttgaaacatgataacagaagtgtgccggatgggatcagtgccaaagat

SEQ ID NO: 39610 - DNA, 182 bp, Glycine max
cggataaccgttatatttcttgcgctcgggcgtattacaaaccccgacttttttattgtatacatttattacataaaatgtcaacacatgctctgcctgttgctttgattattcatgataacttttcctatctcactgactttgagccctctacacatcattcaaattttttccctatcaac

SEQ ID NO: 39611 - DNA, 371 bp, Glycine max
  unsure (1)..(371): unsure at all n locations
aaggtgaaccgatcaatggatcaattacagaagatggatgagagttgagtgaaaggaatcatattgaggatgcaacaacaaagcaactgtacattttgctttgttctgagaaagctttatatgtctattcattggtgcatgcgattcatggggttaaaaaggtgctatacaagaaaaagtttcattcctctacgtgttgctgggcatcaacattttgcagtccttctgatgttggccttatactcattttcactagtggaaaagtagaattaaggtctttgccagagttatacctgattgtggagacttcaattagaggttntaattattctcctacaaaatgaagtcattttctgacagccagatatgct

SEQ ID NO: 39612 - DNA, 261 bp, Glycine max
gatggttttgcgctgttgttggggctcattctgcggaacctccgagctctgcaccgaataacgaatccatggggaagacatatggaatgggatctgctcgcaagctcaagtcccaccgcatgaggcataagtgggctgacatgtcatacaataaatcacatcttgtaaatgaatggaagaaaccttttgctggttcatcccattccaagggaattgtccttgaaaagataggttttgaggcttaacagcccaactctgcca

SEQ ID NO: 39613 - DNA, 222 bp, Glycine max
tacattaagctgttgtctcgagcctggacaattgggttcatgaaaagaagatatcttgacaaaatggctcgctacaaaagccaacctaaacaatgctggcttacacacatgggatctggttattctaatggatccacatattatcacttcaaatgcacttaaatactaatcagcattcatagagaatctgatgaggcggggatacaaaattggtggaatctt

SEQ ID NO: 39614 - DNA, 365 bp, Glycine max
ggttctagtgtatgtgattgttgtgactcgttcttgggcgacgttatcttcttcttttgttgattgtgtgtttgttttttctctcacctgaaaatgtcttgctgcggtggtaactgtggatgcggaagcgcctgcacagtgccgcaacacctgcgcacgctgcaagatgtacccatacttgatctacaccgtgtcaaccaccaccaaaaccttgttcatgcgcgtggcaccattttaggcttattacatccgtgctaaaatcggtggaccccattagaaccaccattgctaatgctgagctaactacacttgcagaccctgctcttgcaagtcttgtgtttgataactaaaacgtgaatcaaaat

SEQ ID NO: 39615 - DNA, 406 bp, Glycine max
cgtccaccggctacaaaaagacgacagaaagggactccatacatcacacttaactgcgatctacgtgagacactaacaaaaatcaccccggccaaaaactcatgactcttacactttaacgcgcattatccgaactactcaccctaatagctaaacactcaatatttctaatgatccctacctttagtttcaaccccaaaaagctttataatgcttcatattattctccatctaattcagattggtcacctgcagaggacacttggtatggacctgccaatggatatcgaagagaatgaggagcttgtgcatatggtaacgctgttgggcaacctccattatattctttaatatccgcgggaagccctcttatatatgactctggcaaaggatgtggttcttgtta

SEQ ID NO: 39616 - DNA, 296 bp, Glycine max
taatgcacaatttgataataaagacttggtggttgaatatgctgatataaagcactctataatatatatatatatgcaaaaaacttgacatgaaatatcaagcaatgccaacactataactatggacaaatgcacaaatattctatttctatttaaatatggaataacagcacgttagatttacaacagatatggggttgaggtcaaattccccactgcagttcctactatttcagctgacaacattaatagctgccatctatttatgagtcttgactccttctaaccatccataa

SEQ ID NO: 39617 - DNA, 425 bp, Glycine max
tgtgttttaatctacatggatgaaaacaatttagttaacgatggaatttatgttcaattctgattatatacaaaaattctttaagccaataattgaacccattttatgataaactttccttccatttttgttcctctagtaggcctaatatttccggcaattgcaatgacttctttatttcttcatgttcaaaaaaacaagattttttagatacagaaaacaaagtaaaattctggggttttttattccccaattataatactaaattcaaataataatcatatatcgtaaataaaattagtcttcgaccactaaaaaaaaatagcaaaagctttatctaaataaacatgcatcacacgtcattagctcctatgttttgcttaatgtaactctagtctttgtgatgcctgtgagtgtaactacct

SEQ ID NO: 39618 - DNA, 407 bp, Glycine max
agtttgttgtgagctttaggctagtttatcgagaggagaatatgaagtggttggttttctttgttgctgcagtagtttgggtagcatggccttgccatggcgcaggctaccaaaggttccctctccgaatgaaaactggctatggtgagcgttcttcggaggtaaaatgcgcaagttttaggcttgctgtggaagcacacaacatccgagcctttaaaaccattcctgaagagtgcgttgaaccaacataggactacattaatggcgaacattttagatcagactcttaaacagttaaccaacaagctttcttttatgctagtgaacgcgatgtccatcacaacgacatatttatattcggcatagataacaccgtactctttaatatcccatactatgaaaaacat

SEQ ID NO: 39619 - DNA, 383 bp, Glycine max
gaatttgaggttcgacccaggcgtacgcgcccgcgaacacgacgccagaggggggcactgcaattgcaaccaaataaggtcattctgtttgcgcagttccctacctctcctttcaagatgcagatcttcgtcaagaccctcaccggaaagaccatcacccttgaggtggaaagctctgacaccatctactacgtctaggccaagatccaggacacggaaggaattcccccggatcagcaacgtctcatctgcgccggaaagcagctcgaggacggacgtaccctctccgactacaacattcagaacgagtcaacccttcaccttgtccttcgtgtccgtggtggcatgcagatcttcgtcaagactctcactggcaaaaccat

SEQ ID NO: 39620 - DNA, 415 bp, Glycine max
ttatggggaccgtatcatccaaactattggccatgcaattgagacccaggataacaatgatgtcttggcttattggttatccaatgcctctacacttctcttgttactccagcgcacactcaaggctagtggtgctgctggaatggctccacaacgccatcgttcttcagcaaccctgtttgggaggatgactcaaagtttccgtggagcaccagctggagtcaatgtttccctaatcaatggtaacacaagcagaggagtagatacattaagacaagttgaggccaagtacccagctctgctgttcaaacaacagcttacagcatatgtggaaaagatatatggaatgattcgtgataatttgaagaaagaaatttctcccttgcttggattatgcatccaggcaccgagaaca

SEQ ID NO: 39621 - DNA, 450 bp, Glycine max
  unsure (1)..(450): unsure at all n locations
agaagggccctatantgtacgtggaaccctcaaaagggttggggctgaagaaaatctgtgtggttttctaaatggagggaagcgccaccaaaagggggtcacaatactgattagcgatcatgcccatgagtaccgctgtttctgaaaacaatgcctaatcaataggcctcctgggtgtgacttgggccacaagaaaaactccctaaggctggatgattgggtgttatgccggatctacaagaagggtaacacacaaaggtcacatgagagggatgattccatggacgacatgattggagaagtacctccttccatcaacgtgggccacatgaatgcgaggtttcacctttcaaagatgtccacgagctacagtggtgcattgttggaaaatgacagaaacacgttagaaggtgtggttataggcaatggtaatgtcaatggaatcaacac

SEQ ID NO: 39622 - DNA, 337 bp, Glycine max
ggttctagtgtgtgattgtttgttgttgtaactcgttcttcttcttttgttgttctgtgtttgtgtttgttttttctctcacctgaaaatgtcttgctgcggtggtaactgtggttgccgaagcttcttcaagtgccgcaaccgctgccgaggcttcaagatgtacccagacttgaacttcacttaatcaaccaccacccagaccttggtcatgggagtggcacctgttaaggctcaatttgagggtgctgaaatgggtgtgcccgcttagaaccattgcttcaaatgttgaccaaacttgttctgcaacccctgcacttgcaagtgaggtgttggg

SEQ ID NO: 39623 - DNA, 316 bp, Glycine max
aaaagggaatcattgccgcatatgaatatcctattatcctctggcatgaacaaattgaaaccccaatttatgcatcacgaaagggggcattagaatggtctcaacacttgactattgagacaattagattagacaattggaaaaaaatatcgagacaattatgaattccattgagtctcccttacttgatcaaacaaccaaaaattcagttatttcaactacattcaatgatctttcaaatgaggcaagatcatccagtgtatggacgcttatctatggaactagttgatgcttcatcgaatttgcttcattaata

SEQ ID NO: 39624 - DNA, 422 bp, Glycine max
gtgctgcacatgtgaggctgttgagatggttagaacccttgcgatgatcaagcccgatgggttgtcaggtaagtacacagaagcaatcaaggaggtcatcttggattctggatttcatatcgtcaaagaaaccgaggtccagcttgatgctgagagggcatctgtcttctatgcggagcattcccagagaagcttctttgacagcctagtcaagtacataacaagtggtccagttcttgctatggttctggaaagacctgacgccgttgcgcaatggcgcactgtgattggaccaactgatgcaaaaaaggccaacacctctcatccaaacagcattagagcaatgtgtgggctggactctgagaaaaattgcgtgcatggttcggattcaccagaatctgcagacagagagatctcatttt

SEQ ID NO: 39625 - DNA, 204 bp, Glycine max
tgtgagagcgtgacatggaccactgtcggtataaacattggcgacacgtgttaatctgataaggcacgataacattgggcgattggattgaatagaacctcaaaaaaactgcggtgggtctataagattcaagcttaccatcgcgtgcatgcaacgtcatagctcttttatagtgtcaactaaattcagactactggtgcggtg

SEQ ID NO: 39626 - DNA, 436 bp, Glycine max
  unsure (1)..(436): unsure at all n locations
aaaacggccgacccacgcgtcgcggggcgtggnataacattcaaagcacgtcttggttgcagatcagacataacaaaagggtctctttccataccaattagcaacaacaccacaatacatctatctctcgtgcacatagcaaatgacaatgtcgtccggctcagaatggcgtcagcgcacagcgtcacggcctataccataatctccagcgtccaccgatataactcctgctccggcacgggcaggtcgacggacacgaggccggtgtcggcatcgtagctgaactccacttccgccgagtccaatagacacctcgccggctcccgcgagcagtaagcgccgaaccgaccgcacccgcgaaccctgagagccatggccttgccgccgacattgctgatcacgtcgcactcctcaacgggcccccagcgttaacata

SEQ ID NO: 39627 - DNA, 391 bp, Glycine max
gcgggtgcgggaggacgacggcgggggacacaaagaatcgaagtcatagttagaagatttagacgtttatccgtgattcggatagttctaatattacacttgcgctaaaagatgtgtttgattccgagagtctttggtggcagaaggagcaatgttttggatcctttgtctctccatgtgagggaccctactaaggatttatctttaaccactattctttctgctgagaaatcagcgttcgagagcacacgagtggattgtaaggagacaccagaagcacacgtgtacaaagctgatattccagggctgaacaacgaggaagtgatgctgtagatttaatatgacagaattcttcagataattctagagaggaacgttgagaaggaagaca

SEQ ID NO: 39628 - DNA, 403 bp, Glycine max
attacaaatctttcgctcacactcagggattgccagaatggcacttggttgcttggtgatgcccctttctgttctcttcactcttggtcttgcgagagaaagccatgccagagacaaaaatttttggcatgctgtttggccaaacactcccattccaagttcattgcgagatcttctaaagcctgcccctgcacgtgttgaaatcgatgaacaccctatgccaattgaagaaacacagtacccgaaaaccttcttctataaagaagaccttcatccatgcttaacaatgagagtacagttcagcacgcgctcctttcaacaaccattgagtgttggtacatgcctaaaggaaattaaagacactactactcaacgatatagttttgaagagctatgcatcaac

SEQ ID NO: 39629 - DNA, 421 bp, Glycine max
gaaagaaggcgattcgtattcggtgagctggtccgtttcctagacgaaatggggtaagaattgaaagcatgatgattgattgatgggagcagcgaaccatataatttaatttaatttgtgtccacatgagaacgtcgtgacctgcattttctatctcgcaacaccgcgataatggacatcagtggaaatgatgtgagtctgaatgattacagcgggaaggttctactgattgtgaatgtcgcctctcaatgtggtttgacacagacaaattacacagaattgaatgtattgtacgagaagtacaacaatcaaggatttgaaatcttggcatttccgtgcaaccagtttgctggacaggaaccaggaaacaatgaagaaattcacgaagtagtttgcacaaggttcaaggctgaatttccta

SEQ ID NO: 39630 - DNA, 410 bp, Glycine max
gagtgcatcatcgtcaacaaatggggaaaataaggggtctgtgaaactgttcaatcgcctctacatacgcgtgctcaagtgcggcaaacgtatggtttggtttgacccgagtgaagataacgaaatctccatggccaattttctttgtaacatcaccaagatggttaacattgggtatattgatacgaatcttactgatattcactcactatcacatgctcgtgggattattgacgcatacaggaatgttcccctctccaattatggtaaacgtaagggtacacgggaggcacagcttaccaccatgatactctggatgagaaggatgcgtgcgctcatacggttgcatcgaaagaacagggaatgaaaaaatatacgacatgcacatgtaccatgataagtgcatgaat

SEQ ID NO: 39631 - DNA, 411 bp, Glycine max
ggggctcaagctttatttcacgtagcttacttgaccgtctgctcaattggaatagttttttgctatgttcgcatgcaagtgtgacgatccattaatgcccttatctgcttagaaagaaccggcgtcatccaaacatggtgaagaggtggcaactggatcaataatagctgaaacttatacttcacagtaatgggcttgcccatctgctcaagcttgtaatgtattctagaagatgcttaactccacttactgctattaaacgatcgatttcatgaaaggagggagggaatacttcatgcgcaccaccaaattctagtgcgcaggatacattctttattgacacgctcaaacttggtgcctgtgtgtatcttcttgaagggtttggttacattgtttttgggtgaccctttt

SEQ ID NO: 39632 - DNA, 219 bp, Glycine max
gtactcgaataaccgaagtaagggtagagctagtacgtgcaacaaaccccgacttctggaagggatgcatttataacataaaaggacaacacaggctctgtctggtgctatgctgacacatgaagactctttagatcatgaggtctttgcgacgcagcacattatgcgagacagttgtcctaaaaactttcaatggtaggatagcggcctaccatgctg

SEQ ID NO: 39633 - DNA, 345 bp, Glycine max
ggggctaaaagctaaaaatcatggaagtactgaaattagcatggctgttacggttgcattcttgaatttgatcattatgtttatagaactcactacttgcaagtcactgtgcttaaactactattcaaaaacacgccctgatagtgtaatgcattgctgccaatgcagtgaaggatgccactgctagggacataactgttccaattgctcttctgcggatgcacttccatgactgttttatttggagctgtgatgccgccgggctgttcaagtcgaaaggaagtagcatagtataaatagataggccaacaaacgattctttgcatgcattgcatgtcactgatg

SEQ ID NO: 39634 - DNA, 446 bp, Glycine max
cccacgcgttctggtcagcaagttgtgaagagcgaagagaatggctcccaagaggtgaatctttttggctgcgttatgcttctcaccactgtcactgagtcgatgtcttgcggaggataatggacttgttatgaactactacaaggaatcatgccctcaggctgaagacatcatcaaagaacacgtcatgcttctgtacaagcgccacaagaacactgctatctcctggatcagaaacatcttccatgactgtgctgttcagagttgtgatgcttcactgttgctggactccacaagaatgagcttgtctgagaaggaaacagatagaagcttccggttgagaaatttcaggtacattgagaccatcaaagaagctttggaaaggtaatgcccaggagttgtttcctgtgctgatatcctcgttctctctgccagaaatggcattg

SEQ ID NO: 39635 - DNA, 224 bp, Glycine max
cacacgcgttcggagagaagacgacagatggggagatagagagtatcggtcgtcaccatgacttttaagcgcaggattggaggtcgcaacaaacacggtcgtggtcacgttaagtttattcgatgctccaactgcggcaaatgctgaactaaggacaaggctatcaagaggtctcaggtgaggaacattgttgaacaggctgcagtcatagatggctatgaggc

SEQ ID NO: 39636 - DNA, 292 bp, Glycine max
gacggacttatggtctatgtgttagagtacatcataaagattcgggtgattgattatgatgaagagtacccgttccgagagactaatgatggatgctactcatatttgatagatgctaatgtatgctctatcgatgactaatataatgtcggtgcatttgattagataatcttgataaaggatgtagcatatctgacagtgatcgttgttatttttggaaggagaagggaattttaataatatatatctatcgcgttcacgactagatgtggatcattactatatcatgttg

SEQ ID NO: 39637 - DNA, 426 bp, Glycine max
tattattcattattaaaaactaatgtaaatgttcaagtttgttcattattatttattaaagaaatcttcacctaagtttaagggattgtcggggcatggcgaatcggccccaaccttaaaaagatttatttacaatttttttaatgttgttaaaataaattatttagcttctactaggactggaaataagtcgagtcaagtcaagctttattaggcttgaattcggcttgagttgaatacgcaaggcttgagcttgactcattacctgacatagactttttttaaaggctcgactcggattacataaaagtctggcttggcctacgagcctatttaaaagtctacctaaagacgtctttaaccaattaattgttttaaaacctagtgaaatactaactaaaaaacgaaacttataaaatttcatat

SEQ ID NO: 39638 - DNA, 419 bp, Glycine max
gaagaaaagacacgttagcgagtctaaggaatgagaatggcgctatcttcatcttcatcaccaccgcttcttcccttcgatctccaacggcaccgtttagttagcctcaaaccctatactcgttctcgttcttctcagtctcagcacaccgtcaccgtcaccgtcaccgccgctaaagctaaagcttcttctgctactccgttagtttactccaccagacaagggtttgacaccgtcaacattgccgaagatgtcacccagttgattggaaatacgccaatggtgtacctcaataaagttacggaaggttgtgtggctaacattgctgcaaaacttgagtctatggaaccttgccgaagtgtcaaggacaggtaggttatacttttattcatcagaagaagattaatgctaacaatacc

SEQ ID NO: 39639 - DNA, 209 bp, Glycine max
tctacatagcatcatcctgcaccaccatgctatatattataaaactacgcagttttgttaggatcttaaaaaacactccgctaacagccagatggcctcttccgacagtaacatgctactaaagaatgatgcagtttatgagatgctcccactcggagttgcccatgctgactctgttgatgaagacccagattgactttaagaacagc

SEQ ID NO: 39640 - DNA, 324 bp, Glycine max
gttactagggtttgattgatgggtgacgcagggggttcttacaggaccaatgggagcgccctcctctagaggtaactacccatgaccacccaaagcctaataccattccccaactctctttattttctgaaaggctgacgacctgatcttattacttgccttgcctccttccatgccaaacttataatcccataacgagaagtggactttgaatgcccagatgattttttcattgttaacaaggctaaagaataaggcattgaactttcctactcgtgcaaggatggttctttcgattcatgtgctgggaaaatttataaacgt

SEQ ID NO: 39641 - DNA, 312 bp, Glycine max
ggttctagcgtctgtgattgctgagactcgttcttcttcgtcgatatcttcttcttttgctgctggtgagatagttttttctctcacctgaaaatgtcttgctgcagtggtaactgtggttgcagaagcgcctgcaagtgcggcaacggctgaggaggctgcaagatgtccccagacttgagctacaccgagtcaaccaccaccgagaccttggtcatgggacaggcaccagttaaagctcaattcgagagtgctaacaagggtgtacccagtgagaacgatggctgcaaatgtggagctaactgcacctgc

SEQ ID NO: 39642 - DNA, 286 bp, Glycine max
ggttctagtgtatgtgattgatgtgactcgttcttcttcgtcgttatcttattcttttgttgattgtgtgtttgttttttctctcacctgaaaatgtcttgctgcggtggtaactgtggttgcggaagcgcctgcaagtgccgcaacggctgtctgtgctgcaagatgtacccagacttgagctacaccgagtcaaccaacaccgagaccttgtcatgggagtgcaccagctaaggctcaattcgagagtgctgaaatgggtgtttccgctgagaacgatggctgt

SEQ ID NO: 39643 - DNA, 370 bp, Glycine max
  unsure (1)..(370): unsure at all n locations
tctggtgaaataccacctgaaattggatctctgaagcagttatcttctttgcatctagaagagaattctttaactggatcaatacctgcagaactgggtcattgtgcaatgctggtggacttgaatcttgcttggaattctctatctggaaatatcccccagtcagtttcacttatgagctcattgaactctcttaacatatctgggaacaaactttcaggttctattccagaaaatttagaagcaataaagttaagctcagtggatttttctgaaaaccagctttctggaagaatcccatctggtctttttattgttggaggagagaaagctttcttggganacaggggctgtgtgttgagggaaacct

SEQ ID NO: 39644 - DNA, 405 bp, Glycine max
  unsure (1)..(405): unsure at all n locations
gagggtttggttattaaggttttcgctcaccggtgggccatccaaccccccaaaaaaaaaccaaaattcccgcccaccagacatttcaaatcaaaaaaaaatttgccaaaaaaattaagccaaacaagcctattcccttcttggatccgcatgaggaccgacaacaccatcaggtacaacgcgaagcgccgtcactggcgtcgcaccaagcttggattctgaggtgcttgctgtgcctcggttctgtttatccaattaattagtgtttttattttcttgagccaaaaacaatgctttggagattttaatattttgcattttgttccaagactatattgngtaaggaacttattgtagttcagactaatggtggggttggtcacctttttttaaaagtattttgga

SEQ ID NO: 39645 - DNA, 336 bp, Glycine max
ctttcaagttgaatgaggagatgattgaaactttgtttgtagtgaacacgcctaatccgaaacctaaggatactactccacgctctgttcttgcgccacaaaaccaggaggatagggtattggatcctaaaaagtgccaaaacattgctatcttgttaagagcacttaatgtgactatagaagaagtgtgtgaagcactcttagaaggtgttactgatactctcggaaccgaactacttgaaagcttgataaaaatggcaccaagcatggaggaagaacgcatattgaaggaacataaagatgattctacaaccaagctagtgcctgctgagaaat

SEQ ID NO: 39646 - DNA, 313 bp, Glycine max
cacggatcgctgactgtggtagagcatgtgctaatagagttgctgcaatccgttgaccatgatagatgctacagcctatatataacgatgctggtcatagaacaactgcgtggctggacaaatagagaaaatcaaatggttcattggctacttcgcgaattcaggtgagtatgcgccgcgtaatgcaaaccagtgctgctgaggaccgtacacaagacacattagacgaaggttgtcgatctattgattaaacatgggagagcttacatgatgtccaggtgagggaccgcacataatgtgcaactctgacttg

SEQ ID NO: 39647 - DNA, 408 bp, Glycine max
tttgcatatattccaccaattgttttacaaaaaaaagaggtgttacctttcaaatatacttaaatgactttttatggtaatttttttttctaaatgctcattcatgactacttttatgttttgtgataattaaaaaaatttacagatcctctggaagagctatgcttcataagagagccaaagtagaatttcacccccttggtgttatcggtgccattgtgtcgtgaaactatcctttccacaatatttttaaccctatgttggcagcagttttttctggaaatggcgttgtgattaaggtataaaatgacttaatatctgctatctacctatctaaaatggttcattccttgatgcattacatttttttaagaataaacattgttgactgatattgcttcacggtga

SEQ ID NO: 39648 - DNA, 426 bp, Glycine max
  unsure (1)..(426): unsure at all n locations
cccacgcgtccgcccacgcgtccgcccacgcgtccgcccacgcgtccgagacgacagaagggtagatggatagcttgtgtctcaggtgttgttcagacagctttgtatgcagatttcttctactattacttcatcagctggaagaacaattcgaaactgaagttgcctgcctgaattatctcaagttgttttggaatttagacctgtgtgaccagtcaccgctaaattttacagagcgtcgtggtttggatgatgttagttttgagagtaacgagacaaggctaactcctctccctgttcatgagtggggtaagtaagttttgtttttaaggttcaagggtaaacaggttttaacttctgatgaatataaccgtcccgtgggttaaaatgcanatgttatgtgatgatgttttgtatattcacgtc

SEQ ID NO: 39649 - DNA, 423 bp, Glycine max
gacctccttctactttgttttaagcttagagagtttgattgaaatccccaatcaaaatccaaggtttttctgtttggggcttcaagttttccaagaggtctctcgtcaagtgtttctgaacttgttgagggaaaccatacatcccttagagaaaaaagacatgatcattattctctaccttcatacttgcatggatataattgtcaaatcacgagagaatgtcaaggttaactggatcattccacattatcatcaacaccccttctcgattcctaccattacctttgtagtcaatcacaaaagagtttttcagaccagcaatatccttcacacaattagtctcactataaggtttttttgtctccattaagaagactacattgggagcttccaaggtaaggagctttcacaaagctcaaacta

SEQ ID NO: 39650 - DNA, 209 bp, Glycine max
cttcactacatggtgcattcaagggaagctacgagatggatcagtgtgtgtgaaaaggctgtggacgtagcatgcattctaagaggaagcatactgacgccggttctgattgaaacacttgctgcagtgcttcaaatggatgaaatactatatgagctgaaagagcatctgctgggtataaactgcggacgttgagattactatttcag

SEQ ID NO: 39651 - DNA, 363 bp, Glycine max
taatgtgagcaaggaaataagctttggggactctggacttgatgagggtagcaatggtcaacaacaaccaatgccaagaaggtgcacacattgcttggctcagaggaccccacagtggagggcaggaccattaggtccaaagacactatgcaatgcatgtggagtgaggtacaagtctggtaggttgctaccagagtataggccagccaagagtcctacttttgtgagctacttgcactccaaattccacaagatagtcatggagatgaagatgtctgtttactccatttctaatgaacaataataatgggggttttttagaggtatatttttaatgtaaaaaaaaaattgcaaattttaagg

SEQ ID NO: 39652 - DNA, 386 bp, Glycine max
ggaagacccacgccgacgcacgcgtgcgagacgactacacaagggggctcaaggcgttttgtctcttggtataatcaaagacactcgtgagtaatataaaaggccctgttttcttaattgatacaatattgcctgtatagtaatgccaagcgttcgatatgtgccctttaccaatgaacactgactattgtgccccacattcggacgtgaaatgcgcaaattggaggcttgctgtggaaacacacaacatctttggctttgagaccattcctgaagagtgcgttctaacaacaaatgaatacattcttggcgaacaatattgattaaacttccaaacagtttagcaacaggcttactttttttccaaagaccttgaaattcattcc

SEQ ID NO: 39653 - DNA, 272 bp, Glycine max
ggcttaagggagtctgctgatcgatataactagggaccacgggattaatatgaagggccttgctttcttcgttcctacaaatttggtaacatgacaatgccatgcgtacgatatgttccctatccgaatgaacactgcctatcgtgcccttactcctaaggcgaaatgcgcaacttggatgcttgctgtgcaagcacacaacatgtttgtctttgagaccattcctgaagagtgcgccccatcaacataggaatacattcatggcgaacatt

SEQ ID NO: 39654 - DNA, 413 bp, Glycine max
gaagtccataactgggaggttatgggttaattcggaattaattagtttaaaaatcatcattttgcgtgcgacttgaaagacatgattagattagctgtggattcttacatccgccattttttctagtatatagaaatgaacatgctcttgactcgacatcgtttgttctgttccactagaacttattgttttggggacgggaaagcagttgatgatgtaagttgatgatgtaaatagtacatgatggagctcgagtttattcatttatcaggggcaagtatctaaggttagtaaaaattaataagttagaaaaacttcgtaagtttatttttgatagaaaaatagaaaggatccaatttgagcaatgttcaaaaaaatggttggaattagtaaaactgttttgatcaaaagtg

SEQ ID NO: 39655 - DNA, 267 bp, Glycine max
tggtgtataggaccactttctttacatgacaagttattcttggaaagggctgggagagatggtaatgagacatcactggatgaatctgaatgtctaaattttctttcttccaacaagccttgttctgtgatctatgtctgttttggaagcttgtgtcgcattaatgcttcacaactaaaggagattgctttgggcttggaagcatcaagccaccccttcatttgggtgattggaaagagtgattgttctcaagagatagagaaatgg

SEQ ID NO: 39656 - DNA, 225 bp, Glycine max
ggtctcggttcgaatcaacataatgattacgatgcgcgtgtctctgcctaaaaggattgatagatggcatacgcactcatgatctatcatgtagatcagtcgaatgtatctaccaaggagcatatttaaatattcgttgatgcactatatcctggatgtcattgcctgcctaggtgccttgcataccatattgctggtagatcgatactggatgtgcttcaactt

SEQ ID NO: 39657 - DNA, 404 bp, Glycine max
aagacgacagaagggatttattttattgtaagttttctgctaatgacgtgtacattctccctgtttcttacccagatgtagcacttgtcacatctttgagggatggaatgaatcttgtaagttacgaatttgtggcctgtcaagataaaaagaaaggggttctcattctcagtgaagtaattactgaaactttatagtgtatttgtctacttttaatttctcaaatcaggctatgttaatgttgaataattaagaaagaaaagattcaaaagctagtagttggaactttcctcctacagtctgttttcctgtggtcatcgcacctgtgataaattgagtaaccgaccaaaagttcatgaattcggtgcccgaaacaaccctcccttcttataaacatatgccct

SEQ ID NO: 39658 - DNA, 392 bp, Glycine max
accgagcgaccacgcgttctacgggtagcaaagacgacatttgggggttatataacacaaggtcttccaagagtagaggaggtattagaagttcgttcgattgattcaatatcgatgaacctacaaaagagagttgatacttggaatgggcgtataacaaaaattcttggcattccctggggattcttgattggtgctgagctaacgatagcgcaaagtcgtatttctttggttaataaaattcaaaaagtttatcgatcccagggagttcacattcataatagacatatagaaattattgtgcgtcaaataacatcaaaagtcttggtttccgaagatggaatgtctaatgtttttttgcccggggaaactaattggattgttgcgagccg

SEQ ID NO: 39659 - DNA, 272 bp, Glycine max
  unsure (1)..(272): unsure at all n locations
ccacatatagacttcactccactctaccacacaaagcttgctgtaccatttagctatgactcatgtccanactctatcacaattgagaaatggctacagatcttgatgttcaagaccaaggaagagagtactcttccaaagactaccatgaccctcctgcagcacctttgttcgacccacagcagctcacacagttcttcttctatcaagccctcatcactgagatgatagaaacacttctgtttctttctgatactaccctcaccatcatt

SEQ ID NO: 39660 - DNA, 364 bp, Glycine max
tagtgtaattatgatacttgcgggtgataagggtgtttgtacggtcacacacagttatatggtaaaactgaacaatggtttctctttctctttctctgtctgcttcttcactttctctcgtttcaatcgaaaaaaatcatgggcagaaaattcttcgtcggtggcaactggaaatgcaatgggaccactgaagatgtgaagaacattgttactactttaaatgaagctaaagtccctgtataagatgttgtagaagttgttgtgagccctccttttgtgttccttccttttgtaaaaagattgctgcgccctgatttacacgtcttggcccataattgttgagtttcgaaaggtggtgcttata

SEQ ID NO: 39661 - DNA, 408 bp, Glycine max
attactcatgttggttcctaaggtatggttctgtcatgttgggggtttgaaaacaaaaggtaaaataaactatggttgaaactagacaaaataaacactaaaagaggtgtgaaagataaggtaaaaactaattggtaaaaggcaagctatctaggcggtttgacaatggagggtaaaggaaataagctatgaaaataagcaagaaattaaagtgcaagaaatgcaaactaggcggattcttagaatggtttgattaacctatttaagggttccaacaaaacaactactattctaaggggaaaatggctaaaattattacacacaaatggaaatagggtgacctaatggaagcttccaaattactttcaattaaagggcttttttgtttcaaattttgaaagccaagca

SEQ ID NO: 39662 - DNA, 356 bp, Glycine max
gcgttctacggcttctataagacttctttaagggactctgcatctgactcctatagaagcctctgagaattccatatccccgttttccttcactcttaaacccctattcatttccaccatcacaagaagcatggctgcaatatcaattccttctcacatgaaagcttgtacatactctgtgtatgtaaaatccaaagaagttctcaagtttaatctataattggctttgccttaagtgaatgaataccatgtccttatcaaagtctcttctgtttcccttaaccccattgatcataatacaatggaaagctattttaagaacatctacttctctttacctactgctcctgattatt

SEQ ID NO: 39663 - DNA, 344 bp, Glycine max
gatcagaggaagaatgtttctaccttcctagtccaggctggtatcgtgaagaaggatcatatcaagattcatggtttctgagcggttggagtcttaagtgtcaaattttacctgcctgactatgtgttaggcataatatataatctgagtcgtgtggatgtgattgtggtatttctaatgtgttcttatgttttaccatgtgatgtgggattatggatttcagaacattgtgggttatttgctttgaagacttatttgaaaacggtttaatcaagggaaaaaattaaaaaaaaaaaaaaaaatgccggccgttttaaagaatccaacttacctacccctgcctt

SEQ ID NO: 39664 - DNA, 423 bp, Glycine max
ggttctagtgtgtgattgtttgttgttgtaactcgttcttcttcttttgttctgtgtttgtgtttgttttttctctcacctgaaaatgtcttgctgcggtggtaactgtggttgcggaagctcctgcaagtgcggcaacggctgcggaggctgcaagatgtacccagacttgagctacactgagtcaaccaccaccgagaccttggtcatgggagtggcacctgttaaggctcaatttgagggtgctgaaatgggtgtccccgctgaaaacaatggctgcaaatgtgaaccaaactgttcttgcaccccttgcccttccaattaaggggttggaaaaccaaccttaaaccaaaattacccttaatttaggattatggttaactatttatgtgttgcttaaaacttatgtattatgtctgggat

SEQ ID NO: 39665 - DNA, 358 bp, Glycine max
aaacaccaaagggggctttgtgaaatatctgatacacatttcactggtatggagacgcacgcattttaatgacaatgactaactggttgtacttattgggtgaagttgttaagccacgttgggatcgtggagattgcaccacttacaccagggtcgagaggccttcccataatagggaatcttcatcaactagatagtccttctcttcatgagcagctatgggatctctcagagaaagatgggcctttattttcccttcaatacggattaaggccatccatagtagtttgctctccacaattggccaatgatgcaaggaaagacaatgaccttgggtgctgaggacgaccttaattac

SEQ ID NO: 39666 - DNA, 240 bp, Glycine max
ggttcaattccaatatatgccaggggctctgtgtaaatccctacctatcccttcaagatgcacatcttcgtcaagaccctaaccggcacgaccatcacccttgaggtggaaagctctgacaccatcgacaacgttaaggccaagatccaggacaaggaaggaatacccccggaccatcaacttgtgattttcaccggaaagcaacttgaggacggtcgaacccttgtgactacaacattc

SEQ ID NO: 39667 - DNA, 322 bp, Glycine max
ttttagaagggtcatgtagcttggcaagggagggttgaagcatgggtacaggatcctttacatgtaagacctatagctcatgcaatttgggatcctcattttggtcaaccggctgtagaagcttttactcgaggaggtgctctaggcccagttaatatagcctattctggtgtttatcagtggtggtatacaatcggtttacgtactaatggggatctttatactggagctctttttctattatttctttctactatatctttaatagcgggttggttacacttgcaaccaaaatgggaaccaaacgtttcgtgggttaaaa

SEQ ID NO: 39668 - DNA, 293 bp, Glycine max
tggggctttatgccaatcttcagattggaccttatgtatgcgctgagtggaactttgggtacatgttgcttccataatccatatttctctctctctctctctctctgagtgcgtgtgttaatatgttgtgattctcaatcgcattctttaatggtgtactggagaggaattactgtatggttgaagtatgttcctggcgtaagcttcagaacggataatgagcctttcgaggttggacttacaattccatcgacatggcttctctatattgtctcaagtcttggataatctat

SEQ ID NO: 39669 - DNA, 243 bp, Glycine max
aagacccaaatgttttctttgccacaaaaatcaagaggtatggctctatattcaagtcacacattttgggttatccttgtgtgatgatttctgacccggaagcagcaaagtttgtactgaacaaagctcaactcttcaaaccaacatttcctgctagcaaagagaggatgttggggaagcaagcaattttctttcaccaaggagcataccatgctaatcttagaaggcttgttcttcgcacct

SEQ ID NO: 39670 - DNA, 351 bp, Glycine max
agctaccggggcattggaacaaaatgggtgtttagaaataaattagatgaaaatggcatagttattagaaataaggctagattagtcgccaaaggatataatcaagaagaggggatagattatgaggaaacatatgctctagttgctagattagaagccatcagaatgttattagcctatgcatccataatggactttaagatttatcaaatggatgtaaaaagtgcattcttaaatggctttactaaagaggaagtatatgtagatcaaccccctggatttgaaaactcagaacagcctaatcatgtttttagaataaaaaaaggctttatatggcttaaagcaagcccc

SEQ ID NO: 39671 - DNA, 278 bp, Glycine max
gatgcatagcaattcccaattcctaattgtttaaacctaattctcatttcttcatcgttcgattcttctcctcctaaagatgcagatcttcgtgaaaactttgaccggtaagaccatcacccttgaggtggagtcctccgacaccatcgataacgtgaaagctaagattcaagacaaggaagggatcccacctgaccagcagagacttatctttgcgggtaaacagcttgaggatggtcgaacccttgccgactacaacatccaaaaagaatccactc

SEQ ID NO: 39672 - DNA, 243 bp, Glycine max
aagatatggtcttcctccattgcttatgtttttttctcatctaagacacccacggatggagattcatggatggaatctttcataactccatattgctttaacaagcaccatgcgtataccatatttaatcccgtgctcacaaaatactgcctacctaggcagaatccaaggctgtttttgaatatcaacgtagccgtcttacaacctacaaacacctaaaaacatccaaaaaaaattggattc

SEQ ID NO: 39673 - DNA, 171 bp, Glycine max
caactggtcagaaggggtggctggatgaagtaaactatctaggccagctttctcatcctcatctagtgcaatcaattgtccattgcttttactatgcacaccgacttctgccctatgaatttacgcctactggccacttggaatatcacttgcccatgagaggctcgaatc

SEQ ID NO: 39674 - DNA, 273 bp, Glycine max
tgagggggttctagtgtgtgattgtttgttgttgtaactcgttcttcttcttttgttgttctgtgtttgtgtttgttttttctctcacctgaaaatgtcttgctgcggtggtaactgtggttgcggaagcttctgccagtgcggcaactgctgcggacgctgcatgatgtacccatacttgtgctacactgagtcatccaccaccgacaccttggtcatggtagtggcacctgttaatgctcattttgtgggtgctgagactggttttccccc

SEQ ID NO: 39675 - DNA, 312 bp, Glycine max
gtatgaggtatatgtatgaaccccgtatatccatcctcatggggatggtgaaaggagggccccaattggtagaaaaaaacccgcaactcctgggggttttcctgcacatggaagaagaagtagaaatagggaagaaatatagtgataattagattcttttgcgtctgtctaaatagtatagaatatagaaactgtatcttcgtctttacaagaaaaaggaattattatttttatcacgtttatttaaaataatccttttttagcgaatcatttattagaaaaataaaataacttaacacaaaagccggaaaa

SEQ ID NO: 39676 - DNA, 337 bp, Glycine max
tggcaatcatagagaagctattagatggcacaagtttggataattctgctttggggtgcttagcagattgcttggaactgtactctgatgcagcatggacaatactgaattccgtaggtgttttcttgtctgggaattatgatgtaactaggatttggatgagttcagctatggaagcagcatcaacatgccaacaaggttttactgagagaggtgaagcttctcctttgacacaggagaattataatctctttcagttgtgtggtattgcactttgcattattcatttggctacaacctgagtaccttattctcaattattccacaaaataatttg

SEQ ID NO: 39677 - DNA, 271 bp, Glycine max
cctttagcaaaatattttcttttatattgcttctaacaagtggtgtttctgttcttggcttaataggatctgtttattataggtgcaagtaatagaccagatttgatagacccagcacttctgcgccctggtcgatttgacaaactgctatatgtcggagttaactccgatgcatcttacagggagcgggtcctgaaagctcttacccgaaagttcaaattgcatgaagatgtctcactttactccatagcaaaaaaatgtccaccaaact

SEQ ID NO: 39678 - DNA, 422 bp, Glycine max
gagtcttgtgtgagtactcatttgtatttttttttaatgttgaacactcaaatttctagtctatcaatacattattattatggagtaaaatccatttatattgataccattaaataatttcagtttcattttctttttttgttaattttacataaattccacctaacaataaataattttttggactatttctcgatttgtacgtgtcatccttgtgcagtggccatactaataataaataataatgtatattggttaaattattttataatttccattatttttacttttcttcaaacaaagcgtgagttcctcttagaaaacaacaaccgctttataaatagcttctcgcacttaggaagggttgagtatgttagaaatagattcatgaatttgaaatgagtattaaacaattaaagtat

SEQ ID NO: 39679 - DNA, 335 bp, Glycine max
ccacacgaccaaaggggggggtacttactagtggtataagaagcaaaaagacttacctgggtccgagaggggaggtttcactcttattttacactctggaaatcctgacaatttgatgaacgagagtcctactgtcatagtcgatcctttttcatcacggcttgatctgggatacatcctcttagatccaccatgggcttttcgtgcaatggctggaaaaggctaccattgaagaagaatacgtattgatggcagagcctgaccacatttttggcactcccctacctaatctagcacatgggggatacccgggtgcattactgtttttgtacatt

SEQ ID NO: 39680 - DNA, 470 bp, Glycine max
tggaaaggggtaataatggatcatgagctaccaaagccgtacctgatagtgacttgagccctgcacgtctcttcgtcactggcgcggctacgatacgaataaactagaaattaccatgtgccaaactgaacaatctgagaattggaaagtcctcaaagatccactgctgctggcatttgcaagcattggtgacaattgactatgaagcgtgctgttaaaccttgctgagggttttaatggtgctgatctacgaaatgtttgcacggaggccggaatgtcagcgattcgtgcagaacgtgattatgtaatccatgaagatttcatgaaagcagtaagaaagttgaacgaagccaagaaactggaatctagtgcacactacagtactgattttgggaaagagtagagagattacttcttttccgttttggaagccatggagtacggagcagtgcattatattttagatgtct

SEQ ID NO: 39681 - DNA, 328 bp, Glycine max
agacttgaatcacagtggagccttatacctgagcgaggccatggtgaccttgctctgtcgtagatctctaccttctctacgccgaacgccgaaaccatggccggaaaaggacagggatctgctctcagaatggatctctgaaccacctactcttgcgcagcagcgtggaaacatgaccgaattgaactatcttcaacgaccaacggaacagaaccacgccgccttcatgctattcactgacaccgagcgtatcatctgtgaagcggccaataatcaagtcgtcatgaaccccatgaacaccgaactcgatgccaagaggctgaatggc

SEQ ID NO: 39682 - DNA, 314 bp, Glycine max
tcccgttcgacgactacagacgacgactctatggggttctagtgtatgtgattgctgggagtcgttcttcttcggcggtatcttcttcttttgttgtttgtgtgtttgttttttctctcacctgaaaatgtcttgctgcggtcgtaactgtggttgcggaagcgccttcatgtgcggcaacggctgccgatgctgcattatgtacccagacttgagctacaccgattcaaccaccaccgataccttgttcatgggagtggcaccagttaaggctcaattccagagtgcttaaatgtgtgttcccgcttagaacg

SEQ ID NO: 39683 - DNA, 387 bp, Glycine max
ccacgcgtgcgaccacgcgtgcgggtgcgtgaatacgacggatggagttgctaaggaacatcggtggcataaacctgaatgtggacagttctaactgcacaccaacaaggctacttcactaaagtgttttatctcttccttgatcatacatggaagcgtggatagctgggatggaagtgacttacattgaatcggagctccacactcttctgatcagaatgaccatcaccacaagacaaagcgttctgccagaggtgatgatgaaagcttgaaacgtgagagcagtgctcgacgccatagctctacgtagaagaagcctagagtgaatagggcaattgaggtgcccgctatcagcatcaaactagctgatctacatactgatgatta

SEQ ID NO: 39684 - DNA, 341 bp, Glycine max
tcctgttttcaataaatcttatatgttgtatcattcttatgatggcagcttgcacagaaagaattgcagaagatcaacatgtacaaggcacccagggataaacttgtctgtattctgaattgttgcagggttattagcaacttgctgcttaatgcttcggttgcttccagagagaatcctccaggagctgatgaatttcttcctgtgcttatttatgtaaccataaaggtaatccaatgttccattacaaataatacatgcataattttcgagtagaaataatttggcttgatagaatgaagttattactttctgcactttctttaaaatatgggtatgac

SEQ ID NO: 39685 - DNA, 341 bp, Glycine max
atggtagaggatgcacgaacagcgctaggcaatcaatttgtggggctccggacttgatggtggaggatgcatgaacaacgctaggcaatcatttcacggggctctagagtcaatgatggaggatgcacaaacagcgctaggcaatcaattcgtggggctccggactcgatggtggaggatgcatgaacaatgctaggcaatcaattcatggggctctggactcaatgattgaggatgcatgaacagcgctaggcaatcaattcgtggggctccggactcgatggtagaggatgcatgaacaacgctaggaaatcaattcatgggggctcagactcaatgat

SEQ ID NO: 39686 - DNA, 395 bp, Glycine max
  unsure (1)..(395): unsure at all n locations
caaaatgacaacaacatggatcctcagcgtaaagcattttatgaatacttctcagctctcatggagccatgggatgggccagctcttatagcatttactgatgggcactatcttggagcaaccttggacaggaatgggctgcgaccaggccgcttttatgtcacccacagtggacgagttgtaatggcgagtgaagttggggttgtagacattcctcttgaagacgtgagtcagaaaggaggactaaatcctggcatgatgcttctagtggattttgagaagcatattgttgtgaatgatgatgccttaaaggaacagtattcattggcaaggccatatggggatggctcaaaagcagaagtagaactcaaaacatagntgattctgtcatgaat

SEQ ID NO: 39687 - DNA, 307 bp, Glycine max
gaccggcttgaccgtggtattcaagaatctcagaaggtgttaatcgaaactcagtccgagatcatcatgctcgaggatagaaccgagtttgggcacgaggaccctcacgaattcgacacgtaccttgaagaacaactgggggattacctagttccccaggatgataaggttattgaaaagacaatcgcagaggtgctaccaaagagagttatatgtgtttggaagccaagataatcgccacagcctatagcatggagtcctctgaggagtgcatggtactcgagggattactggatcaacactgatt

SEQ ID NO: 39688 - DNA, 397 bp, Glycine max
tcggccacgcgttcggccaagccttcctaccggttgtaagaaaactacaaaaaggggatcggcttttggtattaattcctccggattgggtcaaaaacatctctcgaatgagttattcaactgcagggatgaatcgaaaaatcactctctataggttctacctcctctgtgttatgaagagaatgaatctctttatcgaaggatcataaaagaatgggtccagacctcttgcgggaataatttggaagatccaaaacctacaatagctgtatctactagcaacaacatactggaggcagtcaatcaatatagattgatccgaaatctgattcaaatccaatatatcacccatggttacataagaaatgtttcgaatcgattcaattgcaacttcgaa

SEQ ID NO: 39689 - DNA, 397 bp, Glycine max
  unsure (1)..(397): unsure at all n locations
cggtccggaattcccgggtcgacccacgccgtcctaccggttgcaaaaaaccaccaaaggggggtggcaaaaaccgaccccaaaactaaacctaccttcctttaaacctttcactctttttttcttttccaatcaaaggaataatatttcttaaaaatattcccgaaccattgctcaacccaatcctatgatttttggtggtggaattctaggtaaccttgtctccttctgttgctttctagcaccagtaccaacattctatcgagtttgtaagaagaaaaccacggaaggtttccaatcacttccttacgtggctgcactcttcacttcaatgctttggatattntatgcttacataaagacgggcgaaatacttctcatcaccattaacgcattc

SEQ ID NO: 39690 - DNA, 335 bp, Glycine max
ggttgtagatagcgaaccccatactagaggtggcttccgtacaaacgttccagtcttctctgctttaacaatcaagggaataataattattagagatcttccgaaaccatggctcacgccaatactatgatttttgttgaaggaataataggtaaccttgtctccttctgtcgctttatagcaccaataccaacattctatcgagttcagcagaagaataccacggaaggtttccaatcacttacttacgtggatgcactcttcactataatgcgctggatatggaatgcttacatacaaactggcgaaatagttagtatgaccataacacattc

SEQ ID NO: 39691 - DNA, 412 bp, Glycine max
caatttgggttttattggatcatggagatgagatatctaaagataaatgcggtcttaattagtgattattaggagtcagaccacaggaaggcgaaattgaaggcagtgtcgtcaaattaagttggttggctcaccatttttctcacatgaatattgatgaggataacgttgagcaattacaaaggtttacccgtgcgtggatccttcgattcataggaggtgtcctctttattaacaaaagtagtagcagagtttccttaaggtacctacaatttttacgtgactttgaacagtgcagcacgtatgcgtggggacctgccgtgcttgcgtatttatatagaaagatgtatgttagccacgacgaaagtttcgcatatgactcatcccaatcgccatattcaattgcaatgac

SEQ ID NO: 39692 - DNA, 289 bp, Glycine max
aaaacgacagaactggagagcatccttcacaacaggagcaagctgatcccaacctattctcttatcatgtttcacacttgaacactagcgaggaccattagatacattatgctctggggcggagtgtccaccgattataccgcgcgggagtttgtcaaacaaagcgcttagccaggggagtgggttataaatacgaaagaagaggtcacgccctatgaactcacttgtcttagcaaggcctaccatttttcagagtcccctgctagacttcctatgattcaacactttg

SEQ ID NO: 39693 - DNA, 436 bp, Glycine max
gacgacagaaggggatgaaagatcaatttgcaaattacgttgtacaaaaggtgctggaaacttgtgatgatcaacagcgcgagctgattctttcccgaattaaggttcatttgaatgcattgaaaaagtacacctatggaaagcacattgtctctcgtgtagaaaaacttgttgcagctggaggtacatgttccgtgtcattcctaaatttgtagtctgacacatttttatttttcaccatccatgtgtgcattaagagcaatttcattgatagcatgctcctacatgataaatgcattacacgagatacatgcatggaaaccaagccattctgctgcttctaattgtgttatgatatgcacatttaatttcaagcttatggttatcatatgtgaagtatttatgatatataagtttatgaaccggtcatgtattt

SEQ ID NO: 39694 - DNA, 169 bp, Glycine max
gtgagactgctgatctaaataactggtgggcggtttattaaaatgaatgtcctttgaaatattcgttgctacaatttttgtagcatggcaatgccatgcgtacgatatgttccctctccgatgaacactgtatattgtgcccttacttcttatgttgaaatcgcaagat

SEQ ID NO: 39695 - DNA, 322 bp, Glycine max
  unsure (1)..(322): unsure at all n locations
atatttctttcttatgctcttaaacttttcattatgcaagatgaatattttgaggttgataattctgcaatcaaacatgatgggttctttgtaaatagggggaaattggaacgcatgtaagtttttctgttttaaaaaatctactttgaatattacattttgttcttttcaaaccacacatgtttaaagcaaatcatagaaaggtttctttgaaacttattttatttgttgatcccttttcatttctgagggtggtctcttgntatcattttattgtatttgctgttaaataacatctttttagctggctcaaattattcat

SEQ ID NO: 39696 - DNA, 297 bp, Glycine max
  unsure (1)..(297): unsure at all n locations
ttaatgttttatcaaaaacaaaacacaagccgggggaaggggatataaaaagggaaacaaccagcataacgncagggaccagccacaagatgggggagaccttccatgtgggagggcacattaaggaggaagagcataatggtgagcaccatgctggagaatacaaaggggagcaccatggtgaacacaagtatgagtacaaaggagagcatcattggtgaacacatagctggagagtaccttggtgagcacaagccacagcacaaagaggggtacctaagacaaagtcaaggacaa

SEQ ID NO: 39697 - DNA, 411 bp, Glycine max
  unsure (1)..(411): unsure at all n locations
aattcgagcggccgctacanannggactttttattttttgttnganggatttaattgagagaattatggaaaacgataccaaattgggaaatattaaccaccactgtcttcattttttagtatccataaaacaaagatcgaaaggatactacccctcatgctcaggcatattgaacaagaaaagaaggggaaaatgaagtgttatcgcattttatgaacaattaggagtctcaattttgtttcagagtgaaacttgtgtcatctttgctcaattagtatcggtatctaacagtaacatgggccattatatacgtgacaggcatcctttctctattacctcagcccctggcgatgactacctgagtgttcacattcggcaactgggtgattggacacaggaacttaaaagag

SEQ ID NO: 39698 - DNA, 402 bp, Glycine max
gcgggtgtgcgaaaccagtatgggtttctaagcggaaccaatgaatggggccgctatcaaaggtcttctcaggagcgatctaaatttcttctaaacaccctaagaggaacgctagagtatcctaatattcgaaaataaactttactttctccgggcattacgacgatgcatataatatggccaattgggagaggattacctatgtacgcatttttatgcgcactgggttagccatttattatataacaaagggtcactcgcactttagataacctggcgcttacccatatgtgtatatacggaataaggatttcctatgtactctcgatggactatttgattcttaccaccatgacgagcattaatgcgttaatgacagaattcgtgtgactgctagacatt

SEQ ID NO: 39699 - DNA, 409 bp, Glycine max
gcgagagacgacagagggggcactttacacttcttcaagacgacaggccacggcttcgccaaaccccttcctctccactctctctcaaaccttcgatgcccatttcgcccctgccccgaagtcaacgtctcttgaactcagggcgaggaggcacgttggggtgcgagtttcgaacgcgctgatcgaaccagatggagggaagctcgcggagcttgtggtgacggattttgagagggatttgaagaagggcgaggctctttcattgccgacgatcaagctctcaaggattgaccttgagtgggttcatgtactcagcgaaggatgggccacacccctgaaaggcttcatgagagaagccgagttcctacaaacgcttcatttcaactcgccccgactcgatgatgggtcg

SEQ ID NO: 39700 - DNA, 417 bp, Glycine max
  unsure (1)..(417): unsure at all n locations
gaacacagacgggggttacatatttattctatgcgtggaacaggcagtaagagcgttgtggaagcagagaccgagatacttaaaaatggtcacttcgaagcgaactgctctgtactcaactggatggaaaagctcccacgaagcagtttgaaaccaaggatgtacagtggtactgcaccaacaactgatggggtgaacaagcctcatcgttattggcctagatctgttgctctttgtgagattcagaaagagcagaggagtactgtgctcttaatcaggaagctatctttccagaggatgattcgtgtaattgcgcacaatatgaagactgatctgcgttttcagagtcatgccgtgcttgcattgcaaagaagctgntgaggcttaccttggtgagctctttgaggacactaactt

SEQ ID NO: 39701 - DNA, 356 bp, Glycine max
  unsure (1)..(356): unsure at all n locations
gtttgnggatgatcaaagcaaacgctaaagcgaagacgtggcattcggtctgaagctgatgctaacctcatgaatcaattgacttggaggcttggacttacaagacgagagacgcagaatgctatgacgtctatggcttacatgaagagcaggtggtgatggttacaaagcccggtactgccgtgcttgttctttatcacacaaccacccaaactgaagaaacgatgttgctgtctgaaaattatgatatagactattacatgagaacatattttatgaagcaaactgggggtcatgcttgaaagacaattgtgctgcttaatgctctatggtacttgacttgtgaagacaagctc

SEQ ID NO: 39702 - DNA, 258 bp, Glycine max
tcgaaaccttaagtttccgatcaggtctgagcaatctggttggtagaacctttggtcttagagagtcaagttttatgtctgaattagacgatcaaattcctactgccttcgatccttttgctgaagcaaatgctgatgactccggtgctgggtcaaaagaatatgtgcatattctcgtacagcaacgaaatggaaggaaaagcctgacaaccgttcatggattgaaaaaagaattcaactataacacgatacttaaag

SEQ ID NO: 39703 - DNA, 396 bp, Glycine max
  unsure (1)..(396): unsure at all n locations
gggtctcaagccaacatttccaatcaagggatccgtatagttctccaactagctaatacantgaaatatatcaacaaattaaaatcgaaccccaccaatccaaagctatcataccctagcatgttcacgagctttctttcgattggtttgtgcagctgctaattattaaaatgacgagaacgaggataaagataaagaaaatcgacaacataacggcgaggcaggtaacattttctaagaggaggcgagggctattcaagaaagctgaagagctttctgtgctatgcgatgctgacgttgatctcattgatttctcatctaccgagaagctctttgattatagcagctccaggtacgtgtacggacgacgactggtatattataacacaccactct

SEQ ID NO: 39704 - DNA, 377 bp, Glycine max
aatagcgaccaatttggctatgacttcgaacccgacgccaacgttagcgaccacgaactcgacatttccaagttgggttcaccttcgcccctcgtccactccctccaaaaacgtgggatcatcagccttttccccattcagagagctgtgttggtgcctgcactagaaggtaaagatatcattgctcgtgcaaagacagggactggcaagactttagcattcggaattccaattcttaaaggtctcactaatgatgatgaacaaagtcctcacaggcggtctgggaggcttcctaaagcgttggtccttgcacctactagggagttagcaaagcaagttgagaaagagatacaagaatctgcaccttacctcaaaac

SEQ ID NO: 39705 - DNA, 314 bp, Glycine max
gattgtatatcatgtacaatttcaaactctctctgggtgtctctctctctctagacttagattttgtgaatggctgaagtgtaacacggacaagtcatttgcgtccacaccgactatgagtggaagctccacctccagaacgcaaaacacttcaaaaaactgattgaggtgcattttactgctctctgccgtggtccatgccaccttatcgccccacatcttgcagacactgcaaaaaaatctcctcaatagatcttcctcaaagtggatctctatgaactgaggcctgatgctgaggaatatctcattgaggc

SEQ ID NO: 39706 - DNA, 375 bp, Glycine max
gatgtttcaagggataattaagggtgtagaagagtgattttattggacagtggggcttcccataatttcatttcacaaaagctagttcaccacatggattggccaattgaacagacccaaaaaatgaaagtcaagttagggaatggggttcaaatagaagcacaggggaggtgtagggagctagagatgtacattggcagtcacaaattaaggccaaatcttcaactgtttgaattaagaagaattgatgtggtgttaggcatggaatggttgaaaacattgggagataccattattaattggaaataacatacactgagtttttgggaaaaaaggaagatgggttactcttggcaataaaggagggtgcaaaaa

SEQ ID NO: 39707 - DNA, 392 bp, Glycine max
gacttgtggtagttgagtgacacagaaattaagaggaagctacataggggtgggcttttctcaccttccttctctcccttcagacaagggacgaaaaatcagagagagagagagagagagagagagaaattccaaaaccatgtcgtcccacagtcatctaagtttcgcctttggggttctaggtaacatcgcctccttcgtgtgctttctggcaccactaccgacattttatagagtttgtaagaagaaatcaaccgaagggttccaatcaattccatatgtggctgcactcttcagtgcaatgctttggatcttttatgcctatgtgaagacccgagaaatgcttctttataccatcaatgcattcggttgcgtgattgaaaccaattacc

SEQ ID NO: 39708 - DNA, 387 bp, Glycine max
catgccaaatatagaggggagagaactggtgcggatattgcttgcagcaggagctgatccatctgctcaagattcccagaatgggaggacagctttgcatacagcagctatgactaatgacgtggacttggttaaggttattttaggtgctggggttgatgtgaacattcgcaatgtgcacaacagtatacctcttcacttggccttagctaggggtgcaaaggcatgtgttggactgcttcttgatgctggagcagattataattcgaaggatgatgatggtgacaatgcttttcatatagcagcagagacagcaaaaatgattcgtgaaaatcttgactggcttattgttatgctaatgaagcctgatgctgacattgaagttag

SEQ ID NO: 39709 - DNA, 373 bp, Glycine max
  unsure (1)..(373): unsure at all n locations
gttccttgaatctttggtcgtttatttaaatagtttaatatattttgtaaaattttcattttattatttgttccttcctcccttcagtgtggggatcaagagtgttgtggatgagaatgaaagaaaatcatcgggtggtcatcatggtgctgcttgtcctgcgtgtgagatggctgttgtttggatgcagaaccagctgagccgaaatcagacacaagatcagatactaagttacatcaaccagctttgcgataaaatgcctagcccgatgggagaatcagctgttgactgtgggaatatctcttcattacctgtagtgtcctttactattggtggaagaactnttgagcttagcccagaggagtacatactc

SEQ ID NO: 39710 - DNA, 295 bp, Glycine max
tgtttgtttctcataaccacaggggaagaacacaaaatgatctatcaacatgcaacctcactcaccacacaccttcatttgcattccaagatatggtccttgaccatgattccgaccgcacctacgagaagagaaaggaaggcgaaagattcacgctagccacatgtgcgaaggccacgtataagaagcaagggagtgtgcgcgacacaactaataggggtggggaccaagatagactagtatcactaatgaacgtggaacatgcaaggccgaagcaaataacgtgctaacatca

SEQ ID NO: 39711 - DNA, 349 bp, Glycine max
gacggtttgcaattagcactgatttttttcacactgccggtgcaacactggcttcagagaagaaactttcgaacccaatgagggggataaaagtgctaaagctcgatctgaatatctctgatgaagagagtggagatcgcctaaccagagccgccaaggagccggaacatacttgatggccaaacgcacacagatttccaaagcaagggacactgatcgatcctttgggattagaagaaatgaaaagattgcatgctatgtcactgacagaggtgacatggcgatgcaactttataagaatgactcgaatgctaaagaatatgaacttatcagaaagaattacaatgat

SEQ ID NO: 39712 - DNA, 381 bp, Glycine max
  unsure (1)..(381): unsure at all n locations
acacataaggggttctagtgtggattgttgtgtgtaactcgtcttcttcttttgtgtctggtttgtgttgtttttctctacctgaaaatgtcttgctgcggggaactgtggttgcggaagctcctgcaagtgcggaacggctgcggaggctgcaagatgtacccagacttgagctacactgagtcaaccaccaccgaaccttgtcatgggagtncacctgttaaggctcaatttgagggtgctgaaatgggtgtgcccgctgagaacgatggctgcaaatgtggaccaaactgctcctgcacccctgacttgcagtgaggtgttgggagacaagcttaaacagagtagcccttattaggaataatgataaactattatgtg

SEQ ID NO: 39713 - DNA, 416 bp, Glycine max
atcccctatctcccacttcacacctcggaacgcaccgttcttatagagagaggcgctttcacatcttcttaggctggggagaggaaatgttcccattttttaggatactccggggaacagatatccagtggagatgacggggtggggcctgtagctcagaggattagagcacgtggctacgaaccgcggtgtcgggggttcgaatccctcctcgcccacaaccggccaaaaaagggaaggatttttccctctgggggtaggaaaatcatgatcgggctagcggacccaaagctatggaacttgtgagtactttgtagaaatggaatggccttaccttactgttttctgtttattaaaaaaaagattcataaatcgtggatattattaaataaatccagtatgtcctaatcttttaa

SEQ ID NO: 39714 - DNA, 373 bp, Glycine max
aggggtttcttataaaatggtaaaacctgggaatcttcttcaacaaaattctggtactctttggtcggcccccagaggctattataacttatatgacttggccattataaaggcaaagtgacatttatctgtgggcgtgctggtgtttgtgctcttggtgctgtgatagctaagcatactggtgatgaaagattacttgactattacctgaagcaattcaaagagaacagattgcgatacctcgcgagtctccctatgagctattgtatggcagagcaagttacttatgggcttgttcattcttaaacaagcatattggtaacaacacaatacctactacccacatgagaatcaatgtggatgaagtattatg

SEQ ID NO: 39715 - DNA, 402 bp, Glycine max
  unsure (1)..(402): unsure at all n locations
cggaattcccgggtcgacccacgcgntccgggagaagaccaccgaagggggccaccatccctttctttcatggcctaatggtaaccatggccttcttttttctcaatccatttcttcctcctcctttcaatagcccttttctcagtttgttgtttagcagtatctcaagctcccaccaccaaatcacccccctatatctttcccattaagaaagaccccgcaacaaatttgtactacacttcagttggcattggaactcctaggcacaactntgatttagtcattgatctttctggtgaaaacttatggtacgattgtgacactcattacaactcatcatcctacagacctatagcttgtggctcaaagcaatgccccgaaattggatgtgttggttgcaat

SEQ ID NO: 39716 - DNA, 347 bp, Glycine max
ttatggtatcgggaaatggctgatgtgcttccaaagagaaggatactgatgcggtatgaaaagtcgcatggggaccaggaaacggcggcgtacacgaccacacccgaccataacattcagtcaacggcgcaaagcatgattcaggcccttcgcgccagcgaacaccttcgtcacatgggtgcagttctacatatccccctatgctcgcatctaatcgacactccgggagctcacacggtatttcttgaagaagaggatcatcggcgtgagggaagagtcgcgagttcgaaaacgagatatcgagaactttcaggtgggagagaggatgaaggttataaaggaaatgc

SEQ ID NO: 39717 - DNA, 249 bp, Glycine max
taccggtccggaattccggggtcgaccaagccgtccgtacggtggcaaaagcaccacaaagggtttctctagaggatggtagcacgtgggcgcggctaaagcttgaggattagttggtcaaccgggggaagcagttgatctatactctgacagaggatgctgcaactagtaccggagctccttgctggtctggaccaaacagattccctcgtccactacaattctaagactcagatctggagcatctaa

SEQ ID NO: 39718 - DNA, 349 bp, Glycine max
tccggtcgacccacccttccgccggttgcaaaagacaacagaggggttgtgttttcattaacttatacaaattctcggcgttgggtcgcgtccttgtgttaatcgtgttgacgttgaaggaaatttaagtgaagagagaatgatgatgaagtctgctatgtgtgcattggtgcttgtggcactggttgtggttgtagtgctgtccatggctgatgctgcggtgacttgcatcccatcacagttgactccttgtcttgcgcgcgttaattcaggttctgcaccttccagtgcttgttgcctgaagctgaaagagcaaaagccatgcttccgtggctacctcaaaaaccct

SEQ ID NO: 39719 - DNA, 289 bp, Glycine max
gcgagaaaacaccacattgggtcttacttacaaacaaactaccagctgtacttgctcattttgaaagatacaagtgcttcaatacaaacaaaggctgttactcaggaagatgtgaacactttcgggcattgtaggaagcccatttgtgtgcacggtccagatcgcccttaagttgaagggagttgagtacaaatttttggaagaaaactggggccacaagagagattcgctgcttaaatacaaccctggccacaagatagttccagtgtttggtcacaatgagcaaacc

SEQ ID NO: 39720 - DNA, 281 bp, Glycine max
  unsure (1)..(281): unsure at all n locations
gttattgttgtgactcgttcttcttcctcgntatcttcttcttttgtcgtctgcgtgtgtggtttttctctcacctgaaaatgtctcgctgcggtggtaactgtggttgctgacacgccttcaagtaccgcctcggctggcgacgctgcatgatgtacccacactttatctacaccgtgtcaaccaccaccgagaccttggtcatgggagtggcaccaggtaaggctcccttctagagcgctgaaatgggtgttcccgctgagaacgacggctgcaaatgt

SEQ ID NO: 39721 - DNA, 388 bp, Glycine max
ttatatttgagattttttgcttatctgactctttttaatatttcaatgttgggattagttactagttcgaatttgatacaaatttatgttttttgggaattggttggaatgtgttcttatttattaataggcttttggttcacacgtcctattgcggcaaatgcttgtcaaaaagcatttgtaactaatcgtgtcggggattttggtttattattgggaattttaggtctttattggataacgggtagtttggaatttcgggatttgtttcaaataataaataacttgatttataaaaatgaagttaatattttttttcttactttggttgccctcttgctattttgtggctcagtcgctaaatccgcccaatttcctcttcatgtat

SEQ ID NO: 39722 - DNA, 290 bp, Glycine max
ttggggtattataaaaacatgttgaagcaacggggtgctcgtgaggtgtcgttgctaacttgccaggcttttaaatgcacgtgcgacgccctggcaggagtgagaatgacttccgacggagcaacgtcggcggcgtcgcatctgaggaaaccatctgggaaggagaaactgaacaacgcgttgagacagaggatagggagatccatcgtacccaagatatactacggtcttagggcgcatgggaactactatttgcccaaacactgctacaacaatgatgtcttgaatgc

SEQ ID NO: 39723 - DNA, 374 bp, Glycine max
gacattgtgtttagtggaggacacatgaatagagctaggcaataacattcaggggctccgaaaagggggagaatggaggattgccttgagggtccacacttagccaatcatgaaacacagctccaaactcgaaggtggaggacacatgaacagcgctaggtaataacattcatggggctccgaaaaagggggagaatggaggattgccttgagggtccgcacttaggcaatcatgaaacatagctccaaactcgaaggtggaggacacatgaacagcgttcggcaataacattcatggggctccgaaaaaagggggttggagagacctaacggtgcaccgggtttttccacctgaatggcaaacatgctttttg

SEQ ID NO: 39724 - DNA, 405 bp, Glycine max
gagcaaagagtgaagagcgaacagaatggctcccaagggtataatctttatggctgtgttatgcttttcagcactgtcactgaatctatgacttgcagaggataatggactctttatgaacttctacaaggaatcatgccctcatgctgaagacatcatcaaagaacatgtcaagcttctctacaagcgccacaagaacactgctttctcctggctcagaaacatcttccatgactgtgctgctcagagatgcgatgcttcactgttgctggactccacaagaaggagcttgtctgataaggaaacagatagaagctttgggttgagaaatttcatgtacattgagaccatcaaagaagctttggaaagggaatgcccaggagttggttcctgtgctgatattct

SEQ ID NO: 39725 - DNA, 436 bp, Glycine max
aaacaccacagagggggtttcgggtttgggcccagaaaatccctccttggaatctgccttaaaaagtttggggtaaagtggccattgtcaatcttcgacctgaccctgaaccagatgaagtatatccacaaataactttgcttcctgaagcaaatcaaagtgaggtgacaagccctgatgatcccctgcctgaatctccaaggtgtacagtccattcattttgcaagacactcactgcttctgacactagcactcatggaggtttctctgttcttcgaagacatgcagatgattgtttgccaccactggatatgactcagcagcccccatggcaagaattagttgcaactgatctgcatgggaatgaatggcattttagacatatttttcgagggcaacccaggcgccacttactgaccacttgggtgagtgtctt

SEQ ID NO: 39726 - DNA, 398 bp, Glycine max
gtccgcccgcccgtccgaacggatccaagaggacaacataaggggtacccaaagtcattgaaacggtgataacattttaaggagcggtggttatgactctgtacaaaggccctgccttccaaatcataaagggtggaggagccatcagcaaccatagcaactctagcagtactagtaccaccgaaccctctgaccagcactggatagttggaactgtttatctcatatcaagttgtgctagttgggctggcttcttcattttgcaatcattcactttgaagaagtacccggcagagctctcactgacagctcggatttgtgtgatgggtattattgaaggttcaatcgcatcccttatatttgaacgagacttcagtgtatgggccataggctgggac

SEQ ID NO: 39727 - DNA, 218 bp, Glycine max
gattgagagtggcgtcattgagcttgatgataagcagagtgaaagcaagtgtgctcttgtgtatggcaaaataaataacccccttgtgcccctgcccctggttggcctaactggcctaactggggttaaccacttccgggatgttaaaggccagaagctgttttttttcgtaaccacatttttcggtttaaccaaggttaattaaaaggttttggttt

SEQ ID NO: 39728 - DNA, 211 bp, Glycine max
gacacacaactggtttcaaagaaacaggctcgggttggattacctctgggactggtgttaatggtcactcatgtcaaggcatatcggtttggaagatggaccaatgcacatgccaccttatatcgacgtagagatccttctgtcacaatggatggagcatgtcattatggaaatctacatagccaacgatatggaactgatacatcagaac

SEQ ID NO: 39729 - DNA, 384 bp, Glycine max
  unsure (1)..(384): unsure at all n locations
accgggacagaatggccgggtcgacccatgcgtacggccaggcgtncgaacacgtgtgagaaggactacaaaagggctggatacaaacaacagagggatgattaacattgatggattgcgattcaggttgcataaacttggtcattaagttcccgaattagatgtacaaactcttatggaagctggtgatgtaaatggtgatgggcacctacattatggaaagtttgtaaccatttctgctcatctaagaaagatgggaaatgattagcatgttcgcaaaacctttcaattttttgatcactacaaaagttaggatattgtgaacgaggagctgcttagcgacttatctgatgatcttgaccccaacagcgattaagttatcag

SEQ ID NO: 39730 - DNA, 240 bp, Glycine max
cgatgcacctcgtgacttaacatacttgcactaggaaatgtatttccagataattttcagagattcaaatcttagataatctattgcatgaacagttgaatgctaaactatcagactttgggttatcaaggttgggaccattttattgactgactcatgtcttaccagacggtgtatgaacaatgagatattcagctactgaatatgttcacactggacgtctaacattaaagaatgatg

SEQ ID NO: 39731 - DNA, 305 bp, Glycine max
aaaaacaccacaaaggggttttgaaattacatttattgtcccacacatacggtgcttttctgtgaagtggagggcccaaaactttttgcccccaccaaatatttcctttatatttataacagattccattttgaaaatccaactgttaggcctggtctctgaaccacattgccaaagtttggtcctgctgttgatgaataaaagccccgcatattcatactgctaaggcggtgtctttttgatagtgatgatgaggttcgagacagagcaacgctttatctgaacacacttggaggtgatggttc

SEQ ID NO: 39732 - DNA, 391 bp, Glycine max
ccagtcgtacgtacagatccaagaggcctccttaagggggagcaggattgaacagcgatgagactggctcccaacgctgcaatcttttagactgagctatgctaatcaccactgcaactgattctgtgtattgctgatgataatgtacttggtatgaactcttacgtggactcatgctctcatgctgaacacatcatcgaagaacatgtcaatcttgtgtacaaacgctacaagaacactgctctctcccggatcaaactcatcatgcatgactgggctaatcagagttgtgatgctgcactgtggctggactccacacgaaggagctcttatgagaatgatacacatagactctttgatatgagagattctatgtacattgagaccatca

SEQ ID NO: 39733 - DNA, 397 bp, Glycine max
cccacgcgtccgactatactctaggaagcatggacaccaccgccatggcatccaaggtgctggcattgttcgctatgttagctgataatacaatcaccactattactacatatataataatgcgactagtgctatggcatgcttattcttgctatgaacgtcatgcaaccattactctatgattcatcattctcctgttgccttgagttcatgatgggcaatgtgaacgtgactactgaagaacaagaagtttctgcaagtgcaagggcaaccgatgagaacgccatgcctcagtatactgccacctctactactgctatgcattatcccctcatattcgctgctcaggttcctgtggttccgctacatagacctgatgagatgcatgttccaagtt

SEQ ID NO: 39734 - DNA, 300 bp, Glycine max
gacactgttgaagtggatgctataacacaccgaatgacatgtaaaacaggggtagtgaatataccatatggtggtaccaaaggagggataggctgttacccagcagaattaacaatatctgaattagacagacttactagagattttacactgactaatcacgatcagattggttctcacacagatgttccagcacctgatatgtgaacaggaccacagaccatgtcatgggatactatatcaattttccaaatttctacgttacttttctgcagtagtttactggaaaacctttatata

SEQ ID NO: 39735 - DNA, 386 bp, Glycine max
acagatgatgggagtgtacacacagaggaattgcagcgatgggtcgagccatagtcgtgctgtatatattaccgaacaagatcaatcgtcaagtatccttctcaaagcgcataaatggtttgctcaataaagctctcgagctatctgttctatgcgatgctgaaatcgctctcgtcatcttctccagccgtggcaagctttttcagtatagtagctctgacattaacagaatcattgagaagtatcgtcaatgctgcttcaacatgtctcatactggcgatgtatctgaacatcaatcttaacatgagctattggtattaagagtcaagcatgagtcactccatcggactcataggaatcttctggtagaagaactagagccactt

SEQ ID NO: 39736 - DNA, 417 bp, Glycine max
gcagtgagcgagagtgaacagcgaacagaatggctcccaggggtttaatctttttggctgtgttatgcttctcagcactgtcactgagtcgttgtcttgctgaggataatggacttgttatgaacttctacaaggaatcatgccctcatgctgaagacatcatcaaagaacatgtcaagcttctgtacaagcgccacatgaacactgctttctcctggctcagaaacatcttccatgactgtgctgatcagagttgtgatgcttcactgttgctggactccacatgaaagagcttgtctgagaaggaaacagatcgaagctttgagttgagaaatttcaggtacattgagaccatcatagacgctttggagagggaatgcccattagttgtatcctgtgctgatatcctagttctct

SEQ ID NO: 39737 - DNA, 423 bp, Glycine max
ggtggtggtggtgccaatattgggactggcaccaccaattattggaacctcaatatgtgccaagaagtgaataatcctgcaaagaagggtgtgatcaacgtggctgatcatgatgatgagaagggtgtgatggagagtgaggaaaacggggtctatgggcctgactttagggtgtgccaagattgtggcaacatgcgctaagaaagattgcgtctttagaagatgcatgacttgctgcatgggacgtgggtatgattgcaacactcacgtgaagagcacgtggatccgctacgttcgacgactctagcgcgatatcacggtggctctcggtggctgtgttagcggatatggtggtctgtagatgccaatatctgtgctggggtcatctcataatgccacttttcatagttacaactctaatgc

SEQ ID NO: 39738 - DNA, 416 bp, Glycine max
gacagccgtccgaacggatgcgaggacactgccgaagggggtggcgccgctcacataagggctctgcactctgtcttacggaaactattatattcgcttctctgctcaagcctcttcttctccagcactggcatctcataatgttggttatacacacatgctaccgacgagagaacttaaactagcttcagaatctttttcagatggaaagactagtactcaggaactgcacacggttactgaaaaccgtatgtcagccatatggaatcacatggctgatgctggaataaagtatattcctagctgcaacttctaaatttacgatcaaatactggacacaacaaccatgcacaggtcaattccatctagatataaccgtaacggtggtgacattggatttgatgaatacttctcaa

SEQ ID NO: 39739 - DNA, 294 bp, Glycine max
gtttgtataaattggattaaatccaggatcctgacagtttcactgttcccattcatgtgctttgtaattggttttattttaaacacaattgctatattctatggatctctatctgcaattcacttaggtactattgatgatgtctttgttatatgtgcttttatctctttccctttatcacttctagacacagctgttttaataaactcgaatgatgctctaatatatccatgctgttttaagaccatactttggttcataccttatattaattcatatctcacaccattttta

SEQ ID NO: 39740 - DNA, 391 bp, Glycine max
cggggcggcccaagccgtccgcccagccgtccgaccggttgcaagaggccacctgaggggggaggttatgggactggttgggagcttttacaaggaatcatgccctcaggctgaaaacatcatcaaggaacaagtcaggcttctctacaagcgccacaagaacactgctttctcctggctcaaaaacatcttccatgactgtgctgttcagagttgtgatgcttcactgttgctggactccacaagaaggagcttgtctgagaaggaaacagatagaagctttgggttgagaaatttcaggtacattgagaccatcaaagaggctctggaaagggaatgcccaggagttgtttcctgtgctgatatcctcgttctctctgccagagatggc

SEQ ID NO: 39741 - DNA, 430 bp, Glycine max
aaaaaacccggcccgacccacgcatccgcccacccctccgtacacctgcgagtttactacacaaagccccacaaattactttcgtgggctatataactaaaaacagccgcctcaaaattaaccttctttttttcttctctgctacaatttttttagcactacacagccatgcctacgatattttccctctccgaataaacactatctatggtaccctcactccctatgtgaaatgctcaaattttatacttgctttctaatcacacaacatctttttcttctataccattccttaacattttcatttaaacaacaaatcaatacctccactgctaacaatattcatctcactcctttataattaacctacactcttacttttaatccatataccttctattccattccaatgacacatttctttttcata

SEQ ID NO: 39742 - DNA, 297 bp, Glycine max
ttctaatcctaccctctgcgcttctcagagcgagccaattcttctccagcactgacatctcatattgttggttatacacacatgctacccactagacaccttaagttgctatggaatctttctgacacggaaagagtagcgctcaagagctgcacaaggctgctgaacaccttatgtcatccatatggaagcagatggctgatgctgtactaaagtatattcctaactgcaccatctctctttactatcaagtactggacacaacacccatgctcggggcaagtccatctagatata

SEQ ID NO: 39743 - DNA, 321 bp, Glycine max
  unsure (1)..(321): unsure at all n locations
cttgaacctgcagtcgtgtctccttccttctacaaacaaacttcaccttgcgccgaatggccacagatggtagaaaccgatatggatgccgaaactgtttcaaatgttgatccaccaaacgagactccaaacactgttcccatctattatcatttctcacactcacactctcctcttaatgagaggattatttcatacatgaccacaacatcatgtgctgcacacccgtggcacgaccttgagatagggcctgatgctccaacgatcttcaattgntcgaatgaaattgttaaaggcagcaaagtgaaatattaaccgtac

SEQ ID NO: 39744 - DNA, 467 bp, Glycine max
ccgccagactgctggaattaggcttaccgaggtcgcttccgaggtacttgagccctggcttgatgaggatcatctgcagcagcctgtggttgaagtcggacaccccgatggacttggccaatcctgcatctttacactactccatggcctcccatgtggcacagagatccactgtgtcaaatagtatttttccattttcatcttttgggatcacttactcacctggctttatagacactggaaaatgaataagatagaggtcaacatagtccaattgaagatttttcagtgacctttccaaggctggtcggaccaactctggtcgatgggaattgctccaaagctttgaagtgtagaatatgtcttctctcttcacactgccatctgcaatcttgcttcggatggccagtccaacctgctcctcattattgtaaacatgtgcagaatcaatatggtggaacccggct

SEQ ID NO: 39745 - DNA, 188 bp, Glycine max
taccgattctcaattcgcgggacgacccacgcctgcttacagatgacgacgacaacggaggggggcgattaattactagcaatgagcaatagggttggtttgttacctattccgttaggaactgctcattttttggttcatcatattcatgcatttaccatacatgttacaggattgatactcctcaa

SEQ ID NO: 39746 - DNA, 425 bp, Glycine max
ggacacagtgagagtgtgagataatggacgaaattttacgacgtctttctgcggtggccgagtatcgaagaaagttttacctttgtcaaataatccattacagaatccgagcagccaaaagggttttgcgggatgcaaagaaggaatatgcgacaactcagtccctgaggaggggtggccaactcgttactcttgttgaagggccttataatgatcacaatcaacgctttatagtaaaatcaagcagtggagcagatagacatatagttggcattcatagtaaggtggagaaggagaagctagttccaggcacaagagttagcctggataggactaccatgaccattatgagaattcttccgtcccaagttgacccttttgtgtataacatgattcatgaagaccctataaatgctaattactct

SEQ ID NO: 39747 - DNA, 360 bp, Glycine max
ggagcatgaatgaagagcgatcagaatggctcccaagggcttaatgtttttcgctgcgttatgcttgttatcactgccactgagtcggagccttgccgaagataccggactcggtatcaacctctacgatgaatcataccctcacgctgatgacattatctgcgaacacgtcaagcttctctacaagcgccacaataacactgatttctcctggctcataaacatcttacatgactgtgctgttcagagccgtgatactctactgatgctggactccacatgacagagcttgtctgagaacgaaacctatagaagctctcggctgagaaatttgaggttcattgagaccatcaaacaatc

SEQ ID NO: 39748 - DNA, 332 bp, Glycine max
tcatgtagaacgcaggtagcaattgcctaatcacacggtacatacaggaagtgattgtggagccatagctcatctgcattaggagcacggccaaaactttctggacatgcttgatggtatctctttatttgttcttctgcgatactcgagaccccagttctatagtggcactggatgcaatctacggcactttcttgtacattgattggggtatagatggctcctactggatatcctctgaatatgaaggggttgaatgaccgattgctaacatattgcacctttcacaccttgtcactcgtattctagcatatagagagcattccgcagat

SEQ ID NO: 39749 - DNA, 398 bp, Glycine max
cggacgcgtgggcagacgcgtgagaaaacacctaaggggtaattaaggtacatgaaaaggaagatactggggaggttgatgttctaacaaaaagggacaactattatggggatgacaggctactggatgctcatggtcaactttggctgcaaatgcaccacattattggtatgagccgcgggttcttaccatacgtaagctatgtgaccatcattatgactgaaaaggcctatgatcaagtatattctcattgaggctttggggatgatcgtgataacttgcaaggattaaatgatgaatgtgaagtcaaaactgcggtctaactatggatggttgggtgagcagaatataatggtatgattaaaagatgaatctgaaatcattacgtaccattcata

SEQ ID NO: 39750 - DNA, 451 bp, Glycine max
ggttctagtgtatgtgattgttgtgagtcgttcttcttcgtcgttatcttcttcttttgttgtttgtgtgtttgttctttctctcacctgaaaatgtcttgcttcggtggtaactgtggttgctgaagcgcctgcaagtgcggcaacggctgcggaagctgcaagatgtacccagacttgagctacaccgagttaaccaccaccgagaccttggtcatgggagtggcaccagttaaagctcaattctagagtgctgaaatgggtgttcccgctgagaacgaatgcttgaaatgtggagctaactggacctgcaacccctgcacttgcaagtgaagtgttcgagagctaaagctttaagcataaattgcccttagaaataatgattaaaactatatgtagcttcaaaacttcaaaattatgtaatatgtattatggtgcactctggtgtttt

SEQ ID NO: 39751 - DNA, 292 bp, Glycine max
gaagtaagaaagtaagaaagtaggaaagatgacaggtgggatgtttggaaggaaggggcaaaagataaaggggacagtggtgttgatgcctaagaatgtgttggacttcaacgccataaccttcgtcagataaggcagtgttaacgacaccgtctccgatttcttgggcatatgcttgtactcattatgtcatgcatttgatgctgttactgctttaactggtcaaagcatctgcttgcaacttatcatggctactcagactgatagtagcggataaggaaaaggtggaaac

SEQ ID NO: 39752 - DNA, 267 bp, Glycine max
ggcgcactcagagaggaagcttatagagagagagagagagagagtgaggagagcgtattggctcttcatcaagattggtatttatagggattccatgcacaagaggcgtgccactggtggcaaggacaaggcttggagattgaagagcaagtatcatctatgccttaaggcatgcaaacacctacttatcaagcatcaagtcactctagaggattcgtgtaacatatcactgcttctcatacaggtcattgaggctaaatactggct

SEQ ID NO: 39753 - DNA, 442 bp, Glycine max
ggtagacgactgcgaagtgcgaagttgttgaaaacgcgacaggggaaagcgcaaagcatggacaacaaaaccgatttttcaactcctcttctccccacaagctacggtcccgttgactctcaggggaaaggccataccggaccttcttcttcttcttcttctttttcttccataccaactactcttatactcactaccctcgtcgctgtttttggttcttacgtttttggctccgctattgggtattcatcacctactcaagctagaatcatgcgtgacctcaatctcggagtggcccagtactcaatttttggttcaatattgacgattggagcgatgattggtgccgttgtgagtggtagaatagcagattatgctggtcgtcgagttgccatgggattctcccaggttttctgcatcttgggatggcttgccataacat

SEQ ID NO: 39754 - DNA, 283 bp, Glycine max
ggcacacaacatttttagtgaaactgaaatggggacggagatcgtgaaatgggggagctttacgcgttggacttctatggaatcatatttgatatctgcattgaaagctttctttttgctatgaaggcttccaaagtgtgatggcctgatttgtttgatgtggtggatgtaacctcagaaaattgggttattgaccatatgcacactttgcgaccagttttggatacttggtatggacactgtttacttgttagactggtgcttgaaagcatagcaccaacca

SEQ ID NO: 39755 - DNA, 442 bp, Glycine max
  unsure (1)..(442): unsure at all n locations
gacacatacaaagcttcagagtctttactctctctgtctctctcgctctctctctctgcgtaaatcgcgtcttccaccaatcagcttgcttgcttgctacctgatctgtcaatactgcgtcgtttaggaccaatccctcaccctccaaggatatggcaatgccggagacaatccctcccactactcccagtgctcaagttgtcggcaatgcctttgtggagcaatattatcacattctgcatcaatccccagaattggtgcacagattttatcaggattcaagtttcttaaccagatcagacagcaatggtgtgatgacaactgttgcaactgtacaagatatccatgaaaagattatttcccttgaatatgaagattatacagcagaaataaaaactgcagacgctcangagtcacataanggaagtgtgatagttttagt

SEQ ID NO: 39756 - DNA, 423 bp, Glycine max
ggtggtaacgttgttgtgcgtgcggttcatcatgcacaattccacatcctgataactatacaacacaagcacgaacacccccttaccaaaacggcacttgtttattgtcgtttagatcccatggatcacacgcctgctgcgcaacgtcgtctcaaagccattcacgcccacctcaccgccaccgccgatgaatctccctcccacctccgatccaatcccaccgccggcgagttcttctccgctttgatctttacttctgggcagaacaagggtatagtgttgtactcccagagaaattacaaacaggaaagtggaacgtttacagatctgtacgatctcctctgcagctggtgaccaagtttactaatcatcctgaaattggtaccctgcacgataattttgtgcgctcagttgacacctttc

SEQ ID NO: 39757 - DNA, 319 bp, Glycine max
ggcagtagtttattgaaacagattccctttgacccgtgacattttaagtggtgactactagaccaatggaatggagtgcaaagaacatttcagttacctctgctaaatgggtcactactactctgtctctgctctccctgttttggctcttgtccctgcaccaagcaagagctgcaaagttccacaatgtgagtggcttgagagggaaaaagccagttgtagtaaatgggtgcaatttgttcctgggaagttgggtggttgacacgtcttatcctctctatgactcttcaacatgccccttcattgatcccgagtttga

SEQ ID NO: 39758 - DNA, 355 bp, Glycine max
gtacgaaaattgagcctgatgacccaaatgggtacataccggagaggttaattggtgaaatagagtttcatgaagtgcatttcgcgtaccctgctaggcctaatgtggccatctttgaaaatttctccatgaaaatagaggcgggaaaatctacggcaatggtgggacaaagtgggtccgggaaatcgacgatcattggtctaatagagaggttttatgatccacttaaagggatggtgacaatagatggcatggacataaaatcgtataacctaaagtcactaaggaagcacatagcactagtgagccaagagccaacgttgttcggtgggaccataagggagaacattgcata

SEQ ID NO: 39759 - DNA, 402 bp, Glycine max
  unsure (1)..(402): unsure at all n locations
ggagcaagagtgaagagcgaagagaatggctcccaagggtttaatctttttggctgtgttatgcttctcagcactgtcactgagtcgttgtcttgcggaggataatggacttgttatgaacttctacaaggaatcatgccctcaggctgaagacatcatcaaagaacaagtcaagcttctctacaagcgccacaagaacactgctttctcctggctcaaaaacatcttccatgactgtgctgttcaaagttgtgatgcttcactgttgctggactccacaagaaagagcttgtctgagaaggaaacggatagaactttgggttgaaaaatttcangtacattgagaccatcaaagagctttgaaagggaatgcccagagtttgttctggctgatatctcgtc

SEQ ID NO: 39760 - DNA, 248 bp, Glycine max
aggatagcattagcatcgtttgcgtttgctctgctgttccacagatttgcaagtgctggttttcatgggcactcgataaataacttggacaaggaagttggtcatgacagaggagctctcgttgagttctatgctccttggtgaggaacatgtaaactgctcgctccagaatatgctattatagcagattcctttgctggacgtttttggaccattaccgctgcttctgtcatttatgaactgggatt

SEQ ID NO: 39761 - DNA, 356 bp, Glycine max
  unsure (1)..(356): unsure at all n locations
gatgatagaggcggttccttcgtcgctgtgagaagaatttcgcagggtcttgatcgaagcaacacgtgccattcaagttccgctgagtttgtgacaggatcaacagcatggcttggcagaagtctgtcctgtgtctgtgcacagagaagagaaagtgatgcccgaccctcttttgatttaactccagcccangaagagtgcttgcagagactacaaagtcgcattgatattccatacgatggttctgtccctgagcaccaagatgccctaagagatttatggaatgcagcatttgccgaagaagactccatggtttgatttctgagcagtggaaggacatggggctgcaagggaag

SEQ ID NO: 39762 - DNA, 257 bp, Glycine max
  unsure (1)..(257): unsure at all n locations
ncacgcccgagtgccattactacgacatcctggaactgncctaccacggggacaccctcagcatgttcattgctgccccttatgaaaaagaagtgcctctttctggcctaaccaacattctgagtgcccagctcatcagccactgcaaaggcaacatgaccaggctgacccgcctgctggatctgcccaagttctccctggagactgaaatcgacctcacgaagcccctagagaacctgggaatgaccgacatgttc

SEQ ID NO: 39763 - DNA, 337 bp, Glycine max
tcggccagacacgtgcgcccttctgcagccgcccgccgcatccgccgccgcagcccccagcatgtcgggcccagacgtcgagacgccgtccgccatccagatctgccggatcatgcggccagatgatgccaacgtggccggcaatgtccacggggggaccatcctgaagatgatcgaggaggcaggcgccatcatcagcacccggcattgcaacagccagaacggggagcgctgtgtggccgccctggctcgtgtcgagcgcaccgacttcctgtctcccatgtgcatcggtgaggtggcgcatgtcaacgcggagatcacctacaccttcaagcac

SEQ ID NO: 39764 - DNA, 203 bp, Glycine max
tcggccaccgagggcgcacgcgtgagacttcttcgccgcagacgccgccgcgatgcgctacgtcgcctcctacctgctggctgccctagggggcaactccttccccagcgccaaggacatcaagaagatcttggacagcgtgggtatcgaggcggacgacgaccggctcaacaaggttatcagtgagctgaatggaaaaaaca

SEQ ID NO: 39765 - DNA, 325 bp, Glycine max
cggagccgcggggttcttgacggatctcgccatgatccgctttatcctgatccataaccgggcaggtataacgtcgccggactagtggtacacgcgctttgatgatgatgagaaacacaggctgatcgatgaggtgcatgccttgatcacggtccgagacgccaaacacaccaactttgcggagttccggaactttaaaatcatttaccgccgctatgctggcctctacttctgcatctgtgtagatgtcaatgtcaacaacctggcttacctggaagccattcacaactatatggaggtcttaaccgaatatttccacaatgtc

SEQ ID NO: 39766 - DNA, 359 bp, Glycine max
atcaatcccagggaatgatgagagctgcagagatgtgttacagaaagagtctacaattggcatcccaacggggcagttggagtgggaagctctcaagtctgttgagactagcactacttgcattaaaagtctgtatggctaacatttccaatgatcactggccatctttggttcaagaggctacaactgaggccttgaagctttgcttttgtccactggctgttcttttacaagctttgttacaattcaaacgcaaaatgggggcaagagagacacggcgtcttttggaaagagtggtatatcagcctgggtatcccaaatctattgcatcaactgcacgttggtacctactgaaacac

SEQ ID NO: 39767 - DNA, 287 bp, Glycine max
ctcaaggatgaggttttgaagattatgccagtgcataagcagacccgtgccggccagcgcaccaggttcaaggcatttgttgctatcggggactacaatggccacgtctgtctgtgcgttaagtgctccaaggaggtggccacacgtcatactgggggccatcaatcctggccaagctctgcatcgtcctcaggcgcagaggctactgttggaacaagatcgtcaagctttacactgtcccttgcaaggtgacaggccgatggggctctgtgctagtacgcctcatt

SEQ ID NO: 39768 - DNA, 334 bp, Glycine max
ggatggtaggattaagttgctgagtagttgtgtaatcaagattttatgtaacatttgtaaagggaaaattagcacttttgtggttcttaagggaaaagaaacagaccttgtggagattataatttccttggtttctgttaccactgttagagggagttgcatcatttaacatatagtaggatagtttaagtgtagggaggacaattattgtctgaagctaaaatgggttatttataggactgatggaaatgatttcatctctgccatctctaaagcacttttcattgaacatgttagcctatgatacgtacagtaaattaacaatgatagcagc

SEQ ID NO: 39769 - DNA, 413 bp, Glycine max
ggagcaagagtgaagagcgaaaagaatggctcccgagggttgaatctttgtggctgtgttatgcttataagcactgtcactgagtcgctgtcttgcggaggataatggacttgttatgaacttctacaaggaatcatgccctcaggctgaagacatcatcaaagaacaagtcaagcttctctacaagcgccacaagaacactgctttctcctggctcacaaacatcttccatgactgcgctgttcagagttgagatgcttcactgctgctggactccacaagaaggagcttgtctgagaaggaaacagatagatgctgtgggttgagaaatttcaagttcattgagaccatcaaagaagctttggaaagggaatgcccacgagttgtttgctgcgctgatatcctcgatctct

SEQ ID NO: 39770 - DNA, 317 bp, Glycine max
  unsure (1)..(317): unsure at all n locations
ggcggcgaacgcggagagcacgccatgaaggcctcgggcacgctacgagagtacaaggtagtgggtcgctgcctgcccacccncaaatgccacacgccgnccctctaccgcatgcgaatctttgcgcctaatcatgtcgtcgccaagtcccgcttctggtactttgtatctcagttaaagaagatgaagaagtcttcaggggagattgtctactgtgggcaggtgtttgagaagtcccccctgcgggtgaagaacttcgggatctggctgcgctatgactcccggagcggcacccacaacatgtaccgggaataccg

SEQ ID NO: 39771 - DNA, 214 bp, Glycine max
gtcactggccgtgattgtggggatttttgccctgtgctggttacctgtgcatgctgttaactgggtcactcttttccagccagctcagggtaaaaataagcccaagtgggcaatgaatatggccattcttctgtcacatgccaattcagttgtcaatcccattgtctatgcttaccggaaccgagacttccgctacacttttcacaaaattatc

SEQ ID NO: 39772 - DNA, 262 bp, Glycine max
gtcttctgacgctggtgcgcctgcccgggaacatcctgctggactcagtcatggcttgtggtctggtcgccagcaacctgaatctcaaacctggagagtgccttcgagtgcgaggcgaggtggctcctgacgctaagagcttcgtgctgaacctgggcaaagacagcaacaacctgtgcctgcactttaaccctcgctttaacgcccacggcgacgccaacaccatcgtgtgcaacagcaaggacggcggggcctgggggac

SEQ ID NO: 39773 - DNA, 292 bp, Glycine max
tggtcccaggggttcagctgaggtagggacgtgctgtaggccggaatgttaccggctgttggatctgcggatgaggaggaggatcctgcggaggaggattgtcctgaattggttcccattgagacgacgcaaagcgaggaggaggaaaagtctggcctcggcgccaagatcccagtcacaattatcaccgggtatttaggtgctgggaagacaacacttctgaactatattttgacagagcaacatagtaaaagagtagcggtcattttaaatgaatttggggaaggaagtg

SEQ ID NO: 39774 - DNA, 384 bp, Glycine max
gtccctttggggtgtctcagtctagaggtacctccctccctggggggtctcagctcctggagtcgcaggcccttggggcccctctgtgagatctcaatgctgtctggggaccctaagagttttctcacctgttcagtctcatctaaccttccaatgtctgatgttcctgccaaattcctgcctgattctgggtccgtcctgacctccaaaggtcagcttggtgcttgaggtctccctgctcttggtggcagtggtagcagcaacagcagcagcagcagcagcagcagcagcagagacctctccactttcccttagcccctctgctgggtagagaggcactttcagggacttccctccagctgcctcttcatctgggaatgagct

SEQ ID NO: 39775 - DNA, 325 bp, Glycine max
tgggatcacacgatggcatatttaaaggaactgccagaaagtaattggctttgttgcaatgattgcacaagaatacactctactttggagaatcttttggttaaggtggctgagagactccctgaatctatcttgggtgttataaagaagaagcaagaggatgaaggattagaaccgatcattgatgtaagatggaggcttcttaatggcaacattgcttatcctgaaactagaccattgcttctggaggctgcttgaatctttgatgaatgctttaatcctatagtcgatgcaactagtggacgtgaccttattccagccatgg

SEQ ID NO: 39776 - DNA, 414 bp, Glycine max
ggttgcagggtggtggatggtgtaataatattagaacatgtgtttatcgcaagaaaacccggcgtggatcatcagatttcatggaaaaggagataccttttactggaatattaagtaataaggctgaagaaaatccagattttttcaattggaatagagtaaagcttcgttattgtgatggcgcctcatttactggggatagtgaagatgagactgcagaactgcaattcagaggacagcgtatttgggcagctgcaatggaagatttgatgtcaaaaggaatgcgttttgccaatcaggttatagacatatataatgctatttcagtaatctttcatctcatgctatgtacatctcattttgcttcaggctcttttttcgggatgctctgcgggtggcctggctactattatt

SEQ ID NO: 39777 - DNA, 340 bp, Glycine max
gcagaagaaatagcagcattggacaccattgatgggggaaagcttttcagttggtgtaaggctgtggatgttcctgaagcatccaacatcctacgttactatgccggtgctgctgataaaattcatggagatgtgttcaaaacatctcgcaacctccacttgtattctctgatggaacctgttggtgttgttggacacattatcccttggaatttccctaccgtcatgtttttcgccaaagttgccccggccttggctgctggctgcaccgtggtcatcaagccttctgagcaaacacctctgtcatcactcttttatgctcatctttctaagttggctg

SEQ ID NO: 39778 - DNA, 400 bp, Glycine max
ggagcaagagtgaagagcgaagagaatggctcccaagggtttaatctttttggctgtgttatgcttctcagcactgtcactgagtcgttgtcttgcggaggataatggacttgctatgaacttctacaaggaatcatgccctcaggctgaagacatcatcaaagaacaagtcaagcttctctacaagcgccacaagaacactgctttctcctggctcagaaacatcttccatgactgtgctgttcagagttgtgatgcttcactgttgctggactccacaagaaggagcttgtctgagaaggaaacagatagaagctttgggttgagaaatttcaagtacattgagaccatcaaagaagctttggaaagggaatgcccaggaagttgttcctgtgctgat

SEQ ID NO: 39779 - DNA, 321 bp, Glycine max
gtctcaaaaggctgttactgctgccacaaattataataatagggttgttgaatgccatttggcttctattgtgctcgctataaagctagggatggatccaaaagaggcaatatcaaaagtgagcacactgtctgatgttgaagggttatgcgtatcatttgctggtatttataactcatctgatcctgtacttgctgtaaaggtaattgtacctcgtatgatgtcatccttagaattagccttgtgtgacactatctttctatttgcattgagaacatttcatttcaattgatatggatttctttgaactttaatattctc

SEQ ID NO: 39780 - DNA, 400 bp, Glycine max
gttgcttgagttggaataaatgtgctaagaatcaaatagctagtagtgattatgaaggaattgtgactgtttgggatgtaaccactcggaaggtaaatgttgaattcaaatggtcagtttgttcttgtatcagatctttgggtatcttcattcattaatattgttttgattgtcatgtgcttgcttaagttttctacagattatttacgcatggctatcattttaactttggcagagtttaatggaatatgaagagcatgaaaagcgtgcatggagtgtagacttttcaagaacagatccctctatgcttgtatctggtagcgatgactgtaaggtcaaaatttggtgcactaatcaagaagctagtgttctaaatatagacatgaaagcaaacatatgt

SEQ ID NO: 39781 - DNA, 380 bp, Glycine max
ggaactatatgaagactctccaggcagttcggaatacagtacaggatcaactctcctgcctcattcagctggtgaggatttggaacactcactgcatcaggatattggaaccgaactgaatatacaaattgaagattcagaaggagttaggggatgtgaccaaggggttctttctagtgcaactctggatcaagatttattcccatcttgtgaggaacagataaacaatgatgcaattgtttctgccttatcaagttcagcggagttcagttcacctcttcaagttacccctctgtttagatccttagctgctggaattcctagcccacaattttcagaaagtgaaaggagcttccttatgaaaacactcggaatggagt

SEQ ID NO: 39782 - DNA, 350 bp, Glycine max
gatgacatgggattgattgagattgccagagggtgttcgagactggttaggtttgagcttcagggttgcaggcttgtgacggagcgtggactgaggaccatggcttgtttgctcgccaggactctgattgatgtcaaggtttcttgctgcgtcaaccttgacaccgcagcgactctccgagccttggagccaattagggagcggattgagcggctccatgtggattgtgtgtggaatgggttgaaggagagtgatggcctgggacatgggtttcttaattttgatttgaatggtttggatgaaccgggtgatggtggtgaattgatggattactttgggggtggagaatg

SEQ ID NO: 39783 - DNA, 401 bp, Glycine max
gaaggtggtccagttctcaagtttctggaaatgtttgatagctatcgagttgaacattgtttacgcctgtgccaagaatatggcattatagatgcatcggcgttcttattagaaagggttggtgatgttggtagtgctctttcacttacactttctgatctaaataataagtttgttgatcttgatgcctctgtggaagctgtagttttaaaccatcgcagagatggttcttcacatatggaaatattcaacagtgttttaaaaacaaaggaggtaaatgacatccacaatttattgcgtgcctgtattggtctgtgtcagcggaacacccctcgtctaaatcctgaggagtcagaggcacattggtttaaattacttgactcgttttgtgacccactgat

SEQ ID NO: 39784 - DNA, 403 bp, Glycine max
gacggctaaaagctaaatatcatcaaagtactcaaattagcatggctgtcatggttgcattcttgaatttgatcatcatcttttcagtagtctctacaacagtaaaggatgccactgctagggacaaaactgttccagcagcaattctgcgaatgcacttccatgattgtttcgttcgggggtgtgatgcctctgtgctgctaaattcaaaaggaaacaacaaagcagaaaaagacgggccaccaaatgtttctttgcatgcattctatgtcattgatgcagcaaagaaagcactagaagcttcatgccctggtgtggtctcttgtgctgacatccttgctctggcagcaagggacgcagtttttctgtcaagaggacctacatgggatgttcctaaaggaag

SEQ ID NO: 39785 - DNA, 376 bp, Glycine max
taccggacttgaattcccggctagacctacgcgtgcgtgcacgcatacgaccacacgtgcgctatgagaatactacagactgtgaaatgaatgtgtcggaccccctacaaaaccctagcacacttttatcgcttaatgactactacagacgatgtaagcaactgcattcgcaatgggaattgatgtgaaagcctgatgtgagtccaataagaccatgctatccgaacacatatccgatgatatctaccttaagcttctcgacgagctgatccggcatcttgttaggaagactggcagtaacttcaatgctgctgtcctcaagcgccttgtcatgagcaaggtcagcatagcccacgctatacctctctagattgat

SEQ ID NO: 39786 - DNA, 146 bp, Glycine max
taaaaatcatcaaactactccaatgaacatttctaaaaccggtgcattcttcaatttcatcatcatatctccattatcctctacaaacaattcactaaacttaaactactattcaaaaacattccctcatctttaattcatatctt

SEQ ID NO: 39787 - DNA, 316 bp, Glycine max
  unsure (1)..(316): unsure at all n locations
gacagcgaaacgtagagtgatttcagtgagtgatcggtgttcacttgatctcatcataatcgtcagcgtcaattgaagaagatgccgatcagaaacatcgccgtcggaaggcctgaagaggcgactcaccccgacacgttgaaggcggctttggctgagttcatctcaaccttcatcttcgtgttcgccggctcatgctccggcatcggctacaacaagctcaccgacaacggcgctgccacccctgccggcctcatctncgnctncatcngccatgcattcgccctcttcgtcgccgtctccgtcggcgccaaca

SEQ ID NO: 39788 - DNA, 400 bp, Glycine max
gatccatcactagttttttatatatatcggactggttgtgcttatccttattgagagaaaaaatggccaaatcaatcaaattctttgagttgaacacaggggccaagattccttctcttgggttagggacttggcaagctgaacctggtgttgcagctgaagctctcaccacagccattcaggttggatacaggcatattgactgtgctagtgcgtataagaatcaagcagagattggttctgctcttaagaagcttttagatgatggtgtggtgaagcgtgaggacttatggatcacttccaaactctggtgttcagatcatgcaccagaagatgtgccaaaagcattggataaaacattacaggaattgcaacttgactatcttgacctctatctgat

SEQ ID NO: 39789 - DNA, 246 bp, Glycine max
cgattgggacacaaggtaattacgttgtctagataactagaggcagggtcatgaatatgaacgtcctggatctgttaattgctacaaaacttgtagcatgttaatgccttgcgtacaatatgttcactcttccaatgatcactgactatagtgcccgtacttccaaagtgaaatacacaagatacatgcttgctgtagaaccgcgcaacatctatgacttatagaccattcatgatcagtgcgttg

SEQ ID NO: 39790 - DNA, 435 bp, Glycine max
ggtgcacaagtgagtttgttgatcgagataactagaagcagtgtgatgaaaatgaaggtccttgttttcttcgttgctacaattttggtagcatggcaatgccatgcgtacgatatgttccctatccgaatgaacactggctatggagcccgtactccggatgtgaaatgcgcaagttggatgcttgctgtggaagcacacaacatctttggctttgagaccattcctgaagagtgcgttgaagcaacaaaggaatacatccatggcgaacaatatatatcagactccaaagcagctaaccaacatgcttacttttatgccaaagacctcgaagtccatcccaaggacacatttgtgttcagtatagatggcaccgtactctctaatattacatactagcgaatacatggatatgcggtggagaaattaactcga

SEQ ID NO: 39791 - DNA, 319 bp, Glycine max
gactatagagtgtgataggatgatgatgtagctcatgcttatcatttcgaagatcagtgttggtgcttgcagcttctcgtcacctgaagatggccagatggcttgggaactgccgctgcggatgatactgactgtgcgacaacccatgcagaggctgacacatgtacccgatacttgagctacactgagtcaaccaacagcgaaaccttcatcatgcaagtggcacctagcacggctcaatgagacggtgctgaaatgggcgttcccgatgggaaccatggatgcttatgaacaccaaactgttactgcaatggctgga

SEQ ID NO: 39792 - DNA, 404 bp, Glycine max
gactgcaatggctgatataattgactttcatggatggaaagaggtcattgttgtattcttggatgatgattatggaagaaatggactatctgctttgagtgatgagcttgaaaaaaggaaattgaaaatttcttataaactgcctttaagtattaagtttgatttggatgaaatcactaacttgctcaatcaatccaaggtggttggtcctcgtgtgtatgttgttcatgccaaccctgatccgagattgagaattttttttattgcccataaacttcaaatgatggccaaggattatgtctggcttgtcacagattggctctcagctacactagattcattatctccagtgaatcagacctctttcagtgttctccaagggggtgttggtctacgtcaacaca

SEQ ID NO: 39793 - DNA, 259 bp, Glycine max
gttggggctggccctcttgggcattgggggtaaaatttgggttaactttcccaagggggaaacaaattttgcctccgaaaaccccctaaaccgctttgggtgggtcttttctggcatcgtaagaagtggcctgctgatgctcctgccagcatttgtcttcattgggctggaacaggattactgctgtggctgctttggccatgaaaactgtggcaaacgatgtgcgatgctttcttctgtattggctgctctcattgga

SEQ ID NO: 39794 - DNA, 312 bp, Glycine max
ggcggggacggttgccaattttgcaggactgggccaaatcaagggtcgagatcttgaacggtagaagaagggggaactgctgaatccaatgtaccacctgaaaggtgggctgtcccagttacgcctgggcaaatttacaaagcggccggtctgcaaactatctaaaatccacttagatcggaaatccattggacgtattctaacagttattaaccagactcagacagagaacctaaagaaattgtacatgggcaagaattacaagcccctgaacctgttgcctaagatgacacttgccatgcgctgtcggtt

SEQ ID NO: 39795 - DNA, 361 bp, Glycine max
  unsure (1)..(361): unsure at all n locations
gatgttgaagtacatagcacgtgataaagagtttcgcagaatccctgttataatgatgcccgcacaagatgaggtatccattgttgttaagtgcttgagacttggagcagcagactatctagtaaagcctttacgcactaatgaactattaaatttgtggacgcacatgtggagacggaggcgcatgcttggacttgtagagaagaacatcttgaattacgattttgatctggtagtatctgaccctagtgatgccaacacanacagtaccaccttgttctctgatgacacagatgacaagtccaagagaagcactaatccagaggcaggaatatcagtccaacaggaacaagagtctact

SEQ ID NO: 39796 - DNA, 200 bp, Glycine max
ttgtttgaaattaaactgattggtaacctaatttgtggcctcatgacttttaaggaaaacgtgtgcatacattacacacatcctaaagctagtaagagattgactcgtcattgccttcattccttaaaattaaaaacctacaaaagttggtgttaatgtgtatatgttatttaccttaagatttaaattgaaatctgaac

SEQ ID NO: 39797 - DNA, 375 bp, Glycine max
cgggggatcggctgtgggagagaggctaggcctctgaggaggcgaatccggcgggtatcagagccatcagaaccgccaccatgacggtgggcaagagcagcaagatgctgcagcatattgattacaggatgaggtgcatcctgcaggacggccggatcttcattggcaccttcaaggcttttgacaagcacatgaatttgatcctctgtgactgtgatgagttcagaaagatcaagccaaagaactccaaacaagcagaaagggaagagaagcgagtcctcggtctggtgctgctgcgaggggagaatctggtctcaatgacagtagagggacctcctcccaaagatactggtattgctcgagttccacttgctg

SEQ ID NO: 39798 - DNA, 327 bp, Glycine max
ggcacaagtgagtatggtgatcgagataactagaaacagagtgatgaaaatgaacgtccttgttatcttagatgctacactattggtagcatgccaatgccatgcgtacgatatgttagctttacgaatgaacactggctatggtgcccgtacttaggatgtgaaatgcgcaagttggaggcttgcatgtggaagcacacaacatctttggctctgagaccattcctgaacagtgcttataatcatcaaaggaatacatccatggcgaacaatatagatcagactacaacacagctaaccaacaagcttacttttatgccatacacc

SEQ ID NO: 39799 - DNA, 416 bp, Glycine max
gggtaccaagacaataacgaggtttgtatagagttacttaaaacaaaagacggaatcgattctttagctctatacagctcatctgtcggaaggtttcccaatgctcctggggctttgctttatcctatttatggtgagggagaactaccacaagccttttgtcgccgtgctgctgtcaaaggttgcatttatgttctaagaatgtcggttgtttctctgcttatggataaggttacggggtcttataaaggtgttagattagcttcaggtcaggatttatatagccaccaactaatcctggacccatccttcatgattccatcaccattgtcttcgtctccaagagattttcccagtgaaaagctccaaatgttgggtcagagagatattaaaggaatggtggctaggggaatatg

SEQ ID NO: 39800 - DNA, 328 bp, Glycine max
gtcgcgcggaggctgatgcttgggtgcgttcaagattcaacttcacccgtaacccaccgccatggccgaggaaggcattgctgctggaggtgtaatggacgttaatactgctttacaagaggttctgaagactgccctcatccacgatggcctagcacgtggaattcgcgaagctgccaaagccttagacaagcgccaagcccatctttgtgtgcttgcatccaactgtgatgagcctatgtatgtcaagttggtggaggccctttgtgctgaacaccaaatcaacctaattaaggttgatgacaacaagaaactatgagaatgggta

SEQ ID NO: 39801 - DNA, 145 bp, Glycine max
tcccaggcttcgggccacgcgttcgagcgccagatgttcatactcattgccttctgttctgcccacgatcccctttcccaaaatactctttatggggaaaaagggcttgggcatggcacgcttggtgaccgactaccccagtccc

SEQ ID NO: 39802 - DNA, 207 bp, Glycine max
gataaccagcagcaaataaaccctttttaaaaacggattgtcaagtcatgatgcgtctattcaatccccggaaaaccacattgctttttggtatacgtgataaaacaaagaccccacttgaaaatttggagcctattctaagagaagatattcagaagatttgggatggcatttcaaaacccgaagcccatcaacatactcctcttt

SEQ ID NO: 39803 - DNA, 410 bp, Glycine max
ccacacaagtaacggagaacatactaaagctttggagtgtgattttcgggcgctcgagcgaaacccattcttaccccaagcttttaataatatggccgtgatctgtcattaccgaggagaacaggccattcgacagggagactcggaagttgcggagtcttggtttaatcaagccgctgaatattggaaacaagctatagccctaacccctggtaattatattgaagcccagaattgggtgaagatcacaggacgttttgaataagaaccaccttgttttttatttttcttatattttcttcttaaattatatctatctatctataattctatctatatagatagatagatatctataagtatcaaattttggcttggtgttcccatcaatcaaattaaaaactcttttc

SEQ ID NO: 39804 - DNA, 319 bp, Glycine max
gggcgcgaacgagttccagacggagatcaagatggtctcgcgcttccgccacgcgcacttggtctcactcatcgggtactgcaacgatggcggagaaatgatcctcgtctacgatttcatggcgcgtgggaccctacgcgaccacttgtacggttcggagctgtcgtgggagaggaggctgaacatatgtcttgaggcggcgcgtgggcttcacttcctccacgcgggcgtggacaagcagagcgtgatacaccgcgacgtgaagagcacgaacatcctgctggacaaggattgggtggcaaaggtgtcggatttgggg

SEQ ID NO: 39805 - DNA, 265 bp, Glycine max
ggactctactagtacatcgtaaaaggatgcattgatgagttttacttgttgcccgatgctttcaaggtgatcaagcagattggtgttatcggttgtggatctcagggacctgcgcatgctcagaatctactgtactcacttgctgaagcaaagtctgatattgtgatcaagattgtactcaagaatggtactagttcctttgctgaagcttacgcaattggattttctgaagagaatggcactttatgtgatatatgggaaactg

SEQ ID NO: 39806 - DNA, 403 bp, Glycine max
gagcgaaacagagagtgatttcagtgagtgatcggtgttcacttgatctcatcataatcgtcagcgtcaattgaagaagatgccgatcagaaacatcgccgtcggaaggcctgaagaggcgactcaccccgacacgttgaaggcggctttggccgagttcatctcaaccttcatcttcgtgttcgccggctcaggctccggcatcgcctacaacaagctcaccgacaacggcgctgccacccctgccggcctcatctccgcctccatcgcccatgcattcgccctcttcgtcgccgtctccgtcggcgccaacatctccggcggccacgtcaaccccgccgtcaccttcggcgccttcgtcggcggcaacatcaccttccttccgcgcatcgtctacgtcatc

SEQ ID NO: 39807 - DNA, 332 bp, Glycine max
gacggcggggacgtgagaaatgtaatggcttctgaaacggaatgatttgacctgtgtctacccacacatttaacttatgttgactgggataatgcatatcatccaacgtcggttgctgctaatttgagacaaggtagctatgttctagagaaagactagcaagaacggcgtgagacgactgatactcttgcactgcctacgtgggcgatcttccacattaagatgttttgttcgctcgtcgaatactgtgattgtaccatctacggcgctatttatgagtacaagcctccatcatatatgtgcaacgacaccttacatagaagtgcacgtta

SEQ ID NO: 39808 - DNA, 388 bp, Glycine max
gggttctagtgagtgattgattgttggtgtaactcgttcttcttcttttaacgctctgagatcgtgtttggttcttctctcacctaaaaaattctagctgcagtggtaactgtggttgcggaagcttcttcaagggcttctacggctgcataggcttcaaaacatactctgacttgagctacactgagttaactaccacctagaccttggttatggtagctgcacctgctaatgctcaatatgaagttgctgaaataggcgtgcccgataagaacgattgctgcaaatgtggaccaaactgctactgcaactcctgcacttgcaagtgaggtgttgggagagcaagcttaaagcagagattggccctaattatgaataatgataaact

SEQ ID NO: 39809 - DNA, 369 bp, Glycine max
ggagagagcacaatcacttgcttaaacttcactccgagagttacgattatggcattgaatttgagcatgttaccattgctctgcgttttgtctctttttgttacctcggccatcacaattactctttccaagagcgttgcacccattcatgacgtttcttatctcaaccggagcagtttcccgcaaggctttattttcgggtcagcatcctcagcatatcagtatgaaggtgctgcaagggaaggtggaaaaggaccgagtatatgggatactttcactcataaatacccagaaaaaataaaagatggaagtaatggagatgtagcggacgactcatatcatcggtataaggaggatattggaatcatg

SEQ ID NO: 39810 - DNA, 358 bp, Glycine max
gaatgtaacacttttgagttgcattgttgcatcaccgcaagtccacaacatggctgccactgccgctgcaggcatagcttacttgttttcttcttctattaacagcgtcaaatgtcttcgttcctccaagaactgctccattatagacccccttataaccacagtgccctcaaaccgaggcatgtttgtgtcacacttggtggaacctttgaccattgggggtgccattaattcgcacaagttgtgggggcctataatttctgctgctgttgcacaagatgaggctgttgttgtcgctgatgatgaagtaaatgatggcgctggattaggtgaacaagagatagggatgagaatgaac

SEQ ID NO: 39811 - DNA, 332 bp, Glycine max
gatggcacagtttggaaggcaatgaaagaatcccctgcatctgtgatactaatggcttattgtttcatctctttgtggtttgttggtggactgactggttttcatttataccttataggcttaaatcagactacctatgaaaatttccggtacagagctgaacgcaggatcaatgtttttaaccggggttgtttaaataattttctggaagtgttttgcacaaaagtaaagccctcaaggaacaatttcagggcatttgctcgagaggaggtaccaccgagacctctggctccgatcattccccgggatcgtgaagacttgggtggagacca

SEQ ID NO: 39812 - DNA, 363 bp, Glycine max
cggttgacgtgtggcatgaaattggggggtcctttagaattgaaaagcagccatcaaaggttatggtttatgtgcaaggtcctgcttctggtgtggacttaatggttgctggacttcaaatttttcctgtggatagacacacaagatttagatatttaaagatccaaactgataagattcgtaaacgcgatgttatcctgaaattctctggactggactctggcagctatgctaacacctcggttaaagttatacaaacacataatgatttccctattggaacatgcattatctgaacgaacattgacaaccaggactttggttacttcattgtgaagcattttaactgggcctggggtttgg

SEQ ID NO: 39813 - DNA, 337 bp, Glycine max
ggccttggtattgggaaagttattgaaaatggaggagttggaggaagcctaaccgggataacaattggtaccgtgacccaaactgataaagtttggagaaccatgcaagctcttggtgacatagcctttgcttattcatactccctcatccttatagaaattcaggacacagtgaaatcccctccatcagagtcaaaaacaatgaagaaggctagtttcatcagtgttgcagtaactagcattttctacatgctttgtggttgctttggttatgctgcttttggagatgcaagccctggaaaccttctcactggttttggcttctacaacccatact

SEQ ID NO: 39814 - DNA, 264 bp, Glycine max
gacagatcggacggatggcactgacggtttagggcaatctgattccgagaaagttaagactacccctgctggtaaatatctcactgctgccctgaatgactttaatcctgaacaatatgagggactggctgccatttctgatggtgcgaacaaactgatgatgctgattctggatgatgacatcaaagctgtgtgcctccagagaacatgagagccttgctggaactagacatgctgaactcttatttattcgtaatatggcac

SEQ ID NO: 39815 - DNA, 274 bp, Glycine max
cccacgcgtgctgacacccgagaggacgacttaaggggacggctgaaatctaataatcatcgacattcgtcagattatcaacgctgtcacggttgcatccttgaatttgatcatacacgattataagaagatgtacaagcagatcactgagcttaaactactattcaaaaacatgccctcatgtggaatgcattgctgacaaagcagtgaatgacgccactgctagagacaaaactgttccacctgcactgctgcgaatgcacttacatgactg

SEQ ID NO: 39816 - DNA, 351 bp, Glycine max
gactccgatatcgctcaagttttgtcctccatgggagggtccattgactatttcacgactggtgcgggttgaacctgcccttattttgtgtgcgtcaccgtctctgatctgcctgctgtgcacacgatagacatggatgcactctacaacgtccagagatagcacccttacactgtttcttttactgcggatcaccccacttttacggcgctgtttaaaatgccacctatggaggatgaccccacttatggtcctattatttgcagcattgctctcatgaagctagctactgcccttgaacgccaagccaacgcaatgatcaatgtaggttctgaacaactcacattgatg

SEQ ID NO: 39817 - DNA, 362 bp, Glycine max
gactattcaaggaagcaaaagacagggattctagtgggaagaaatgggatgatcaccctgcaataatggctgttggtgtggttgatggaacttcagaagccatcttccagactcttatgtcgcttggtccttcaagatcagaatgggatttctgtttctacaaaggaaatgtggtggagcacttggatggtcacactgacattattcacaaacaactatttagcgattggttgccttggggaatgaaacgaagagatctcttgttgcggcgttattggaggagagaagatgatggaacttatgttattctttaccattccatgtttcacaagaagtgcccttcccagaaaggctatgtgcgt

SEQ ID NO: 39818 - DNA, 267 bp, Glycine max
ggggcaatgtacagatcacagagcattacgatattatccatgctggttctcagagcaaaggagaattttctaggcttgactatcagaccaggccatttttaagaggtgcatcagcctttaggcgtcttgttgccaagctacctccaagagctcattctgtgtactacagggatgaaattggcaacatttccacttctagtttatggggtgactcaaaaaaggtggatattttcacatttgataaatttttactgtgaaatacttttt

SEQ ID NO: 39819 - DNA, 371 bp, Glycine max
taccgtccggaattcccggtcgaccacgcgtcgccacgcgacgaccgtcgatacctacgcacgatgaccacaggaaagcgatatctactgaggctgcagtctataggagaagcaactaccgagcatgagaatgctcgatgcgaagtaccaggtggcggacatggcggtgatgatacatgtgaagaacatagcggacatgggggcgtacgtgtcgctgctggagtacaacaacatcgagggcatgatcttgttctcggagctctctcgccgtcagattcggagtgtgagcagcctcatcaaggctggccgcatcgagccggtgatggtgctccgtgtcgacaagggaaaaggttacatcgatctcagcaagc

SEQ ID NO: 39820 - DNA, 363 bp, Glycine max
ggcctccggcatgcagtagaccgatctgtctctggtctctagctggggaatagctggtctagcgtgcgtatttcacctgcttttcctatcgatcttagcagacgacgccggcgtgctctctgaagataactacgagaaggaagttgttcatgccataggagctttcggtgaactctatgctccttctcgttgacactgcataaagcttgctccagaatttcaaaagcttggtaccaacttcaagaaagcccaacctgacccaatcggcaacgtcgactgtgatgagctcatcagtcttgtcaagacatatggagtcttatgttacgcatctattcattggtttccaaaccgatctcttgtacc

SEQ ID NO: 39821 - DNA, 401 bp, Glycine max
gagtgtgtgagttcattaacatatacaaattctgtgtgttgtgttgtgtacttgtgttaattgtgttgttgttgtaggaaatttaagtgaagagagaatgatgatgaagtctgctatgtgtgcattggtgcttgtggcactggttgtggttgaagtggggcccatggctgaagctgcggtgacttgcaacccaacacagttgactccttgtcttccggcaattaattcatgttctgcaccttcgagtgcttgttgccagaagctgaatgatcatatgccatgcttctgtggtacctcaaaaccctagcttgaacagatgtaaacttctatgccaaaaaccgtagtcttgggattgctatcaactgtaagactctattattattaaatgggatcatttttat

SEQ ID NO: 39822 - DNA, 227 bp, Glycine max
cgataagacaacacaacgggacacaagtgagtatgttgatcgatatagctagaggcagtgtgatgaatatgaaggtgcttgtaatattcgttgctacaatattgggagcatgggaatgccatgcgtacgatatgttccctctccgaatgaacactggctatggtgcccgtactcctgaagtgaaatgcgcacgttagaagcttgctgaggaagcacacaacatcttt

SEQ ID NO: 39823 - DNA, 401 bp, Glycine max
  unsure (1)..(401): unsure at all n locations
gatgattaaggaccgtaccatcgtctacattgtccactgcttaacctccatttccataaagggagatcaaacttaatagtaaataacataatgcggcatttgctgcacgggaggctcgatgtgatcatacgtgagatcgacacattaccaagtcttaacgagtggaatttcaatctctgctgcaagggtacaagtagaagcgtgaggaagagatttctttcccaactcaagagttgtttgctctgtcaatgctaatgccagcccgagtttgtcgagacgggtctctatgcgacaggtgatttagatgaggcaagggttggaaggactaaactgttaaatgatcaatcctacaatcccacatggaatgagacctttcacatatatngtgcccatttgatctc

SEQ ID NO: 39824 - DNA, 205 bp, Glycine max
aggcgtgcgtacacgtccgagaagacgacagagaggcatgcatctcaaccatgggggctaaggtttcaagatgcggtaacacctataatgcgcggaattatatacttacatcacgacttcttgatcttgctcattgaaagcggccgttatggatcatggctattgcttcgtgctttgtgcaattccaggattaaaatgaacccaa

SEQ ID NO: 39825 - DNA, 286 bp, Glycine max
  unsure (1)..(286): unsure at all n locations
ggagcgaaaaatgaagaaaatggcttccaagggtttaacctttcttgctggggtaatatgccgttcaacacttgcccttgagtcctcttgtggcgggggaaggccaaaataatggcctggttatgaccttttccaaggaatcatgccttcagcttgaagacatcatcacaaaacaggtcaagcttttctacaagcgccacaagaacactgctttctcctggctcaagaacatcttncatgactgtgctgttcaaagttgtgatgcttcactgttgctggactccac

SEQ ID NO: 39826 - DNA, 388 bp, Glycine max
gacacagggtcctttcttacctgctaagattcagagtgctaagtgtgatacaatgaaaatgcctaagcctcaacttcgaaccccatttattgaatgtttcactgttttattaaccatcatcgacgttacctctgcatacgcgctctatggagcatccactcccgtgctatagctcactcactgtgacttcaagtccatggatctcaattcagatggagttgtgctcattgaatgctttgctccatggtgtggacactgtcaggctctgactgctatatgggataaggcatctactgacttgaacggtgtcgttactgtggcatcaatagatgctgatgctcacacatgtttggctcacgaatattgaatcagaggattttcaactatt

SEQ ID NO: 39827 - DNA, 233 bp, Glycine max
gatagaaaaaaataaaaaactttgcaaagattttatccaattggaattttaaaaatgactgggataaacttaagaattcaattattgaaattgaataaggtaaccatttaattggattggtccaatggtattaaaaaatggagtacttacttccaattcctatttattattggaatacccgaccacttggtttggtatcggaccattttttttggatttcaaaaattttccgg

SEQ ID NO: 39828 - DNA, 162 bp, Glycine max
gacaacagagtgtgataatagtaagacagaacacctactcactcgtaaatggcgaggaagaagatcagagagtgccactccaagaggcttctcaaggagcatcttaaacgtgttgactatatcgacctgcaaatgctctcagctcaagggacagaatctacg

SEQ ID NO: 39829 - DNA, 348 bp, Glycine max
gacagcggagcatttgatagatggaaactgcaacagcctttggtgtgctaccctgattatgcctaatcataagcttagaacgacacacatggaatcttccattgctctagtgactatcattgatgttatctttgtctacatgctcattcaaggagccactgctgactatggtagtagtcacagtgcttatgccactatttatgtcgatgctgatgcttctggcacaatgggaggagcatgtgcatatggaaatcactatagccatcgctatggaactgacactagggctctaaccactgctttggtcaacaatactttaacctgtggagcttgctatgcaatgacatg

SEQ ID NO: 39830 - DNA, 340 bp, Glycine max
aatgtggaagctgacctattatgctgcacatggggcattgggtcttaaaattacgtaccatgaaccctcgttcactaatacgaagccatacttcaatgactggtcaaatcatgagtcgaagagttcactactgttgtactacatgtgccagtgtcggctctacatatatagcattgctgctattctcacatgggacactcgaatgaaggatttttcaaagacgtttacttaccatgtaattactgcactactgattgggatctcatatctaacaagtatctttagggatggctacataatcctcgcccttcatgatgcacgtgacgtattcatggaagct

SEQ ID NO: 39831 - DNA, 138 bp, Glycine max
gaccccaaagccataatgtctcaaaacgaggaggccatatagaaattttgtattactttgtcttgaactttgtgaaaaactccattttatatcttcctcgtttcgaacaaaaaaatggggctttgccccaattttaca

SEQ ID NO: 39832 - DNA, 315 bp, Glycine max
gaatgggaagtctagatgttttggttttgtgaatttccagaatccggattcagcagctgctgcagttgagaggttaaatggaactactattaacaatgacagggttttatatgtggggagagctcagaggaaagccgaaagagaggcccagttgaaagccaaaattgggcaggaaagaatcagtagatatgaaaaattaccaggggctaatttgtacctggaaaatcttggtgaccgtttcagtgatgagaaagtgaaagatctattttctgagtttggaactattacatcttgcaaggtgatgattgattcaaa

SEQ ID NO: 39833 - DNA, 288 bp, Glycine max
gcttgtggagggccacaccgaggtcccaaactggaggtttaactgcaacgttgagcttgtccaatcgccgcaaaaacatggtgggatgatcctcatccaaccgtagggtagacacgcggtcaggctcgtcaacgactccgagatcagtcagcatctgccagttgagaagggtatccatttactcgctcacgttcagtgcggttcgcacctgccctcactttgagtccatcaacatctcggttctgcctgcgtcgaatacgatagacttgcagacactctacaacgtcc

SEQ ID NO: 39834 - DNA, 354 bp, Glycine max
aatagagagaggtgcaaaatcaatggatatgagatgccagctaagaccagggtctttatcaatgcttgggcaattggaagggatcccaagtattggactgaagctgaaagtttcaaacctgagaggtttcttaatagctctattgattttaagggcacaaactatgaatttatcccatttggtgctggaaggagaatctgcccaggcatttcatttgctacacctaacattgagctgccacttgctcatttgctttaccattttgattggaagcttcccaacaatatgaagaatgaagaacttgacatgactgagtcatatggggctacagcaagaagagcaaaagacctatgc

SEQ ID NO: 39835 - DNA, 446 bp, Glycine max
  unsure (1)..(446): unsure at all n locations
gcgagacgacagaaggggaagtttttgatggaaaagaacaccactaatgctcttcatggacaagtcactattgggaccctgattttgcaggactgtgctgttggattgctctttgcattgcttccagttctgggtggcacctcangtgtttttcaaggagtgttatcaatgaccaagctgttggtgacattgattgcattcctctctgttctgtcaatattgtctcgcacttgccttccatggttgcttaaactgatgataagcctctcatcacagacaaatgaactctatcaattggcgtcagttgcattctgcttgctagtagcctggtgtagcgataagctgggactaagtctagaactaggttcctttgctgctggagtgatgaatgcaaccactgatctggctcaacatacactagagcaaattgaacctattcgcaatct

SEQ ID NO: 39836 - DNA, 247 bp, Glycine max
ggatgaagagcgaatagtgaatagaatggctggcaaaggtttaacctttgcggctgtgataatatgcgtttcagcactgtcactgagtacttctgtcgcggtggcagcggccaatgatggccttgtattaacttgtacaaggaatcatgccctcatgctgaagacatcatcacagaacaagtcaagcttctctacaagcgccacaagaacactgctatctactggctcatgaacaatgatcatgact

SEQ ID NO: 39837 - DNA, 387 bp, Glycine max
aaccaccttttgggattttgcaagagattgatgtaaccggtaaactggcttattgagaggggaatatgaagttgtaacttttctttgttgctacaatatttttgctaacatggccatgccttgtctcaggctacccaaggtcccctcttcaaatgataactcacctattctgagctttctttcctggtaaactgctcacactttatgcttgcttcttagctcacaacatccgcaccttttataccattcctccagagcgcgttcaaccaacacaagactacattaatctcgaacatttaagatcagactctaaaacaattaaccaacaagctttcccatatgctagtgaacgcgacattcatttctgcgacatatttatgttccccc

SEQ ID NO: 39838 - DNA, 496 bp, Glycine max
  unsure (1)..(496): unsure at all n locations
ggaagaaccgaaccgaccgcacgcgttcgtacagctccaaaaaaacgacttttttgagttttctaaattcttaaacatcanatgtggccacaatctgcggattattaaaagagtcatttcgcgtcacattcatacattccaataacatcaaaacatatctaacatctcaccattctactaacaccattacttcactttttctaattcaaaatctcactatctatatgcttatctcaccaaaaaattataaatgcatagattaaacaatccctaccattttccctattaatacatcaaaaccattgcaactatctttttcatgattctcaacaacctatattacatatattctagacttcacattccatatcttttttttttgatatacaccaaacttcatgactcatgaaatttctatttggctttattgcatttcatggctaaacttaattctatccctcaaaaaaatttttattggacaacaattctaaatttt

SEQ ID NO: 39839 - DNA, 378 bp, Glycine max
gggactgcatagggggagattgtcacttgtcagcactcaggagtgatatcaggtgaagaagcagaagcagacgaaagaggcagaagatggtgagggtggacatatatcggccaatgaccctggagcaggttatggtccacaccgacatcgctggcaatgccaagaaatgggcaacggctcaggattgaccgcatttactattatatggaccatgtggctgcgactagaaaacgctaatgatggctctgatgcggcaaaagttcggacctggcgccgaaaaggtgaatgcggatgataggacctgtgaagcggatgctgggagtagagctagtgatgtagagctagcagcagtatcaagcgccaatcacattgaaatga

SEQ ID NO: 39840 - DNA, 409 bp, Glycine max
gggggaagtttatttcaaaaccttttctatgagtccttggctttaacatcagcaacgtttgcgtccgctctctacaacctcattccagccattacctttgtcttggccatctcctgcggtttcgaaaggttaaatttgagggtggcagcaggaagggccaaggtgttgggaactttacttggaattggtggagcaatgttgttgacctttatcaaaggggcagaaattaatatctggcctttccacatcaaccttatgcatccagatcagcaccaaaacagccacgtggcatcattaaatactgactctggcaataataagttgttgggagcaatttgctccctagcaagctgcttctcttttgctttgtggctcaccattcaggctaagatgagcaaagaatacccat

SEQ ID NO: 39841 - DNA, 425 bp, Glycine max
ggaaattctattattatgcacacaaaggaggaaaaatcaacacgaagatctcattctcgcagctgcaccgtttcaccttctaaatcagagtaccgttttttcatcagatccgtatacaaaactcctcagggaatgttgaattacgatattttaattcttgattggtagccggttttggctggatttgggttgttggtttttatatcagaaggagaaaggaataggttgagagttgaaagtgaaagtaaatttctgtttcaatggctgctgcttctggtgaaaggtggatggaccgtcttcagttttcctcattgttctggcctcccccactagatgatcaacaaagaaaggatcaagttgctgcgtatgttgaatacattggccaatttacatcataacaagtttctgaggatattgctgagttg

SEQ ID NO: 39842 - DNA, 417 bp, Glycine max
  unsure (1)..(417): unsure at all n locations
ggagtgagcaagagtgaagagcgaagagaatggctcccaagggtttaatctttttggctgtgttatgcttctcagcactgtcactgagtcgttgtcttgcggaggataatggacttgttatgaacttctacaaggaatcatgccctcaggctgaagacatcatcaaagaacaagtcaagcttctctacaagcgccacaagaacactgctttctcctggctcagaaacatcttccatgactgtgctgttcagagttgtgatgcttcactgttgctggactccacaagaaggagcttgtctgagaaggaaacagatagaagctttgggttgagaaatttcaggtacattgagaccatcaaagaagctttggaaagggaatgcccaggaagttgttcctgtgctgatatcctcgntctct

SEQ ID NO: 39843 - DNA, 357 bp, Glycine max
agcgcaagagtgaatagcgaagagaatggctaccaagggtttaatctattcggctgtgttatgcttcttagcactgtcactgaatcgttgacttgcggatgataactgcactagttatgaacttctacaaggaatcatgccctcaggctgaagacatcatcaaagaacaagtcaagcttctctacaagcgccacaagaacactgatttctcctggctcagatacatctgccatgactgagctgttcatagtctgtatgcttcactgttgctggactccacaagactgagcttgcctgagaaggaatactatagaatctttgggttgagaaatttcaggtacattgagaccatcaaag

SEQ ID NO: 39844 - DNA, 413 bp, Glycine max
gtggtctgtgtgaaacaataagtgaggttgtcttagaaagatggaagaggggacatttgaacaaccatctttggagaaacactattatgggaactgtcctggttgtaaggtggatcaagccaaagagctgagaaaggatgtttccattagaaatctttcttatatttggatggcagtgttatgtggcatacagcgctgcctgtagcatcactctttccctttgtttatttcatggtgaaggattttaatattgcaaaaactgaggcagatataagtacctatgctggttatgtgggattatcattcatgcttggcagggctttgacatccatattttggggaatgctatctgatcgctatggtagaaaacctgtattatttcagggatattacttgtgcattttcaacacata

SEQ ID NO: 39845 - DNA, 387 bp, Glycine max
  unsure (1)..(387): unsure at all n locations
gaatcaagagagtgactactggtcggcgacagcgaactacttccgggtaatggcgaacctcgtcgcaatcgccggcgctttgaacggcgcatgatcgccggattctgacagcggtgaacgtcggagcgtcgagcctgtcgttggccggttccagcttcattgtagtgtgctacctnctcttcaaagagctccgcaagttctccttcaagctcgtcttctacctcgctctctctgatatgctttgcagtttcttcggcataatagggtatacatgctagatcaagcaagattttcttcaatggacccgtccaaaggtttcttttgttatgctcagggctatagcacacatttcttttgtgtggcatcttttctatggactacaacaat

SEQ ID NO: 39846 - DNA, 435 bp, Glycine max
ggttctagtgtatgtgattgttgtgactcgttctgcttcgtcgttatcttcttcttttgttgtttgtgtgtttgttttttctctcacctgaaaatgtcttgctgcggtggtaactgtggttgcggaagcgcctgcaagtgcggcaacggctgcggaggctgcaagatgtacccagacttgagctacaccgagtcaaccaccaccgagaccttggtcatgggagtggcaccagttaaggctcaattcgagagtgctgaaatgggtgttcccgctgagaacgatggctgcaaatgtggagctaactgcacctgcaacccctgcacttgcaagtgaggtgttggagagctaaagcttcaagcagaaatggcccttagaaataatgataaaaactatatgtagtttcaaaacttcaaaattatgtagtatgtattatgt

SEQ ID NO: 39847 - DNA, 493 bp, Glycine max
  unsure (1)..(493): unsure at all n locations
ggacgtgtctaaaagcttaaatanntcatcaaagtacctcaaggatgtagcatggcttggtcatggttgggcgattctnnngaatttgatccatcatcnnnttttcagtnnagtctcttacccaacaggnncaagtcacttgagccttaaaccctactanntgcaaaaacccatgtccctaatnngtggagttcaattggttgccataggggcagtaaagggatgcctnactgctagggaccaaatactgtnntccagcagctnaattctgcgaatgccacttcnncatgattgtttcgttcgggnggtgtgatgncctctgtgccctgctaaattcaaaagggaaacaaccaaagcagaaaaagacgggccaccaaatgtttctttgcatgcattctatgtcattgatgcagcaaagaaagcactagaagcttcatgccctggtgtggtctcttgtgctgacatccttgctctggcagcaagggacgcagtt

SEQ ID NO: 39848 - DNA, 424 bp, Glycine max
gaaggtgcacagagtttagttgtgaagctataagctagttttactcgatgaggagcatatgaagactgttgtgttttctttgttgctagcagtagctttggtagcatggccatgccatggcgcacgctaccaaaggttccctctccgaatgaaaactggctatggggagcgttcttcggaggtaaaatgcgcaagatttaggcttgctgtggaagcacacatcattcgagcctttaaaaccattcctgaagagtgcgttgaaccaacataggactacattaatggcgaacaatttagatcagactctaaaacagttaaccaacaagctttcttttatgctagtgaacgcgaagtccatcacaacgacatatttatattcggcatagataacaccgtactctctaatatcccatactatgaaaaa

SEQ ID NO: 39849 - DNA, 351 bp, Glycine max
ggatttagagtgaagagctaagagtatggctcccggggtgtgaatcacttaggctgggtaatgcttcttagcactgtcactgaatcgctgtcttgccgaggataatggacttgtcatgaacttctacaaggattcatgccctcaagcttaaaacatcatcaaagaacaagtcaagcttctctactagcgccacaagaacactgctttatcctggctcataaacatcttccatgactgtgctgttcatagtactgaatccacactgatactagacttcacaacaatgagcctgtctaataaggaaacaaatagaaactctatagttgataaattacaggttccttactacca

SEQ ID NO: 39850 - DNA, 402 bp, Glycine max
ggaagaggaaggggctagagaggaaagaactagctggctggaagctgagaactttagcatggactagtactactagtacattcatgcatattacgttggactatggtggcttaaccatagcatcgagagcgcaaagatggtgtgagctccttggtgagaaaagatgcgcctgaagaaagagccttgggctatcgaggaagatcaaattctaagatgttacattgacaaacatggacatggcgaattggcctgccctttcaaagcaagcaagcttgttaaggtgtgggaaaagctgtatactacgctggattaactatgtgaggcccgatgttcaaagacggaatttcacaattgacgaagaagatactatcattgagctggatgacatgctgaggaacaggt

SEQ ID NO: 39851 - DNA, 369 bp, Glycine max
ggtgagacgagggtagggtcgcgttgtgtcgcggcgtgtcgcgcgctgcttctgtgtgtggcgtttgtgtttacacaccaaactctatctgcgtatcagcaccatgtcgaccacgcggggtggaaaagctaagcctttgaagaaacccaagtgtgatgagagggatcaccacgagggtgacatggctcacattcagaagaaaagggaagaggagaacgctctaaaagagttgagagccagggcgccacagaggggacgctttagaggctctgcgctcaagaagagtggagagatatagggtctctatatcaagagtgtacacatccaatattgagccctgtagtatatcaccatgatcacttgtgtcat

SEQ ID NO: 39852 - DNA, 350 bp, Glycine max
ggtacaagcagagagttacaagacatatgtaacggttttttccgtttttactatgcacatgttaagccctattaaatagaaactgagagatcaattctgatgagcttcacaataaccgcgtgttcagagaaacccatgaagattgggtcaaaactttacgatgatggacgacgtaaaagaaccgtggcatggataactgttagtgcccatatcgttactgcagtgatctggctccgaatgctggtacttgcattggccatttgccacatgggttgggtggctggccctggcggtcactttgtcttttatgttattactgacttgacttacactcttcttgacgactgtta

SEQ ID NO: 39853 - DNA, 276 bp, Glycine max
gggcaaaaaaggaggtaatatggagcatgatgggaaggcagaccccttgaccaaggggatgttcaaaatttaagggaggcattccacattggtgtaagaaagatcccaccggtggagatttgctacctggaacaccttaccatcaaccaattgcaaattggttcaaaagtggggtgcttaagttaatggtgccaggatcaacccaaggcagttctcacatttaaagacagtgttgatagactctggacccacatatagctctgtaaaagtcccaaa

SEQ ID NO: 39854 - DNA, 418 bp, Glycine max
gagagcgaagagcgaagagaatggctcccaaggggttaacctttctggctgtgttaatatgcgtttcagcactgtcactgagtccttctgttgcgggggaagggcaaaataatggccttgttatgaacttctacaaggaatcatgccctcaggctgaagacatcatcacagaacaagtcaagcttctctacaagcgccacaagaacactgctttctcctggctcaggaacatcttccatgactgtgctgttcagagttgtgatgcttcactgttgctggactccacaagaaggagcttgtctgagaaggaaacagatagaagctttgggttgagaaatttcaggtacattgagaccatcaaagaagctttggaaagagaatgccctggagttgtttcatgtgctgatatcctcgttct

SEQ ID NO: 39855 - DNA, 416 bp, Glycine max
ttggggggcaagagtgaagagcgaagagaatggctccgaagggtttaatctttttggctgcgttatgcttctcagcactggcactgagtcgttgtcttgcggatgataatggacttgttatgaacttgtacatggaatcatgccctcacgctgaagacataatcaaagaacacgtcaagcttatgtacaagcgccgcaagaacactgctttatcctggctcagaaacatcttccatgactgtgctgttcaaagatgtgatgcttaactggtgctggactccacaagaaggggcttgtctgataaggaaacatatagtatctctgggttgagaacattcaggtacattgagaccatctaagaagctttggaaaggggatgcccaggagtagtttccttggctgatattctcgttctc

SEQ ID NO: 39856 - DNA, 299 bp, Glycine max
gcatctgacatgtcgtgacatggaacgttggatgattgtggggcaggtggcatcgcgattaacacatacacatcgccattttgaacgtgaaagatgggcatcaatgggaggagaagatgagatggaaatgatcaaagacttgccacaggcgctgaggagggacatgaagcgccatcttcgcctctatctcattagaaaggttactgtattccacatcttggatgatcttattcttgacaacatctgcgacagggtgaaaccgctagccttctctatagatgaaaagataatcagagaag

SEQ ID NO: 39857 - DNA, 347 bp, Glycine max
ggttcgagagtgaagagcgaagagaatggctcccgttgtggaatctttttggctgcgttatgcttctaagcactggcactgagtcgttgtcttgcggaggataatggacttgttatgaacttctacatggaatcatgccctgaggctgaagacatcatcaaagaacaagtcatgcttctctacaagcgccgcatgaacactgctttctcctggctcagaaacatattacatgactgtgctgttcagagttgtgatgcttcactgtcgctggactccacaagaaggagcttgtctgataaggaaacagatagaaactttgggttgagatatttcaggttcattgagac

SEQ ID NO: 39858 - DNA, 248 bp, Glycine max
ggagttagggtgcgttgcaagcagtgacatctggcctttggcgactagatgaccatgccacttccccatcggccgttattcatagacagatactggaaagtgcccgtcctcaagaatcggatttcgattatcaacccttacaccctacacctaatcatggatatcccatttcctactaatgaagacgtagatctcgctgtcgctgtcgccaaagctgaactttccctcttcaaggacacgggttgggc

SEQ ID NO: 39859 - DNA, 434 bp, Glycine max
gggcttacacttgtaaaaaaaattcacagcagcctaatcagcaagcaggaattggcactaataatccacagattccaccacctctgcagccgtcaccaccttcatcggtgacgacaggtatcggaggtagtgactatattcaaggctctatcagaccaggatcaatggctgatagagccaggatggccaagatacaccaacccgatgcagcactcaaatgtccacgatgtgaatccacaaacaccaagttttgctactacaacaactacagcctctcacagcctcgccacttttgcaagacttgtcgtcgttactggaccagaggaggtgcactcaggagcgtgccagttggaggtggctgcagaaggaacaaaagaaacaaagggaacagtgctagatcaaagtctcctatgaaaccttcagcaagtgctaat

SEQ ID NO: 39860 - DNA, 419 bp, Glycine max
ggagcgaagagtgaagagaatggctcccaagggttgaacgtttctggctgtgttaatatgcgtttcaacactgtcactgagtccttctgttgcgggggaagggcaaaataatggccttgttatgaacttctacaaggaatcatgccctcaggctgaagacatcatcacagaacaagtcaagcttctctacaagcgccacaagaacactactttctcctggctcaggaacatcttccatgactgtgctgttcagagttgtgatgcttcactgttgctggactccacaagaaggagcttgtccgagaaggaaacagatagaagctttgggttgagaaatttcaggtacattgagaccatcaaagaagctttggaaagagaatgccctggagttgtttcatgtgctgatatcctcgttctct

SEQ ID NO: 39861 - DNA, 235 bp, Glycine max
catatcagccatggatgtggaacgtgcgaaaccacgaagtgaaaccattgcctgaaggataacttcatccttccaaaatctatctctaccgatttactacttgctattcgcctctcaaaaacaccagcctgctctagtatgcaagcttgcgtaccatctctcatattatcgtgctatcaagctattctccattatcgaagatcacggcctaatacatattgcttaaaaaatagct

SEQ ID NO: 39862 - DNA, 206 bp, Glycine max
tcataaaccacaacttcatatcatattcactcaagacttgaacatatccaacttgtaattctctacaaggctccattaagaacttcttcctcacaaattggttacaccacatatcaaccaattatatcagctaactaaaaaatttcaaagaacaattcctcaaaatccatctcataaaacttctcaacaaaacatttaaacaaaca

SEQ ID NO: 39863 - DNA, 410 bp, Glycine max
  unsure (1)..(410): unsure at all n locations
gtgacaagaagtggagtgaggagatatgnngtactgcaaaacacgcttccacgccttggtgttcttctcaagatacttctgtccatggaacaaagtacgagaaagggtggagaaagatagtgcgaagggaacatatcggcgtcgtttacaagagcttcgcgaccgcgtcaccaatagagaaccatcgctctcaagaaagattncgcctcgagcanggaggacgaaggcgttcccacgcaccgccatttcgcgagatttcttctcctcanaagagatgcnnagcataggaacaattgttaaggttgcagggatgtagtacacnagtgaagaagcgattgtatctggtttttgagtatctggacttggatctaaagaaacatatggattcatctccagagtttgtgaaagat

SEQ ID NO: 39864 - DNA, 360 bp, Glycine max
gagggcgactataagttagaacaaaaggccaatgctgcggtattatatgaatagcttgaccgtagctactcaactttttgaagattataatgctgatcctacacaaatagcacatatggaggatgggcgctcaacagtgattgacaaaagcgaatcacgtaagcacttcgagctgcatggtggtgaagaaactggtaagaaagacactgaatgtagcgatttaactaatgcccgctataaaggaacaagcagtttcttcaaatgttcgaattgcttgataagtagctaacgagatgcacactctcaacaagttgtatgttcacacactacacatgatgctgaaacaccttgtatcaccac

SEQ ID NO: 39865 - DNA, 377 bp, Glycine max
gcaatcgagaagaagaacaagaagcagatggtgaagtatgagatctggagcatgagaatagcgacggcagtgtttgcgtttgctctgatggttccatcggactcagcagacgacgtcgatgtgctctctgaagataacttcgagaaggaagctggtcaggacagaggagctctcgttgagttctaagctccttggtaacacaccaatcttatcgatctatttctctctgtgtatatcagacaattcgctattccatcgttactttgatttcttgaaatcgctattaaggagggcttattattaaccgagtctgatgttatactttatagactatgcctgaacagattgcatgagctctttgcgtgtaacggctcaac

SEQ ID NO: 39866 - DNA, 450 bp, Glycine max
  unsure (1)..(450): unsure at all n locations
ggttctagntgtatttgtgattgttgtgacctcgttctgtcttgcggcgntattcttcttctttgtggtgtttggtgtttgttttnttctctcaaacctgaaaatggtcttgctgcggtggtaacctcgtggttgcggaagccgcctgcnaagtgcggcaaccggctgcggaggctgcaagatgtacccagacttgagctacaccgagtcaaccaccaccgagaccttggtcatgggagtggcaccagttaaggctcaattcgagagtgctgaaatgggtgttcccgctgagaacgatggctgcaaatgtggagctaactgcacctgcaacccctgcacttgcaagtgaggtgttggagagctaaagcttcaagcagaaatggcccttagaaataatgataaaaactatatgtagtttcaaaaacttcaaattatgtagtatgtattatg

SEQ ID NO: 39867 - DNA, 400 bp, Glycine max
  unsure (1)..(400): unsure at all n locations
gcagatattgaagtttaaaccagacttggtgatcgcgagataacgggctaacaagttccgcatgtcnctgggtcttccagtggcggcgacggtgaactgcgccgacaacacgggggcgaagaacctctacatcatttcggtgaaagggatcaaaggccgtttgaaccgtcttccctcggcctgcgttggcgacatggtgatggccaccgtgaagaagggaaaacccgatctgaggaagaaggtcttgccagctgtcatcgttcgccagcgcaagccatggcgccgaaaggacggcgtctacatgtacttcgaagataatgctggtgttattgtcaatcccaagggagaaatgaaaggttctgctatcactggtcccattggaaaagagtgtgctgatttg

SEQ ID NO: 39868 - DNA, 411 bp, Glycine max
ggatgcaaagaaatgggcgcaggttattgcttttcgctttgccatccaaggccacataaacccaatgctccaactcgcacagatccttcactcaaagggtttttccatcaccatcatccacacaacttttaactcgcccaacccttcaaactaccctcactttagcttctcttgcatccaagacaacttgtccgaaaccgagacctcggcctcggatctcttgaatttcatcgttgcactcaacgttaagtgtctggtgcctttcaaagattgcgtggaaaagctactaagtgatgtgtccgaggaagctgttgtttcgtgcttcatctcagatgctttgtgttacttcactcaagcgggtgccgacaaccttcagctgcccaggattgtgttgagaactggtggagtttc

SEQ ID NO: 39869 - DNA, 338 bp, Glycine max
ggagtgagcaggagtgaagagcgaagagaatggctcccacgggtttaatcttttgggctgggttatgcttctcagcactgccactgagtcgttgtcttgcggaggataatggacttgttatgaacttctacaaggaatcatgccctcaggctgaagacatcatcaaaggacaagtcaagcttctctacaagcgccacaagaacactgctttctcctggctcagaaacatattccatgactgtgctgatcagagttgtgatgcttcactgttgctggactccacaagaaggagcttgtctgagaaggaaacagatagaacgcttgggttgagaaatttc

SEQ ID NO: 39870 - DNA, 305 bp, Glycine max
gggtcttagaatatgtcagtatggttaggtctatgcaatataggaaattagattttgaggagttttgttctgctgctataagtgtgcaccaacttgagggaatggagacctgggagcaacatgcaaggcgtgcctatgagctttttgaaaaggaaggaaatagaccaattatgattgaggagcttgcctcggaacttgggcttagtccatcagtacctgttcatgtaggacttcaagactggataagacactcagacgggaagcttagtttcttggggtttgttaggcttctgcatggggtttct

SEQ ID NO: 39871 - DNA, 273 bp, Glycine max
ccactcgtacgttctgttcgagatttctatttattgggacacaagcgagtttgttgatcgggataactagaaacagggcggtgaaaatgaaggtccttgttttcttcgttgctacaattttggtagcatggcaatgccatgcgtacgatatgttccctctacgaatgaacactgactatggtgcccgaactcctgaggtgaattgctcaagttgcaagcttgctagtgaatcacacagcatctttggctttgagaccatctcttgagagtgcg

SEQ ID NO: 39872 - DNA, 358 bp, Glycine max
ggatgcagtttaacaaagcaaggaagagaaagaggtttggttctctctaaagagtctccgctgaactttttggtttcttgaagatgtcgttactctccgatcttatcaaccttaacctctccgacatcaccgataaagtgatcgccgagtacatatggctcgacggatttgccttgccttttattaacgcactttttttttgttcgatccgatcaaccttctcgatcaagttcccgaagaccagcttcgatttcaagggtataatgataccgtgtttactgtaaatggggttgaatactaaggaaagcttgctttgtgttggaaatttgctcatgtcttggaaacctaaaaatttttt

SEQ ID NO: 39873 - DNA, 383 bp, Glycine max
  unsure (1)..(383): unsure at all n locations
gctggtcagggttggaacaaaacgaaaaccaatcacaacaacgtagtaaaactcaaaaccaggaaattaatatgagctgcaacggttgccgtgtgctccggaaggggtgcagcgacacatgccctctgaggtcgtgcctgcagtggatcgaatcttcggagtcacaacgacacgccactctcttcctcgctaagttctttggccgtagcgacctaatgtccttgatttactccgtccccgaaaccaaaaggcctggtactgtccaacactctaccttgtactcactcataattcatgcttttacgtgtgcttagatttcatgctatatagctgcctacgtcttaaaatataaagtgtattcatattttataagatganatata

SEQ ID NO: 39874 - DNA, 203 bp, Glycine max
gagggagaatttctttggaggataaggccttttggttacatttcatgctggaagaaacaacttgtctttacaagtgcatgtgtggttataaaggcttttggtttatggatgagggtgagaagggtttgcctgaccatgttatgggtgatgagaggagggtttttcaagtaattttgcatatggatgggaacctactggaacac

SEQ ID NO: 39875 - DNA, 419 bp, Glycine max
aattttgtcttaaaacgctgtttagcattattgcgccggggcatttatcaataaccaatccctctctactcttttatcttctccttctcttctctaccgttttatcttctccctcttcacttcattctttactctcctctacattaaccaccatacacaacacattcaccgtcgccgatctcacttctactctcaacgaagacaatagaacagaccttgtctatcctcttaacatcaacatacacagtttgactctacaacactcccatattctagagtctctgtcccccaatgtccgaaagcgtcttgaggttcttatacacatccactgccaacatgatgaattacaggctaaattttttgaaaagagaacaacatctcgatgccaaataccaaaaattgtattaaccactttacac

SEQ ID NO: 39876 - DNA, 399 bp, Glycine max
gatagaagaagcagaaagagaagcattagcaaaagcaagaagaactagtctaagcagaaatggcctcttcagtgatggcatctgtggccctcaaacctgcccctttcactgttgagaagtcctcagttagaggccttccctccctctcaaggaactcctcttcattcagagttgtggccagtggtggcaagaagatcaagactgacaagccttatggaattaatggtggcatggctttgagggaaggagttgatgcatctggcaggaaaggaaaggtttgtgcctcattaaatcttagtacataattaacaatatgtttttttgttaaaatgatttcattcctctaaactgggggtataagtcaagtaatatagtcattgatgagaaaatcaacacttc

SEQ ID NO: 39877 - DNA, 445 bp, Glycine max
ggaaaacgggggccgaccgcacgcgtccgcgcacgcgtgatcagatgtcagattacgactgaacggggattggtcgaatggtcggaaaagaatgttttactaactcccattgcttatttattattgaatcaaccgatcaacttgcttcggtatcgaacatttctttttgatttcaaaaattttccggaaaaaatttgaatctatttttatatgctaatcaattctactacttctgatcctgatgttattgcgcttgaaaaaaaaaatctgtgacgtatcgcccaaataatttgatacagactatatgtatcttttaccccacataagatgcctaatatttacaacactctgatagttaaaggtcgagatactcttggtcaacaaatttatgtgacttgagaagtacagcaactattaggaaataatccaattagagctgtagcta

SEQ ID NO: 39878 - DNA, 295 bp, Glycine max
gtgcacaaatgactatattcatttacgcgccgttaaattttgatcagctatcgctactcttaaacatctatactataaaaagaattactcatttaattcttctcagacagaaaattctaaatatctttcatccaaacaggcactctttaatttggctcaacttcttcagtatcatcaggattccttacatgcaaagcttaatataacataaactgaatacccctgtttcatttttcacacctcatatactacaacactcaatacatgattacgtctcaagtttccacatttaaca

SEQ ID NO: 39879 - DNA, 363 bp, Glycine max
gggttaaacaaggaggtaccaaatattgttagtgaatttgttgggggcaccaatttagaaattcacgagaggtacaaaactatcacggaaaagaacattggaaggttggaccagccttctcaaaactcaagagaatatgaatctactattggcatatgtctagagaaaagcctgagtgctgcattagattcttttgataatcttttttgtcgccgctgactgatttttgactgtcagatgcatggctgttctcaacctttaatatatcatagtgaaaagcagacagtttggtctgatcctgaaagagacaggaaaccttgcagtgatcagtgttaccttcagttaaaggtagtgaaaaatgtg

SEQ ID NO: 39880 - DNA, 191 bp, Glycine max
gttaccggtttggatcaaaagacccttctcttgggcgacgggccagtcactgattttggacacactaaccttgaacagatcccatggaagtctactgaagcttacatcattctttaatccaccagaattttcaccgataaagattatgctgccgcacatttgaaggatggtgcatagaaagctattatttc

SEQ ID NO: 39881 - DNA, 383 bp, Glycine max
caggtgtgagcttgagttatagagcgaagagaatggctcccaagggttgaatccttttggcttagatattcttcttatcaccttcactgagtcgttgtcttgctgtagatattgttctataaatcatcttttacaaggaatcttgctctttcatactcgtcttcagcttccttcaagatcagttttacttcattcttcatatgttcactgcttattaatgctttaacagcttttcctgatcttgaacttccacaaacaacaatcttgactacacggtggactccagttacatattttgagaagaaaatgtgcttgatgtttgtgttcggtgaagatgagaaggtggtgtctaggcagccagcaatttccccgtttgccttttc

SEQ ID NO: 39882 - DNA, 267 bp, Glycine max
tgttgccctgaaaaatgatctgaaacttcatccgtattttgaacatggagaagaaaaagaaaaacctgtaggtgatttgtccccaaggttgggggatcctagccaatatcttgatggcacacgaatttacatacaaggatcattatgggatgggtttgcagatgggaagggggacttcactgatggaccttatgaaattcaaaatcccgaagatttctttacagataagttttataattatggattcaatcccgaaggtggttctgt

SEQ ID NO: 39883 - DNA, 204 bp, Glycine max
ggttgagtgaagagaatggctcccaagggtttaagctttctggctgtgctaatatgcgttccagcactgtcactgagtccttctgacgctgcagaagggcagaataatggccttgttatgaacttctacaatgaactatgcccttacgctgatgacattatcacatatcatgtcaagcttacatacatgcgccacaagaacact

SEQ ID NO: 39884 - DNA, 191 bp, Glycine max
gtttttcaaaagaagaagactttggttgaaggagtgcatgctaccatggaggacagtgatttcagaacttatccctttgctactgcttctatcccatcaactggtgccatatgcactcggcttgatgttgctccaaggatacttggtgatttactaggcgtggtgacggcatacactacttgagttgcatc

SEQ ID NO: 39885 - DNA, 168 bp, Glycine max
gacttctaaaagctaaaaatcatcgaagtactcagagcatcatggatgggacggaggcactcctcaataagatcatcatggtcacagtattctctacaagcaagtcactgaacttaaactactatacagcaacatgccctatatgaaaatgcatccttgccaacacac

SEQ ID NO: 39886 - DNA, 334 bp, Glycine max
gctgtgacagactggctgctactacatgcaccacgtccaagggcaggagtgcttgatttggctacgacgacgcttcctacttggggaaacttggatacagccctggccagaatcgtgtcgttcgtagcgctggatttgagggagacaacatgctctggacgtgcactgaccttggccggtacaagggtccaagtctggttgacgcacttgaccacattagtgagctcataaggctctttgacccggcattaacgctctcacttcatggagcgtactggattgtacgcttagaaactgtgccagtgggacatgatcagaccggagccttgtaccc

SEQ ID NO: 39887 - DNA, 288 bp, Glycine max
agccccactcaaccaccgcaccactctctctgctcttcttctacctttcaagtttttaaagtattaagatggcagagacattcctatttacctcagagtcagtgaacgagggacaccctgacaagctctgcgaccaaatctgcgatgctgtcctcgacgcttgccttgaacaggacccagacagcaaggttgcctgcgaaacatgcaccaagaccaacttggtcatggtcttcggagagatcaccaccaaggccaacgttgactacgagaagatcgtgcgtgacacct

SEQ ID NO: 39888 - DNA, 410 bp, Glycine max
ggagagaaattttagtgattgatcttaaacgacaagtatggaggttacgttcaatttcaagaaaaattgcttgagaagctgtgtttgaagagcaacttcaatataaagtaaatgatttgtttttttttgttagatcagcatcaataaaaagtaaatgattgatcgattgattctagaggcatccgatacctgctcagtggtgtcaacagttgagtgttgaaatgggtgtgcccgctgagaacgatggctgcaaatgtggaccaaactgctcctgcaacccctgcacttgcaagtgaggtgttgggagagcaagcttcaagcagagatagcccttaattaggaataatgataaactattaatgtgtagctaaaaacttatgtattatgtctgtgatggttttcgtgcactc

SEQ ID NO: 39889 - DNA, 428 bp, Glycine max
  unsure (1)..(428): unsure at all n locations
gccactgatttctccttcatgtttgcacggttacaccgttataatacaagccttaatccccacttttgtctctcacaatcgctctcaatctttccagattttctcccaaaccgttcaaacccgtatcgcgtgtcaaattgttcttctgattttctcattgatcgcgattatcgcatctcaaatcgaacttgaatcagtcatctttatatggaggggaatccaagaggtacaataatatacccagaggacaccatcatttgacaacacagaagaaacaggagattagggaagcctttgaattattcaatactgatggctcangtactattgatgccaaggatctgaatgttgccatgagggcccttggatttgaaatgacagaagagctcattaatcaaatgaaagcagatttggacaacgatggaagt

SEQ ID NO: 39890 - DNA, 411 bp, Glycine max
ttccgaccggttgcaaaagaccaccgaagggggaaccgaaaaaaatttaagggttttgaagggcgggccggcaatccaagaatttttttttgaactttccgccaccggctcatttaacaaggcttgaccaaaccaaaaagctttttttgaacaacccaaaagtgttctcagctcgaaaaaactgggaaaggaaagaaacccggaaagggtgggaaccgcttttggaaatccattgggctttggatttaagactcccagggaagccatcgaaggaacctacattgacaagaagtgccccttcactggcaatgttttcatccgtggccgtatcttggctggaacatgtcacagtgctaagatgaacaggactattattgttaggaggaattatctccattttatcaagaagta

SEQ ID NO: 39891 - DNA, 421 bp, Glycine max
gagactgaagatgaggactcttctgctcccaccttcactatcacagtggatgtgaaatctggaacttctacgggtgtatcagctgctgatagagcgaaaactgttcttgctctgtcatctcctgagtccaaatcagaggatttcagaagaccgggtcatgtgtttcctcttaagtacagaaatggtggggttcttagaagagcaggtcacactgaggcctcactggacttagttgcactggctggcttgcccccaatttctgttctttcggctcttgttgatgaaaatgatggctctatgcaatctttgctcaatttaagaaagttagcatcggaatacaccttaccaattgtctcaataactgatttgataaggtatcggagaaagagagaaaaattggttgaaagaacctcagtttctc

SEQ ID NO: 39892 - DNA, 426 bp, Glycine max
  unsure (1)..(426): unsure at all n locations
gaaagagagaagtaacatcaaggtgcagagagaggaattgaagcatgggaagagggaaggtggttctggagagaatacagaacaagatcaatcgccaagtaaccttctcaaagcgcagaaatggtttgctcaagaaagctttcgagctatctgttctatgcgatgctgaaatcgctctcgtcatcttctccagccgtggcaagctttttcagtatagtagcactgagtatttttcttcgatctctcatcttttttatcattataatcctaggttttgatttttcaacatatattgctggttggtttgggttgtttttttagtattacacacacacacatatatatatatatatataggcaataaatctctgaaatttgcgtggttccgattgttttcttctattaattgngatgtagctagggttt

SEQ ID NO: 39893 - DNA, 433 bp, Glycine max
  unsure (1)..(433): unsure at all n locations
ggaagagaagaggctatttgcgttttccactttgttttgtcgtcgttttcattcagagacggatcaaaacggcatgtggtggccgtgtgggagaagtgggggttcttccttttcatcttcttccactgccgaacaagttactgaaggaatcgatggcactggcctcaccgctattgttacaggggcatccagtggtattggtgctgagactacccgtgttcttgccatgcgtggtgttcatgtaattatgggtgtgagaaatgtggtagctgcaaaagttgttatggaagcaatacttaaagagattcccaacgctaaagttgatgctatggagttagaccttagttcaatgatatctgttagaaaatttgcattagagttcatttcatctggtcttccattaaacattctcatgntagagtataataactat

SEQ ID NO: 39894 - DNA, 435 bp, Glycine max
gtggtgaaatggagcaaaagtacaatatggtagagcatgacttgaaagatgaagaagatgtagaggatggagaaaaccttgcccctggttcatatgagattctacaattagaaaaagaagaaatccttgctcctcatacccatttctgtacaatttgtgggaaggggttcaagagagatgcaaatcttcgaatgcacatgcgaggccatggtgacgagtacaaaaccccagcagcgcttgccaaaccgcacaaagaatctgcatcaccaaagcctatcaagaggtattcctgcccctatcctggctgcaagcgcaacaaggatcacaagaagttccagcctctgaagacgatcttatgtgtcaaaaaccattacaaaaggacgcattgtgacaagagttacacttgcagtaggtgcaacaccaagaagttctcag

SEQ ID NO: 39895 - DNA, 294 bp, Glycine max
  unsure (1)..(294): unsure at all n locations
tgctttaatttgtcgtgaactataancaccggtaggggaaggagaatatgctgggtttgttctcatcgcgctgcagtagttttgggagcatgcccatgccaaggctcacgctaccaaaggttccctatgaaaatgaaaactggctatggtgagcgtattctgcacaatatcagtcacatagttgatgcataatggaatattatttatgacacgttgcatatatgtctaatcagtgaggccgaggttgactcttctaacgactgactttagggatctaaatacacatcatactct

SEQ ID NO: 39896 - DNA, 245 bp, Glycine max
ggagactgtggtgatcagtatcagggcgatgttagggcgcttgatatggatacaatgacttggtcaaggttgaaaattcaaggctcttccccaggagtcagggcaggtcatgcggctgtgagtattggaaccaaggtctacatcattggaggggttggagataaacgttattatcacgacatatgggtcttcgatatctgcactagctcgtggactcagcttgatattcgaggtcaacaaccaca

SEQ ID NO: 39897 - DNA, 417 bp, Glycine max
  unsure (1)..(417): unsure at all n locations
actcggtctcggaanttcccgtggtcgactccactgcgtctcgtaccgggctgctgtagaagatctatcagaagggggagtgtcaaagggctggtagttgtctccaagtccaaagaggagaagtataagtataagcgaaaggaatgggcgaatcatagagcatcgaagtggatctctggaagcagcagctctgatgaatgggcgccgttccgtagaccgaaaatagtggtgtaactttggtgccccgctttctcgatccagtggaaatgactagagaatgcttcttagggctagggatgatacgttgcgtcgtttcaatttctctcatggcacccacgactatcatcaggaaaccctcaacaatctcaagactgctatgcacaacactggtatactctgtgccgtcatgcttgacac

SEQ ID NO: 39898 - DNA, 163 bp, Glycine max
gtcattgaattgaagttattgcgcttcctggatatgcacgtgtcgaaaagctccaaggtgccatgcggcattttattccaagagttttagaccctcatggattgagacttgagtgtcttcagatttctgacgctatggtgaatcttgctattcagagatgttc

SEQ ID NO: 39899 - DNA, 359 bp, Glycine max
cattgaaatgaggtcaagtgtgctgagcttacatgggacatctatagaatgatacaatgtttagaatgggagcctagtggagtattctaccaaaaacatacagttaaacctaaggagaatggtgacaataattgatcattcaggagctttcgggataatagacatgaatcttactgcagatatgaccgatccaactgtacctgctaatcctagaaaggcttgcgtgtaccgaccatgtgtgacacatgtgatagcagttttggctagtatttgtgaggagctgtcatcagactgtgatgggctagtatatcgtgtagccgtagggatggctggtcttaataatgtgtctcaggtggaga

SEQ ID NO: 39900 - DNA, 448 bp, Glycine max
  unsure (1)..(448): unsure at all n locations
gcccagcggccgcccacgcgcccgccacgcgnccgcgcggctggagcgcgacagaaggggagaaaagaaccaagcgacatgcttccttactaatacatcatggcagacgagacccatacaagttgatagctctgaggtgatgtccaggatcgtggtgtttttgactttctcggtaagaaaaaggatgaagaagacgagcctgatgctcaggaggaggtcatcgtcaccgagtttgaaaaagtcactgtctcagaccaaggagagaacaaggacagcctattagaaaagcttcaccgatctgacagcagctgtagctagttaagtgaggaggaaggagaagatggagagaaaaggaagaagaagaagaaggaagagaaagggctgaaagagaagatcgaggagaaaatagagggtgatcatcatcatcacaaggatgaggacacaagtg

SEQ ID NO: 39901 - DNA, 381 bp, Glycine max
gttttcggggttggttgttctctcgttgcgttgggctttgggtttcgtgtctccgtcccttctcctccttggcctccgttgtcgttttttgggcttttgccctcgctcttctcctccttgccttcctttctcctccaagttgctaggtgtcagtcagactccgaagatgtagtggaggctgctgaagaatcaagtgatatcggcattgttggtgatgatgtccaagactttggtgatgggaccttgccttctgccccaggaattgaaacaataagtgtttttccaaaaaatagtgcgagattgataacagctggagaagagacagagctgcttgttggtgttaaaaatgatggggattcaagcttgaatgttattgcgatc

SEQ ID NO: 39902 - DNA, 425 bp, Glycine max
gagagtgatcgaaaatggagataagaaaaatgttgggggttgttgtggtgacactaattatgtttaacaatggtgagagtgagagccaacacagtctcgttgccaatggccttggtgccactcctccaatgggatgatagctggggtgaaatgatccgggatgtcgatggaaatttggtagctcataaaacaaaattaatttccttctggcatcaaagctgttgcagattatgttcatgggaagggtcttaagcttggcatttattcagctgcagggtattttacttgtgcaaatgtgatgcctggttcacttggttatggagagcaagatgccaagactttcgcatcatggtatgctttcaaaagcagatatgaatgaagtttatgctgattatgcaagacctggtggttggaatggtatgaat

SEQ ID NO: 39903 - DNA, 396 bp, Glycine max
aggcgtgcgaacacgcgtgagggatctaacactggtactcctagctagggtgacagactgctaaatggagaaagcttagattgatgactctggatcaaaaaccaatgacactcaggtgaaactatggtgatattatgcctctgcggctaggaagagcagataagaagatattcatagctcgtgctaaatcgtatcatgggacaacattgatagcattcaggcgttatggccttacggctctgcatcaaaaagtcgatttgactgcttcgtttgtattgcgcactgactgtgcacattactggaggcatgattttccaggtgagacagtggaagaagttgcgactagattaggctataatgtggagcaggtgattctgaaagagggaccagagacta

SEQ ID NO: 39904 - DNA, 392 bp, Glycine max
gcatatgattttgatgatgagtttccggttaagaatcatcgtgaagatctagatcggaaccatgatgttgatcatgtggaaaatggggactacaatccaaagaagttgcataccattggttcaagcattctattcagctgggagcgttgctggcatggattttgaaggggacaaagaattctacagcaatgcagaatggcaagaaagagtcgagaaatggagagtcaggctagaatagagaggtcttctagacaaagaatacggaaaagaagatcagggtgaagaagatgattaccttttgggtgaagctagactaccattgtggcgcatggttccgagatctagaagcttaatcaatgcatatcgcatagtgatggtgatgaggctggtca

SEQ ID NO: 39905 - DNA, 198 bp, Glycine max
cctaaagtgtggcagaagcaatgtctggcatctatccaaataaagtcatcaaatcttcatcggagaattcttgacaaaacataataaagttggttaaagatggttttattatcaagaagccaactaagattcactctcgctctagtgctcgtcgaatgaatgatgacactaagaatgaacgtctctatggctatgctt

SEQ ID NO: 39906 - DNA, 400 bp, Glycine max
cgagtcagagagagcgagagaaaggcgcgcatgatgtcggacgaatagcatcacttcgattctgaggcggatgcaggagcgtccaagacgtattctcagctggctggtaccatgcgcaagaatggcttgacttgcgatcagatccatgccttgcagggcagtagagtgttgtacgtgaaatacaggcgagcatggacctgcaaagtggcactctgttgcaattgacattattaatgggaaagagatcgaagatgttgagcgatcatccgacaaatgtgatgttacacatgtgaatcgcactgactatgagcttattgatatctatgaagacggctacgtgagtgtgatgactgataatggacataccaaggacgatctgaagctatctactgatgaggca

SEQ ID NO: 39907 - DNA, 369 bp, Glycine max
agtcaaaagcagagaagagtcactcagggcagcagtcactgagtgaaaactactggcaattgtctgctgatgagaagcttacctttgaaccaccgcctatagattgcacaactagcggagattgcatgtaacgcagtggtatgtattataccaggggcgctggtgacacaccacattattaacgcctatgttgctataatgatgctcgtacagagaacatcattgttggatgcactcgcattgacgagtcaagactgtgaaagatgaagactgattacgaaactgatgaatggtgggctaatgggataagtgagacgcatggtatggtactatttgtgcctaaggtaatggatcaagcattgatggtgg

SEQ ID NO: 39908 - DNA, 388 bp, Glycine max
ggcagcaacagcagcattcactgaaggcactcaggggggtttgcggtttcagagattgtgacacacacatccatggccaccaataccaacgccgactcagatatgtcgcaccagctatactagaatgatgccgacatccatatgatgctagccgccgacgtacacatagtcaccaaagactgcgactttcaaaaggaacgttacatcttcaagcgcctgatcgacgggatttacattaacaatccttgggaagacatgggacatgcttcagttagctattagggatactagagcaactgaaaaccctgatgagatcatcgtacaatccttaaggccctatgatcgaagagcagatgtgaaatatgctaaggacactgaagctcatgct

SEQ ID NO: 39909 - DNA, 312 bp, Glycine max
  unsure (1)..(312): unsure at all n locations
gacggcgaaaagccaaaaaacaacgaaggacgcagannagcanggctgncacgggggcatcgccgaaagggaacagcagggcnncagcaggcnctacaagcaagncacngagcncaaacnacnaggcaaaaacangcccngangnggaaggcanngnngccaaggcagcgaaggaagccacngcnagggacaaaaccgnnccagcngcacancngcgaangcacnaccangacngnnncggacgggggcgagaagccgcagagccgcgaaaggcaaaaggaagcaacaaagcagaaaaagaagggccaccaa

SEQ ID NO: 39910 - DNA, 360 bp, Glycine max
  unsure (1)..(360): unsure at all n locations
agggaaagaaagggaggaaagagtgcttctgcttcaggaaagatgactctgaggtcctatctgataataatgttgagcaatatgatcttgtcccatttagattcccatgtgaactgtgatttggatgagcttctcaaggcttcagctnttgtgttgggtaagagtggaatatggattatgtacaaagtggtgcttgaagatggacttgctttggctgtgagaagatnnggagaggagggtctcaagggttaaagagtttcaacagatgtagaagcaatatggaagttatgacattcaaatattgcaactctgagagcctattactggtctagtgatgagaagcttcacatatatgattat

SEQ ID NO: 39911 - DNA, 387 bp, Glycine max
gaaatgtggggatgtcaatactgctaggttggtgttcgacaaaatgcctaatagagataggatttcgtggaatgccatgatttctgggtattttgaaaacggggtgtgtttggagggactgagattgtttggcatgatgatcaaatatccggttgatccagatttgatgaccatgaccagtgtgattactgcatgtgaacttctgggtgatgatagattggggaggcagattcatggttatgttctgagaacggagttcgggagagacccttcaattcataattcgttaattccaatgtactcatctgttggacttattgaggaagctgaaacagttttctctcgaacagaatgtagagatgtggtatcgtggactgcgatgatatc

SEQ ID NO: 39912 - DNA, 422 bp, Glycine max
gagttaagaatgtgggtatgtgtttcagaatattttagtttgaagagagtgacaaaagctatcatcgaagcagctggccatacctgtcaggatttggatctagagtcacagcaaagaagacttcatgatctgcttcaaagaaaaagatatttgcttgttttggatgacgtgtgggatgataatcaagagaattggcagaggctgaaatctgcactagcttgtggggcaaaaggcgcttcccttttagttactactcgccttttgaaggttgtggcaatcatggggacattgcctcctcatgaattatcggtcctgtccgacaattgattgttgggaattggttaaacaccaaagccttggaccaaatgaggaagaacatgtggagctcgaggacataaggaaagagatggtaaagagtgtcg

SEQ ID NO: 39913 - DNA, 302 bp, Glycine max
cctgagtgcggctgaaataagactactgatcgagataactaggagcatggtgatgataaatatggtgattgttttattggttgctacaatgcatggaacatggctatggcatgcgtactatatactgacattgacaatgaacactccctatagggtctgatctaaggacgtgaaatgctcaccttggaggatggctgttgtaacacacatcatttttggatcaccaaccattactaagaaatgcttatgagcgaccacatgatacatacgtggcacactgtctttatctgactccttaacaa

SEQ ID NO: 39914 - DNA, 417 bp, Glycine max
cttaattatatcattttaatcttattgtcaattatttagtatttttggtttaatcagggggatctgctcaaaacatattaaccgttaaaactatttcttgatcttcctaatcactatgcacaaacatatattgccttcactccttattagcaactttatttgactggaacatctgttgaaagggatagcattacattattgttattgtacttcttttatagaataaaattttaactttatttaaaagtttgcatattacccactttgttttttgttcattgttcttgccatacgaaactgtatcatatcttttcaactactggttataaaatcctaatttgtacttacatactatattatccataccttaagttaaatatcaacctttgtataaatttctcattcactcatttaaaa

SEQ ID NO: 39915 - DNA, 438 bp, Glycine max
gaagaagaggcagagaagagcacgaagaatgctttggggaaggtgagcatggatggtgcaccgtatctacgaaaggtggacataaagttgtacaagagctaccaggagctgtcagatgcgctggctaagatgttcagttccttcacgattgaaaagtgtggattccaagttatgatggattttatgaatgatatctatagctctaactatgtaatcacatatgatgacattttcgttgactgatactttgtctgtgttgttttttatggttttgaattttatttatttcaatttgttttttgtttaataatttttttattattttttatttattaaattttattctattttttttatttttgttttttttattatgattttttgtttattatttttattttttatttttattcttatttttatatttttctatttttt

SEQ ID NO: 39916 - DNA, 397 bp, Glycine max
gaacacactcatccaaacaaccttctttctttttgtgtgagcctttctttcaggttcttaacttgatcagtgtgcagtgtccaaatcataagggtagctgcaaattgcaatggctaagcatgatgttgagggtggttccttctctgcaaaggactaccatgatcctcctccagcaccgttgattgatgctgaggaactcacacagtggtccttctacagggctttgattgctgagttcattgccacaatgctcttcctttacatcacagtgctcactgtgattggttacaagagccagagtgatgtaaaggctgggggtgatgtgtgtggtggagttggcattcttggcgttgcttgggcctttggtggcatgatcttcattctggtgtactgcact

SEQ ID NO: 39917 - DNA, 382 bp, Glycine max
gaatatgaggctgagaatagcacgaagagcgcttttttgtacgcgtgattgtactgaacaccatacatactttgggtacgcgtaaacttatatatgctccccattcaatcgtggtatgcgggaaataagttgacatttatactgttaacaattgttttatccgacgtatgatcaccatgttctttataacaagtctgtagaggaagatgtttctcatcaaacaacaatagacttacgttagcgtcatactacctgtggttagttcttatacatatgaaagaaatgaagtctacctgacccttgctaaaaatgaagcgacattgctgcataaaaaaatttcaaaccaagctttttatgatgacaactttatcatgatttttgc

SEQ ID NO: 39918 - DNA, 412 bp, Glycine max
ggcagttcaattccaatatattccattgtctctgtgtatttccctacctctcccttcaagatgcagatcttcgtcaagaccctcaccggcaagaccatcacccttgaggtggaaagctctgacaccatcgacaacgtcaaggccaagatccaggacaaggaaggaatccccccggaccagcaacgtctcattttcgccggaaagcaacttgaggacggccgtacccttgctgactacaacattcagaaggagagtactcttcacctcgtcctccgtctccgtggtggcatgcacatcttcgttaagacactcaccggcaagaccataaccctagaagttgaaagctccgacaccatcgataacgtcaaggccaaaatccaagacaaggaaggtattcccccggaccaacaac

SEQ ID NO: 39919 - DNA, 402 bp, Glycine max
ggacaacaaatcatgcgtttcgaatagattatcctaagtcgttggaaatagagctgcaatggcttcaagtcaggacgaggtgacccttttgggagctactgcaagcccatttgtgtgcaaggttcatattgccctcacgatgaagggagttcaatacacatatgtcgaacaaaatttgatgaacaagactgaactgcttctcaaatccaacccacttcacaagaaggctccagtgtttattcacaatgacaagcccataacagagtctcttgtgattgttgaatacattgatgagacatcgaagaacaaccccatcttgccttatgatccttaccaaatagccttggctcgcatatggtccaaattcatttatgacaatgttttttgtgcttcatgcaaatc

SEQ ID NO: 39920 - DNA, 343 bp, Glycine max
acgcacgcgtccgagatgtctcacaggaagttcgagcaccctttgcatggttccctcggattcctccccagtgagcgtgcatcacgccaccgcggcaaggtgaaagcatttccgaaggatgacccatcaaaagcccctcatcttactgccttccttggttacaaggctggaatgactcacattgttcgtgaggttgagaagccaggatcaaaactccacatgaaggagacttgtgaagctgtgacaatcattgaaactccacccatggttatagttggagtggttggttatcttaatacaccacgtgtccttcgctctcttgccacagtatgggctgagcatt

SEQ ID NO: 39921 - DNA, 281 bp, Glycine max
gtcatggccgcaggattttcgtggtcgcggtttatgtgccagctactggtcgattcatcatgaacctgttctaatgaaccagggacagttgacaaagtgtgtgagattgtgaataaacaactggctcttactgatgataatgtaatcaacggagagtcaaaatttacagcacttgatgcttattctctagacacggttgagattgtgatgggacttgatgaatcgtttggaatcactgttgaataatataatgctcagactattgcaacagtttaagatgc

SEQ ID NO: 39922 - DNA, 372 bp, Glycine max
gtctgaaagggaaaatataaaaagtcgcatcctcgtctggatgaaagggtacctctttcaagttgaaccatgtggttgaagcacatatcaaggcctgctcacacttaatggcttgcacgctccctgcttcattactcctaattaagggttcttatcataaaccagctctgatgagagacattgctgcccgttactccccgggtatatttagtctaaacagcaatgggcttatccagaaaaggtccaagcgtcaaacgaattttgttactacgaatacggttactgccatacatgccgtggcaattccagtacaaccagctccggtggaaagtgcggagtatataaaacagctagctgaatactactgtttca

SEQ ID NO: 39923 - DNA, 297 bp, Glycine max
ggataactattttcatatgaaaagaacagatgtgttttcggggacataggcattcgataagcgtgaataggttcaaaacggtacatatggtaatgtgtacagatcaagacaaaatgcctcttgtaaaatctgctctttgatcaaaacttgtatccacgatgacaactaaagtgtacatactaccactctacgttatgtttccattctacaaatgctgtcttgagatccatatgtcagaaaggtattggatgtcaaatatggacatatcaatgaacttttatcagaactatacttggt

SEQ ID NO: 39924 - DNA, 324 bp, Glycine max
ctatacgagttcttgcgaaaacctaccaaacctatggctcactctattacgctacactttaatgggatggacctgaaacttcctttgtaaaacagattgatacacagcatcactgattagatttcatgtcttgcaattgcagtggcacccttcaatgtgaaactcatgtttaacagtatctccaactttcagaaacagaaccttaggatattgtttgataccgtccataataacgttggcatatcccgttaagtatgtaactagctggctgactacatttttatttatttatctaataaaatgtaccacctggatttcttgatt

SEQ ID NO: 39925 - DNA, 402 bp, Glycine max
gacacgcagttgtattgtagaactgaacaagggtttctctttctctttctctgtctgcttcttcactttctctcgtttcaatcgaaaaaaatcatgggcagaaaattcttcgtcggtggcaactggaaatgcaatgggaccactgaggaggtgaagaagattgttactactttaaatgaagctaaagtccctggagaagatgttgtagaagttgttgtgagccctccttttgtgttccttccttttgtaaaaagtttgctgcgccctgatttccatgtctcggcccaaaattgttgggttcgcaaaggtggtgcttatactggagaggttagtgctgaaatgcttgttaatttgggaattccttgggttattattggtcactctgaacggaagcagcttttg

SEQ ID NO: 39926 - DNA, 398 bp, Glycine max
ggaggctcggaattgcatagagattggaatcagagatgctaacaatagcaatagcgttgtttactcttatttaatttcattcgtcgtatcggagtttgatggtttcatcgaagaaacaatacccccattcttcttcaactctctccctccctccgagagaggatcctaaattctaatcattcaaatctaatctcataataatggcggctgtgtcaggaggagggagtgagatatggaaggcccacacggcaatggccatggtgcagttattcaacggaggttatcacgtcatcaccaaagttgctctcaacgttggggtcaaccaaatcgtcttctgcgtcttccgcgacctcattgccctcgccattctcgctccactcgcttacatccgcgtaaag

SEQ ID NO: 39927 - DNA, 385 bp, Glycine max
ggcattcactctgtgagagaaagagatagggtgggggagagagaggagcggaagtgagaaaatgactacgaggttcaagatgatcatgacgactagaggccacgtctgctcctgtcacggtacgtatcgtgaagcaccgtaagcatccagatagtcgagataacgtcagtggcatgcaccatcaccgggtactcttagacaagtaccatccgggattcttcggaaaggtggctatgcgctacttccacatgctccacatcaaattctactgagccatcgtctacattgatatgctgtggtccctcctactatacgaggctctggacatggccacggccgacaatgcgccattgctcgatgtcacccagttatgttgctttaaggt

SEQ ID NO: 39928 - DNA, 395 bp, Glycine max
gtatgatgtggatcttgttcagaggctgttagagcattttattattcaggaacacactgaaagttcaagtccaagcagacagtccttttctgataaacagcatatgggaatgggatgcatcctaaatgccaaggcaagagtggcaaggcttgttgacagttatcttacagaggtgtccagagataggaacctttccctcaccaagtttcaggtacttgcagaggctttgcctgagtcagctaggacctgcgatgatggactatacagagcaattgattcctatcttaaggcacaccctacactttctgagcatgaaaggaagcgactatgccgtgtaatggattgttagaaactgtccattgatgcctgcctgcatgctgctcaaaatgaaagac

SEQ ID NO: 39929 - DNA, 319 bp, Glycine max
  unsure (1)..(319): unsure at all n locations
acagcatacgacacgagaagactacagattgttttactaacctacgccctacgggttagcgatacctgaacgaagaggttcaagatacacgaacgatctagctgcacgtcatgaccgatgcatagattnctcatgaacctcgattgtgccctaacgtactctcagtcacaatagacaccgtcttagtcgtcttcacaatcaatggcaccgaagcagaccatggctgagaacaagatcgcttacgatgcgaagctgtgcgacctaatggaggagtacggtcagatccttggtgtgaacttcgatcacgtgggatcgaacc

SEQ ID NO: 39930 - DNA, 410 bp, Glycine max
ggaaaaaagagtgacactcattttaaacggaaattgctttagcataaaagagttcaagaggaggaagaacaacaagtagtaataactatatctacatagttatctttctcttgagctttgtaatttgaaacctatagatggaatggaggaagtgctacttggatgttatattggtgcccttggtgtttctaacaagcattgggtaccatttctggctatggcataaggttcgaactcagccacacacaaccatcattggcatcaatgctagtggccgtagaaattgggttaatgccatgatgaaggtacctagctatcttattttcattcttgtttttagttttggcttgctaagagtatatataattcttatcactattattttttttctttccaagttatcatcacta

SEQ ID NO: 39931 - DNA, 407 bp, Glycine max
gatagaggtgcggattcttgtttttgttggagatctttctttctttgattccaccagcctcattgtcttagggtttttgtttccagcatagatgttgttgtcgatgattacttactagttttggtttgcttgattgaagatcaaggaaggaaggaaggaagatgttgggtgttataaggcacaagagtattcgccctgccttctccgcaatcagacacttgtcttctgcagctaaagagattactgtcagggaggctctgaactccgcactcgatgaggaaatgtcagctgatcctaaagtgttcttgatgggtgaagaggttggggaatatcagggtgcatacaagatatccaaggggctgctcgacaagtatggccccgagagggttctcgatactccaatcact

SEQ ID NO: 39932 - DNA, 406 bp, Glycine max
gaagtcaggatggcagaggtgaagcttcatggattttggtatagtccctacactttgagggtggtatggaccttaaagttaaaggatataccatatcaaaacatagaagaagaccgctacaataagagtcttcaacttcttgaatacaacccagtatacaagaaaactccagtgcttgtccataatggaaaacccttatgtgagtccatgcttattgttgaatacattgatgagatttggtcacataattcattacttcctgctgatccctacgagagagctctggcaaggttttgggttaaatatgctgatgatgacatggtaatttttaaaaacttaatcatgtagtactacttaaagtttctagcctttgatcttgatcaagagcacctgcatttatacaatt

SEQ ID NO: 39933 - DNA, 300 bp, Glycine max
tccgaaagggcaacaaaaaggttgggtgatggggcccattgattccgagaaggaaagaaacgatgtctgcgccacaacagctatactctcgcgcgaacaccgatgaattcgacctcgaatcaggagaaaccctctacccacagctgagcggctgcaaaaaccatctccgatggggttccatccggctggtctactgcatccttttcgagcaaatcgttcttagcacgctagtcttcgacaccaccgttttatatactccaatcaatgacctactcattggcagttccaccctacttctca

SEQ ID NO: 39934 - DNA, 383 bp, Glycine max
gggtacgagaggaggattttctcgcacccaagaccagcatgtgaaatcgaaaagggctcttcgttgaatttgctgttcataaaacccttctccgacaacttgtatctgctgctgtacttcttctataacgtggttacaccgtacatgccaccgtccaagatatcaaggatgaacatgagacgaaacatttggaggaaatggaaggagcaaagagtcatctccattttttagaaatggatcttcttgacatcgactccattgccgctgccatatagggttgctccggcgtaatccaccttgcatgtcctaacatcattggtcaagtcgaagatcccgacaaacagatattggaaccggcgattaaaggaactgctaatgtgttg

SEQ ID NO: 39935 - DNA, 223 bp, Glycine max
ttggggactttatatgagacggatcaactatgtgtcttaggggatatatttgatctccgattcattataatatctgataggtttccatcctctccgactgtatatgaattaaaggattcatattatagtgcttcccgatctatatttattgctatgcctccatcttctggtgatgtctcaccacatcctattgaaaaggaaacatataattttgcacaagaca

SEQ ID NO: 39936 - DNA, 454 bp, Glycine max
cgacccactcctgcttacggatgacaacagacgacagattgagttatctgataacaacacatcttcgggagagagatcattacaatggggtacttggctctccattccgtttacaccttcgtttcgtcgtcatcgccatcgacttctatcacaacgcgtaacctttatccctccatatctgaccaaaacgacgtcgtgctacatcggcagcggacccgtcgatatacatcatggccattaaagcggctcacctgggtctgaacaccacttacttcctataacctgacactctataagcgacctgtctcaacgactgatgcattcattacaaggcactttagcatacataccacatgtaatacgaggctaaacatgcattttccaaccatgacctcaagttttcatttgtcaaaattattttcatacattacttcccaaaagataattcatttct

SEQ ID NO: 39937 - DNA, 259 bp, Glycine max
ggagagagagagagagagaggcacttggaatccaaaaatgagagaaatcatcagcattcacataagtcaagccgggatccaagttggcaacttctgctgggaactctactggctggaacatggcattcagcccgatggcatgatgcccagtgacttcttcttcggtgtagcccacgacgcctttaacaccttttttagcgaaaccggattcggcaagcacgttccttgcgccgtcttcgtcgatcttgagcccaccgtg

SEQ ID NO: 39938 - DNA, 227 bp, Glycine max
  unsure (1)..(227): unsure at all n locations
gaagagtttgttgtgagctataagctagtttatcgtgaggagaatatngaagttgttgttttctttgttgctgcagtagttttggtagcatggccatgccatggcgcaagctaccaaaagtttcctcttcgaatgaaaactggctattgtgagcgttcttcggaggtaaaatgcgcaagttttaagcttgctgtggaagcgcacaacattcgagcctttaaaaccat

SEQ ID NO: 39939 - DNA, 246 bp, Glycine max
ccgcgtatagtgggcagcgtagctctgaattgggaacgactgttagacaagatagtcacatgaacaaagccaagctaatcaacatgcttgatgaggtggaccaaaggtacatgcagcaccacagccagattcaaattgtgatattctctatcgagcaatctgctgggataggctcaactaggacgtacactgatctagcactgcatacagtttcaaatcaattacagcgcctgaaggatgcaataa

SEQ ID NO: 39940 - DNA, 155 bp, Glycine max
gggagccagagtaataataatgggtataatgctgcagcaacgggtattggaaaaaaaattattccaaaaggaaaagggggattccaaattactattgtggatgccttggatgggccttaaatgaatgatattatacctctccgaccagaactttt

SEQ ID NO: 39941 - DNA, 428 bp, Glycine max
ttccaaaagaccacccaatggggtgtttaagtgagtttgttgatcgagggaacttgaaacattgtgattagaatgaaggtccttgccttcttcgttgctacaattctgagagcatgtcaatgccatgcttactatatgttccctctctgaatgaacactggctatggcgcccgttcttcgaaggtgaactgctcattttggaggcttgctgcataaacacacaacatctttggctttgagaccattcctgaagaatgcgtagaagcaacatatgaatacattcattgccaacagtatatatcatacttcagaacagttaaccaacactctcacttttatgcctgagacctagaactccattccaaggacacatttgtgttcaatatatatgtcaccgtactctttaatattccatactacctcataaa

SEQ ID NO: 39942 - DNA, 290 bp, Glycine max
ggttagtccagatggtacgcaattttccattacatggcctgatcggagaatacgtgcgttccggttcagttcaggttaactaaggcgaggttatgatgaatccctggaggctgctcatgatctgcaaagaagtgatgcttcattataccggttggaatccattgaatgtggttgaagaatggctgtcgagaaagaaattgagacgactgaaagtgctcttcttacaaatgcagtttttgactaaagttccgatgttcttatatatgcaaccttgcttgggattaaaattg

SEQ ID NO: 39943 - DNA, 384 bp, Glycine max
  unsure (1)..(384): unsure at all n locations
ccgggncgacccacgcgtgacgcacggcctccataagctacaaaaagacgttttagtgtattttattgcatcacacacacggccacatagggaattctcttgcttttatagcaactttttttgcnttgattactcaaacaacacttagtgttcttaggttattattcttgattgacttcctaaaacattctacttttgnnnnnnaattatttgagctcctatcacaatttccctccaacaccttaatggtttcctttgcattaaaacttcacacttcacaactgacacttattttgttcatttgattcgtttaatattctcaaaaacccatcattgattgaacttgcaaactatactcatcggaactagcttttttggttttct

SEQ ID NO: 39944 - DNA, 199 bp, Glycine max
  unsure (1)..(199): unsure at all n locations
gatctcaaagaaaataaaatcctcaattttctgagcagccatacgctctctctctggctctcgaaaattctcattttgcatagaaaatctgaatcatgttttggcaagcgtatgtctacnatcaccttctgtgtgacatcnaaggtaaccacctttctctttctgctatcatcggccaagacggcatcttttgtgctca

SEQ ID NO: 39945 - DNA, 453 bp, Glycine max
gctcgacccaagccttccccaaccttctaccgtttagaagccaccaaagggcaatgcaagggcgcctagggggacaagagagttatcacctacagatactgcttcgtgcactcactgtcagatgctcgtggtttggattcagaatcaactaacacaaaagacgaccaaggagatagtattcaactatgtaaatcacctgtgcgagagcttgccaagtccaaatggagagtcagtagtagactgtaatagcatttatggattgccaaacatcacgtttactgttggagacaaacctttcaccctcacccctgagcagtatattctgaaaactggaaaatgcattgcagaagtttgccttagtgggtttattgcttttgacattcctcctccttaaagtcctctctggattcttggcgatgttttcatgaaggtatatcacaccctctttgacta

SEQ ID NO: 39946 - DNA, 262 bp, Glycine max
  unsure (1)..(262): unsure at all n locations
ctaatcttcaaaatttaattaacaattttataaaccctttttgnnncccattttcatacatttacccatattatattttttatacaccaccttacaacaacttgntatttcaaattataactnccaattcactcttcaaacccaacttgtcaaactttcctaggaaattgaatgtgttccttgttttatcccattatcttttttaacatccccacattaattatctttcttacattccttcaaacaaaggattacctttttt

SEQ ID NO: 39947 - DNA, 438 bp, Glycine max
ggcgtgacggccagcgcgtccacacggttgcgaaaacaccttataggggttgtcctaatgtaacacaccgggccaattgggaaaatcgtcatgtggtgctaccttatttaccaaaaattctcaagggcctcaataaggttggatcgactagtcctcaaagtggaatggacaatgtgagaaaccctgttggtaaccctcttgcaggcattgacccagatgagattgttgatacacgaccttacaacaacttgttatctcaattcatcactgccaattcacgcggcaacccaaccatgtcaaacttgcctaagaagtggaatgtgtgcgtggttgtgatcccatgatctgtttgagcatccccacattaatgatctggcttacatgcctgcaaacaaggatgggcgttttggattcaacttacttgttggtggtttcttc

SEQ ID NO: 39948 - DNA, 345 bp, Glycine max
ggaccatgtcggggttttttcttggctagtacgggttcccaaagcgtctgtcctccttatgttgaaccggtgatgatgttggttcagggtctttgtcatgctctacaggagtggaatcctgtaacaagggaaaacataacaactcagggatctcagcttctagactactctccctctgaagcggaggactagtgaagaaagactctgtttcatgaaaagtgacatccttggaaacatagacacgacgactttgagggtgataacatttgtacccctttttgtttgaggcataacctatgaagacacatttgatagcccgaggatctaactttccctgatggggac

SEQ ID NO: 39949 - DNA, 355 bp, Glycine max
ggcagaaatggggaataacagacaaaggagattgagaactcatcgcgcacaatcaagtcgacaccaccaccaacaactcttactagaggacgattctcaaagctctcttccagcacaaaatggtgagggcgaggaagaggaggaggaactcacggaacctaaaataaagcttgctatgtgggattttgggcaatgcgatgccaaaaagtgcactggacgcaagctttcaagattgggcatgctaaaatccggctggaaatcaatgtgtctcaagagaagattactctttaatccataagaaaggattggctggtgtggattgatcatgggcacgcttagatgacgtgcctttcgt

SEQ ID NO: 39950 - DNA, 365 bp, Glycine max
gatagaaatataattgaaaggaatattcgccttaaaattcagcaaagtcctgattatgcagaagagccagattttgagactggattgcaagacttcaaaaatcgtctagaaaattatgagaaggtttatgagacagttaatgaaggatcttacataaaaatgattgatatggtcagtgggcatggtggacaaatacaagtgaacaatatcagtggttaccttcctggacgaattgtctttttcttggtaaatacacatcttacaccacgcccaattttacttacccgacatggggaaagtcaggataatgtgagaggcagaattggaggggatacctgcaatagtgaggcctgagaactttattc

SEQ ID NO: 39951 - DNA, 314 bp, Glycine max
  unsure (1)..(314): unsure at all n locations
gaagaacgactattcttgcangtacagatgcatcaacttccttacaaacttgctataactcagccaactacacactctgaagcacagttaaaagaaaaatatcaattaaggcttaaagtgctacaagagaatttgagagaaacttctaacagtattaatctctgcaccttaaacttacaatattttaacaattggccatatcaacttcaatccctatgttgagcttaatacatcttaaaacttacatctaatgtttttttaagagatcaccgtccaatcaaattaatttttttttttcttcaaacacaattttt

SEQ ID NO: 39952 - DNA, 244 bp, Glycine max
  unsure (1)..(244): unsure at all n locations
ggagtggtggcatcaaaatcaaagggtgtctntcagaaacgaagaaaatgggaagaatcttcacggtggagcttgagggtaggtcttacagttgcaagtcctgcaaaacccacctagcccttgcagatgatctcatctctcgttcattttattgccagcggggaaaagcatatctcttcaataatgttgtgaacttcacaattggagagctagaggaaaggttgatgctttcgggactgcatac

SEQ ID NO: 39953 - DNA, 394 bp, Glycine max
gggatatttgttgatgtgcgcgataaggcgaggctgagcagagagtggtaaagtaaaatggcttacaatctttgctcttccccttcctctctcttccatgaccttccctccatttcttcttcttcttcttcccgcaaattcaaacttcgaaacttgtcctcttcttctctcactcctcattccaaaacccttctccatgtctccttgcacgaacacgaacccattcccgaacacctaccacccgacgcaaaatcctcgtcttcgtcgaaaagtaattacatctgggtcaacccccgaagccccatggccaaacaactcgagagtagatcctacgatgccaggtacacttctcttgtaaatctcgcccactccttggactcttgcaatccctctc

SEQ ID NO: 39954 - DNA, 213 bp, Glycine max
ggttctagtgtgtgattgtttgttgttgtaactctttcttcttcttttgctggtctgtgtttgtgtttgtttcttctctcacctgaaaatgtcttgctgtggtggtaactgtggcttcggaagctcctgcatgtgccgcaactggtgtagatgcttgaagatgtacccactcttgttcttcactgttttaaccaccaccgagaccttcgtcat

SEQ ID NO: 39955 - DNA, 332 bp, Glycine max
ggttgagtggaagtggaaggtgaagaagaagaatatggaggatttcaagaagagaaagctggagctggacgaagcacgtggcgacggtgatttttcttccaaggaagagcttcgcttactcatcgaacctctcgctaaaccccagctcgtcgatcttcttgccaaactgcatttcaagagcatggagaaattgaggaaggagctgagatctatgataaagggacaggaaaatcccgtggctatggatttataactttcaaaaatatggaatcaactcagcaagcattgagagcccctaaccagttaatcgatgggagattggctgtctgtaa

SEQ ID NO: 39956 - DNA, 402 bp, Glycine max
gcaactgcaattatttatagcggagaacacaagcatcaatgtcctcatcctaacaagtgctcaaaagacaccatgacttcaaatgaaaattcaaatatgcaagggaatgtatgattcaacgtatcaagggacgagtacaaactcaatgtctaagatggatcccgagtcaagtcaggcaacagctgatcgtctatcaagaacacgtgacagcgaggaagtagctgatcatgaaactgaagtggatgagacaaatgttgagcctgagcccaagaggagaaaagcacaagtctcgcagtcagatccaccttcttcacataggacttgtaccgagcctcgaatcattgtgcacacaacaagtgaagttgatctcttagatgatgggtatagatggcgaaaatatgg

SEQ ID NO: 39957 - DNA, 306 bp, Glycine max
acccacgcgtccgaccactcctacggactgcttgataaaaaacgtcttgaggctatactgatgatctcacttctggaacaggtggtcagtatttatggagcttgattacctgcataagtggcattctttcatcccccaatggatgacatttctggtaccagagagtctcttatttatgttacctctttctacacagggtccggattaaacaaaccagactgtttgtcgacagtgtatgtgtatccaaactattcatctttttccaaagaaatacataggcttcccgctgcttatttaggtgactaa

SEQ ID NO: 39958 - DNA, 351 bp, Glycine max
ggcttcgaaagagagagaaagatgacgaggcgtgggcatggtgactcggcggagagacaagttccgcatgtcgctgggtcttccagtggcggcaactgagaactgcccagaaaacacttgggctaagaacctctacatcatatctgtgaaacggatcataggccatcttaatcgtctaaccttggcctgcgttggtcatatggtgtgtgtcctccgtgaacaaggtacaacctcgatccgatgatgatcgtcttgccagctgtcatactttctccgcgcatgtcatggcacacaatggaccgcgtgttcatgtactttgactataatgctgtagatattgccaatcccata

SEQ ID NO: 39959 - DNA, 322 bp, Glycine max
ggaggtagcttagaaaatcgttgtcggtgtccactaatggttgtgaaggctgtatgtgatgacattggagctgacaaagttggtgttaggctatcccctttcgccaattattgtaattgtgtagactctaatcctcaagcgttaggcatttacatggcacaatccttgagccaattgggcattctttattgccatgtcattgagcccaggatgctcacaatgtttgaaaaacatgagacagacgtgtcccttttgcctattcgaaaggccttcaacggaacatttattgttgctggtggctacaacaggagtgagggaaaca

SEQ ID NO: 39960 - DNA, 251 bp, Glycine max
caagagaatggctcgcgcgggcttaatcttttttgctgtgttattcctttaacacacccacttctgcaatttgcattgttcatagtatgaattgttatgaacttctacaaggaatcatgccctcaggctgaagacatcatcaaagaacaagttaagcttctctacaaacgccacaagaacactgctttctcctgactcaaacacatcttccataaatgtactagccaaacacaaggctcaccactattgct

SEQ ID NO: 39961 - DNA, 395 bp, Glycine max
ggaagaagaaaggtcatggggaattcagggaagtaaccgagggtgatttcttaggtgaagtcactggaagtgaaaaagtgatttgtcacttctaccatagggagttctatagatgcaagataatggataagcatttaaagtctcttgcaccaatgcatattgatacgaagttcatcaagcttgatgcagagaatgcaccattctttgttacaaaactggctatcaagactttgccttgtgtcttgttgttcagacaaggagtagcagtagatagattggtaggatttcaagatgtgggaggtaaagatgattttaccacaagaacgctggaagctcttctgataaagaaaggtataattgaggagaagaaagctgaggatgatgaagatgatgaa

SEQ ID NO: 39962 - DNA, 389 bp, Glycine max
ggccggcaaaataaagagtcctaatgagaagttgagtggtcctcttgatgagattgtcaagaggagaatggaagacaagaatagaacttcaaagaatttcttgtcactcattttgaatgcaagagaatcaaagaaagtatctgaaaatgtcttttcacctgattacattagcgctgttacttatgagcacttacttgctgggtcagctaccacagcctttaccttgtcatccattgtctacttggttgctggacaccgagaggttgagaaaaagttgcttcaagagattgatggatttggtccacctgataggattcccacagctcaagatcttcatgacaagtttccttatcttgatcaggtgattaaagaggccatgaggttttaca

SEQ ID NO: 39963 - DNA, 405 bp, Glycine max
gtaaccagagagaaacagccagatatgaatgacaaaaagctaattcaaacattatggttcaagccaaatgcattggatgaaccagtttctgcagttttaggacaaaacagttggctctatcttagcattatcatctcatcctcctttatgttattccttctacttattgccatcctaactagatattacatatatccaattgaccataatactgacatgatatacccttatttctcaaggtccagtctaagcatgttattcatatgcatatctatagcctttgtagcaacatctgctttcctatggaacaagaaacagaacaaggatttggggcagattaaaaacatttacacatccaattcatcaacttctccgggttcaggatactacaatgctgacagagaa

SEQ ID NO: 39964 - DNA, 367 bp, Glycine max
gcgtacgcccacgcatactacatctgcgagatttcttcttaaggggaaggagcaacatattggcgttgtctataatctaggttatcgcgacgagaatatgaagttgtttgatatctttgatgctgcagtagatttggtagcatggccatgccatggcgcatgctaccaaaggttccctctccgaatgaaaactggctatggtgagcgttcttcggaggtaaaatgcgcaagttttaggcttgctgtggaagcacacaacattcgagcctttaaaaccattcctgaagagtgcgttgtaccaacaaaggacttcattaatggctaacaatttagatcatacattaaaacagcttaaccaacaagcttt

SEQ ID NO: 39965 - DNA, 349 bp, Glycine max
ggacgatgaagtagcagtgctgccgttgaaatctatacaaatcacaaaaactgggatgtataacttgtatttcatccattgcgatacgaggcttaaagaattggttgttgaagggaaaactgtatggaaaaatccctctggttatctacctggtagaatggcgcctatgaaagttttctaccaattcatgtcttttgcgtatgtactgcttgggatcttttggttctctcaatatgctagattttggaaggaagtatttcccctgcagaactgcattaccgcagtgataaccctaggcatgtttgagatggctctgtggtactttgactatgctgaattcagtgagact

SEQ ID NO: 39966 - DNA, 286 bp, Glycine max
gactcgcagttgtattgttgagcaagggtttctctgtctgcttcgttcactttctctcgtttcaatcgaaaccaaaacaaacgcatgggcagaaaattcttcgtcggtggcaactggaaatgcaatgggaccactgaggaggtgaagaagattgttactactttgaatgaggctaaagtccctggagaagatgtcgtacaagttgttgcgagccctacttttgtgttccttactgctgtaaaaagcttgctgcgccctgatttacatgtttcggcacataactgtt

SEQ ID NO: 39967 - DNA, 413 bp, Glycine max
gcgcaccgcattaacgactcctgatcacaatttaaggggagcttacaccatgtcactcacgacaatccgtggtgctgactagagcgctacctctcttaagttctcctacaactgcccaaatagataccactccaacccctgcaccatcacccgccccacacctggcgaacataagctccctactgtccgtcgccggcccattacagacctttctcaactatctctagcaaacaacagtcatcgaaacctttcaaaaccaaccaaacaacaccaaccagcgcatcaccatcttcctaccgaaggactccgacttctcgtccctcataaaaccgtcactagccaacctgacccaagaccaacttaagtccctccttttaatccatgcattcccgtaagtctacactatttaccat

SEQ ID NO: 39968 - DNA, 299 bp, Glycine max
tggacagattcaattgttaacttgcattttcatggtgtgccaatcgaagatctctgcttagattttacactccctggttattctgaatacaccttgaagccaggagatgaaatcgctgatatcaacaataaggaggagtatatatccttggttgcatatgcagctgtcatgactggaattatgctgtatacttaagcacttagagcacgtttgaaccatgcaatacgacatcattggctctcaaatatttactccatacgaactagttgggttgccttgcagatgcaatgatctttggt

SEQ ID NO: 39969 - DNA, 373 bp, Glycine max
caagcctacaagaagttgctcgatgctcttggccagcgaacggatacccttaacaggctggaggctgaaattaaagttaacgagaagcgtatgtccacgtttgaattgttgcgcccgaagaaggaactagtagaggaagttccattggaaccttttattcctcttactaaagaggaagaagttgaggttgcacatgccttttctaccaaccggaaaaagatcttggtttcccatgagaaatctggcattgagatctcgggagaaaagtttcaatgccttagaccgggtgcatggttaaacgatgaggtaataaatgtgtaccttgaattgctgaaagagagggagagaagagagccacagaagtttctgaact

SEQ ID NO: 39970 - DNA, 422 bp, Glycine max
  unsure (1)..(422): unsure at all n locations
cagggaaacaagggaggaagcaaatgcagatgtagaagtaatttctccatttgcccaattggatattcctttaattggccaagtgagaaagaagctttgatttatttcttttattattttctttatttttttctttttatttccttgattaggtagagaattttgatcatgattatggaatgtttgaggcagagttacatgatattcttagcaaagctgaagaagcaccatttttcacctggtccagaatcatcagcatgccaactttttccacttgatgatatacctttcaattctctatccttttcatcaatggtggttaccttaagtttggtatgattcacaatcagatatttaaacatgctggctttagttgtttnttttttgtcgcctactcatactgtaaccatgtatttgtcatg

SEQ ID NO: 39971 - DNA, 286 bp, Glycine max
gaagagaatgatgcggatttggaatcggaatcactgaaagcgttgcttaacatgagaagaaatgcaaaagagaaagagctagaggcattgctttctggggagcaagattcttggtcgtgctacattgagggtcaagctggtgctgggggtactgagagcatggactgggctgcaatggtcatgcagatgtataagtcatgggcacagcaacgtggatataaagtaactgtagtggatgaaatgcctggtgagattgcaggaatcaagcgagctaccatcaaagtag

SEQ ID NO: 39972 - DNA, 388 bp, Glycine max
gttagagagagagagaaacaagtcagcacccgggtgtagcctctcttctattcttagatcgccgataccctttttgctttctcaaccgagagagatagacagaatctttcgtagttcggtcgcgtgtgttgagttgacagtcaccaatggcatcaccatctgctaggacacgttcccattacgattacctgatcaagcttctatcttataggcgatagacagtgtgtgaacgagctgactgcttatgcgatgtcctgaggggtccttcacaaccggatgttatcaccaccattggcattgagattacgatgacatccattgaacttgatggcaaacgcataaagctacaaatctgtgatacagcttgccatgaaccgatttctactat

SEQ ID NO: 39973 - DNA, 412 bp, Glycine max
ggagcaagagtgaagagcgaagagaatggctcccaagggtttaatctttttggctgtgttatgcttctcagcactgtcactgagtcgttgtcttgcggaggataatggacttgttatgaacttctacaaggaatcatgccctcaggctgaagacatcatcaaagaacaagtcaagcttctctacaagcgccacaagaacactgctttctcctggctcagaaacatcttccatgactgtgctgttcagagttgtgatgcttcactgttgctggactccacaagaaggagcttgtctgagaaggaaacagatagaagctttgggttgagaaatttcaggtacattgagaccatcaaagaagctttggaaagggaatgcccaggagttgtttcctgtgctgatatcctcggtctc

SEQ ID NO: 39974 - DNA, 268 bp, Glycine max
cggacgcgtgggtggtcaacttgcgatggcatccatggcttcacttgatttgtttagtggaggggaacaaattgatgcccggaaacttcaagagaaaatgatggttgttcagaaggaaagggaggagaaacttgctgagattctgaaagatagactccaccagtatgttcaaggagacaaggagggttttattagtcaggccgatgctgaagcgacatatctttaatatggcaattacggagttgatatgctgaacacaattggctat

SEQ ID NO: 39975 - DNA, 321 bp, Glycine max
gtttccaagatcaaaccacaggcccagtgaaggggagaaggactaaaaatcaaagagcataatgtcagggatcattcacaagattggggagacccttcatgtgggagggcgcaagaaggaggaggagcatacgggtgagcaccatgctggagaatacaaaggggagcaccatggtgaacacagtagtgagtacaaaggagagcatcatggtgaacacaaagctggagagtaccatggtgagcacaagccagagcacaaagaggggttcctagacaaagtcaaggacaagatccatggtgagggctgcgccgtcgaaggcga

SEQ ID NO: 39976 - DNA, 250 bp, Glycine max
ttttgctctgtgtttctatcgcattatctctcacctgaaaatatctcgctgcaatgccaactctgattgcagaaactcctgcaagttcggcaacacctgcagaaactgcaagatgtacccaaacttcaactacactgattcaaccaccacctacaccttgatcatgggagatgcaccatgtaaagctcaatttcatggtacctaaatgggtacacccgctgagaactatggctgcaaatgctgaccaaac

SEQ ID NO: 39977 - DNA, 377 bp, Glycine max
gatcacatagatgggaactggtgcatcgaaggacgcagaggaagggagcaaggaagagcgtgacaggctcgatcatgcaggtggccaactctacgtctctctcaagatggagaatcggaagctcacaggggaccttgttcctcacgtttatggctctgttcctcttgttggctcttgggatccttccaaagctcttttcatggagcgggaatcggtgtcaatgtgggaacttagctttgttgtcccacctaatcacgaaactttggatttcaaattcctgttgaagcctaaggacagcaatacaccttgttttgttgaggagggtcctagccgcctgcttgtggggggagcgttgcaagaggatgccaagcttgcgt

SEQ ID NO: 39978 - DNA, 397 bp, Glycine max
ggcactgcatagatggaaaaagcatggaaagaggcgcattgttagcaacgtgtggtctgctgttgcagcataaaacggagtagagcttcatcctctgctcttgcacactaagacccttctcttccttagcaaccccacttcttagttacacatccacatttgcttgtcttgtttaggtggttggtgagaatgtcagagacattcatattcacactttctctggttatgctatgtgctgcttcagcttttgcagcagttccacacaggttgccagaagtttacctcaagaatggtaactttgaggagaatccaaaccccaaatacctcaagaaaacgacactgattgggaaatatgctcttccaaaatgggagatcagtggtcatgttgagtatgtct

SEQ ID NO: 39979 - DNA, 404 bp, Glycine max
  unsure (1)..(404): unsure at all n locations
ggaaagaaaaaggaatgtagtgtgtgtgagtgagtaacagattctaaacgctattgagagtaaaatggcggattcagtgtcggtggacatggaagccatctctcctccacccgaggaacatgttgttagaactcgtcatggttgtgtctcagttgctgtgtatggggaccaggacaagccagcgcttatcacgtatcctgatttggctttaaattgggttattattttgtccagaagcctgttcattgctgctccacaatttctgcatatatcatattagtccacctgggcatgagttgggagctgctgccattgatccagatgatccaattctntctgctgatgacttggttgatcaaatagctgaagttctaactattttgtcatagtacagttatgtgtat

SEQ ID NO: 39980 - DNA, 386 bp, Glycine max
aattcagatgttattacgcaaattccaatggtaaaagcatacaatcttcatgcaggtgccactgttgttagaggacccgggtttacaggtggtgatatcctgagacgaacaagtaatgggatggtcgtaacactaagagtagatgcctctgcagtaaggaaccaacgatatcgcataagattccgttatgctgcaacatcaaatttctattttgtcgtaaggcgtgggaatcttggtgttaatggtcgagagatcatgaaaacaatgagtacaggcgaggaattaaaatctgcatcttttgttttgggagagtttattacgccttttaatttttttgaaaatcaggttccacttcaaatagaaatacaatcactttctcctggggg

SEQ ID NO: 39981 - DNA, 407 bp, Glycine max
gtattcggttcacgaggaatctatgatgcctcagtgaaacacttgggagtgaagcgcattgaactaacacctcatagtttgcaatctgatgtacaaatgcattccatggcatgcttcttgaatgctcctatgaatactgaatccaattattcaaatggatccacatggatatacttaatatcactttgaatatataacttactcataatgtaattcatatagtataaaagctcatacatgatgacaaaccaccgcacagcacctcaaaattcccaacaaattaacagtgctacctgacggatggaacactactctgttaagtgagcttaagcctgctgcctgccgtgacctggatcactgctaaagtgtcacatactatttgcctacaataatgtgatgcttgcatg

SEQ ID NO: 39982 - DNA, 327 bp, Glycine max
ggatgatgacgatgataatgggtttatgatagcctgtaacgttgcaaaatccgagtatgttgatgaggccgaagctgctgcacatgacgcactacataatacagcagtggatacacttaacacatcagaaaggacacatttctgggaggagccgttaagagacaagtatcaagagcataaagacgaggaattcaatgccttatgcaaacgtaagccaaaccagaagtccatgtgttacagagaagaggatgaccttgctggatctggcagatgtaagctctgatcgtaatatgacagtcattaagcataccttacttatggtgattc

SEQ ID NO: 39983 - DNA, 371 bp, Glycine max
gggccaggtaaccagaaaggtgtaccattccaaggggggtggttgttctttggcaacacttccttgccaacatgggtttctcaaaaaattctatccccaaaagccgtcccactggtggcaggaaaaaggctggaggaagaaaagaagtatgagcttgtcgccagcctgctaacactaaactgtcaagcaacaagacagtcagggaggatccggtttagaagtgaaatgtgaaatggagggcactgagattggatactggaaattactctctgggaagtgaagctgtaactcgcaagactcgtatactaggatgtggttacaatgcctcaaacaacgagcttgtgcgtactcagactcttgtaaaagtgcta

SEQ ID NO: 39984 - DNA, 424 bp, Glycine max
  unsure (1)..(424): unsure at all n locations
ggaggtgggaggggaaggacctgaaccttaacttggcgggattggaaagtgcccccaaaccagtgtattttttccatgaatcccaaaaaatctgtacaaaatgaggccccaaatgatttctgtggcaaacgcttgttatagggctattgcctttgatttcaaaggctatggactttctcagcaaccagcaaagcctgaaaaggaaaccatgtttgatctggttcatgaaattgtaagccttttggatgctttgaacatcttcaaagccttccttgttggaaaggattttggtgccattccaggacatcttactactgcagtgcacccaaaaagagtagctggtatcataactttaggcattcctttcatgcttncgggtccctctgctgtggagagccaccttcagctttccaaaggggtttat

SEQ ID NO: 39985 - DNA, 388 bp, Glycine max
tacagatgacaaaaaaacttcagattgtgaacgagtaaaaaagaaagatcgtgtttggtattatatttaacagcgatgtagacgtattgaagatgttaaagtttggatcacacaaattctctgagaggcaagcactttttacatgagctaagagtgacaattactactactaggcaccaccagcacccttgtttgatccaggtgagttaaagtcatgctctttttacagagctttgatctcacagtttgttgccacattctttttcctctacatcactgtcttgactgtcatgggtttcaacatggcacccaacaagtgcttttctgttgtcattcaaagaatttcatgggctttttgtggcatgaatctttcccttttctacttcac

SEQ ID NO: 39986 - DNA, 262 bp, Glycine max
cttagaaaaggaaacagaaaagtcaaaaggtgacaaaacagagaaggaacaaggtgatgcagccaactcacaagagaaaaccctgaagaagccagataaagtgctaccatgcccccgctgcaaaagcatggacactaaattctgttactacaacaactacaatgtcaaccagccgcgttatttctgcaaagcctgtcaaagatactggactgcaagtggcaccatgaggaatgttcctgtgggggcaggacggcgaaagaac

SEQ ID NO: 39987 - DNA, 409 bp, Glycine max
ggaggaccgaggaacacacaaagacaagacaaaggttcgcttttccatccctcccaatcacaaacccagaaccagaagaagggccttcaccttgaacatggcacacaccccagttacccttttagctgttgagcaacacaaagtgataatacccaacaagcacggtgaaaaactagtgggtatattacatgaatctggaagcagggagattgtaatcttgtgccacggttttcgctcctcaaaagaatccaattccttagtgaatcttgctgctgctttggaaaatgccagaatgagttctttccgctttgactttgctggaaatggggaaagtgatggctcatttcagtatggttactattggagggaggcagaagatttgcgtgctgtaattcaacattttcatgaa

SEQ ID NO: 39988 - DNA, 358 bp, Glycine max
  unsure (1)..(358): unsure at all n locations
ttcttagggagttaagaannaaaaantgggttgccaggagggttggatgagagcaaggttactagatagtggcgcaccaccatattacaaggtttccacctttgaatcagtgtataagccaagcttttgtttccatattggttctaaggaattggccgcttatgctcttgttttcaccgctctcattatgttcgccaatggtgttctgttatgaatggcaagtgccttgtcaacactttgtggacaagcatatggggcaaaagaatatggcatgatgggagagtatcttcaaagatcatggatagttgtgttcttaactgcaaaactgcttcttcctgtgttcatcttcacaagcccc

SEQ ID NO: 39989 - DNA, 283 bp, Glycine max
cgtgaagacgaccgacggaggggcacgagtgaagagcgaagaaaatggctcccacgggtgtaatctttttggctgtgttatgcttctcagcactgtcactgagtcactgtcttgccgaggataatggacttgttatgaacttttacaaagaatcatgccctcatgctcgagacatcctcaaagaacaagtcatgcttttctacaagcgccacaagaacactgatatctgctggctcagaaacatattacatgactgtgctgctcaaacttgtgatgcttcact

SEQ ID NO: 39990 - DNA, 133 bp, Glycine max
ggctcaaataaattagctgagcgagagaactcgaagcagtgtgacgaaaatgaaggaccttgatttttatcctgctacaatattcgtagcatggcaaagccatgcgtacgatatgttaactcttacaatgaac

SEQ ID NO: 39991 - DNA, 415 bp, Glycine max
  unsure (1)..(415): unsure at all n locations
ggagcaagagtgaagagcgaagagaatggctcccaagggtttaatctttttggctgtgttatgcttctcagcactgtcactgagtcgttgtcttgcggaagataatggacttgttatgaacttctacaaggaatcatgccctcaggctgaagacatcatcaaagaacaagtcaagcttctctacaagcgccacaagaacactgctttctcctggctcagaaacatcttccatgactgtgctgttcagagttgtgatgcttcactgttgctggactccacaagaaggagcttgtctgagaaggaaacagatagaagctttgggttgagaaatttcaggtacattgagaccatcaaagaagctttggaaagggaatgcccaggagtntgttcctgtgctgatatcctcgttctctct

SEQ ID NO: 39992 - DNA, 346 bp, Glycine max
  unsure (1)..(346): unsure at all n locations
ggagggagttttggtggatattgagaacatgttagctcgtggtaggatggacctaccagtgagtgtgtgctttgcggcagcaagaggagatgacttgttgttgcatcaattactcaaacgaggcatggatccaaatgaatccgacaacaatcgaaggacagctttgcatatagcggcatctcaaggaaaacagaactgtgttttgcttctgttagactatggtgcggatcccaacattagagatttggaaggtaatgtgccactatgggaggctatagtgggaggacatgaatcaatgagcaagctgttatcagagaatggagcaaatttgcaatgcggngatgtg

SEQ ID NO: 39993 - DNA, 336 bp, Glycine max
gatcgtgaggtgttcaagaagattctcaaggacggagtcgatggacccattttagtctaccctctcttgcgaaacaagtgggatagtcgtcattcagtggtggtgccggacagtgacatgttctacatagtagccttgctccgattcactccaccacccccaaagggcccagcagctgaactcttggtggcgcaaaataatgagattattgagttctgcacaagcagaagccttgatttcaagctatactttcctcactaccagtcacgggaggattggatcaagcactttgggaatcaatgggccagatttgcggagcgaaaggccaattttgat

SEQ ID NO: 39994 - DNA, 427 bp, Glycine max
ggtatacatatatataatagcatttgttcgggacatgttaatgtactattgcaacaacaacaacattaacatcatctgaggttaatttgcaactacacttcctggtgtatttcaattaattcaaatggcgcaattacctccaaagatcccaaacatgtcaccaagttggccagatttctcttcacaccaacagaagatgcaattgccacctcttaataacaacggcaccatcaccaacaactatcatcagcacaatcagaacccttcttgggtggatgagtttctcgacttctcctcggcccggcgcggcgttcaccggcggtcggtgagcgattccatcacctacttggattcaccaatgaaatgtggaaggaattaaagcaacaacaacaatgggaaccagttttacaaggttgatgatgaacaa

SEQ ID NO: 39995 - DNA, 394 bp, Glycine max
gatggttagcgggaggaggaagaagtgtgtgaaaaaatggcggcggcgaactctgagggtaatggtcagaaaccgagattggaaacgtttcagttattctcttcctccgcttccgccttcggaatcttcgacgatgctgcgcaacaagttcctcatatacctcctcctccctgcgttgaagtccttgcttctgaggttccttcatccatcaaacacaacgtggactctgtaaatttggatggagttactttgttaaaggtaggatctggtcatggactccctggaatctttgcattgcttgagggggcagctgctgtacattttcaagacttcaatgctgaagtcctacgtttcctcacaattcctaatttaaatgctaatctttctagagata

SEQ ID NO: 39996 - DNA, 320 bp, Glycine max
tgcacaagaagatgagacattaaggaatgctgttgcagtttttaagggaaagagttggaagaaaatagctgagttttttcctgatagatcagaagttcagtgtctgcacagatggcaaaaagttcttaatccagaacttgttaaaggaccttggacacaggaggttgaaacttggtccttttctttttaatttttcctacagctttattcaagcaataacttcttttgattggcttacaggaggatgataaaattgttgaactggtgtcaaaatatgggcctacaaaatggtctttgatagccaagtctttacctggtcg

SEQ ID NO: 39997 - DNA, 319 bp, Glycine max
gagacaaagatgagaagctctaataataaccatgatgctcctgcaccttcacctctacttcaagacctgaaggtgatcatccacaatgcctccatgattttcccatccaaagagatcgagagaaagtcccttttcttgtcaaacattgacaaggtcctcagcttcgatgtggaaacggttcacttctttggtgcccacaaagattttcctcctcgtgttgtgaatgagaggctaaagaatgccctagaggatgcccttgtggtttatgacttcttgggtggaagattgaagctcaactttgacaccaaaagattggaga

SEQ ID NO: 39998 - DNA, 324 bp, Glycine max
  unsure (1)..(324): unsure at all n locations
ggccattgttgctggcatcatcccgagctgctgttattcgcaccgcaaacaaacagtgagccatgggcggaggaaagaacacgcgcatgtgcaaacggaaaaagggtggtaagaagaagcagctgatccattgccaagaaggattggtatgacattaangcccgttatatttttgaggtgaaaaatgttggcaaaaccgtggtatttcgtacgcagggtaccaggattgcttctgaaggacttaaacatagagcgcttgacgactacttggctgatcttgatggggatgaggatcatgcattgaagaagattatgttgagagct

SEQ ID NO: 39999 - DNA, 407 bp, Glycine max
  unsure (1)..(407): unsure at all n locations
gctcacaaatcaagaaaaaagtattccattggaggtgatattaatcaactttttccagctcttggaaattaaaactctttttaaaagcgcaagttcatcacgttacacaaaaaagcgctcttaaagggccaataaaagtcactatatctcacgcatcaaaaattgatatctcagaccctgtaagtttaacgcacgcacttagagggttgtgcatctctcaggcctcanaaatggctgctttgaagagactgactaagccatgcagttcatctatagtatcagaggcgggcaccatcaaaaggttgtacacggcactggtcgatgaggggaaagggaacttggttgaaatttctcttgtgccagacatatctgcaccttctgataaattgtcccgtgtaactatatca

SEQ ID NO: 40000 - DNA, 255 bp, Glycine max
gtgtgcttgctgctatacaacggcgcgattgggattcacctactggggcgtcaattcttccccttggcaccggaaatgatttgtccagggtacttatctggggaagaggcttctttacacttgatggacaatgcggattgactatgcttttgcatgacattatcattgcagcattttctatgctacatcgcttggaagtaaaaatcgttgaataaagctctgaacgaaaatcaaattaagttgaaaacctaatct

SEQ ID NO: 40001 - DNA, 376 bp, Glycine max
gaacacaaagaagtctaattgatggggtgttgttgcaccaaacagcgagtcgatcataaagatccagcagatcttgcttcccaaacctatgttaatatttctgaaattgaagctctgtatgatctgtacaagaaattaagcagctccatcatccacgactgagatatcagcaaagaagagtttcagcttggcttatttggaagcagcgagaaacggagcctctttgccgacaggggctctcaattatttgactcataaaaatgatggggtgatagaatttggagagttcgttaaagctctcaacgtcttccagccagcagcgccacaagcacaaagagcagattttgcatttcgactctatgatataagtcaaaga

SEQ ID NO: 40002 - DNA, 334 bp, Glycine max
gcagcaagagtgaaaagcgaacagaatggctcccaagggtgtaatcttattggctgtgctatgcttctcagcactgacactgagtcgctgtcttgcggaagatcatcgacttgttatgaacttctacaaagaatcatgctctcaggctgaagacatcatcgaagaacaagtcaagctgctttacaagcgccacacgaacactgctttctcctggctcagacacatcttccatgactgtgctgttcacagttgagatgcttcactggtgctggactccacatgaaggagcttgtctgataaggtaacagatagaaactttgggttgagaaatttc

SEQ ID NO: 40003 - DNA, 413 bp, Glycine max
ggagcaagagtgaagagcgaagagaatggctcccaagggtttaatctttttggctgtgttatgcttctcagcactgtcactgagtcgttgtcttgcggaggataatggacttgttatgaacttctacaaggaatcatgccctcaggctgaagacatcatcaaagaacaagtcaagcttctctacaagcgccacaagaacactgctttctcctggctcagaaacatcttccatgactgtgctgttcagagttgtgatgcttcactgttgctggactccacaagaaggagcttgtctgagaaggaaacagatagaagctttgggttgagaaatttcaggtacattgagaccatcaaagaagctttggaaagggaatgcccaggagttgtttcctgtgctgatatcctcgttctct

SEQ ID NO: 40004 - DNA, 221 bp, Glycine max
gtcacaagtgagttatttggtggaaatatcgagaaacagtgtgttgaaaatgaatgtccttgttttcttcggtgctacaatttttgtagcatttcattaccatgctttcaattttttcccttttcaaatgaacactgtctatacttcccttactacaaatgtaaaatgctcaagttgtaggctttctacataagcacacaacatctttgacttttatacca

SEQ ID NO: 40005 - DNA, 254 bp, Glycine max
ggctgtaaaatgtagtcacgtctgtgggaattaggctagtcaataaagccttgatggctacatatggatttaattttgctacatgctttaactgcactacatcattccacaacaaccttgttgacacttactcttaaatcaatctcatatatccatacctctcatctaccattatctgatatcatcaaatttgtctcgtttgcatatttcttcattgttgttattaatgtgattttaatgttgaactcttacat

SEQ ID NO: 40006 - DNA, 299 bp, Glycine max
ttcaggcttctgctaaaagctaaaaatcatgcaagtgcgcaaatttgcatggctgccacggtttcattcttgaatttaatcatcatgttttcagtaatctctacaatcaattcactgagctttatctactattcaaaaacatgccctgaccttgaatgcattgctgccaaggcaaagaaagttgccactgctatggacaaaactgttccagctgcactttttcgaatgcacttccatgactgttttattcgggagtatgatgcctctatgctgctaacttcataaagattcaacaatac

SEQ ID NO: 40007 - DNA, 389 bp, Glycine max
ttctataagactacttaaggtttttgaagaaattcaactccaccgggtatagtgaattgtttaacaagggcaatccaccatctctgtcctatactcttaataattacaacaagctgcagtctcttgtcttcaatattatattcttgtcaataaaaacactgtacaaacattccttaacagaatcaaacttaaataatgctgtcttccacacattggaaaaattaattctcaaagatccacaagatccttccacttcaaatgcaatttcatacaaaacatctcctaaaaataaacttataagtcaattatacaacattgtttagatcattgtaaaccaaattatcaatctcctttttatccacatattctaaatcatgacctttaatctt

SEQ ID NO: 40008 - DNA, 393 bp, Glycine max
ctcgagccgaatcggctcgaggaaagatgtttggagagttgaatgtggaatcccttctggatttccgctcacagctatttgcaatagcatttttaatgagatgctcattagatatagctatgaaaaattactgcgccaggctaaagctccaagtatgtttttacaatccttcaaaaattttgtttctttgtgtgtgtatggtgatgataacttaattagtgttcatgaatatgtcaagccttactttagtggttctaaattgaaaagctctctagctagtcataacatcaccattactgatggcattgacaaaactcgtgcaactttgcaatctagaaagttagcagattgtgattttctcaagagaaactataagcagatgtcttatgtttt

SEQ ID NO: 40009 - DNA, 293 bp, Glycine max
ctggaatttgtgttttctttcgcttgttcgtttgtttaatgcagtaaaggaaattaggcatgaccctcttgttgagtatgctctgcctatttgaaaatgtccacacctcttttaattgtcgtaatgatgtgtgaagtgtgtgttattttaaaggcaaaccttttattgagcgacaactgactgcttcgtgggtgagagcaaagtttatcgtcatacgggttctggtatgcatatccgaccgactatgtgctgatatcaaattctataagcatatgaaacatattttaatgaat

SEQ ID NO: 40010 - DNA, 419 bp, Glycine max
  unsure (1)..(419): unsure at all n locations
cgggaattttactttcataaagaactgaaccgatacattggcagtgtcggaaaatatgcaggcctatctattggtgccctcactgcctatgcagatttcatgacggcaattggctcagggacaggaatattgcttgcagtaacaatcatctatcagtacttcgagacatttgagaaagagaaagctagccaacttggcttcttttgtttctaagctcttctaacaaattcacttgtggtgacgcaattccgctttaccgcacccaccattttgttgtgtaatgaagacttgttgtaagttgtttaacaaaccaataaggaaaacttaaaataattttttttaatacttttctcaaaccaagaaaccccctaatataatccttgtaaagtcttttgaatttctatgaatacactnccttt

SEQ ID NO: 40011 - DNA, 327 bp, Glycine max
gaccgcgttcgagggcaccgacgagcacggcaacctcggcggcttcgtcggctccaagacggagacggcgttgctcgcgttcgccaaggcggcgcagtggtccgactaccgcgccgtccggtccgaggccgccgtcgcgcagatggtccccttcagctcggagcgcaaggcgatgggcgtcgtcgtcaagctgcgcgacggtcggcaccgcctcttcctcaagggcgcgtccgagatcctgaccaagctctcgacctcgcacgtcgtcgttcacaacccgcgctcgcagtcaatccccgacccgcgcgacgacgacgacagcgacaa

SEQ ID NO: 40012 - DNA, 332 bp, Glycine max
ctggtggaactgtcgcacccccaacagcacaggcagctatagtgcagtttggcagtgtgcagattgctgaacctaatactatagttaagccagtatggcaagatacccctccaggaccgagcttggatagttcttcggccagagaagagggtgaagtgcctgaatcagaattagacctagataccaggcgtaggcttctcatattgcaacatgggcaagatacaggggagcacacgtcaagtgaacccccacttcccgtcagacaccccacacaagttgatgctcccagagtcccatcacgtaggggatggttttctgtagaagaggagatg

SEQ ID NO: 40013 - DNA, 334 bp, Glycine max
gcctaaacctgtctcaagaaggccacattacgcccttctggggggcaacgcgacacactcccatcgtctccttcttcatcttcgtcttctgactcaccttctctcattcaagacaggcctggctatgctgaccctgccctcatcatcaccccaactgatgcagaggatatggcgaaggaatacgagcaagctattggataactacagaacttgttgtgcggaaagagtgaacatctagccacaactgctcgaaaaggggaacagatgacatcttctctgggaacatcatcatctgatggcataccatcattagaagcctgagacaggatccaag

SEQ ID NO: 40014 - DNA, 271 bp, Glycine max
ctcgagccgcgaaaaatacaccatcgtcgccagcttcgaccgattgcccagcacacagcaatcatggccaccgaattgactgtccagagcgagcgcgctttccagaagcagccgcacgttttccagaacaacaagaagcagggcggcaagaccaagagggctggaaagggcggcaggagatgggtgaaggacgtcggtctgggcttcaagactcccaggaccgccattgagggcaactacattgacaagaagtgccccttcactggtctcg

SEQ ID NO: 40015 - DNA, 280 bp, Glycine max
gtttcagagctcttagagatgtcaggattcctcctggaccgaggcttttgattattgaccagatcgacaaggacccggattggaaagagaagcgaggacatcgaaagcgactgggatgaaaagcatgactgggagggactttgaaatgacaagcaaaatgtatagtacgacgaaagcgattcgaggacagtcgactcttgccgactacaacatccagaaggaagtaaccgttcaactcgtgctacatcttcgtggtggcatgcaaattttcgttaagacc

SEQ ID NO: 40016 - DNA, 299 bp, Glycine max
  unsure (1)..(299): unsure at all n locations
gtttgcagaagaaagtgatttttgtcacagtgatcactgacctgagcacatgccaccctacttggtttcatccttgggtgaatagatgttactgcccttcacaagaagtggccacgaaagcctcacaagatggccttgaggaatctcaaatccgagttttcggcttgcccattaggccttcttttgccagggcagttcttgtcaaggaacaattgagagaagaacttgngttggatcccaacttgcaagcagttttgctgatggggggtggtgaaggaatgggtcctgtgaagaaaact

SEQ ID NO: 40017 - DNA, 387 bp, Glycine max
tgaggttggttcgcttgacgaggccatcaatttggtcaagagttgtgggggggactcatgcaattgaaggccttaccacaggattggacttgaagggttattcagaagcccccatttccccagctaggttttttgaagcggttgccgatgatttgctaactctcaataaaaatcttcagtcgattgttggagcagaaaatcctgttttgatgtctgcagctgagcagatttttagtgctggtgggaagaggatgagaccagctctggtgttcttggtgtcaaaggcgactgcagagttacttggctttgaaggaactacttgtaagcatcgacgtttagcaaaaattattgaatgattcatactgcaagcttgatacatgatgatgt

SEQ ID NO: 40018 - DNA, 317 bp, Glycine max
atccttttgtgttaaataggtggatgggaaaattgactgggccccagggcacttcccgaagtgttaagagaatgcctctttctatagggggaggagctggtgcaaagaatgctattctcatgaatatgccaaatgctgttctttcaatgtggagatattttgttggagatctcgtctttgaagtttctaagatgacttctacctacattaaatgtacagtctctttcttcataacatttggaaatttggctggtgataccatcaattttgaagcttttccccacaaacttgtgcaatttggaaagaatcaagaaaaa

SEQ ID NO: 40019 - DNA, 271 bp, Glycine max
ggccaggcaagccccactcaaccaccacacctctcctcgttcgcgctacccctttctgctcttcttctacctttcaagttttaaaagtataaagatggcagagacattcctatttacctcagagtcggtgaacgagggacaccctgacaagctctgcgaccaaatctccgatgctgtcctcgacgcttgcctcgagcaggacccagacagcaaagttgcctgcgaaacatgcaccaaaaccaacttggtcatggtcttcggagaaatcacg

SEQ ID NO: 40020 - DNA, 332 bp, Glycine max
tttcttttctttcaacacccgtaactttacacaccctttcttcttcacacattgagcaaattctcacaaacataacctatctattcacatttcaatctcctaactattctcacccctgactagctgtgctaccacatctataattcattgctcaatccatacctagaacaagaccctgacatcaaggtagcctgtaacacatacacccaaaccaacatgttcaaaatctttagagagatcacaaacaaacccaacctagactattagaaaattgtccctcacacataccgcgaaattttattcatctataataatgtttgtctttatgctca

SEQ ID NO: 40021 - DNA, 347 bp, Glycine max
ggtattgcaagttctcgtatcttgggcaccattcctcattggggttgacatcaaactgtctggaatcaaatggcaacagagagaacaccattgaattgagattctagcaagcaaagctttggtcaggtttatattgaccttctcggcggatgaatactaggggacaaaactggagatcgtatcacacttatacaaaattcttcaattagtaacttattgagagttgctgcttgtaagaaaggctgtacaatggtcaagattgcgatgtctagaaatgcatcacccaaaaagagtgattgctcctcattggtacaaagtgctgtaacaaacagcagcagctcacatca

SEQ ID NO: 40022 - DNA, 372 bp, Glycine max
ggaccgaacgatccgtctatacaacccacagaaggctcctacgacctgtgtcgcgcctaccgcctcgaacgtgtacccgcccgggctcgtcaacaagtacagcgcgcatggctatgaagtcctttccattgacgtcaataccgacaatgataaattcgtgtccaccggcggcgacaagacagtctttgtatgggacgtgcagactgctcagacagtgagacgcttcaccggccactcagggcgcatcaatcgcggagtcttcggtggcgagggagacagcatcatcgcgagcgggagcttcgacgggacggtcaagatttgggacctgaagtcgaacgcatataagcccatcatgacgctcgatgacgccaa

SEQ ID NO: 40023 - DNA, 264 bp, Glycine max
  unsure (1)..(264): unsure at all n locations
ctaatagctgaacgggagaaaactattcctacattggttggcattgaatgtcccacggatgataaacttactcatccacaactattgacaaacctaagactcgctccttcactattctccctatggattataatcttgaggaccgncaaaagcttcataaaaatgagaggttcattatgattaacacggacaaacttagtcgccaagattgaatcatcccatactccatgtaatgcactgctatgatcaaaaaattactgagaa

SEQ ID NO: 40024 - DNA, 294 bp, Glycine max
tatcaacaaaaccgattcccacgagggcttgctttaagtaagagaaattgttttatcttactatgagttgatcctctttccattatgctttacttggctgtctctttttgtgcgttatagaatgataattctgatttctaacgaccactaatacctatgcatgacgcgactctcttgagaacttgtaaaagtctcaaatatctgcttgatgagcgtccttttgcatttgtcaactagtatgtattattttattcacttaaataaagcgcattactacttgcaatgagtgtgttt

SEQ ID NO: 40025 - DNA, 349 bp, Glycine max
gtatgctggtgaggtgggctatctatctgcatcaataagaacagtagctgatgctagagtgggtgacactattactcactatggcagaaaggctgacaattctctccctggatatgaggaagccactcctatggtgttctgtgggttgtttcctgttgatgctgaccaattccctgatctgcgtgatgcacttgaaaagctacaactcaatgatgctgcacttaagtttgaacctgagacatcaagtgccatgggatttggctttagatgtgggtttctgggccttcttcatatggaaattgttcaggagaggcttgagagagaatacaatttgagcctaataacaact

SEQ ID NO: 40026 - DNA, 386 bp, Glycine max
ttacactccaactccattgttggaatctggtttgcaaaaagacagagggttaattgtggagtattttggaaggatgtcttacgttgctcataacgttaatcagccccaagagaaagatttgttggagggaaatttttcctttgatattaaatctcgctctagattggaaaaagtttcctctacaaaagcacaatttgttagtggaaaaaccttcaaatatgatataattggtgctggttcacattcttcagaagattttcctgaaaaggaagatcaagaaaaacccacaaagattgatgccagattgagacacagaatagatcctcaatacaatgatgttcaagctcagatggaaaccaatttggttaaattgtctcttgatgatg

SEQ ID NO: 40027 - DNA, 410 bp, Glycine max
atttccgaataccattgtgcagattgaaccagacatgaattcaagggttcagcttttgagtaccactaccaatggtgattttgttcaagggaaagatctcgcaatggttaaagttaatgtagcatgtgctgctgttggcttgacatcaagttacactccaactccattgttggaatctggtttgcaaaaagacagagggttaattgtggagtattttggaaggatgtcttacgttgctcataacgttaatcagccccaagagaaagatttgttggagggaaatttttcctttgatattaaatctcgctctagattggaaaaagtttcctctacaaaagcacaatttgttagtggaaaaaccttcaaatatgatataattggtgctggttcacattcttcagaagattttc

SEQ ID NO: 40028 - DNA, 378 bp, Glycine max
ctcgccgttccctgacatcaacaagggtctcgaggccgacaccacgtcttccgactgggagccagccagatccaggccgacctgaaagacgtgcgattcgcctttaagcgactttccggctggcccaagctcatcgaccacggtgtcgctgatgttgtcattgccggcaagggtatctcgctcgacgtcgagatccaagcgatcaccaaccgacgagaccgagtcttcaaggtcaaccacgtcaaggtcgagctcgacaccctcagctggcgaatccacgacagcaagcacgacttgctgtacaagttcctcaaggccaccgccaccggtgtcatcaaaaaggctatcattgccggtatctcggccggtatccgaact

SEQ ID NO: 40029 - DNA, 276 bp, Glycine max
gaaaaattgatgcgtgaaaggacgttcctgctgtcggcttgttgatcaaggatggcacttcgtaagaaagatgtttggagagttgaatgtggaatcccttctggatttgcgctcacagctatttgcgataacattcctaatgagatgctcattaaatatagctatcacacattactgcgccaggcttaagctccacatttgtttttacaatccttcaaaaattgtgtttctatgagtgtgtatggtgatgataacttaattattgttcataaatat

SEQ ID NO: 40030 - DNA, 400 bp, Glycine max
tatatttttaaaaatatccgttactaatcctttgtgtattttggtgtttctaatcatccattcattttttattaatcccttatttatgttatttatgttaatatatatatgctaattcatacaaatgatattgaaaatttaatttaaaaagggttggtcttttacgcccgcttcaagacaggatgactaatcaaccaaccttgggaaaaacaacaaaatacacaaaggattagtaacgtatatttttaaaaatatccaaaagaacatttatatttatgtataatagaaaaagaatactaattggggctttccgttggtagaaaaaataaggcagtactccccagaattccgatccagagtatacttccatccaccgattaaataaatagtatcagaaacg

SEQ ID NO: 40031 - DNA, 397 bp, Glycine max
catttgcatgcaagaatcacttgcactcttgcaccatgtagtacttacaaggatgagcagttatcaaacttaacacttagctatataacattaagtttttgacatatagagatatataacttatgcttctaacattcatcacatgtgtcacaaacataacgtgtcacatgcagatttatcttgtaaatggatgcagcatccagtattggaagcaaaggctcttctgaaagaagccctccaagcagaagttggattgccagtcgacagaaatattcctctcattggtttcattggtaggcttgaagagcaaaaaggttctgatattcttgcagaaaccattccccaatttatcaagcaaaatgttcaagtggtagccctaagaacaagaaaaaaacaa

SEQ ID NO: 40032 - DNA, 403 bp, Glycine max
attttacaaaatcaatgatgtgccctgatatatggtgtggcaagctatacaccgaatttgatttatgagccacttttttcttgtcaaattcgaatagcatacacaattacacaggaagttgcccattcttttcaatttgagttttaatttccttctcttatttacctttaaatttaagccttgttaatgatgatatgtaggcaagaattcttttatttggtttgggcgaaaaccaaaggtgatcatcacagagcctgagttaatcaaagatgtacttaataagatgcatgatttcccaaagcctgacacgagtccgcttgtcaagttacttgctactggtcttttaaaccatgagggagaaaaatggaacaagcacagaagaataattagccctgcattcaat

SEQ ID NO: 40033 - DNA, 402 bp, Glycine max
aagaaaactgctgaatcattcatagacatggtcaccgtcactggtgcagcagttcctattccctcattcactggcctcaatgcaagcgcatgctatgagagtgccgccgcagttaaagtctcaactccccaagccacatggttctgctgcatacaagcttccatcaaagacgttggaatcactgctgaggccatcgctgcgagcgcagatctaactagcaacgccatagccattgaattgtcactgagcactgaagactgatctctggttatctctcccaactctttctccaaggcccatgaggaaaagatcgtgttctataacaacgcaggtttacgccacaacgttgagttccacaaagactagattcctaccgacgcaagatgcacggaaaatctgcat

SEQ ID NO: 40034 - DNA, 401 bp, Glycine max
agaaactgtattaaccgtttctgctctgctttgttctgcctgcgactaataatgggcactacatctaccaccatcaaattgcttccactttctcctttgccaaaaccaaccacttcatcttcatggctttcttgcaaaccaatttcccatccctttccaaattctcgtccgcgaggtaatgtcgcagtctcggtttcctacaacccccaaggcaacttcgacctctctttatttgacgatgatgatgaaactaaagctgcacctcctctgcccccaactgaaggccgatttgaagttgtcattgacaatgacgttattagtcggcttgacttgtctccttttcaagctgcaacaggcatgaaatcccctttatctgtaaaaccaaaagaatttcttgaccg

SEQ ID NO: 40035 - DNA, 397 bp, Glycine max
ctcgagccgtccaaaccttcattttgtagtgggtggggagttgtcatttctctgccgttccatggatcgggaaggaggatccaacggcggatcttgctactactccgttctcggtattcgtagggacgcctccttctctgatattcgcactgcctaccgcaaactcgctatggtaaagtagtatacgccaccgtttcattcttttcctcttttttatttatttatttatactaattaattcctgatttttcgaaaaaaaaaaataaaattgggccgggctgagaagaggtggcacccggacaagtgggctcagaatcctgcaaccgctggcgaagccaagcggcggtttcagcaaatccaagaagcctactcagcagttctctccgatcagtctaaa

SEQ ID NO: 40036 - DNA, 375 bp, Glycine max
ctcgagccgaaaaaaaaaaaaaaattttaaaaaaaaaaaaacgggcaaaaaaaaaggcgggggttggaaaaacaaaaaaaaaacaacaccaaaaaaccaaaaaacaaaaaaaaaaaacaagggggccccccccccctagtgagcccgcccccccggaaataaattccggcccgggccctgcaggcgtcccacctttccctatagggggccgtattaaaccctgccgaaaacacggccatagctgttccctggggaaaattgttatcccctcacaattccccccaacaaacaaccccgaaacataaagtggaaaacctggggggcctaatgagggacctaacccccattaattgcctggccctcaccccccccttt

SEQ ID NO: 40037 - DNA, 396 bp, Glycine max
aatggctctgacttctgggcttttattgagaacttcttcccggggtctaccaccaccagaaacccacactttcattaggaccatgccttcttctgctgacttgcgcaccattaccgatagctgatgcaccgactctcattcatctaagccatcccgtaaaattcgtggtatcatgaaaccccgcatagtctccctcaagatcgaacacctcgtctgcacttcctagatggtttgaacccaagtcctcaaacggatttggtcttacattaacgacaacaatattgacgaccctacacacaagatgactataaattgcgatgagaagctgaagaacgtgtttgcagggaaagatcaagacgacatgctacagattgctcgctcgattatcccttactt

SEQ ID NO: 40038 - DNA, 346 bp, Glycine max
ggataaggaatgtattcccccagaccagcagcgattgatgggggaggctaacagctggaagatggcataaccctttcagactacaacattcagaaagaatctacccttcacttggtgctgcgtcttcgtggtgggatgcaaattttcgtgaaaactcttactggaaagactatcacattggaggttgagccttctgactccatcgaaaatgttaaagctaaaattcaagacaaggaaggtatttctccagaccagcagcggttgatctttgcaggcaaacagcttgaagatggcagaaccctttcagactacaacattcagaaagaatctacccttcacttggtgc

SEQ ID NO: 40039 - DNA, 239 bp, Glycine max
gttatacacctctttttttttctcgcgtcaatctgggggggatgaacttatcctgcgatctcataaatcttatcgacaatagtgtgtgctcagtccaaatgatgctcgcctattgaaatggtaagctatttctagtattgaatggctacaaaaagctgatgtgcctaccatattcacaaattgaagagattcattcgtcgcaaaggatgatgaatgctccttgttcaaatgataatttt

SEQ ID NO: 40040 - DNA, 232 bp, Glycine max
caatttttgtgtattgctttatcctgtaagtaattacggggagagcttcgttggaatgttacatgtggtgtggacgtggtggtttacccaccactgcttggattagttctgcagttaacaatcgctcctcagatatcaacaaaatgattctcacagcacttgggaaaggtaagaaaattgtttttcttactaaaagttatcctttttcaatatctttactggctgttctttt

SEQ ID NO: 40041 - DNA, 324 bp, Glycine max
gctgctctggctatatcgaagtcttatccaatagtgaccatcgtggctgcacaaaatgctcatgctgcatcgaaaggtccagatcataatcgtgcaacaaatgccatcagccagactggcttctcaacacaagatgctgaaccttgcaatgatgccaaccaccactatttgatccttccctcaaactgtataactgacgacggtacgccctgaattgcatgctgacacaaccttcgaggatgagtgtgttacgtctattgatgcagaaattcacaaaggtgtagagctctaagaacagcttgatattgatgttcttgtcatgga

SEQ ID NO: 40042 - DNA, 379 bp, Glycine max
gcgacttaaatagataattaacttgatttattaaaatatactttttaactaaatgtaattttaagatcattattctaaatttaaaatgttatattttccaacaattatctctgttcttgaagtattggctgttactgtacctgttttattaacagtagcttttgtaactatagctgagagaaaaacaatggctagcatgcaaagaagactgggacctaatgcagtgggttgatatggtctacttcaagcatttgctgatgctcttaaacttttattaaaagagtatgtttctcctacacaagccaatatagtattatttttcctgggtccgattataactttaatcttttcattattaggatatgctgtaataccttat

SEQ ID NO: 40043 - DNA, 378 bp, Glycine max
gaatttgactggaactgctagatatgctagtatgaatactcatcttggaattggtatgctctcaatgtatctcttcatcaaacttcctttccattgtatttattgttaattgattctgaagtttggtattgccttttcattctttaatagagcaaagccgtagggacgacttagaatcacttggatttgttcttatgtattttttgagaggaaggtagttatccttgctcctatgttgttttgtctttctttatcacctacttctaatttaattttttacttggtatttctacagtctcccatggcagggattgaaagcaggtactaagaagcagaagtatgagagaatcagtgagaagaaagtttctacttctattg

SEQ ID NO: 40044 - DNA, 383 bp, Glycine max
tgcaaggcattggcaccagccacaatttccagaatttcaccagtgatcttagcctggcgctccctattgtacacaatggacaagttcttcttcaactcaatagcattatctgtaggtattgtttacttattataatgatgggtggtggttgcccttttcattttctaatgtggttatctaagacacttgtgcaatttttacgcttctgttgaaacttgaatgaaatgcgcaggctttgtgcaataggaaaaatgcgatcaaatctgaagcggacacttttttttttgttatgttatttttttttttccttctgaattatgtattgtaatgaatcaataatagatctattatataaagattcaaaaagttatctctgttgattt

SEQ ID NO: 40045 - DNA, 383 bp, Glycine max
gttttggaaatggctacaaccaaacctccttggtttcagtatgaaggggttgctgccatgttcaagattggtaatagcaaggaactcccaaccatccctgatcatctctcaaatgaaggaaaagattttgttaggaaatgtcttcagcgtaacccacatgatcgtccttcagccagtgaattgttggaccacccctttgtaaaaaatgctgcacctttggaaagacctattccggctcctgaagctttggaccctgtttctgggattacacagggagcaaaagctctggctattggacaaggaaagaatctttctagcttggattcagatagactttctgttcattcttctagatttttgaaaactaatcctcatgaaagtga

SEQ ID NO: 40046 - DNA, 370 bp, Glycine max
gagctggcgagatctctgagagcgtcgtcgagggcgaaacggcaacgacggatcctcacatgcaccggtccctcaagggccgacagatttccatgatcgctatcgcaggtaccatcggtaccggtctcttccttggctccggacgtgctctcgccaacggtggtcccgtcggcgccctcatcggttacaccgtcgttggtatcctcgtcggatgcatgatgtactcgctcggagagatgatggtctacgatcccagcgccggcggcttcatcgagttctctgcacgttacgtcgaccctgccgttggattcgcagtcggatggcagttctggttccagactgccatcaccgccccggtcgaagttgtcgc

SEQ ID NO: 40047 - DNA, 411 bp, Glycine max
ctcaagcagggcgaaatcaggatcgtccaagccagtatgcgcggcagtatcttgtccaacattctgctcgtgctcggatgctgcttccttgctgctggcctcacccagcacgaaagccgtttcaacgagaccgtcgcatctaccatgtcttccctcatggccgtcgcatccgcctcgctcatcgtccctgctaccctctacgcagttatgcacggcgacaacaaaaaggacaacctcgagactgacaagaacattcttgttctctcccacggcactgccatcatcctgctcattctctacatcctatacctctacttccagctctactcgcaccacagcctttttgccgacgtcgagaaccaagaaggtggcgataacgaggaggaggcccagatcctgtcgcccgtcgct

SEQ ID NO: 40048 - DNA, 349 bp, Glycine max
cacccatcttcgttttaggtttttcttacccttaaccttagccgctgcaattttaacaaccattttccacaaaaaagcaaaaaaagactcgagctttgtgcgcttcacaccgtttgagcttgccagtttctgcataagggtgaggttttcacctgtgacgtaatatatgcggttaatgagtggctcagattggaactcgggttttggatctgacggtcgaggtgacgccgagatggagacgtacaagtcgtgaagtgaagaatggaaggaaggtggatttcgtgggatgaaaaaggaccgagcaaaagaaggctggattgatattatgggcttgttggacttggctatt

SEQ ID NO: 40049 - DNA, 419 bp, Glycine max
cccgcaccgacaggatcgaaccctcacaacatgagagtggatggcacaggaaacacagtactgcatcttcacatagagttttggaagtgttcgatcccgcaccgacaggaggaagcgtgagcctccacagagattcatcaggcgcagggatgatgcaccaagacctggtcagcccggtcaaggacctcgtcctgctggcacagcagcagcacctgtccgaacctaaaagcaagtcctaaggaataagccttgattttatgctggaccaaatttataatataaacttttatttgttgcttaattttgaacatatcagttttgtggagggttattttcttccaatcatcagctttagtcttggatgatatctttttggttataatttggcggcttttatgaaaatggaacttggtatgtga

SEQ ID NO: 40050 - DNA, 371 bp, Glycine max
caaggagcaggtaaagcttttccaaacaaaattgtttttgatgataagcttgtgttggctaacacacaagaattctttgatggaaattttccagtggattcttggttaccaatttttgtgaattgtctttatcctgtaagtcaattaccttcagaagctgtcgttgtaaatgttacatgtggtagtggacgtggtggtttacccaccactgcttggattagttctgcagttaacaatcgctcctcagatatcaacaaaaggattcgcacagcacttgggaaaggtaagaaaattgtttttcttactagagttgatccttttccagtagctttactggctgttctttttggcgttaaaaatgaaattctgag

SEQ ID NO: 40051 - DNA, 508 bp, Glycine max
  unsure (1)..(508): unsure at all n locations
gagntatgacgnngcatgcaccgcgtaccgtaagctcggaatntcggcttcgagcacggattncaagcaggtgtatttctcaaacccaaattctctctgagggaagcgagccagatactcaaccttcgagtgcgcaatttcanntctgctgtnntcctgcaatgagtcatcannatctcagcccatggcgtgcaccattcctntgccaatgccacaacnagcataaanggaccatcctaactccccaaatnggctccacgtgtctcttccacaatcatcacaacttccaaacgtacctctgccttctcttcatcaaactcaaatggcaactgcttccagtcagttacagcaaccattgcagacatcggggtttccacctctgcaaccacctctgccaccacagatcagaccaactgcattgccaactttccatccccagtatcccccacaggtgggtgcaaacatgggtttccaacatgctggtacttctcacaatcttccgcaatca

SEQ ID NO: 40052 - DNA, 360 bp, Glycine max
  unsure (1)..(360): unsure at all n locations
gctcctcaaatattaacaaaaggattcccaccacacttggggaagggaaaaaaaatggttttcttacctaaagtgaacccttttccagtaccttaccggcttgtctttttggccgttaaaatgaaaatcttaagtcttaccccccttaatctatgctgacgccacttcttgagaactgtgagagtctcaaatatctgggtgatgagagtgcttttgcatttgtgaactcgtatgtagtattttattcacttaaataaagcgcattactatgtgcaatgagtgtgtttaaattttttanaaaaaaaataaaaaaanaaataataaatataaaaatnanatttatttattttttttttattt

SEQ ID NO: 40053 - DNA, 413 bp, Glycine max
gagcatttcgatgcatgtcagtggacaaaatcagaaccacattggtgggaattgatcttcccaagagaggtatgtgcccctaataatggatatgaaatgtggagttctgagtgggcaaatcaaacttcatggcattcgagtctccttattgacaatcccaaacagtctacagtgtctgatattctctggggaatctctcaagattttgaaactgctggtaatactctgatgccagctttttctgttacacaggctactgccagatcttatgaaaatgcggaatcctctgcatgatctggaattagagttaactttcactcgttcgtttgattaattcaataaaggaaattaggcatgaccctcttgttgaggatgctctgcctattcgaaaatttccacacctattttaatag

SEQ ID NO: 40054 - DNA, 350 bp, Glycine max
cgacaacaacagggtcgtgaacccatagctattcgggcgagccgggcgcgacaacagcactggcatcctaaattcgacaccttcagaaatccaccctccaagacagaatggccgaccagagcgctgcttggccgattgctgatgctgcactgagccaggaaattctcgacctgctccagcaagccagccatgcccgccagctcaagaagggagccaacgaggctaccaagactctgaaccgtggtatcagcgagatcatcattctcgcggccgacactacccctctggctatcctgctccatcttccacttctttgcgaggacaagaacactccatacgtgtatgttcca

SEQ ID NO: 40055 - DNA, 361 bp, Glycine max
atgcgccgtcgtagctcggaattcggctcggagaaaatcctacccattttcttcgtagccaaacactctggaggtctcagttatgtcgtggcaagcgtatgtggatgatcacctactgtgtgaaatcgaaggtaaccacctcactcacgccgctatcatcggccaagacggaagcgtttgggctcagagcaccaacttccctcagttcaaacctgaggaaataactgccatcaataatgactttaatgagcctggatcacttgctccaactggattgtatatcggtggcaccaaatacatggtcatccaaggtgagcctggtgctgtcattcgaaggaagaagggtcctggtggtgttact

SEQ ID NO: 40056 - DNA, 264 bp, Glycine max
ggctaaagctacttttgtgtttttaccattcttcaaaaagagtggttctttgtgtgtgtatggcgatgataactacactcgtgttcatgaatatgtcaagccttactttaaaccttcttaattgcaaagctatctagctactcataacatcaccactactgatgctatcgacaaaactagtgcaactttgcaacttacaaagttcacaaaccttgcttttctgatgacaaactttcaagcaccgtctactgctttgtgggtggc

SEQ ID NO: 40057 - DNA, 311 bp, Glycine max
gcttctccacattctttatactattaacctgcaaaggaacatcagggaaaacccaaaaagatggatgccccatatacacaaacaatctatcctcaatacaatgaggttcaggctcatattgcaacaaatttgataaaattgcctcttgactatttttaaactactaaaggttccatgttggacctgaaaatttctcaatctaaaatagcactctccaacaacacagttggtggaaccattctccatagtgatctattgacaaatttttttacaaagcgcctttttttaacaacccttcatttatgaggcac

SEQ ID NO: 40058 - DNA, 380 bp, Glycine max
tttcagtttttcactgataattacagaatatcactttacttttgctttgtttcctgaattaagaatttgtaaaggaaatgataaaattaacaaaacatcaaatgaccttaaaactaggtagcacttggttaattgtaaatgtaaatgtaacaactgaaaatgaaaagtaaaaaccaagccaaataccacaaaatttaatgaatatgtgacttctgtgtgttcaataaattattgaatcatttcaccatttgaataatgtgtgttgatcaaacaggcacttccacttgtaagcactttttggggcgtggttctgtttggggagtacagaaaatcatcaagaagaacatatatactgctagggagtattgttgttatgttta

SEQ ID NO: 40059 - DNA, 377 bp, Glycine max
ctcgagccgattcttttcgaggttgaatgtggaatcccttctggaggtccgctcacagttatttgcaatagcatttttaatgagatgctcattagatatagctatgaaaaattactgcgccaggctaaagctccaagtatgtttttacaatccttcaaaaattttgtttctttgtgtgtgtatggtgatgataacttaattagtgttcatgaatatgtcaagccttactttagtggttctaaattgaaaagctttctagctagtcataacatcaccattactgatggtattgacaaaactagtgcaactttgcaatttagaaagttagcagattgtgattttctcaagagaaactttaagcagatgtctaatgtttt

SEQ ID NO: 40060 - DNA, 392 bp, Glycine max
gatttatgagtattcgattgagaagatctggaaggactggacatggacagagaaataccccgactggcaagaactccgcagctacttcgcctatgtcgaagagaaactccagatcaagaaagacaccgctttcgactctcgagttgtcggcgctcaattcaacttgaagacacacaaatgggacgtcaaaacccaagacggccgcaccgcacacgcaaagtacctcatcaatgccattggctttgctgcaaagcgctacttccccgactggcagggcctggactcgttcaagggcgagatgtaccattcatcattctggccggagggcggcgtttccacgaagggcaagaaggttgctgttattggaactgggtcgactggtatccagatcg

SEQ ID NO: 40061 - DNA, 384 bp, Glycine max
gtggtgttggtgaagaataatcaggggtttggcttcaatggaggaggtggtggtggtggaagagatgatggtgccactgctaggattttgggaaaccttgctttagctattggattgacttacctttctatgactgggcaacttggttggattttggatgctattgtgtccatttggctcgttgcagtgttaataccaatagtaggtcttggtgctttcctctggtgggcagggcgagatataatgcaaggcacttgtccaaattgtggaaatgattttcaggttttcaaatcctctctgaatgatgatttgcagctgtgccctttttgtggtcaacctttttctgttgttggcaatgagtttgtgaaggactctgtcaagttt

SEQ ID NO: 40062 - DNA, 243 bp, Glycine max
ctctagccgactgatgtctaatgttatgtgggtggctcctgcggacaatgcaagtttatggtcacaactatattatgtttaatgtaataatctggaaatgcaaaaaccttattttgtcaatctcagaaatgtgttactagaattgacttttcacaatgcatatgaagctcgccaattgagaacgaaagctctctctcgcattgaatggctgtaaaaagctaatgtgcctaccatagcacaaat

SEQ ID NO: 40063 - DNA, 265 bp, Glycine max
ctctagccgttctagccgcaaaactggagattggatcacacttatacacacttctccaattagtaactggttgacagctgctgcttggaagaaacgctgatcaatggtcaagattgccatgtctgggaatgcaccagtcaaaaagagtgattgggcctcattggtgcaagcgtttttaacaaacagcttcagtacagagcattttgatgcatgttagtggacaaaatcataaccacattcctgggaattgatcttaccaatagag

SEQ ID NO: 40064 - DNA, 401 bp, Glycine max
aactcgaaattccttttgaaatttgaaaatttttttgatgatcccatcaattttcaggcttttgcccacaatctgatgcagtttggagacactcacttacaatagcgtatcgaaattgtacaacaggaatgtcttacagcttggacaactcatgtgcgtcctgcaacaactctgttggctgatgggtgtccatatttgtatgcaatggtgcatgatagttcactgtctacaataccatgtgattttgtcattggtgtcaagttgacaaccataaacaatatgtgtgcatatgggctcaatcctggtatttcacgatctcgtgtttttggcaccattcctcagtccatttcacagcaaactgtttggaatcaaatggcaacaggctgaacaccattgaattt

SEQ ID NO: 40065 - DNA, 365 bp, Glycine max
tcaaactccaacaaactacaactaccacttccaaatctccaatggaccaaccaccaacaatcaacatgtctgactccatgcgcaagggcctcggcgagcaagcctccgagaagatcacccccgactcccagaagtccaccaccgagaaggccagcgagagcctcaccggagctggtgaccgcattgccggcgccgtccagcctgagggccagaagtccactggacagaagctcggtgacgcgacccgctccggcggcgacgagggccagggcgtcatgaagcaagcccaggatgctctcggcaacgctggccagagcatctccgacaccctctccggcgccactggccagaagaagaaagcactc

SEQ ID NO: 40066 - DNA, 281 bp, Glycine max
atgataagcttgtgttggctaacgagacaggaattctttgatggaaaggtggcagtggattcttggttaccaatttttgtgaattgtctttatcctgtaagtcaattaccttcagaagctgtcgttgtaaatgttacatgtggtagtggacgtggtggtttacccaccactgcttggattagttctgcagttaacaatcgttctttagatatcaacaaaaggatttgtacagcacttgtgaaaggtaagaaaaatgtttttcttactatagttgatccttt

SEQ ID NO: 40067 - DNA, 405 bp, Glycine max
gctcctgattcaaatgataatattgatttactgttgggcattgatttgttgggtttacaaggagcacgttaagcttttccaaacaaaattgtttttgatgataagcttgtgttggctaacacacaagaattctttgatggaaattttccagtggattcttggttaccaatttttgagaattgtctttatcctgtaagtcaattaccttcagaagctgtcgttgtaaatgttacatgtggtagtggacgtggtggtttacccaccactgcttggaataatttctgcaagtaacaatcgcttcctcagatatttaacaataaggaattcgcactttcacttttcgaaaaggtaatgaaaattgttttttttttacctagagtttgattcttttttcaattaacttta

SEQ ID NO: 40068 - DNA, 235 bp, Glycine max
attacaggttctttttttttgggcaccattcctcataccattggacaggatactgtttggaatgagatggcaacagttagaacaccattgaattttgattctagcaagcagagcttttgtcagtattctattgaccttcttggtggatgtatctttgtggtcaaaactggtgattggatcatacttatacaaaattttccaaattagaaacttgttgagaagttgttgtttggaa

SEQ ID NO: 40069 - DNA, 386 bp, Glycine max
gtttttatggtttgattaccaagcaagttatgagcgagatgggggaaatgataaacaggcgttgtggtggtgatgaaaaattgatgcgtgaaaggacgcacctgctgttggcttgttgttcaaggatggcaatttgtaagaaagatgtttggagagttgaatgtggaatcccttctggatttccgctcacagttatttgcaattgcatttttaatgagatgctcattagatataacttatgaaaaattactgcgccaggctaaagcttcaagtatgtttttacaatcccttaaaaattttgtttctttgggtgtgtattgtgatgataacttaattaggggttatgaatatgtcaagccttaactttagttgtttttaaattgaaa

SEQ ID NO: 40070 - DNA, 185 bp, Glycine max
aagggtcatggataatctttccaatgcgagcttgtttttgcctagatgggaatcaaccccatcatgattagtgctggagagttggaaagtggaaatgcattatagccagcaaaactgatcaggcagagataccgttaagccgcagacttgatcatgaagggaaagatgtgtgctctctttatcaa

SEQ ID NO: 40071 - DNA, 375 bp, Glycine max
atcaaaaccacatttttttgaattgatcttcccaataaacgtctggggtcttaataatggtgttggaatgtcaagatctgattgggcaaatcaaacttcatggcatttgagtttccttattgacaatcccaaacagtctacagtttttgatattctcttgtgaatctctcaagattttgaaattgctggtaatactcttatgccagctttttctgttccacaagctactgccatattttttgaatatgcgaaattctctcattgatctcgaatttagttttctttgcttgtcccgtcgtcaattaaaaaatgaaattattcatgatcctctttttgctattctctgcctatttgaaaattccacactcttttaat

SEQ ID NO: 40072 - DNA, 377 bp, Glycine max
ggaaagctctctttcgttttgaatggctgcataaagctgatgggcggaccttaacacagagtgaggagttccattctatgcataggatgatgaatgctcctgattcaaatgataatattgacttactgttgagcattgatttgttgggtttacaaggagcaggtcaagcttttccaaacaaaattgtttttgatgataaacttgtgttggctaacacacaagaattctttgatggaaattttccagtggattcttggttaccaatttttgtgaattgtctttatcctgtaagtgaattacctttataagctttcgttgtcaatgttacatgtggtaggggacctggtggtttacccaccactgttggattagttctg

SEQ ID NO: 40073 - DNA, 335 bp, Glycine max
  unsure (1)..(335): unsure at all n locations
ttctaanatgacttctttctacatcaaatgtacagnctctttgtggaatcatttgaaaaggaggctgctcactccatccatttttaagcttttccccacaagctggtgcatcttggagagattcaagaaaaagtcgtattgaaattttcacaataggaatttctcacagctcgatcaactcaggtgcatcctagcaacatctctgtttgctgatgggagcccatatattgtatgcaatggtgcatgataattcagcgtctacaattccatgtgattttgtcattgatgtcaagttgacaaccataaacaatatgtgtgcatatgggctcaatcct

SEQ ID NO: 40074 - DNA, 410 bp, Glycine max
  unsure (1)..(410): unsure at all n locations
ctcctctcttactctggatactcttgcatcatcgctctggagggcaactccatgggtgaggaggccantttcatgcccgtgtccggaggtttcattctaatggccggacactgggtcgatgagtccctaggcttcatggccggctggaacttcttcttctacgaagctctgctgattcctttcgaaatcacagctctcaacattgtgctgcgatactggagagatgacataccactcgctgctgtctgtgcggccgtcatcgttctatatgctgcttgcaacatcttggctgtaaaagcatacggagaaagagaaattttgctcttttgatgcaaagtcctgctgatacttgattctctactggtttcaccttcgtcaccattgttggaaggtaaaccttaaaaagattc

SEQ ID NO: 40075 - DNA, 332 bp, Glycine max
gctcaatcttgttttttcaggttctcgtctttcttccaccaaggctcatttcatttcacagcaaactcttttgaatcaaatggcaccagtgtgaacaccattgaattttgattctagcaagcagagcttttgtcagttttctattgaccttctcggtggaggaatcttactggacaaaactggagattggttcacacttatacaaaattcttcaattaataacttagtgagagttgctgcttggaagataggctgtttaatggtcaagattgtgatgtctggtaatgcaacattcaaaaggagtgattggtccttatttgtccagttttttt

SEQ ID NO: 40076 - DNA, 233 bp, Glycine max
cactaatcctatgctgtcgcgacttcttgagaactgtaagaggctgaggtatctggttgatgagtgtccttttgcatttgtgaactagtatgtagtattttattcacttaaataaagcgcattactatgtgcaatgagtgtgtttaaatataaaaaaaaaaaaaaaatagaaaaaaaaaatacaaaaatttacaacaccaattcaaacattctaaaatcatatgtatctttta

SEQ ID NO: 40077 - DNA, 386 bp, Glycine max
cgatgccatggcttatcgcgctttcctccaggttttggatgcctttgaatactgccactctattggaatctaccaccgggacctcaagccagagaacgtactagtcactgaccaaggaatgacttgcaaacttgccgactttggacttgccactaccgaccacgtcacctctgactttggatgcggctcgactttctacatgtctccagaatgccagacatcggcacccaaggcctactcatgctacgcctcagcgcccaacgatgtttggagtctgggagtcatgcttgtcaacctcacatgcggacgcaacccatggaagcgagcttctttcgaggacagcacctttcgcgccttcatgaatgaccccaagtttttgaagacca

SEQ ID NO: 40078 - DNA, 287 bp, Glycine max
aaaatctggatcccatttacttgaagtcgaatcatactcctgggctgactgattctgcacgtgggacaaactctacactgggtgtgcattccagtttgttgccttactcccatgctgggacaacctttacacatggaatgttattgactatcccgaggaagaagacaggaattcttgaagatgttcggtctagtggttggttggatgccatgaaatcatgttcaccttcagccaggaagataacaaaggatgttggccatcgttttgcatcatatgattctgaaact

SEQ ID NO: 40079 - DNA, 305 bp, Glycine max
  unsure (1)..(305): unsure at all n locations
acgtaagctcgtaattcggctcgattgccaactttctttttttctggttaggggatttgaatgatcgggtcaatttgaaggaaggggaggttcgaaagctggtanctctaaagaattgggatgaactgatgaattacgaccagctaagtaatgaattacgtagtggtcatgtgtttgatggatggaaagaggggttgataaacttcccacccacatacaagtatgattttaattctgataaatacatcggtgagaacccaaaagaaggggaaaagaagagatctccaccctgtagtgatcgtata

SEQ ID NO: 40080 - DNA, 357 bp, Glycine max
cgtacgtaagctctgaattcggctcgatccgaactgttattataatgcctctttctatatggggaggagggagtgcttagaatgctagggtggtgaatattccaaatgctgttctttcaatgtggagatattttgttggagatctcgcctttgaagtttctaaaatgacttctccctacattaaatgtacagtctctttcttcatagcatttggaaatttggctgatgataccatcaattttgaggcttttccccacaagctggtgcagtttggagagattcatgaaaaagttgtattgaaattttcacaaaaaaaaatttcttacagctttggtcaactcatgtgcgtcctgcaac

SEQ ID NO: 40081 - DNA, 341 bp, Glycine max
caaatgccaacatttacaacaccattgcattttgattctaacgtgcggagcttttgtcagttttctattgaccttctcggtggaggaatcttaatggacaaaactggatattggatcacacttatacaaaattcttcaattactaacttgttgagagttgctgcttggaataaaggctgtttaatgatcaagattgtgatgtctgggaatgcatcagtcaaaaggagagattgggcctcatttgtacaagtgtctttaacaaacagcaacagttcagagcattttgatgcatgtacgttgacaaaatcataaccacattccttggaattgatcttcccaat

SEQ ID NO: 40082 - DNA, 394 bp, Glycine max
gcgtacgtaagctctgatattcggctcgtgttacaggattttttcccgtgacattttgtacccaaaacaaacgcgcttcttagctgcgcttcatgccttttccatttgtttctagtgttattgtaaagaatctttgtcttgttttccacatttttatctgttgatatatagatatatatataatatatatctatcatttttctaattttctgccattttttttagtttcctatactatcatattgactagaatatgaaaaagaaaaaaaagattctaaagatatataactaatattctgtagaataatcaaaaaagatatttaaattcaaataaattttagatagaaaaataaccttaaaaaggaggttttggaatgccagatcttaaaacatt

SEQ ID NO: 40083 - DNA, 336 bp, Glycine max
ctcacttaacctgttacaggatggaaaaaccttaccaaaaggggctgtttttatctgacctgatggattattcccctcactttaccgtgaagtgataagaagggcacctcacgagttcaagattgcttgtttagaggatatcaaaagacttttcccatctgactataatccattctacgctggatttggcaattgagatacagatgaacttagttacagaaagattggagtcccgaacggcaaattatttattatcaaccctaaaggtgaggtagctattagtcaccgtattggcgcaaagtcatatacgtcattacataccctcgtcaatgacat

SEQ ID NO: 40084 - DNA, 323 bp, Glycine max
ctcgagccgaatctgctctagcgatcgccagtcactcctttggtaggcgagcatgatcattgcgaaggccgacaggcgttccatctacgagaacctcttcaaggaaggtgtcctcgtcgccaagaaggatttcaacgccccgaaacaccaagacctcgacgtcaagaacttgttcgtcatcaaagcttgccaatctttgacttcgaaaggtttcttgaccactcacttctcgtggcaatactactactacgtccttacccccgaaggtattgactacctccgagagttccttcaccttcccgctgagatcgtccccgctactt

SEQ ID NO: 40085 - DNA, 338 bp, Glycine max
cgtcgttactcgaattcgctcgaggccttaaaagattattttcaattcttgtaaacatccgtggaggcaatgacatgggaagaggggtgctccaaaccatttcgcggcttgtgaatctctggatgaggataaggtatctgacaaaattgttttgggaggtcagagagatgagaagaaattaaaaattgccccaactatcatattgggtgttcctgaagatgctatgataatgcacgaggagatatttgggccaataatgccaatcgtcactgtagacaatataaaaaattgctacagttttattaaatcaaaaccaaaaccttttgctgcatattttt

SEQ ID NO: 40086 - DNA, 330 bp, Glycine max
gcagccgcgccttcatttctccgcatggccaatgagttggggttggctttttcggcggcgggtttacaagctccagagcggtgtgaacaagctcgcggatctggttggggtcacgcttggtcccaaaggaagaaatgttgttctcgagagcaagtatggctcgccgaaaatcgttaacgacggtgtcactgtcgctaaagaggttgagttggaggatcccgttgagaatattggtgccaagttggtgagacaagcggctgccaagacaaacgacttggctggtgatggaaccacgacctcggttgttcttgctcaaggtcttatagcgga

SEQ ID NO: 40087 - DNA, 378 bp, Glycine max
ggatgcgcgcgtacgtaagctctgaattcggctcaagctcttccataaattggtggtgcctctcttccatctcccgaggggatacctctctcaggaaggccacattactcccttccttcttcacaacccttaacactccttcttctccttccttttcatcttccttcccctctctcattcaagacatgcctgtttttgctgcccctacccccatcatcaccccaactgtgagagatgatatggcaaatgaataccagaaagctattgaagaacctcaaaaatcgtcgatggaaaagagtgaactcaaagcgacaacttgttgaaaaagttgagcatataacaagcttctctaaggacatcattcatctgatggcattc

SEQ ID NO: 40088 - DNA, 369 bp, Glycine max
  unsure (1)..(369): unsure at all n locations
acccggacgtaagctcggaattcgtctcgagcgtttacatagctatttttaccaatacaacanccataanaaagaaagaggccttattaagacaagtaatcctaacaaacagctcctcttcaaagcatttttatgcatgtaaatgaacaaaatcagaaccacattccggtcaaaatatctatccaatatacagttgtggaactaataatagctttgaaatattgatttctgagtagccaaatcaaactttataatcatttgaatttccatatcccaataccaaacagtctacattttttaattatctataataaatctctcaagaactctaaaaatagcaaactaatacttcttttgccacctttattt

SEQ ID NO: 40089 - DNA, 371 bp, Glycine max
cggacggaagctaagatttcggctcgagcgtgcacaaagcctcttttaccgtgtcaacatgaaatataagggaaagaatgtttttaagatgccaaatccaaccactgctgtcttcacaaatgtaatataaaacatgaagatgctgcccaacttaatggaaatggatgcctcccaagctaatggatctgccactgtcgctgacattttcaactcccatgatgtggtcagcttgagcaggtctgtgattgtgaatttggcataattggtaatccgaaaagaacccttgcttgttgtgctctatgcaccatagtgccgcttctgtcacgctatagaagaatcatatttttatttggcacaaaatttaccttttt

SEQ ID NO: 40090 - DNA, 375 bp, Glycine max
ccccaattgcttttatgatcaacatcctttgttgtgtggatggaaaattcttgcgtgaatggacgcacccactgttgacttgttctttaaggatagcaatttataaaaaatatgtttgcaaagtttaatgtggaatcccttctgaacttccattcacagttatttccaatagcatgtttaatgagatgctacttaaatatagctatgaaaaattactgcgccaggctcaaactacaagtatgtttttacaatccttcaaaaaattcgtttcttcgagtgtgtatggtgatgatatcttaattagtgctcatgaatttatcaagcctcactttaatggttctatattgaaaaactctttagcttgtcataacatca

SEQ ID NO: 40091 - DNA, 318 bp, Glycine max
ctccaacaaatttttgtaacactgtgctaggatcattaactctgccagatttatatacccggcagctgcggacaaaacatcaaggaaagttttatgaatccactaccttaactgaacacgatctcacgcaactgacctaaccgctgactcttacaacacacaaaataacactggatatactcctatagcaatgattctacccaaacatggagctggctacaattgcacctgcactctaaataaagacacaaaacagactgactctgcaaacttttcacctatagagtgaatgcactaattattaatggcatctacaac

SEQ ID NO: 40092 - DNA, 404 bp, Glycine max
ctgtgtcactggaaaaggctcagaaattggtgatttccttacggggcatccaggagtgaactgtataaggttcctttttaaatgatgctgtgatagcatgctttactggtggtgatactggcatttcaatttcaaagaaggcaggcatgattcctctgcaaatggagttaggaggaaaagatgcctgcattgtacttgaggatgctgacctggatttggttgctgcaaacattataaagggaggcttttcatacagtggtcagaggtgcactgctgttaaggttgtcctggtaatggagtccgttgccgatgctttggttgagaaggtgaaggctaaggtggcaaaactaactgttggaccaccagaggatgactgtgatatcaccccggttgtgtcagaatca

SEQ ID NO: 40093 - DNA, 392 bp, Glycine max
aatattattttttttgttcctgaagacaaggcaaatatcgcggcacaaattcattatgttgggggtaataatctacaaatgcacgaagcttatcttgtcaatcatcatcaatgtgtcacgagaattgtttttgctcatcccatacaaatctcgccaattgaaaaggaaagctctatctcgctttgaatggctgcaaaaagctgatgtgcctaccatatcacaaattgaaaagttccattcaatgcaaaagatgaagaatgctcctgattcaaatgataaccttgatttactgttgatcattgatttgcctggatttacaacgagcatgtgaagcttttccaaacaaaattgattttaatgataagcttgcgttgccttacacacacaaattt

SEQ ID NO: 40094 - DNA, 351 bp, Glycine max
gttagagttagattaacacaacaacaagaaaaaggtaagagaattgtttttattactagagttgatccttaaaccaaaaactatacatggctgaactttttggcgttaaaaaatgaaattctagaagttctaacgccactaatcctatgctgacgcggcttcttgagaactgtaagagtctcaaatcctctggttgatgagtgtccttttgcatttgggaactactatgttccattttattcacttaaataaagcgcgttactatgtgcaatgagtgtgtttctgtgtaaaataaataaccgtagggcggccgcccactattgagctcggcgaccctagaattaaaacccg

SEQ ID NO: 40095 - DNA, 355 bp, Glycine max
gcttatctttttatgctgctccactaaaaccaaaagtccggccggttcaaacgttcccatctcgccaccgtgaacaccccacacataaacacactccaagcgcacgttagcaacctacgctgtcttcgccaccgcgcgatcgccgtcgatggagtctctcttctactcgatcaacgtccacgaccttctttctgcgcaggatctctcggaccctaactcccctctctcggcgcccgatctccgtctcctgatccaacacctggagtcccactccctccaaatccgctttcaagtgcagtcctacctcgtctcgcaccgcgaggattttatgcgcctcttttccctttgcaaccac

SEQ ID NO: 40096 - DNA, 304 bp, Glycine max
ggcattcgagtttccttattgacaatcccaaacagtctacagattttgatattctctggggaatctctcaagattttgaaattgctggtaatactcttatgccagctttttctgttccacaggctactgccagatcttctgaaaatgcggaatcctctgcatgatctggaatttgtgttttctttcgcttgttcgatcgtttaattcaataaaggaaattaggcatgaccctcttgttgagtatgctctgcctatttgaaaatctccacacctcttataattgtcgtaatgatgtgtgaagtgt

SEQ ID NO: 40097 - DNA, 320 bp, Glycine max
agaattcagatcgagagaaaatcctcactcattttttcgtagccaaacactctcaaattgtcagttatgtcttggcaagcgtgtgtggatgatcacctactgtgtgaaatcgaaggttaccaccttactcacgccgctttcatcggccaagaccgaagcgtttgggctcaaagcaccaactttcctcaggtaagcttttcattttcctttaactcttttttcccaatcggatcgcgatttattgttatttccttagggaagcttctagaatcgccgatctatgctcacttgttatggatattcaacatgcacaatagttc

SEQ ID NO: 40098 - DNA, 371 bp, Glycine max
gaatggttctattgtgttgatgaggaggattcctttggcgcggtttctttaagtgcggcacttaatggtgttgaaggtttggactatatggaaagaattcctcttgccacatctgagggatttcctcatgtgctttcacgcaaaaatggtgaaaaaggcaaaaggagatttgtctctggggatggtgaaaagatgacactgatttcgggaaccagtgttgaagaggcttacaacaagctaatagttgaacttgagaaaagtgttcctacattggttggcattgaatgtcccaatgatgataaactttcttctctcatatattttgacaaacctaaaacgcgctgctttactattctccctatgggagttaa

SEQ ID NO: 40099 - DNA, 264 bp, Glycine max
acgcgtacataagctcgtaattcggctcaaacatatttttttttaatggtgcatgataattcaaaatctggtgtgctttttaattttgtcattcccgtcaaattgacaaccataaacaatatgtgtgcatatgtgctcaatccttatctttcaagttctcgtaatttgttcaccattccttattccatttcacatcaaactgttttgaatcaaatttcaacattgaaaacaccatttaattatcatactaccaaacaaaacttt

SEQ ID NO: 40100 - DNA, 382 bp, Glycine max
tgaatgttgaattccttctggatgaccgctcacagaggtgtgcagtagcatttataatgagatgctcatcagatatagctatgaaaaattactgcgccaggcaaaagctccaagtatgtgtttacaatcctgcaaaaattttgttgctttgtgtgagtatggtgattatcactgtaattagcgttcatgaatatgacaagccttactttaaaggttctaaaatgaaaagctatctagctagttataacatcaccattgctgatggtattgacaaaactagttcaactttataatttagaaagttatcacattgttattttctcaaaagaaactttaagcagttgtttaatgtattgtgcatcgctcctgaggacaaggctag

SEQ ID NO: 40101 - DNA, 172 bp, Glycine max
  unsure (1)..(172): unsure at all n locations
ttcactttttattgtcttcaattcagtaaaccacaccgcgtccgattgcagagtcgcggcggctccanaacctacaatcccaaccggcgaacaagatctgcgttgactgttcccagaaaaaccctcaatgggcctcggattcctacggcgtctccatgtgccttgagtgctc

SEQ ID NO: 40102 - DNA, 398 bp, Glycine max
aatggccttagccgcatcccccaccactttctctctccggcctccgccaccccttcctcctcctccaccgccacctccgcctccccctccccctcgcgcgtgcagctcacctcctccctccgcgcccgcccgctgcgccgcctgggcttcgccgcggcggacccgctgctcgcggcgagtgtagcagcgcgcgtggcggcggtgagaggaggaggaaagggcgcgaggggggtggtgtcgatggcgaacaagaacgtgggggacctgaacccggcggacctgaaggggaagaaggtcttctgtagggccgacctcaacgttccgctcgacgacaaccagaacatcaccgactacaccagaatccgcgccgtcattcccaccatcaaacatctcattca

SEQ ID NO: 40103 - DNA, 362 bp, Glycine max
tgaccttctctgttgaggaatcttagtggacaaaactggagattggatcacacttatacaaaattctccaattagtaacttgttgagagttgctgcttggaagaaaggctgtttaatggtcaagattgtgatgtctgggaatgcagcagtcaaaaggagtgattgggcctcattggtacaagtgtttgtaacaaacagcaacagtacagagcattttgatgcatgtcagtggacaaaatcagaaccacattcctgggaattgatctttccaatagaagtatgtggtcctaataatggttttgaaatgtggagttctgagtgggcacatcaaacttggtggcgatttgagttttcttattgac

SEQ ID NO: 40104 - DNA, 376 bp, Glycine max
aaagcgcatgcacgcgaacctaagaatctgatgtcgagcttaatgtcaaaattttttttcttgccactgcacaaggtctcaccgcgggtggtctctgtataaacccaagcctcctcacgagaattaccagacatttgcgctcaaaatagaggtttctgacaccctcttgcctttaactataccaggcagtgactattaggccaatggtgtgcccctcttctgcctctaccatggttgaaaccaaaaacggagagtggtttcttggtttggccagcccaacttaccttaatagcacactttctggtgacaatagatttgaccctctgggactatctgaggacccatagaacttcaagtggtacgttcaagccgacct

SEQ ID NO: 40105 - DNA, 339 bp, Glycine max
tgaagcctgttgcaccgaaatcatctcccagaccgtcgggggggtcgacctaaaagcgcgccccttcaagtactggttacaccccatgggtgacgaggaggagatcgaggaggaggaacacaccgctgatgctctgatcatcgcgaccggcgcaaaggctaggaggttagatcttaagggcgaggacaagtactggggtaacggtgtatccgcatgcgccggatgcgatggttccctccccatgttccgcgagcagccactggtcgttatcggaggtggtgactaggcagtcgaggaggccttgtacctcaccaaaaatgcgagcaaggttactgtgct

SEQ ID NO: 40106 - DNA, 388 bp, Glycine max
cgaaaattttatttgcacagtccacaggaagctcgccccgtgagatggaaagctctgtctggcattgaatggctgcaaaaagctgatgtgcctaccatagcacagattgaagagttccattcgatgcagaggatgatgaatgctcctgattcaaatgataatattgatttactgttgagcattgatttgttgggtttacaaggagcaggtaaagcttttccaaacaaaattgtttttgatgataagcttgtgttggctaacacacaagaattctttgatggaaattttccagtggattcttggttaccaatttttgtgaattgtctttatcctgtaagtcaattaccttcagaagctggcgttgttaatgttacatgtggtagtggac

SEQ ID NO: 40107 - DNA, 412 bp, Glycine max
ggatagtccaaagtctacaataccaggtgattttgtcattggtgtcaaggggacaaccatgaacaatctgtgtgcatatgggctcaatcctggtattacaggttctcgacttttgggcaccattccttactccatgttacagcaaactgcctggaatcaaatggcggcagtgagaacaccattggatttcgattctagcaagcagagcttttgtcagttttctattgaccttatcggcggaagaatcttagaggacaaaactggagattggatcacactcatacaaaattctccaattagtaactcgttgagagatgccgcttggaagaaaggctgtttaatggtctagattgtgatgtctgggaatgcagcagtcaaaacgagtgattgagcctcattggtacaagtgttt

SEQ ID NO: 40108 - DNA, 350 bp, Glycine max
gtttgtttaattcaataaaggaaattaggcatgaccctcttgtggagtgtgctctgcctatttgaaaatttccacacctcttttaattgtcgtaatgatgtgtgaagtgtgtgttattttaaaaaaaaaaaaaaaaaaaaaaaaaaaaaaaaaaaaaaaaaaaaaaaaaaaaaaaaaaaaaataaaaaaaaaagaaatgtgaaaaagagcatttattcaaatcaataactttattcacattttgatgatgcggaggtggaccatgtttgctatagaaaagtggttttcaaaccttctgagacataaagctttttgaatcaagatggctgttcttaacgtggattaatggg

SEQ ID NO: 40109 - DNA, 315 bp, Glycine max
atgttttcataatgggggttctatcccctctggaaatgctctcacacctattcgccatatcatttatgatgagatgctcattaaatatacctttgtaaaataactgcgccaggcttaagctacaagtatgtttttacaaaccatcaaaaattttggttctttttgcgcctactgtgttgatcacttaattatagctccagaatttttctagccttactttaacagctctatattaaaaaacgtatttgcttggcataacaatcccattactgagggtattggccaaactattgccacttttcaatttataaagtt

SEQ ID NO: 40110 - DNA, 376 bp, Glycine max
gatatttacaccatctgctctcaagactgtgaattgtggaatcctgctggcacaaaagcaatgactatgtcatttaatccaaacccgtgttctgatgcatggagtttggaatttctgaagcgtactggatttcattgcgatatcatttgtgtcactggatggactgccaccccaatgcaggatgttcaggttacaattgattggtttatttcctctcaggaatgtgttcccaggacctattgtgttttaaattcacaaaatactttttgtgttaaataggtggatgggaaaattgacttttccccaaggcacttcccgaagtgttaagagaatgcctctttctatagggggaggagcctgtgcaaagaatgctatt

SEQ ID NO: 40111 - DNA, 330 bp, Glycine max
gctagtgcaagtgaaatagttgcttctgcacttcatgataattgtagagctgttcttgttggaaaacgcacatatggcaagggtctaatccaatctgtatttgagcttgatgatggatctggtgtggttatcactgttgggaagtatgtaacaccaaatcacaaggacataaacggcaatggaatagagcctgacttccagaaacttccagcatgggatgatatcagccgacatcttaaaaaatgcagtatgtcacaacagggataaagcagtctctttggtattccgatgcaatctattgctttggacttatcatttaattgaaacttt

SEQ ID NO: 40112 - DNA, 413 bp, Glycine max
cacgcgcgtagacaagctgcatgcgaaagttgagttcttgcaagagttggggttttcgtacgaggaggctgtcagggcttgtgctaggttacccgcaatttttgggtatgacgtggagaacaatttatggccaaagtttgtgtatcttgtcaaggaaatggagagggatttggaggacttgaagaggttccctcagtactttgggttcagtttgaaggagaggattgtgccaaggcacttgcatttgaaaaaaaggggtgttaggattcccttgaatagaatgttgatgtgggctgatcaaaagttctacgccaagtggaagtgattagtcaactcacatatttgctcataaccttatatgattcaacaagatattatcttctttttaattgtctaatccaaatagactgtta

SEQ ID NO: 40113 - DNA, 376 bp, Glycine max
tgcaggcttccctcagactcagaattcggaatctagggtccaggttcttttaaggggcccgccacaagctatttttacacggtctggtgttaacactgtgaatcgtggaattcttcttacacaaaagcaattactattgtaattaaaccaaaccccttttctgatacatgcaactctgaattacccaagcagactctctttaattgcgacatcatctgcgtgactggaaggacttccgacccaactcacgatgtctaggttacaattgattgatttattatctctcacgaatatcgttccaagacctattgagaatctaatacacccaacccttttgtgttaaatacgttgatgggcaaatatactttgccccaca

SEQ ID NO: 40114 - DNA, 389 bp, Glycine max
ctcgactaatattctgtcattcagaccagcttcctatactatggtataggaccaaacgtgaaagcgaaaaaaaagattcttaagaaatataactaagcctctcttgaataatcaaaacgaatgttgaatccaaatcaatttgatatagaaaaaagacttaaaaaggaggattcgcaatgcgagatctaaaaacatatgtttccgtggcaccagaagcaagctctctatggctcggcgcgttcgcgggtctcttgatagagaccaaccgatatttttccagaggcatagatcttcccttgttttacattctaggcattgacaccgaaaggggtgaagaagattatacagccaattaaacattaaatatatgcaatgaatgtctaataaat

SEQ ID NO: 40115 - DNA, 388 bp, Glycine max
  unsure (1)..(388): unsure at all n locations
caatanangtatgtggtcctaataatggttttaaaatggggaggtcttagtgggcaaatcaaacttcatggcatttgagtttccttattgacaatcccaaacagtctacagtttttgatattctcttgggaatctctcaagattttgaaattgctggtaatactcttatgccacctttttttgttccacaggctactgccagatcttttgaaaatgcggaatcctctgcatgacctggaattggtgttttctttcgctggtccgtttgtttaatccaataaaggaaattgggcttgaccctcttgttgagtatgctctgcctatttgaaaatttccacacctcttttaattgtcgtaatgatgtgtgaagagtgtggtatttttcncc

SEQ ID NO: 40116 - DNA, 399 bp, Glycine max
ctcgagccgaatagtctctagggtacaattgattgctttatttggtctgaggaatgtgttaccaggacctattgtgttgtaaatgctcaaaatcctcttgtgttaaataggtggatgggaaaattgactatacgccagggcacttcaccaagtgataagacaatgcctttttctatagcgggaggagctggtgcaaaaaatgctattcttatgaatatgccaaacgctggtcttttaatgtggagatattctgttggagatctcgtgttttaagaacctaagatgactcatccctacattaaattgacaacactctttcttcatagcatatcggaaatatggttgatgataccatcaaatttgaggcttgtccccacacatctggtgcagtcaggagag

SEQ ID NO: 40117 - DNA, 239 bp, Glycine max
attggatcacacttatacaaaattctccaattagtcacttgttgggagttgctgcttgtaagaaaggctgtttaattgtcaagattgtgatgtctgggtatgctccactcaaaaggagtgattgtgcctcattggtacaagtgtttttaacaaacatcaaccgtccagagcattgtcatgcatgtgactggacaaaatcacaaccacattcctgggatttgatcttacctatagaggga

SEQ ID NO: 40118 - DNA, 342 bp, Glycine max
cacgcgtacgtcagctcggaattcggctctagcacttatacaaaattctccaattagtaacttattgagagttgctgcttgggagaaaggctgtttaatggtcaagattgtgatgtctgggaatgcaacagtcaaaaggagtgattgggcctcattggtacaagtgtttttaacaaacagcaacagtacacatcattttgatgcatgtgagtggacaaaatcagaaccacattcctgggaattgatctttccaatagaggtatgtggtcctaataatggttttgaaatgtggagttctgagtgggcaaattatactttatggcatttgagttttctttattg

SEQ ID NO: 40119 - DNA, 331 bp, Glycine max
  unsure (1)..(331): unsure at all n locations
caaaactaggtgcaacttttgcatatttagaaaagttacgcagattggtgattttctcacagagaaaactttanagcagatgtctaatgggttttgtgggtggcttcctgaggacaaggcgaagtttatggtcacaacttcattatgtttcgtgtaataatctggaaatgcaagaagcttatcttgtcaatctcgtaaatgtgttacgagaattgtatttgcacagtccagaggaagctcgccaattgagaaggaaagctctctctcgtattgaatggctgcaaaaagctgatgtgcctaccatagcacagattgaagagttccattcgat

SEQ ID NO: 40120 - DNA, 382 bp, Glycine max
ctcaaaccatttttattcaaaccaaactgtccatatactcggggacgttttggtaaacactcaacaactataacactttctgcacataacaatcacctactcagatatcaacaagaaaattctcacatcacttcgtaaacgtaagaaaattagttttcttactagactcaatccttttccagtatctatactgcctgtcctttttatcgttaacaataaaattctcagttctaacgccactaatcctatgctgacgcgacttctttagaactgtaataatctcaaatatctggttaatgagtttcctattgcatttgttaaactagaattaatattttattcacttaaataaatcgcattactatatccaatgagtcttttt

SEQ ID NO: 40121 - DNA, 327 bp, Glycine max
  unsure (1)..(327): unsure at all n locations
agcttttccaatcattattgtttttgatgataaccttgtgttgccgtaacacacaaaaattctgcgatggaaattttccagtggattcttggttaccaattcttgtgaattggctttatcctgtaagtcaattaccttcagaagctgtcgttgtaaatgctacatgtggcagttgtcgtcgcttattgtttctctattttttaacaaataccttcaagacaaagcattttttgcatttagtggacaaaattagaaccccattccttggaattgatcttcccattagaggtattnntccttctcttagatttccaaacttttatgcct

SEQ ID NO: 40122 - DNA, 418 bp, Glycine max
tttgggttagcggggttagagcaaaagcttggctaataataataataataatagggataagaataataataataataatgaaaggcctactagggttcgacaccaacacagcctttccatggatggctccatccacccggatatgctgctctccgctaccgctgccgctgccgatgatgtctccggtggtggcatcgacaccaaaaaggctatgtctgctgacaagcttgctgagcttgccttagttgatcccaagcgggctaaaaggatatgggcaaatagacagtctgctgcaagatcaaaagaaaggaagatgcgttacatttccgagcttgaaaggaaagtgcagacattgcaaactgaagcaacttccttgtctgcacaattgactctcttgcagagagatacaactggaatg

SEQ ID NO: 40123 - DNA, 408 bp, Glycine max
ctgatttccaacaatctggcagttgcccctttatttgattgtgtggcacatctaaagtgcccaaatttgaagctgtgctttggtcacataagaatgaaaacaaatctgaaaaattattttcagagagcatcagctcggaagcttgtagtaaaaatgaccgaattttaccctcaaactgatttgaattcagaagtatagactgtctgagaggaagcttcaacgatatatttggaattgcaccaatgagataattggaagacatatttaacaatcccatattttgcaacttattccaaaaccagtctggtacagagtcattaatcccgttatcagaaatatcaaggatatacaaagaactttgagtcttgagccaactttgaaaagtggggcccaacttgcaagatctgt

SEQ ID NO: 40124 - DNA, 294 bp, Glycine max
ctaagctcgaatcggctcgagtgcaatccaaacagtctacattttgatttctctgggaatctctcagatttgaaattgctggtaatctctatgccacttttctgttcacaggctctgcagatctttgaaaatgcggatcctctgcatgatctggaattggttttctttcgcttgttcgttgttaattcaataaggaaattaggcatgaccctcttgttgagtatgctctgcctatttgaaaatttccacacctcttttaattgtcgtaatgatgtgtgaagtgtgtgttatttt

SEQ ID NO: 40125 - DNA, 249 bp, Glycine max
gaaattccgagagactgcacctggagataatcttagagttatatatgaaacactaagcaaggatccaaatagtctagccaacttggatcaggatcttcctaattatgctcagcataccgtgcctattttctctttgccacaagagtggctatggtgtgaatcatggtgtggtaatgctacaaaatacaaggcaaaaaccattgatctgtgcaacaatcccatgacaaaagaacccaaactgcagggtgc

SEQ ID NO: 40126 - DNA, 463 bp, Glycine max
aatccttcaaaaattttgtttctttgtgtgtgtatggggatgataacttaattagggttcatggatttttcaaggcctactttagtgggtctaaaatggaaaggtttctaactaggtataacaataccctttctgatggtttggcaaaaactgtgcaattttgcaattaaaaaggtagccaattgggattttcttaaaaagaaactttaagccaatgtctaatgttttgtgggtggctctgaggacaaggcgaggttatggtcacaacttcaatattgttcgtgtaataatctggaaatgcaagaagcttatcttgtcaatctcgtaaatgtgttacgagaattgtatttgcacagtccagaggaagctcgccaattgagaaggaaagctctctctcgtattgaatggctgcaaaaagctgatgtgcctaccatagcacagaatggagagttccattcgatgc

SEQ ID NO: 40127 - DNA, 255 bp, Glycine max
ttcaaaaactgtctttcttaatgacacatgtgacaatggacggggggggttacccaccaccctctttattatcctctacaatcacaatctctcctcccatatcaacaaaaagattcttactattcttgcgaaaacgaagaaaattctttttcttaccataattgatcccttttcaatttcttcacatccagtcctttttttcaaaaacaatgaaattcttacttcttactccactaattctatgctgactcgact

SEQ ID NO: 40128 - DNA, 261 bp, Glycine max
tggagatatactttaatcaaaagacctccaaggttgcagttgtgtgtgcggacaatgtcgaagcaagaactgcactttttctcatggagcttgaggaaaaaagagctattgaggttaattagaaagagcactttgagaggactgtgtctaactttctttgctggactttgcttctctatgttctcaccagcatgcaacatagcagcagatgacctatggaatacctttagaaaaggggttccccatctgacagtatatact

SEQ ID NO: 40129 - DNA, 406 bp, Glycine max
atcttgccggcgctggtccttgcgcagattgagccgcagtacatcatgtcccgagcgacgttcgtccgagagtcgagctccaagatgtactcgagcaccatctttgcctttacgcagatgctcgccgagatgccgtactcgctcgtgtgcgcgactgcgttcttcctcctgctgtactacggtgtcgggttcgacaaggcatcgtctcgcgccggttacttcttcgtcatgtgcctcctgaccgaggtctacgccgtgacgctcggccaggccgtcgcggccctctcgccgtcgatcaccgttgcggcgctgttcaaccccttcctgctcgtcatgttctcggtcttctgcggcgtcgtcgcgcccaaggcgacgctgccgtacttctggcgcagctggatgtacc

SEQ ID NO: 40130 - DNA, 383 bp, Glycine max
taactggacaaaatcagaaccacattcctgggaattgatcttcccaatagaggtatgtggtcctaataatgggtttgaaatgtggagttctgagtgggcaaatcaaacttcatggcatttgagtttccttattgacaatcccaaacagcctacacttattgatattctcttgggaatctctcaagattttgaaattgctggtaatactcttatgccagctatttctgttccacaggctactgccagatcttctgaaaatgcggaatcctctgcacgatctggaatttgcgttctctttcgctcgatcgtttgtttaatccaataaaggaacataagcatgaccctctcgttgagtatgctctgcctatttgaagatttcacac

SEQ ID NO: 40131 - DNA, 395 bp, Glycine max
gaagtcttgcccttctctcttcaactccaaacacaagagatcgggatccatggctgcctccgtctccactgtcggagctgccaacagagctcttttgaacctcaatggatctggacctggggtttcagctcccagttcatccttctttgggagcagcttgaagaacgttattggctgaagggtcctcaacacaaagatttcctctggaagcttcaagactgttgctgtagaagagaacaacgagatcgaagagacccagcagaccgacaaggacagatggaagggtcttgcctatgatatctcatacgaccaacatgacatcacaagaggaaagggtttggttgactgccttttccacgctccacagcatgctggaactcactatgctgtcatga

SEQ ID NO: 40132 - DNA, 401 bp, Glycine max
cttccctatcgcgcaggagaatgtgttggcttattctccccgacgaagggtggaggcgaattctggagatcggaatcaagagcaacggtttcagttacaaggatctctgctgcgtctcaatctcatgccgccggcttgatcgcctctccttggaagaacctttttggaaccggcttctcttctctgactatccccaatcccaatctcacccttcttcttcttcttcttcttcttcttctaaatctctttacagattaaggtttgagagagacaaggagaggagaatagctgctcatatgagggctgtgctgagaaaggaaagccagtttgccgaacattccagaaggctcaaagatatgaacacacgtctcgctcaagaaaccaccaaagccacgcaaact

SEQ ID NO: 40133 - DNA, 377 bp, Glycine max
aagaaagtaaaagttttctcccaaaaacaatatccctggggctgggttaaatcctaaagtctcatgttacactcattttatcgccactacttatagcatttcacatctgactctactaaatcaactagcggcagttagaacaccattgcattttctttctcacaaacagaactttgtaacctattttattaaacttctcgctggaggaatcttattcgactaaactggggatttgatcacacttatacaaaattcttcaattcataacttctttagagttgctgcttggaataaaagctgttttatggtcaagattgagatttctgggaattcaaccatcaaaacgaatgattggaccttatttgtacaagtgtttt

SEQ ID NO: 40134 - DNA, 303 bp, Glycine max
ttagagtacaaatctggagattggatcacacttatacggaggggtccaattggtaactggtctcccttttctgctttccttaaaggctcaataaaggtcaccattgtgatgtcaacaaatgctgtcatcaaaaagagtgattgagcctaattgggtcacgtgtttataacaaacagcacctcctcatagcattttgttgcttgtgagctgacacaatcagaaccacatttcttgcaatcgatcttgccaatacacgtatgtggtactcataatgagttttaaaactggaggtctgagggggca

SEQ ID NO: 40135 - DNA, 367 bp, Glycine max
gcactatttctagcaaggcatttgctctccatagcagctaaagtgtgtggggctttctggaggcctcactgccaggaacaaaatgagatgtttgggcgcgaggcacacaagcagctggactatgcggaatgctatcccggcggattttggtgaggaactaagatgatcaaggcatgcatatatgccaaactggaaggttccccaacgcggattattgatggccacgttctatgtggtgaggtagaattatcagacctgactcacatttctggttcaaagaatcttgcaacctttatgctagatgagcatcagatgtttcaataggaaatttgtagtatcacatacatagctgtacatcttatagatt

SEQ ID NO: 40136 - DNA, 322 bp, Glycine max
atgaatgataaatgttgagatctgaacaaacaaatcaaggtgggtggaatttgcgtgtacttatcgacaatcacaaacaatctacagattatgatattgtttcgggaacctgtcatgattaacaaattgcaggcaatactcaaattccaaatttttttgttccacaagctactgccagatcttctgaaaatgactaatactgtgcatgatctcaaatcatgtctatgcttatattaggtcgcatggaaactcaataaaggacaaaaggcatcacccgctcttttaataagctctggctattagaaaagtttcacacctattt

SEQ ID NO: 40137 - DNA, 406 bp, Glycine max
ggagagattcatgaaaaagttgtattgaaattttcacaagagggatttcttgcagcttggtcaactcaggtgcgtcctgcaacaactctgttggctgatgggtgtccatatttgtatgcactggtgcatgatagttcactgtctacaataccaggtgattttgtcattggtgtcaagttgacaaccataaacaatatgtgtgcatatgggctcaatcctggtatttgacgctctcgtcttttgggcaccattcctcagtccatttcacagcaaactgtttcgaatcaaatggctgcagtgagaacaccattgaatcttgattctagcaagcagagctttagtcagatttctattgaccttctctgcggaggaatcttaaccgaccaaactggagattggatcacac

SEQ ID NO: 40138 - DNA, 412 bp, Glycine max
acaatgccgaacgcaagctcatcctacagtatcaaacacggttgcatttctggtgcatggatctctctttcccatccaaaacaggcaaggccgcgtagctgagcccatcagcccctctagtggggtgggtctgcatgaggataaccgtcacgaagcatgcctactacagaaacccttatgtcggcccagaccgcgatgcgtactagagcacattctctacatatcccccttgctacgttacctagcacttcccaagaagctacaagctggtcagctgatgtgctcacggctcgcttcgatggctgacacagacacacacaatcttataacagacactctacgtgggcaatacatattggcttaagagaggactatatctgaatagttatactatagctcttacatgatgcag

SEQ ID NO: 40139 - DNA, 302 bp, Glycine max
tgccgcgtcgtaagctcggaattcggattgaggtttttaacaaacatcaacattgcagagcatttcgatgcatgtgggtgggcaaaattataaccacattcctgggaattgatcttcccaatagaggtatgtggtcctaataatggatttgaaatgaggagttctgagtgggcaaatcaaacttcatggtatttgagtttccttattgacaatccaaaacagtctacagattttagatattttctagggaacctctcaacattttgaaaatcctggttatactcttattacacctatttttg

SEQ ID NO: 40140 - DNA, 411 bp, Glycine max
gtccgagcagctggtgacatatatctcgtgcactcaaagcgtgcgacagaccagaccagaatgcctctcaactactccaaatgggacaaccttgagctgtcggatgattccgacatcgaggagcacccaaatgtcgacaagaagagcatgatccgatggaagcagcgcgacatccacgagaagcgggagcagcgaaaattgcaaatcgcaaagctgcactctgagatcgctctcaacgctgtccttcgacctcgaatccagaccgttctggacggcacgcgctcaaagggtctggaccactaccgcgccgttcagcgccgtgtgaaagagtcgccatcggacgagaagcctaacaccggcgcgcctaaccagcccacttacgacatgatgcttgctcagcttctcggggat

SEQ ID NO: 40141 - DNA, 340 bp, Glycine max
ctgcaacaactctgatggctgatgggtgtccatatacgggtgcaacggtgcatgatagttcagtgactacaataccaggtgatcttgtcattggtgtcaaattgacaaccataaacaatatgtgtgcatatgggctcaatcctggtattacaggttctagtattttgggcaccatttctcagtacatttcacagcacactgttaggaatcaaatggcgacagtgagaacaccattgaattttgattctagcaagcagagcttttgacagatttctattgaccttctcggaagaggaatcttaatggacaacactggagattggatcacacttatacaaaa

SEQ ID NO: 40142 - DNA, 405 bp, Glycine max
gggctatatatcatgaacatttgagtcttcattgcgcgcgggcgacctcttccattaacgggtggtgcctctcttccatctccccagccaaaacctctctcaagaaggccacattacgcccttctgtctttgcaaccgttagcactccttcgtctccttctccttcttcttcttcttccttcccttctctcattcaagacaggcctgtctctgctgcccctgcccccatcatcaccccaactgtgacagaggatatggccacagaatacgatcaagctattgcagaacttcataaattgtcgagggagaagagcgaactcaaagccacagctgctgagaaagtggaacagattacagcttctctgggcacatcatcatgtgatggcatgcaatcatcagaagcct

SEQ ID NO: 40143 - DNA, 435 bp, Glycine max
tgcccccgtccgtaagctcggaattcggttcgagatttttaatttttgtgaaaaataatgttcatcgagaattttaaggttgagtgtcctaatgtgaagtacaccgagactgagattcagtccgtgtacaactacgaaaccaccgaacttgttcacgagaacaggaatggcacctatcagtggattgtcaaacccaaatctgtcaaatacgaatttaaaaccaacatccatgttcctaaattaggggtaatgcttgtgggttggggtggaaacaacggctcaaccctcaccggtggtgttattgctaaccgagagggcatttcatgggctacaaaggacaagattcaacaagccaattactttggctccctcacccaagcctcagctatccgagttgggtccttccaaggagaggaaatctatgccccattcaag

SEQ ID NO: 40144 - DNA, 347 bp, Glycine max
atgccccccgtccgtaagttcgaatttcggttcgagatagggattgttttggccttgaggaacagcagcagattcgggggggaacccaatgtgggcaggccccacaaggctgacatgggtgtattgtttgaagcaccgaccgcaaccagtcaaccaatccgccggttggatggtacagaaacaacaccttgagaactcgtctgagtccaacccatccgtcaggaggagtgtcttctgcccatgcatgaacaccacctcaaaaacctataccatgtctgaagtccgaacgcacaacaacgccggttctgcttgtatcatagtccacgagcatgtctatgattgcaccc

SEQ ID NO: 40145 - DNA, 409 bp, Glycine max
cttttggaagcattgttcatggtctactgcccaagggtcggtgagaaaaggcattaccgaaggtggatgtcatgaagcagaatggcataacacctaccatccatgtttttacgtcactaatagttcatttctttaaagagaaacaagtagagaaagctattgagacttttgaggagatgctacactcaggttatgaaccaaccattgtcacatattctgcacttatacgtgggtacatgaacgttgggaggcctattgatgcgtgggatatcttctaccgtatgaaactcaaaggaccctttcctgattttaaaacgtattctatgttcctcacttgcctttgcaaggttgggaaatctgaagaaagaatgagacttatttctgaaatgttggacagtggaattgttcc

SEQ ID NO: 40146 - DNA, 351 bp, Glycine max
gccagggaatcagatatggccagatcaaaagattaaattgagattgaaagtgctctatatgtatgctgctggattttatacatactccatacttgctttagtattttgggaaacgaagcgctctgactttgtggtttccatgggccatcatgttattactgtcattctcatcgtgttatcctacatttttaggtttgttcgtgttggatctgtagttttagctcttcatgatgctagtgatgtgtttattgagacaggaaaaatgtccaaatacagtggtgctgaaacaacagctagcattgcatttattctttttggtttgggttttaccgtgacacggatcatttacta

SEQ ID NO: 40147 - DNA, 394 bp, Glycine max
gagcaggtcaagctgtttcaaacaacattgtttttgacgatgggcttgtgttggctaacacacaagaattctttgctggaaatgttgcagtggattcttggttaccaatgcttgagaattgtctttatcctgtcagtcaattaccttcataagctgtcggtggacatgttacatgtggtagcggacgtggtggattacccaccactgctaggattaatgctgcatataacaattgctcctcacattttaacaaaaggattcgcacagcacttgggaaaggtcagaaaatattttttcttactagagatgatccttttacagtagcttcactggctggtcttttaggcgttcataatgaaagtcttggttctcacgccactcaacctatgctgac

SEQ ID NO: 40148 - DNA, 235 bp, Glycine max
ggaagtgattagaaatagaggcattcctgctgatgtgcttgcaaagcgagctcatgaatttgaaaaacatgttgctcatgaaagcctcaaggatcagattcctgctgttgacaagttgtattctactaaggttaataaatttgcaaaaattatgaaccttagacaaagtgttgttggtgaatagggaaggaaaaagatggaaaaaaatgtgactgtttcatgtactgatatttgt

SEQ ID NO: 40149 - DNA, 334 bp, Glycine max
ctaaacaccacagaccaactcgtcaaggatttagagaacccgggtgatgatcaccatattcgtttgaaccatcacgctcagcctttcctatgtcaccaggtatgctgattatcaaccgggttctctaaacaccacacaccaactcgcctgggatctagaagattatgacatcgttttccacataggacgacatgccttatgcgaatggatacatctaacaacgggaccaattcacagctcaagtgccatatatttccttgacagtgccatacatgattgctagtggaaatcatgaacgtgactgcccaaacacaggatcattctatgatactcc

SEQ ID NO: 40150 - DNA, 305 bp, Glycine max
agaacaggtatttgttaactaataccgtgcagcaaaaggcttggtgagggaaatatgaacgtgttggtaccactcaaaaacgtgcccgtgccggcaaggtagctccattcactgggcttaagtacatggctgtcgtgcccacccgtaagaccaaccaggaacttaccttcatagatcgcaacggtggaggagtgctatgcctgcaggtatggccacgagctggcaaatagatgcgtgtgactctattctacgtgccagacattgatgatgcacatgtcggtgacgaagtacaataccttcttatg

SEQ ID NO: 40151 - DNA, 278 bp, Glycine max
gggatggactgtctccccaacgctcgatgttcagggtacattggattggtttatctcctgtcaggaatgccttcccaggacctattgtgttttaaatccacaaaatcctttcgtgtccaataggtggatgggaaatttgtctttcccgcagggcactacccggagagttaagagaatgcctctttttatagggggaggagctggcgcaaaaaatgctattctcatgagtatgcccaatgctgttctttcaatgtggagatattttgcaggagatctcg

SEQ ID NO: 40152 - DNA, 454 bp, Glycine max
  unsure (1)..(454): unsure at all n locations
gctanntgacgtcgcatggcacgcccgtacgtaanngctcggaattcggcttcgagtaaaacgggacacaactttagtgtgtcaaagttgtgaatcaacaccatactgtcatggaaatggactcggtttggcacaatgcattacctgagtaaggggcaaatgatattcgtgtgttcgcgactatagctagatcctgatggtattgatctaccaatgcaatgttattgagcagagatgtgcagaaatagataacacagtctctagcggtgagtgatgaaaatactgatgcgtgaaagtgacgcaacctgctgatggctagattgtcaaggatggcaatgtgcaagaaagatgtttggagagttgaatgtggaataccttctggatttccgctcacagttatgtgcaatagcattgttaatgagatgctcattagatatagctctgaaaaattact

SEQ ID NO: 40153 - DNA, 296 bp, Glycine max
gacaaccattggcattatatgtgcatatgggctgagccctggggttgagggcattcgacagcagaccgccattcctcaaacggtttcacagcgaacagcatggaatcaagtggctaccgagcgaacaccatggcattttgatattgaccagcatagctgttgactgttatctatcgaccctggcggaggaggcacactaatgcacaaaactgcagataggatcacactgatacaaaatgcttcaaataaagactgattgatagtcactactgtgatgactggctatgcaatggtca

SEQ ID NO: 40154 - DNA, 250 bp, Glycine max
gtaacagccagctaaccgtgaaaagcccaccatggaaatcgggcgctctgggggtccgaattgtattctggataaccattctcagtggcagacctggcccaagtcccctgaaatggggcgccagagaaggtgagagccctgtcgtgcccgggccctgttgcaccaccaggcgctgttggtgagtctggttgataggaaatgcagccccaatcggtcggttgattccgtacaaagctaaatactgtctaga

SEQ ID NO: 40155 - DNA, 392 bp, Glycine max
caagcctcaccatcttagggaacttgacgcggctgaatatgaagaaatggttggtgctccagcactaagtttcaataaatctttcagggaagtggaatcacccctagttggatcaaaggaaataggcaatgcggaaatattagatgagttaactactaatagaggggagttgaaggtcagaactgtcagctttggtgaagaaagaaattgccaggcttaccctgatgaaaatggatcgacactcacagatttttagaaaaggtgatgaatccgatgttatacggtaaatgttccaatcccagaagaagggatatgacattcatacgtctactctagaagaagatgatatcaatatatagatgactatcaagttttaaaatctagaaattttc

SEQ ID NO: 40156 - DNA, 327 bp, Glycine max
tgggaatgcagcagtcaaaaggagtgattgggcctcattggtgcaagtgtttttaacaaacagcaacagtacatagcattttgatgcatgtaagtggacaaaatcagaaccacattcctgggaattgatcttcccaatagaggtatgtggtcctaataatggttttgaaatgtggagttctgagtgggcaaatcatacttcatggcatttgagtttacttattgacaatgccaaacagtgtacagtttttgatattctatagggaatctctgaagattatgaaattgctggtaatactcttatgacagctttttctgttccacaagc

SEQ ID NO: 40157 - DNA, 391 bp, Glycine max
gctcgcgaacggtcagggcgagcccccagactggcagaactggatcggtatcgtcctcctgctcattgtcaactccaccatcggtttcgtcgaggagcgcaacgctggtaacgccgtcaaggcgctcatggactcgctcgcccccaaggcccgcgtcaagcgcaacggcgcgtggcgcgaggttgaggcgtccgagctcgtccccggtgacctcgttgcattcaagcacggtgacatctgcccggccgactgccgtctcgttgaggcgattgacgtgtcgatggaccaggccgcccttacgggcgagtcgctcccccagggcaagaagctcggtgacgagtgtttctcgggctcgacctgtaagcagggcgagtgtgagggtatcgtcatc

SEQ ID NO: 40158 - DNA, 340 bp, Glycine max
tttgcttgttaacaagcacacaaattctcactcatgctgaatgacattacctacaagttgaaggcttgaacatgtgaattgcttaagttcaaattacagtgcaagcaaaagggaattcgaaacatgagacatagaaaaccaaatattattttgaccttgtatgattttctttttgttcttttcaggattcatctgttattgcacagttggggatacctgacatgcgcttaccgctcctttatacattatcttggccagaaagaatctattgctctgaagtaacttggcctcggattgatcttagcaagtatggttctctaacattttatgcaccggatga

SEQ ID NO: 40159 - DNA, 341 bp, Glycine max
agataatgaagaggaattggtgaaagccaatcgaatgaaaccggagagtgacaaaggaactgaattagaagagaccagtgaatctgagtcagaagaaaccagtgaatcagagtctgatgtggacacagatacagatgaaggtgcagatgaggaagtttacgaggaagaagcctctgatgtccatgaagacatagcaacgattgacaaagaaactcatagggttgcggttgttaacatggactggagatatgttaaggctgttgatttgtatgtattggtaagctcatttgttccacctaatggactgatcaaatcggttacggtctatgcatctgagtttg

SEQ ID NO: 40160 - DNA, 361 bp, Glycine max
agaaggcccaaaagaggggaagattttaagtttactgaggctctagttaaggcagattactggttactattttttgtttactttgttggtgttggaactggggttactgtacttaataatttggctcaaataggcattgcacaaggtatggaagataccacaatcttgctgtcacttttcagttttttcaattttgtgggtcggcttggtggaggagttgtttcagaatattttgtcaggacaaaaacgattccaaggacaatttggatgacatgcacgcagataattatgatcttcttgtaccttgtgtttgcctatgctatcaaaggaaccctttatcctgcaattgcagttcttggta

SEQ ID NO: 40161 - DNA, 434 bp, Glycine max
  unsure (1)..(434): unsure at all n locations
gagctatgacgtcgcatgccccccttccttagcttcgaaattcggttcgagcaatcacgcccccctctggcatctgaacttttgagagcatattgtgcttctcgcaggtatgttaccgctagtggactgcctgatgaaactagagctgctcgccagatactgaaagattacattgatgggaagctgcctcactatgaaatgcccccagcaatgtcaaatgtggaactatactcggttaacttgcatggctctgtttcatctcgtactgaagatgttgatggccaaacttgcaccagattttgagcaagtgttggatgacctcaatttcatttgacatggctaatggacttgtttcgaatgaagttaccatcaagaaggctgatgcatctcataatcaccatangaagcctcagcggaaaaaagatcgtctcaga

SEQ ID NO: 40162 - DNA, 258 bp, Glycine max
ctcactaccaatgcacaactgacggcacgaagatagctgacgtgctgctttcacaagacattgacacgggtgtgaaagtcaacaagcgaacgctaccccaagcttgtgccaactaagaggcaagatgccaaggtattgatggattaggctttagcatgggtgcttactaccatgctggtgcgcttgttaagacatcgcaaacagtggcttgaatacggaagggtatctaggccatggctgagtacgatgctacctggg

SEQ ID NO: 40163 - DNA, 391 bp, Glycine max
  unsure (1)..(391): unsure at all n locations
cgagccaattcggttcgaggtgatgtctgggaatgcagcagtcaaaaggagtgattgggcctcattggtccaagtgtttttaacaaacagcaacagtacagagcattttgatgcatgtaagtggacaaaatcagaaccacattcctgggaattgatcttcccaatagaggtatgtggtcctaataatggttntgaaatgtggagttctgagtgggcaaatcaaacttcatggcatttgagtttccttattgacaatcccaaacagtctacagtttttgatattctcttgggaatctctcaagattttgaaattgctggtaatactcttatgccagctttttctgttccacaggctactgncagatcttctgaaatgcggaatctctgcatg

SEQ ID NO: 40164 - DNA, 229 bp, Glycine max
gcacggactgcttcacgtactctatggcttgcaggaagacaatgcgggaaactacgcgaaagcgttccctctctacatgaacgccttggagtacttcaagatcaagggagccatcacgcagaaattcaccgagtacctgcgccgggccgaggagattcgggccgtgctcgacgatggcgtgcccggcccagcctacaacggggacacggcggtggctgcaaggcccaag

SEQ ID NO: 40165 - DNA, 422 bp, Glycine max
  unsure (1)..(422): unsure at all n locations
tagaagagctanntgacgtcgcattgcctacgtcgtacgtannagctcgnngaattcggcttcnngaggtcacgaggctaattagggnngttgtggaaagggtgtaggagagggatgtannactgaagttaccaaaagggagatgttggttgtnntccaattttcttacctgattgtggggnagtgtattcgattgcaannatcaagcaagagcaactctttgttcaaagtttccatttgaggtgtctccctggatgcctagatatgccacttctagattcacagatttaaaaggagagatcatacatcatttcttgtctgtttctagttttagcgagtacactgtggtcgacattgcccatctaatcaagattgatccggcaataccacccaacagggcatgcctcatcagctgtggtata

SEQ ID NO: 40166 - DNA, 357 bp, Glycine max
gcaggacatgaacaccaacacctccccttttctcccaagatgtgttgaagcctacaattactactctgctgtgtttaacacacttgatgcaactctccctagggagagccaggacaggatgaatgtcgaaaggcaatgcctggcaaaggacatagtcaacattgttgcttgcgagggtgaggaaagaatagaacggtatgaagtcgccggaaaatggaaggcaaggttgccaatggctggcttcactccatccccaatgagcacaaatgttggagaagcaattaggaaacctatttataaagcaatactgtgaccaaattcaaagattaacgagggaaatgggggggtctttaattt

SEQ ID NO: 40167 - DNA, 480 bp, Glycine max
tcgcatgcaccgcgtaccgtaagcttcggaatttcggcttcgagcaaccattaaacaatttgtgtggcatatggggctcaatccttggtatttcaggttcttcgtcttttgggcacccattcctcagtccatttcacagcaaactgtttggaatcaaatggcaacagtgagaacaccattgaattttgattctagcaagcagagcttttgtcagttttctattgaccttctcggtggaggaatcttagtggacaaaactggagattggatcacacttatacaaaattctccaattagtaacttattgagagttgctgcttggaagaaaggctgtttaatggtcaagattgtgatgtctgggaatgcagcagtcaaaaagagtgattgggcctcattggtacaagtgtttttaacaaacagcaacagtacagagcattttgatgcatgtaagtggacaaaatcagaaccacattcctggga

SEQ ID NO: 40168 - DNA, 419 bp, Glycine max
actaaatacaccaattccatcaagtaccttacattaccgtcaaaatggtcaaagctgtcgccgtcctccgtggagactccaacgttaagggaaccgtcacctttgagcaggagaacgagtcttctcctaccaaaattacatgggacatcacgggccacgacgccaacgctgagcgtggcatgcacgtccacgctttcggcgacaacaccaacggatgcaccagcgccggacctcacttcaatccccacaacaagacccatggtgctcccgaagacgacgagcgccatgttggtgacttgggtaactttaagactgacggccagggcaatgccaaaggcagcgtcaatgataagttgatcaagttgattggttctgagagcgttattggccgcaccatcgtcgtccacgccggcaccgac

SEQ ID NO: 40169 - DNA, 380 bp, Glycine max
  unsure (1)..(380): unsure at all n locations
tgggtttcaattttgttcagtttgtgatgttttgctctgtggagtggaacaccaaaatcatggagggtttgaatgtgtatgagaaagtggtggcgtcgttgtttcaagtcacaaacgcgagacactctggtgaatctgtctttgatctctcctncatatcttcagccatattggtactcttcgttgtcatgatgtacctnccaccatacacaacattttaccagtaagagagcacgaaaatgatgtgaagagaaacgaaaaaagcgtagtggagtgtcttgtattctctcaactctcttactnggtcattttcattattttgatttgcatcactgagagcaacagcttaaaagaggatcccctcaactttaaatgtgtga

SEQ ID NO: 40170 - DNA, 274 bp, Glycine max
atggcatttgagtctccttattgacaatcccaaacagcctacagtttttgatattctcttgggaatctctcaagatttcgaaagtgctggtaatactctcatgccagctgattctgttccacaggctactgccagatcttctgataatgcggaatcctctgcatgatctggaatgtgcgtactctttcgctagttcgattgtttaattcaatgaatgaaattaggcatgaccctcttgttgagtatgctctgactatttgaaaatctccacacc

SEQ ID NO: 40171 - DNA, 423 bp, Glycine max
  unsure (1)..(423): unsure at all n locations
gttaaaagccttagccttccctacaactccaaacacaaagacatcatcatccatggctgcctccgtctccactgtcggagctgtcaacagagctcttttgaacctgaatggttctggagctggagcttcagctcccagttcagccttctttgggaccagcttgaagaaagttattgcctcaaaggtccccaacagcaaagattccggtggaagcttcaagattgttgctgtagaagagaagaaagagattgaagagacccagcagaccgacaaggacagatggaagggtcttgcctatgatatctcagacgaccaacaagacatcacangaggaaagggtttggttgactccctttccaagctccacaggatgctggaactcactatgcagtcatgagctnctacgagtacctnagcactgga

SEQ ID NO: 40172 - DNA, 408 bp, Glycine max
gtgcactacttcctctagatcccaatcgcgttatgcttttagtcattgctcgtttgctcgttggtatagcacaaggcttcattttcccctccatccacacagttctagctcaatgggttccccctcacgagagatctagatccgtctctctcaccacttctgggatgtacctaggtgcagctctaggtatgcttcttcttcctactctagtcaagttcagaggtcctcaatctgtgtttcttgcggaggccgcattgggcgcttcatggtctttactttggttcaaatacgccactgatcccaaatccactgcctctggtgtcggggaatcagtcttgcccgtcaataaaaaaattgacactcacaacaaaaaaccgctttcagcccaaatcccctgggtcaaaattt

SEQ ID NO: 40173 - DNA, 139 bp, Glycine max
  unsure (1)..(139): unsure at all n locations
atctctnttncagcgccggtcgcccttactggggtacctccggccacgacagacgacagctacaacaaccggtggtcgacgttccttttcgatgggctcttcaacatctacgggtggggcggaccctaatttttcgtca

SEQ ID NO: 40174 - DNA, 386 bp, Glycine max
gtaccattgaaatatgatttatatgccattgttgtgcatactggactttcttctacttcagggcattacttctgctttgttcgctcagctccagacacatggcataagttggatgattcaatggttactgaggtctcagtagaaacagtactgtctcaggaagcatacatattgttttatgcgcgacagggtactccatggtttttgagtattatggaagagaaaacacaatgtttgaatccaaatattatgagtacatcttcctaagtctgttttagacgttggtgacaacatgtctaaatcaaatcctattttacttccaaatattgaaaagagtgtggctgaagaatccacagagtattctgagcctcagtttgattattatt

SEQ ID NO: 40175 - DNA, 262 bp, Glycine max
ggaaaaggacaggccctagcttttctacttgaaaaattgaaggctgatgaacaaggaccaatcaacactcttgtttggggggattcaaggaatgatgctgaactggtcactggacctgaaggtaatggggtcttggtcaataatgcacaagaaaaattggttcaatgggtttccaaaaattccagggggaatcccccgattattcattccacctgaaaattttccacttgcatttggccaagcattgggtaactttttttta

SEQ ID NO: 40176 - DNA, 277 bp, Glycine max
cgacaatgccaggtgattttgtcattggggtcatgttgacaaccatgaacaatgtgtgtgcatatgggctcaatcctgatatttcagagtgcttgtcttgtgggcaccattcctaaacccatttcacaacaaaactgctggaatcaaatggccacagtgagaacaccattgaattttgattctagcaaacagaacttttgtcagttctctattgaccttctggggggatgaatcttattggacaaaactggagattggatcacacttattcaaaatt

SEQ ID NO: 40177 - DNA, 353 bp, Glycine max
gggctatcaattcgagcatggtggaacaatcaaagaatgtcaagaataacacctatgaatgctggtttttgtgcatttcttagtgtcctacttaagctgtttagaatatctgaaactgtgtttgacataacaaagaaagatttgccctcaactaaagatgttggagatgatcaagattctggaaggtacaccttcgatgagtccgtagttttcttaccatgaacttccattttgttggtgcaattgaccacaatgggtatcaaattttttagggtccaaccaccaatggcaactcaaaatgggaaacattggtgttgacttagggagattttctggagaggttatttgattaa

SEQ ID NO: 40178 - DNA, 294 bp, Glycine max
cgcttctatacacaggcttaatagtgttcttttctttctactattggctcttggcatttcttctgccagaagggcccttctcactcttgatggcggctatggtgtaggccctggcattggtggtggttatggtggatatggaggtggtagcggctcgagacaaggtgggggtgtaaggtatgtgtggtaacatggaacaagttatggccagcagtcttgtatactatattcgattacaaacttgtatatgaccaagtgactggcatgtattatcaagctacttaattacctact

SEQ ID NO: 40179 - DNA, 466 bp, Glycine max
  unsure (1)..(466): unsure at all n locations
ctactatacatacaccatatcaatattacataaaccaaggaattgaactagtaactgataacgaatagaactgaacatggcaatcaaagaagatgtggaggatcgcacacagaaaggaatcagagagccacttgttgtgggggaacagaatcaccatgcaaacaaagggcatccatggatggtttacttcagtacatttattgcagtgtgtggctcttatgaatttggggcctgtgctggatattcatctcccacccaagatgctatcaggaaggatctcagtctgtctttggcagagtactccttgtttggatccatcttgacttttggtgcaatggttggtgcaataacaagtggacctcttgctgantttattggacgtaaaggggcaatgagagtgtcaagtgctttctgtgtcgcagggtggctngttatttatttttctgagggtccagtgcctttggac

SEQ ID NO: 40180 - DNA, 312 bp, Glycine max
tgaatatgtcaagccttactttagtggttctaaattgaaaagctgtctagctaggcataacatcaccattactgatggtattgacaaaactagtgcaactttgcaatttagaaagttagcagattgtgattttctcaagagaaactttaagcacatgtctaaagttttgtgggtggcttctgaagacaaggcgagtttatggtcacaactccattatgtatcgagtaataatctggaaatgcaagaagcttatcttgtcaatctcgtaaatgtgttacgagaattgtatatgcacagtccagaagaagctcg

SEQ ID NO: 40181 - DNA, 448 bp, Glycine max
tgacatgcactgcatcccgtacctaagctctgcattcgggtcgaggaaaaatctgatgcgtgaaaacgtcgcacctgactgtggcttgtcgttcaaggatggcaatttgtaagaaagatgtttggagagttgaatgtggaatcccttctggatttccgctcacagttatttgcaatagcatttttaatcagatgctcattagatatagctatgaaaaattactgcgccaggctaaagctccaagtatgtttttacaatccttcaaaaattttgtttctttgtgtgcgtatggcgatgataacttaattagtgtacatgaatatgtcaagccttactttagtggttctaaattgaaaagctttctagctagtcataacatcaccattactgattgtattgacaaaactagtgcaactttgcaatttaaaaagttagcagaatgtgattt

SEQ ID NO: 40182 - DNA, 284 bp, Glycine max
  unsure (1)..(284): unsure at all n locations
gtggaaaggacgcacctgctgttggcttgttgttcaatgcatggcaacttgtaagaaagatgtttggagaggttgaatgtggaatcccttctggatttccgctcacagttatttgcaatagcatttttaatgagatgctcattagatatagctatgaaaaattactgcgccaggctaaagctccaaatatgtttatacaatccttcaaaaattttgtttctttgtgtgtgtatggtgaatataactcaattagngatcaagaatgtgtcaagccttactttagt

SEQ ID NO: 40183 - DNA, 364 bp, Glycine max
gaaacaagctctataggaaggagctagcacttgcacttcttttgctcacagcatctgcaagaagtcttttgtcagcacatggtgttcacttctattttttgctcttccaaggattgtcatttctcataatgggtctggacttgattggtgagcaagtgagctgaaataactaataaggattggaaattgttttacttgtttttgacaccaatacttttggttgaatccagattttagttgaagttcattaagatacaatcgtaagattacatagcagctggcaagacaatgaaatatatagattaaagttgattgtcccatcataaaatataaaaaataatgataataataagcattgaggatc

SEQ ID NO: 40184 - DNA, 333 bp, Glycine max
  unsure (1)..(333): unsure at all n locations
anaaattgatgcgtgaaacgacgcacctgctgttggcttgttgttcaaggatggcaatttgtaagaaagatgtttggagagttgaatgtggaatcccttctggatttccgctcacagttatttgcaatagcatttttaatgagatgctcattagatatagctatgaaaaattactgcgccaggctaaagctccaagtatgtttttacaatccttcaaaaattttgtttctttgtgtgtgtatggtgatgataacttaattagtgttcatgaatatgtcaagccttactttaatggttctaaattgaaaaagctttctagctagtcataacatc

SEQ ID NO: 40185 - DNA, 259 bp, Glycine max
gaatgcagcagtcaaaaggagtgattgggcctcattggtacaagtgtttttaacaaacagcaacagtacagagcattttgatgcatgtaagtggacaaaatcagaaccacattcctgggaattgatctttccaatagaaggatgtgggcctaataatgggtttgaaatgtggaggttttagtgggcaaattaaactttaatggctttggagtttcttaattgccaatcccaaccagcttcaagttttggtttttttttt

SEQ ID NO: 40186 - DNA, 266 bp, Glycine max
catctatccgcatttgcagaggatggttctgttgctgataaatttcacaagtggcataatggaggtggcactctccacgagtcagcttccattgactccacagcactcgtagaggttggcgctgtagttcattcagagtctattgttggtccaaatgttcgtataggttctggaactattgttggcccttctgttacaattgctcattcaacaaacataaggtacacttcctaacaaagttattcaactttctcccaccaatatca

SEQ ID NO: 40187 - DNA, 375 bp, Glycine max
ccccagcaccgtactagctcggaattcgtcaggtgagaacaccattgaattttgttctagcaagcaagctttgtcagttttctattgacctttcggggggaatcttatggcaaaactgggattggatcacacttatacaaaattctcaattagtaacttgttgagagttgctgcttggaagaaaggctgtttaatggtcaagattgtgatgtctgggattcagcagtcaaaaggagtgattgggcctattggtacaagtgtttttaacaaacagcaacagtcagagcattttgatgcatgtagtggacaaaatcagaaccacattcgggaattgatcttccaatagagtatgggtcctaatatggtttgaaatgt

SEQ ID NO: 40188 - DNA, 232 bp, Glycine max
agcaccgccagcacgctcgagctcgatcggtcggcaaatttgggtcgcctgtatgggatgatactaatagaggcatgaatatgtcaagccttacttagcgggctataatgggcgcgtgccttgaaaatcataacatcaccagcactgatggtattgacaaaactcgtgcaactttgaaacttagaaagttagcagattgtgattttctcaagagaaactttaagcagatgtc

SEQ ID NO: 40189 - DNA, 434 bp, Glycine max
  unsure (1)..(434): unsure at all n locations
cgcgtncgtaagctcggaatnaggctcgaggtggaatcccttctggatttccgctcacagttatttgcaatagcatttttaatgagatgctcattagatatagctatgaaaaattactgcgccaggctaaagctccaagtatgtttttacaatccttcaaaaattttgtttctttgtgtgtgtatggtgatgataacttaattagtgttcatgaatatgtcaagccttactttagtggttctaaattgaaaagctttctagctagtcataacatcaccattactgatggtattgacaaaactagtgcaactttgcaatttagaaagttagcagattgtgattttctcaagagaaactttaagcagatgtctaattgtttngtgggtggcttctgaggacaaggcgagtttatggtcacaacttcaatatgtttc

SEQ ID NO: 40190 - DNA, 291 bp, Glycine max
  unsure (1)..(291): unsure at all n locations
ggaagaatcaatgtctcttaaaacctaagggtacttacgtacgttctgcaacaactggtgaaggctgatgggtgtacatatctgaatgcaatggtgcatgataattcagtgtctacaataccaggtgattttgtcattcgtgtcaacttgacaaccataaacaatctgtgtacatatgtgctcaatactggtatatgaggttctcgtcttttgggcaccattcctcagtccatttcacagcaaactgtttggaatcaaatagcaacagtgngaacaccattgaatttttat

SEQ ID NO: 40191 - DNA, 413 bp, Glycine max
catgcacgctgacgtaagctgcgcacttacgttagcgcgggaatcggctcgagacaggaccaaccgaagctcggcaagtgagacagagagcgctctctcgaatagaatggctgcaaaaagctgatgtgcctaccatagcacagatcgaagagagccattcgctgcagcggatgatgaatgctcctgattcaaatgatcatattgatttactgttgagcattgatttgttgggtttacaaggagcaggtcaagcttttccaaacaaaattgtttttgatgataagcttgtgttggctaacacacaagaattctttgatggaaattttccagtggattcttggttaccaatttttgtgaattgtctttatcctgtaagtcaattaccttcaaaagctgtcgttgtaaatgttaca

SEQ ID NO: 40192 - DNA, 294 bp, Glycine max
  unsure (1)..(294): unsure at all n locations
ggatcgtaaccatggcaaggttgggtctccttttgttcagaattggcgaccaaactgtaaaatcagattggatttttgtggataaccttgtccttgctcttatattggcgagtatgggacttttggatgacaatcttagcaagggaaaacgccctgtagctgctggccaggcctactttatatctgatggtagtattggatttggttatgtttctactaaccaagttacaagncttgctgagtctgacttctgagtgagtcttcttttttcaggctcaccggtcaattcttttg

SEQ ID NO: 40193 - DNA, 341 bp, Glycine max
  unsure (1)..(341): unsure at all n locations
cgagaattgtatttgctcagtccanattatgctcgccaattgagaacgaaagctcttgctcgtattgaatggctgcgaaagagtttatgtgccatccatttcggatttcgctcacaggcttttgctatagcatttttaatgagatgctcattagaattagctattaaaaattactgcgcccggctaaagctccaagtatgtttgtacaatccttcaaaaattatgcttctttgtgtgtgtatggtgatgataacttaattagtgttcatgaatatgtcaagccttactttagtggttctaaattgaaaagctttctagctagtcataacatcaccattact

SEQ ID NO: 40194 - DNA, 358 bp, Glycine max
taacctcggatttcggctcgagcaggaaatttggtctttggtgtcaaattgacacccttaaacaatatgtgtgcatatgggctcaatcctggtatttcaagttctcgtctcttgggcacacattcctaagtccatttcacagcaaactagatcggaatcaaatggcaacagtgagaacaccattgaatcttgattctagcacgcagagcttttgtcagttttctattgaccttatcggtggaggaatcttagcggacaaaactggagatcgtatcacacttatacaaaattcttcaattagtaacttattgagagttgcttcttggaagaaacgctgtttaatgctcaacattgtgat

SEQ ID NO: 40195 - DNA, 272 bp, Glycine max
cgtcaattttgtggcttttctctacaagctggtgcaatttggggaggtttatgaaacagcagtttcgccaatcccacatgatgcatctcttacaacttgttcaactcaggtgcgttctgcatcaactctcctcgctgattggagtccatatgagtatacagtcaatccatgataggtccaaggctaaaactcctattgcttatgcgactattgtcaagttgactaccgtgaactatatctgtgcatatcggctcaatcgtgatatactaggt

SEQ ID NO: 40196 - DNA, 343 bp, Glycine max
gcccaattcatcattggacgttgcatcactggaatcggtaatggcatcaacacgtctacgattccaacttaccaggcagagtgctgcaaggccaagaaccgtggtaaggttatctgtatcgagggcagcatggttgccattggtacgctgatcgcctactggatcgattatggctgcctttacggtcccgatgacttcacatggaggtttcccattgccttccaatgcgtcttcaccttcattgttctcggcatgatgatccagctgcccgaatcgcctcgatggctcctgactcatcaccgggaggatgaagctgccactattcttgcatcactcaacgggc

SEQ ID NO: 40197 - DNA, 381 bp, Glycine max
cggttcgagcgctctagcggatcgagcggctagaggagggccttacatggcttccgcttgggcttactctgcaattacagctggtgccatctgtacgcccagttccgggctgaagaatggatcaggcggttgacttcttagtggaaggaaattgcgggtggaaaaggggggagcctctattggaggacgatcgatgggcactacagtgtgcgccgttgctgagcccgacagacctctatggttcctaggcagcacccatactccatggcttgatagcactatacctggagacttgtgcattgaccctcttggggttggatcagaccacgagagtcttgcaaggaatgatccggcacagctagtgcactgcctatgggcaat

SEQ ID NO: 40198 - DNA, 387 bp, Glycine max
ggattgtggaattctgcttgcacaaaagcaatgactatgtcatttaatccaaacccgtgttctgatgcatggagtttggaatttctgaagcgtactggattttattgcgatatcatttgtgtcactggatggactgccaccccaatgcaagatgttcaggttacaattgattggtttatttcctctcaggaatgtgttcccaggacctattgtgttttaaatccacaaaatccttttgtgttaaataggtggatgggaaaattgactgttcgccagggcactatctgaagtgttaagagaatgcctctttctataaggggaggagctggtgcaaagaatgctattctcatgaatatgccaaatgctgttctttcaatgtggagatat

SEQ ID NO: 40199 - DNA, 351 bp, Glycine max
gtgttaaataggttgatgggaaaattgactttcccccagggcacttaccgaagtgtgaagagaatgcctctatctatagggggaggagctggtgcaaagaatgctattctcatgaatatgccaaatgctgttctttcaatgtggagatattttgttggagatctcatctttgaagtttctaagatgacttctacctacattaaatgtacagtctctttcttcatagcatttggaaatttggctgatgataccatcaattttgaggcttttccccacaagctggtgcagtttggagagattcatgaaaaagttgcattgaaattttcacaagaggaatgtcttacaggttgg

SEQ ID NO: 40200 - DNA, 275 bp, Glycine max
ctcgagccgatctttcttcatagcatgtgaaaattaatctaaggatactatatagaatggagtggttccgcacatacttggtccaattggggagattaaagacaaagtgggattgatatttgtataggaggaattacttacaaatcggttaacgcaaatgcgacctgcaacaacaacattggttgatgggcgtacatattaggaggccatggtgcagtcatagctagtgtttacaataccaagtgagtttgtcattcgtgataaagatgcaacca

SEQ ID NO: 40201 - DNA, 435 bp, Glycine max
ttgcaattgaagttgaagtcttgcccttctctcttcaactccaaacacaagacatcattatccatggctgcctacgactccactgacggagctgtcaacagagctcttttgaacctgaatgggtctggacctggggtttcagcttccagttcatccttctttgggagcagcttgaagaaggttattggctcaaggggtccccaacacaaagatttcctctggaagcttcaagattgttgctgtagaagagaagaaagagattgtagagacccacctgaccgacaaggacagatggaagggtcttgcctatgatatctcagacgaccaacatgacatcacaagaggaaagggtttggttgacttcctttttcaagctccacaggatgctggaacctactatgctgtcatgagcttctacgagtaccttaacactgg

SEQ ID NO: 40202 - DNA, 421 bp, Glycine max
ctcatcactctgcggagtcactgacagccatccgactttggggagcgcaagatgggcattttcactgcagtagatcactctgccaatccggcacccgtcgaggtgtatggctggcgcatatatctgctcgcaatctccgctgcatttggttcggcaatgttcggctatgacagcgccttcattggaggaactctgtcgctggcgtccttccgaaggacatttggtctcacgcccgagacacaagccgccctctcctctcatatcgtttcgacattccaagggggttgctttttcggcgccctcttcatctatccagcccttgttcgctttggaagacggccatgcctaatccttgctggcatcctcttcacgatcggtgcccgcatccaaaactgaaccgaccgacatgttggcatgatct

SEQ ID NO: 40203 - DNA, 387 bp, Glycine max
  unsure (1)..(387): unsure at all n locations
agagcttgacgtccatgcacgcgttttatgttcgttattttgctcgagaaaagcctnagccttccctacaactccaaacacaaagacatcatggtccatggctgcctccgtctccactgtcggagctgtcaacagagctcttttgaacctgaatggttctggagctggagcttcagctcccagttcagccttctatgggaccagcttgaagaaggttattgcctcaagggtccccaacagcaaggtttccggtggaagcttcaagattgttgctgtagaagagaagaaagtgattgaagagacccagcacaccgacacggacagatggaagggtcttgcctatgatatctcagacgacctacaagacatcacatgaggaaagggttt

SEQ ID NO: 40204 - DNA, 327 bp, Glycine max
aaaagccgtatcgtatttttcacaagaggaatctcttacagcttgtttaacttatgtgcgtgctgcaacaactctggtggctgatgggtgtccatatttgtatgcaatggtgcatgatagttcagtgtctacaataccaggtgattttgtcattggtgtcaagttgacaaccataaacaatatgtgtgcatatgggctcaatcctggtatttcaagttctcgtcttttgggcaccattcctgagtccatttcacagcaaactgtttgcgaatcaaatggcaacagtgagaacaccattgatatttgattctagcaagcagagctttt

SEQ ID NO: 40205 - DNA, 395 bp, Glycine max
ttgaagttaaaagccttagccttccctacaactccaaacacaaagacatcatcatccatggctgcctccgtctccactgtcggagctgtcaacagagctcttttgaacctgaatggttctggagctggagcttcagctcccagttcagccttctttgggaccagcttgaagaaggttattgcctcaagggtccccaacagcaaggtttccggtggaagcttcaagattggtgctgtagaagagaagaaagagattgaagagacccaacagaccgacaaggacagatggaagggtcttgcctatgatatctcaaacgaccaacaagacatcacaagaagaaagggtttggttgactcccttttccaagcttcacaggatgctggaactcactatgc

SEQ ID NO: 40206 - DNA, 399 bp, Glycine max
cgccaacgaacacgatgcggtcactcctcaccattttcagcgcattgctggcatacaccactgccgtgtatgctactgccctcacctacagactagaggcacacgagcaagcatgcttctacgcgcacgttgagaacaaggggaccaagttggctttctactttgcagtccaatccggaggctcattcgatgtcgactatttggttgtcggcccaacagacaagaccatcctggatggaaccaaggagcgacagggcgactttgtattcacggcaaacgatgtgggagaataccgtttctgcttcaacaacgagatgagcacttttgcggagaagatggtcgatttcgaaatcgccgttgagaacgaaagccgccgtgccaagatcccgtccaagcagg

SEQ ID NO: 40207 - DNA, 229 bp, Glycine max
tcgaggtcgagttcaagcagaactaccaccagtgcccggactgcgcgaagagttatacacacaacacatggagggcctgcgtgcaggtgcgccagaaggtcccgcataagaagactttcctgtacctcgagcagctgatcctgaagcacggcgcccacaaggacaccatcaacatcaaggaagtccacgacggtatcgacttcttctttgccgagcgcaaccacgccac

SEQ ID NO: 40208 - DNA, 405 bp, Glycine max
tgatggatgagagacataattgggctatgtggtcagggagacctgggatcaaaggttgttcttcttgttgatgaatatgttgttcttgtttttggcgtttggttgtggaagaagaagaagaagaagacgactcaggcatggctatggccatgggatgggacatcttggccacttgaatgagttgcaactgttgggatgtctagctggtgtagagatgatactcaaagatgtgggttatcctgtaaagcttggaagtggagttgctgctgccagtgcatacttacagaacactattcctatgatcccttccaggatttgagtcacaaatcattcttgtctttacttcctttttctgctctttcagaaattctgtaaaatatatattaccctctgttacactccttt

SEQ ID NO: 40209 - DNA, 403 bp, Glycine max
cagcttttgaagacatgccttggtgttttgctctgttgaaagtagaacgcatggttttgagttttggtagctgagtagcgaatagttgtgggcaaatgctgctgtgactgtggttacaatgattttgtgagactttaagaagctcaattcactgcaattttaaaccatggaacttatacgtgtgcgcagttacaaaggaagggaaacataaagagaattgaagttatttgaatttttaagtgaaatagagagaatgggaaagcagaatagattaaatgaaagaaaatggaaaaaaaatgatacgacaatgggttagggaagaagacttggcaaaggacctcaaattacacacaaaacaacttcgtcgaactctgcggttttttgaagaagaaaagatcattac

SEQ ID NO: 40210 - DNA, 424 bp, Glycine max
cttccctacaactccaaacacaaagacatcatcatccatggctgcctccgtctccactgtcggagctgtcaacagagctcttttgaacctgaatggttctggagctggagcttcagctcccagttcagccttctttgggaccagcttgaagaaggttattgcctcaagggtccccaacagcaaggtttccggtggaagcttcaagattgttgctgtagaagagaagaaagagattgaagagacccagcagaccgacaaggacagatggaagggtcttgcctatgatatctcagacgaccaacaagacatcacaagaggaaagggtttggttgactcccttttccaagctccacaggatgctggaactcactatgcagtcatgagctcctacgagtacctcagcacttgacttcgccagtacttg

SEQ ID NO: 40211 - DNA, 407 bp, Glycine max
tggaaaaaggaagtaccaaaatggccgccgttacccagcccaaggacctcgttaagaagccgaaggatgccaagtccttcgccatcgacttcatgatgggaggtgtctccgccgctgtcgccaagaccgctgccgcccctattgagcgaatcaagctcttggttcagaaccaggacgagatgatcaagcagggtcgtctcgctaccccttacaagggtatctcggactgtttcgccaggacctacgccgatgagggtctcgtctcgctctggcgaggaaacaccgccaacgtcatcaggtacttccctacccaggcgttgaactttgccttcaaggactacttcaagtccatgttcaactttcaagaagtccgagtcttacgccaagtggttcgccggtaacatcgc

SEQ ID NO: 40212 - DNA, 418 bp, Glycine max
agaagagctatgacatcccatgcacgcgtacctaagatttgagttcgggtacagaggtcaagcaatggaatggatgactgtgggtacaaggaaagaaaactaatgaaacaaacctaacacaacacaaatccttgaaacgacgacggaaatggccgtttcgagctcgcacatgcgtttcacctttgagtgccgctccgatcccgatttctcgccccccccgccgtccttcgacaacctccgccgccgaaacttccgctcctccgcaggatccggcgcggcgtttcacggcatctcctccctcatcctccgcttccctcccaacttccagcgccagctaagcaccaaggcgcgccgcaactgcagcaacatcggcgtcgcgcaaatcgtcgccgcttcgtggtcgaacaacagcgacaac

SEQ ID NO: 40213 - DNA, 185 bp, Glycine max
tttgtgagaaagacttgctcaaagttgttgatagggagtacacattttcatacattggtgacccctgccgtggaacatacccttttattgcaaagcttaagcaagtgcttgtgggctatgcattggccaatggagagaacgagaagaacacaaacacatcaatctttcaaaagattgcaacattt

SEQ ID NO: 40214 - DNA, 252 bp, Glycine max
acgtcgctgccgcgtcgtaagctcggaattaggctcgaggtgagcaaggaccacactgcctcatagttctccaattaggaactccttgagagttgctgctcggaagaaaggctgtttaatggtcaagattgtgatgtctgggaatgcagcagtcaaaaggagttattgggcctcatcgttacatgtgtttttaacaaacagcatctgtacagatcattttcatgcatgtaattcgacacaatcagaaccaca

SEQ ID NO: 40215 - DNA, 292 bp, Glycine max
tagtggtacgcaccatcaccatttgacattaaaattggctcctataacataataactgatatttgtaaaaatatgtaacccaaaaataagcatgttaatcagaagcaaatgcttcttatgctgtatcatacatatgccagaccaccccgaatcagtccccaagtccatttagagtatgcttgtttctccattgtcatactttcttatagacctcaacctgaatgcaatgaacaagttggaggtgttgaagccatggactctctcattctcatttgggcgagcactgcaacaa

SEQ ID NO: 40216 - DNA, 387 bp, Glycine max
aaaatgtgtggaggtgatcaagttgaagggaatacaaacagaattgtcggaacatacggttatatggcacctgaatatgctattgatggattattctctataaaatcagatgtatttagctttggcgtattgttgttagaaattataagtggaaagaaaaacagaacagttacatatgaagagcacagtgacaatcttattggacatgcatggagattgtggaaagagggcattccagaacaattgattgatgctagtcttgtggactcatgtaatatatctgaacttgtacgttgcattcaagttggtcttttatgtctgcaacaccatcctgaagataggccaaacatgacaactgtggttgtaatgttgagcagtgaaaatagt

SEQ ID NO: 40217 - DNA, 261 bp, Glycine max
gcacttgggaaaggtaagaaaattgtttttcttactagagttgatccttttccagtagctttactggctgttctttttggcgttaagaatgaaattctgagttctaacgccactaatcctatgctgacgcgacttcttgagaactgtaagagtctcaaatatctggttgatgagtgtccttttgcatttgtgaactagtatgtagtattttattcacttaaataaagcgcattactatgtgcaatgagtgtgtttaaatat

SEQ ID NO: 40218 - DNA, 386 bp, Glycine max
ctcgagccgaatcggctcgagcggctcgaggttttttcatcttctcaaagcttctaaatcaatctttacatctactacatcctaaatatcaacaatggtgtttattgaatcaatgcttaaagaagtcccaccagtgactaagctcctttgtggaagctctattttaattcattttctatgttatatcgatgtgataaatcaatacgatgtctttttcaatcttggcttaattttctccaaggggcagttctggagactatacacaaatctcttccattttggagacgaaggaatgtttgttttcttccaactaatgatgctttatcgttgttctaagagacttgaagaacatacctttagaaacaagaccgccgactacatatatt

SEQ ID NO: 40219 - DNA, 329 bp, Glycine max
attgttgctgatatcatacgcagctgttgtgattcgcaccgtgaacaaacagagagccatggccgtcagaaagaacaagcgcatattcaaagggaaaaagggtcggcaagaagaacgcagctgatcccttggccaagaaggattgggatgacattaatgcccctgctatttatcaagtgaagaatgaaggcaaaaccctggattctcgtacgcatggtaccaagattgcttgtgaaggactgacacatagagtgatagaggtctccttggctgatcttgatagtgatgatgatcatgcatgcaatacgattatgttgagagctgaagat

SEQ ID NO: 40220 - DNA, 537 bp, Glycine max
gtttcgggtaataatcgggaaatgcaagaagcttatctggtcaatctcgtaaatgtgttacgagaattgtatttgcacagtccagaggaagctcgccaattgagaaggaaagctctctctcgtattgaatggctgcaaaaagctgatgtgcctaccatagcacagattgaagagttccattcgatgcagaggatgatgaatgctcctgattcaaatgataatattgatttactgttgagcattgatttgttgggtttacaaggagcaggtaaagcttttccaaacaaaattgtttttgatgataagcttgtgttggctaacacacaagaattctttgatggaaattttccagtggattcttggttaccaatttttgtgaattgtctttatcctgtaagtcaattaccttcagaagctgtcgttgtaaatgttacatgtggtagtggacgttgtggtttacccaccactgcttggattagttctgcagttaacaatcgctcctcagatatcaacaaaaggattcgcacagcacttggg

SEQ ID NO: 40221 - DNA, 546 bp, Glycine max
  unsure (1)..(546): unsure at all n locations
aagacttgactccatgcacctacgtagctcgaattcgctcgaggaagaaccggngtatcaatctgagaagaagcgtcgtctaagtgtggatcaagtgaaggctttggagaagaactttgaggttgaaaacaagcttgaacctgagaggaaggtgaagcttgcccaagaacttgggttgcaacctagacaggtagccgtatggttccaaaaccgtcgagccagatggaaaaccaaacaattggagagagattatggtgtactcaaagccaattatgatgctcttaagcttaactttgacaccctcgatcaggacaacgaagccttacgaaagcaggttaaagaattgaaatcgaggctgctgcaagaagagaacacaggaggaagcggtgtttcggtgaaggaagagataataacgaggcctgcagactcagaagacaaaacgatggaacaaagtaagagtgacccatcttctgaaaccttaaatattaatcctagttcggagtcggaggaggatcacttgaactacgagtgttttaacaacaacga

SEQ ID NO: 40222 - DNA, 516 bp, Glycine max
  unsure (1)..(516): unsure at all n locations
cgaaacctcatccatggcttctcttctccgttgcaacggagtcttcctctcccccttacctccccaacccagacgcgaccccatccttcccaaattctttcttccccaatccccaaatcctaaaccggcacgccttctgacggggccccccgaagggaaagaaaacttcttcggcggcggcaacaacaacaacaacaatttcttcggacaccagaatccgggaaatcttccgaacccgggactaccaacaggaattcgggttcaagggggacatcgagtcttttgacaatccaaaaggggctctcgaaagaaaccatccgtctgatctcgtccctgnaagaggagccncagtggatgctcgaattccgcctcaaggccttcgagaaaatcctgtccatgaaggaacccacctggtctgataacacttacccccccatcgacttccagaacatctgctactactccgctcccaagataaaccctcacttcaatccctcgacgacgccgaccccgagc

SEQ ID NO: 40223 - DNA, 488 bp, Glycine max
cttaaataaagcgcattactatgtgcaatgagtgtgtttaaatgtaaaaaaaaaaaaaaaaaaaaaaaaaaaaaaaaaaaaaaaaaaaaaaaaaaaaaaaaaaaaaaaaaaaaaaaaaaaaaaaaaaaaaaaaaaaaaaaaaaaaaaaaaaaaaaaaaaaaaaaaaaaaaaaaaaaaaaaaaaaaaaaaaaaaaaaaaaaaaaaaaaaaaaaggggggggcccccgaaataagaatcttcaaacccggaaaaaaatttgaaaagggtatctggggggaaaaaaattttttttaatgagggggaaaaaaaaagtgggaaaaaaaaggggaaaaatgttttcttggaaaaaaattaattgccgtaaaaattccaaaaaaatttaaagccggaaaaaaaaaagtgaaaactgggggggtcaaaagggggaggcacaccaaaataaaggggggggattcaacgcccctttttaaatggaaaaaactgggggg

SEQ ID NO: 40224 - DNA, 442 bp, Glycine max
gttggaatcaacccatactccatggaatggactggtttggccaatagattactgagtaagggcaatgatattctgtgttgcgattatgctagttttgatggtttgattaccaagcaagttatgagcaagatggcagaaatgataaacagtctttgtggtggtgatgaaaaattgatgcgtgaaaggacgcacctgctgttggcttgttgttcaaggatggcaatttgtaagaaagatgtttggagagttgaatgtggaatcccttctggatttccgctcacagttatttgcaatagcatttttaatgagatgctcattagatatagctatgaaaaattactgcgccaggctaaagctccaagtatgtttttacaatccttcaaaaattttgtttctttgtgtgtgtatggggatgataacttaattagtgttcatgaatatg

SEQ ID NO: 40225 - DNA, 414 bp, Glycine max
atgatattgtgccatgcatcaagaggaacaatgactgacagttaagaatcgagcttggatgtcgactaccggtgaggcattggtcgaggaaagagacgaatacgggtaggggataggtaagctgtgctgctgaagacttgacatcctttcacactctgactgccaagcctgtatcttacttggataatgtcacagagaaagatgaccaatgaaaaaagaacatgtttctgcccaataataatgcatgggtccaagaacacagagatgagactattattactttcaactgtgccttgaaaaggaatcttgcatatatgacacctgactatgctgatacacattgtgaggagaacaaaacacatagtgctcttaccaaaatgactgagactggatcttcagctattaatctcattt

SEQ ID NO: 40226 - DNA, 511 bp, Glycine max
attcaaccaatactccatggaatggactggctcgcccaatagatcactgattaagggcaatgatattctgagttgcgattatgctcgtttagatggtttgattaccaaacaagttatgagcaagatggcagaaatgataaacagtctttgtggcggtgatgaaaaattgatgcgtgaaaggacacacctgctgttggcttgttgttcaaggatggcaatttgtgagaaagatgtttggagagttgaatgtggaatcccttatggatctccgcatcacagatatttgcaatagcatttataatgagatgctcattaaatatagctatgaaaaattactgcgccaggctaaagctgcaagtatgtatttacaatccttcaaaaattttgactatttgtgcgtgtatggagatgataacttaattagtggtcatgaatatgtcaagccttactatagcggttctaaatagaaaagctttctatctagtcataacatcaccattactgatggtat

SEQ ID NO: 40227 - DNA, 465 bp, Glycine max
ctcgagcctaattggatcgagattgaccttctcggtggatgaatcttaatggacaaaactggagattggatcacactcatacagaattctacaattagtgacttgtggtgagttgctgcttggaagaatggctgcttaatggtcaagattgtgaggtctgggaatgcaacattcaaaatggagtgattgggcctgattggtacaagcgttcttaacatacaccaacagtacatagcattttgatgcatgttagtggtcaaaatcagaaccacattcctggtaattgatcttgccaatacacgtatgtggtcctaattatggctttgagatgtggagttctgagtgggcaaatcaaacttcatggcgtttgagtttgctgattgtctatacacaacagactaccgtttctgatatgctgttgagaatctctcaaaattctgaaattgctggtaatactcttatgcc

SEQ ID NO: 40228 - DNA, 399 bp, Glycine max
  unsure (1)..(399): unsure at all n locations
attgaagttaaaagccttagccttccctacaactccaaacacaaagacatcatcatccatggctgcctccgtctccactgtcggagctgtcaacagagctcttttgaacctgaatggttctggagctggagcttcagctcccagttcagccttctttgggaccagcttgaagaaggttattgcctcaagggtccccaacagcaaggtttgcggtggaagcttcaagattgttgctgtagaagagaagaaagagattgaagagacccagcagaccgacaaggacagatggaagggtcttgcctatgatatctcanacgaccaacaagacatcacangaggaaagggtttagttgactcccttttccaagctccacatgatgcttgaactcactatgcagt

SEQ ID NO: 40229 - DNA, 675 bp, Glycine max
ggtttggccaatagattactgagtaagggcaatgatattctgtgttgcgattatgctagttttgatggtttgattaccaagcaagttatgagcaagatggcagaaatgataaacagtctttgtggtggtgatgaaaaattgatgcgtgaaaggacgcacctgctgttggcttgttgttcaaggatggcaatttgtaagaaagatgtttggagagttgaatgtggaatcccttctggatttccgctcacagttatttgcaatagcatttttaatgagatgctcattagatatagctatgaaaaattactgcgccaggctaaagctccaagtatgtttttacaatccttcaaaaattttgtttctttgtgtgtgtatggtgatgataacttaattagtgttcatgaatatgtcaagccttactttagtggttctaaattgaaaagctttctagctagtcataacatcaccattactgatggtattgacaaaactagtgcaactttgcaatttagaaagttagcagattgtgattttctcaagagaaactttaagcagatgtctaatgttttgtgggtggctcctgaggacaaggcggagttatggtcacaacttcattatgtttcgtgtaaatatctggaaatgcaagaagcttatcttgtcaatctcgtaaatgtg

SEQ ID NO: 40230 - DNA, 375 bp, Glycine max
cctcggaattcgcctcgagtgttgatgataagcttgtgttggctaacacacaagaattctttgatggaaattttccagtggattcttggttaccaatttttgtgaattgtctttatcctgtaagtcaattaccttcaaaagctgtcagtgtaaatgttacatgtggtaatggacatggtggtttacccaccacagcttggatttgttctgcagttaacaatctctccttacatatcaacatatggattcgcacagcacttgtgaaaagttagaaaattagttttattactagagtaaatccttttcgagtgactctactgactattctttttggacgctagaatgaaattctgaattctaacgccactaatacta

SEQ ID NO: 40231 - DNA, 529 bp, Glycine max
ctaatatttaatgttctcgtctttcgggcaccattcctcagggggtttcacacaagactgtttggaatcaaatggcatcagttagaacaccattgaattttgattctagcaagcagagcttttgtcaattctctattgaccttctccgtggatgaatcttagtggacaaaactgcacaccggatcacacttatacaaaattctccaattagtaacttgttgagagttgctgcttggaacaaaggctgtttaatggtcaagattgtcatgtctgtgaatgcatccatcaaaatgagtgattgggcctcattggtactagtatttctatcaaacatcaacagctcagagcattgtgatgcatgtaagtggacaaaatcagaaccacattcctgtgaattgatcttaccaatagaggtatgtggacctaataatggttaaagaaacgtggacctctgagtggacaaatcaaacttcatagaatttaattttccttattgacattcccaaacagtctacagtattcgtttttc

SEQ ID NO: 40232 - DNA, 471 bp, Glycine max
atactccatggaatggactggtttggccaatacattactgtgtctgggcaatgatatcatgtgttgcgattatgctagttctgatggctcagattaccaagcaaggtactgagcacagatgagcagaaatgattaacagtctctgtggtggtgattaaaaattgatgcgttaaaggacgcacctgctgttggctcgccgttcactgatggcaattcgtatgaaagatgtttggtgagctcaatgtggaattcctcacagatttccgctcacaattatctgcattagcattttcaatgatatgctgattatatatatctatgaaaaatgactgcgccatgctaaagctccaagtatgtttttacaacccttcaaaaattgtggtgctctcgttatgcatggtgataataactgaattctggtgcatgaatatgtcaagccttactatagtgggtataaattgaaaagctttc

SEQ ID NO: 40233 - DNA, 581 bp, Glycine max
atcaccactggctacggcgcggctgtcatcaccgcaggacgcggcggagtcgagaagggatcgcaggttgccattttcggcgccggctgtgttggtctttccgtcatccagggagctgtcaagcagggcgcttccaagatcatcgtggtcgatgtcaacgactcgaagaaggagtgggccaagaagttcggtgccactgacttcgtgaacccagccaaggatctgaaggagggcgagaacatccagagcagactgatcgacatgaccgacggaggatgcgactacactttcgactgcacaggcaacgtccacgtcatgcgatctgctctcgaggcctgccacaagggctggggagagagcatcatcatcggtgttgctgctgctggccaggagatttccaccagacctttccaactcgtcaccggtcgtgtatggaagggttgtgctttcggcggtgtcaagggccgcagccagatgggcagcctcgtgcaagactacatggacaacaagctcaaggtcgacgagttcatcacgcatcgacagccgttgagcggcatcaacgatgctttccacgacatgca

SEQ ID NO: 40234 - DNA, 413 bp, Glycine max
  unsure (1)..(413): unsure at all n locations
agggttattatggctttaaggaattcgccggcggaggtctgggtagaagttgactggtctgggccgaggaatgatatcaaatgtgggacgaggttctgctgttgtacccactgcaacacattacctcctgatcatcaaatcgagcgcgataacatacgtcgacaattccctgaccgccctcgttcttctcaacgctgataatcttcaacagcaggtccatgatgcccggacaatcgacatgctgcagcanatccgtgacgacgttgtccagcgacttgaagaacttgagcatctcctccatcttgcggtccagcagcgactcgttgaccttggtgaagtagccagcctgcacggngtcgaggggcgcgggctgcttgatgtatgcccagaactggcgcagcgtgtcctggttc

SEQ ID NO: 40235 - DNA, 414 bp, Glycine max
cggctcgagggatgaacaagtcaagggttgtgaaaaactgcaagggtttaccactttccatcaaagtgattgggagctcactctgtaatcagccttttgagttgtgaccaaagacagtggaggaattgtcccaatgtctacttgattctaacttcagataattctgtcaaggagtgcttcagggacctagggttatttcctgaagaccaaagaattccttttacttctcttattgatatgtgggcagagttgtatggactagatgatgatggcatagaggcaatgtccatcatcaacaaattagactccatgaatctggctaatgtctcggtagaaaggtacaattacagcatatattttcttcacttaatcctaatatatacaacaaataacatgaatttatgctctataaaa

SEQ ID NO: 40236 - DNA, 416 bp, Glycine max
cttgaatatacacacctcgtcaagcacaacttcaaccacaatgccagaactcgtaagaaagcaggtcggcgacgtaggcttcggcctcatgggcctgacatggcgccagagcccaccgcccaaggagcagagcttcgagactatgcgcaccgcgctgtcccacggagctaacaactggaacggcggcgagctgtatggacctcctgacgccaactccctgcagcttctcagtgcgtactttgaaaagtaccctgaggatgcggagaaggttgtgctttctatcaagggcggactactgccgggccagatgaagcctgatggcagtcagaagaacgtgcagcgcagtattgatgagtgtctgaagtggctcgatggcaagaagagcctcgacctcttcgaatgcgcacgcgttgatc

SEQ ID NO: 40237 - DNA, 534 bp, Glycine max
ctccattcgcgaatggcatcctccgaatcattgtatgttacatcggtcgacgggaacagtgcattaccttcatcgcacacaagcccgcgggcttataaggcattgatctatatgcggaggatctggtgccacccaagtctgtctgatgaacttaacctacagctgcatttgaatgtgcgtgatgagagttcagacatcctcgtatttgaggtttctgagatcacacttcaatgcataaaatgggctgactccttctgcatagcatttggaaatttggctgatgataccatcaattttgaggcttttccccacaagctggtgcagtttggagagattcaggaaaaagttgtattgaaattttcacagggggaatttcttacagcttggtcaactcacgtgcgtacatgaacaactctgtcggctgatgggtctacatatttgtatgcaatggtgcatgatacttcagtgtctacaataccacgtgattttgtcattgaagtgaagttgacaaccataaacaatatgtgtgcatat

SEQ ID NO: 40238 - DNA, 339 bp, Glycine max
cttttgggcaccattccctcaggccatttaacaagaaacgtgtgggataaatggggcagtgagaacaccattgtattttgattctagcaagcagagcttttgtcagatttctattgaccttctcggtggaggaatcttagtggacaaaactggagattggatcacacttattcaaaaatcttcaattagtaacttattgagagatgctgcttggaagaaaggctgtttaatggtcaagaatgtgatgtctgggaatgcaccagtcaaaaggagtgattgtgcctcattggtacaagtgtttttaacaaacagcaacagtacagagcactttgatgcatg

SEQ ID NO: 40239 - DNA, 547 bp, Glycine max
ggtttctttcctcataaggattctctaattaaagagaagatattagaagaaaatcatatggatgtctttcagtgacttgttattaaaaaataaaaatatttgcaatggtttagctcttacacgtgtataattacgtgatgcattcagtgtagttgtaacaacctacctcttcatgacacttcaatgtgcaatggttctatcagggtctaatccaatctgtatttgagcttgatgatggatctggtgtggttatcactgttgggaagtatgtaacaccaaatcacaaggacataaacggcaatggaatagagcctgacttccagaaacttccagcatgggatgatatcagccgacatcttaaaaaatgcagtatgtcacaacagggataaagcagtctctttggtattccgatgcaatctattgctttggacttatcattttaattgaaacttttgatgaatctgctcgctggaagctgctttgtatatctcaagaatttcaagttaatatagatatatgcctgaatggtctgcctagccttcttggc

SEQ ID NO: 40240 - DNA, 530 bp, Glycine max
ccgcggccgtgcaccgggaaggcgccgttgaaggccaagaagagcaagagggttccgctcttcgactcgttcaatcccccgccggccggcaccaagggcgtgaagctcgtggagatgcccgggccgtttcccatggggcagtttccgctagaggggaagagcagggaggagattctcggagagcctctgaagaagtgggagatacatatgctggttaagcccatgatgtcttacaatcgccaggttaatcttggaagggatggattaacgcataacatgctggagttgatacattcacattggaagcgtcgccgagtctgtaaaattcgttgtttaggtgttccaactgtagatatggataatgtttgccatcatattgaggagaaaacaggggggaaaataattcatcgggttggtggtgtagtttatcttttccgtggcagaaattacaactatagtactcgtccacagtatccagtgatgctcttgaagccagctgctcctgtttacccaaaacttatacaggatgc

SEQ ID NO: 40241 - DNA, 326 bp, Glycine max
catgaatatgccaaatgctgtactctcaatgtgcagaaatcttgtcggggatctcgcgtatgagggttctaagatgactattccctccattaaatgtacgctctctttctgcataggattggtaaatctggctgaggatgccatcaatttgcaggcttgcccccatagctggagcagttaggacagatccatgcaaaagatgaatagtgcttctgacacgaggaatatcttacagctagtgcaactcatgtgcgtgctgcaacaactctgatcgctgatggctgtccatatctgtatgcaatggtgcgtgatacttgagtgtctac

SEQ ID NO: 40242 - DNA, 461 bp, Glycine max
gaattttgattctagcaagcatagcttttgtcagttttctattgagcttctcggtggaggaatcttactggacaaaactggagattggatcacacttatacaaaattctccaattagtaacttgttgagagttgctgcttggaagaaaggctgtttaatggtcaagattgtgatgtctgggaatgcagcattcaaaaggagtgattgggcctcattggtacaagtgtttttaacaaacagcaacagtacagagcattttgatgcatgtaagtggacaaaatcagaaccacattcctgggaattgattttcccaatagaggtatgtggtcctaataatggatttgaaatgtggagttctgagtgggcaaatcaaacttcatggcatttgagtttccttattgacaatcccaaacagtctacaggttttgatattcttcttgggaatctcttaagattttgaa

SEQ ID NO: 40243 - DNA, 310 bp, Glycine max
gcttggaagaaaggctgtttaatggtcaagattgtgatgtctgggaatgcagcagtcaaaaggagtgattgggcctcattggtacaagtgtttttaacaaacagcaacagtccagagcattttgatgcatgtaagtggacaaaatcagaaccacattcctgggaatggatcttcccaataaaggtatgtggtcctaataatggtttagaaatgtggagttctgagtgcgcatatcacactacatggcatgagagtcttcatattgacaatcccacacagtatacagtttgagatattctctggaaaatct

SEQ ID NO: 40244 - DNA, 530 bp, Glycine max
gtggaatcctgcttgcacaaaagcaatgactatgtcatttaatccaaacccgagttctgatgcatggagtttggaatttctgaagcgtactggatttcattgcgatatcatttgtgtcactggatggactgccaccccaatgcaggatgttcaggttacaattgattggtttatttcctctcaggaatgtgttcccaggacctattgagttttaaatccacaaaatccttttgtgttaaataggtggatgggaaaattgactttcccccagggcacttcccgaagtgttaagagaatgcctctttctatagggggaggagctggtgcaaagaatgctattctcatgaatatgccaaatgctgttctttcaatgtggagatattttgctggagatctcgtctttgaagtttctaagatgacttctgcctacattaaatgtacagtctctgtcttcatagcatttggaaatttggctgatgataccatcaattttgaggcttttccccacaagctggtgcagtttggagaga

SEQ ID NO: 40245 - DNA, 493 bp, Glycine max
ctggacatgcacgaagcttatcttgtctatctcgtatatgtgtggcgagaattgcattagcacagtccacaggaagctcgccaatcgagaaggaaagctctctctcgtattgaatggctgcataaagctgatgtgcctaccatagcacagatggaacagttccattcgatgcgcacgatgatgaatgctcctgagtcaaatgataatattgatttactgctgagcattgatttgttgggtttacaaggagcaagtaaagctttttcaaacaaaatcgattttgatgataagcttgtgttggctaacacacaagaattctctgatggaaattttccagtggattcttggctaccaatcattgtgaattgtctctatcctgtaagtcaattaccttcagaagctgtcagttgaaaagatacatgtggtagaggacgatgtggtttacccaccactgctaggattagttctacagttaacaatcaatcctcaaata

SEQ ID NO: 40246 - DNA, 468 bp, Glycine max
  unsure (1)..(468): unsure at all n locations
gtgcccagctgcttcagcagccagaagtcattgcaatcactgttgaagaagtttcttcaactgcaaagcctctggttagacagcttcaggagcttcccaagagaattaagaatatcattgcatcattacctgatcaagaagtggatgaggaggaagcctccctctttgacatgctctggttactacttgcaagtgttgtatttgtgccaatatttcaaaagattcctggaagtaactaggttgccatgttttcttaatattggatgaaagaataacaaagttgtttgtctaaatgttatactttagtttgaatttgattaggcacncaactctatatattgcttagtgcttacatgaaaattttggtttatagattatatctgctgctttttttagctcacatttattttcctatgtcaccttttgttagttgattatgatgataaatgcatttattagcttgatatg

SEQ ID NO: 40247 - DNA, 375 bp, Glycine max
gttcttttgtgtgggactggggaggttaccttattaagtgttcatgaatatgtcacgcctaccttggctggtgctaaattgaaaagcttcctagctagtcataacatccccattactgatggtattgacagaactagtgcaactttgcaatctataaagttagcagagcgcgatgatctcaagagaaactctaagcacatgtctaatgttttgaggctcgctcctgaggacaacgcgcgtttatggtcacaacttaattatgttatctgtaataacctgcagatgcaagaagcttatcttgcctatctcaccaatgcgttacgagaattgtattcgcacactccagaggaagctctgcaattgacaaagaaagct

SEQ ID NO: 40248 - DNA, 446 bp, Glycine max
ttgaaaattgttgggaaaaccgtcatgccacctgtttcggctcgacaggctactggcagactttctaaaaatgcggaagcctatgcatgagcaggaatgcgtgtgttcttacacttgttcggctgactaattgattaaaggcacttcggcatcaccctttcgtggagtatgctgtggctatgtgcactgaatctcacctgttagacctgtctatgtgatgagtgaaccgtgtgacattgttggcagttatactaggtggaggagctggaacccgtctcttccctcttactaagcgacgagccaaacctgctgttcctattggaggagcttacaggctcattgatgtgccaatgagtaactgcatcaacagtggtatcaacggggtgtatatcctcacccagtttaactctgcctaactcaacaggcacattgcacgcgcttacaac

SEQ ID NO: 40249 - DNA, 491 bp, Glycine max
aaagtgattgcctttgccggcgaccaaataacttttttgcaaccgtccgttacacgctgcctagcattagaaatggaaagcttgtgaagttctgtaatggggaagtcatgggacgtaagcttttgttaaaaaatggtggtggcagcactaaggattttaagcgccaacaacaacatatatgcatgtctctcaccgctgatgtgtgcactgaatctaacgtgagagacctagatatggaaagaaggaacccaaggacagtgttggcagttatactaggtggaggagctggaacccgtctcttccctcttactaagcgacgagccaaacctgctgttcctattggaggagcttacaggctcattgatgtgccaatgagtaactgcatcaacagtggtatcaacaaggtgtatatcctcacccagtttaactctgcctcactcaacaggcacattgcacgcgcttacaactctggtaatgagtcaccttttgag

SEQ ID NO: 40250 - DNA, 292 bp, Glycine max
tgagggcagggctcttgttggtagtatgtgctctggctatagaggctgtttacggtgcgtgtagtttatcgagcccatgtgccagcaacctctgctgctctcaatatggatattgcggtagtaccaatgactattgtggcactggttgtgtatttggaccttgtgctggcaaagtctctccaacatcagcttcgagcaacgcgtggccattcggtcctgtgaaggctttatacgttgatgccaacatgaactggaacgacccccccttcactttcaaggccattgctgatgc

SEQ ID NO: 40251 - DNA, 399 bp, Glycine max
  unsure (1)..(399): unsure at all n locations
gtaagctcggaattcggttcgggaaaccaccaaatcgcctggacctgaacgtaatcgcaggctgtcccatggcaccccacttggaacatccaccagaaaagatgtctttttccaatgcaaacacaggcgacaagccggccgacccctacaccaaggccaatgccgacaccgaggtctcagtcgatcagaagatcagcgacttgaccaagttcatcgacgccagtaagttcggcatgatgaccacacgagacgccagctcgggaaagctcgtctcacgatgcatggccgtcgcggccaatgagtccggcngaatcgacctgctctttcacaccaacaccgagttcaacaagacagacgagctccaggacgactcccacgtgaacatctcgttcctaaatg

SEQ ID NO: 40252 - DNA, 390 bp, Glycine max
  unsure (1)..(390): unsure at all n locations
ctgaggcagatgattgcttaagactggtgtatgttaagagtgaattgttgaggattaccagtcaacaaattgagcatcagtgcaccaggagaggaaaaatgtggaggctaaagataggggatggaggaaaaaacccatacatattcagtacaaacaattttctgggcagggaaacatgggagtttgatcccgagacaagtactattgaggagcgaacccaagttaaagcagcttgtgaaaatttctataaaaatcggttcaaaactagagctttgggtgatcgactctggcggtttcagtttctaagggaaaaaaaattcagacaaacaataactagtgtgaagattcaagatgatgaagagatacanatgagaaaactccaacacactg

SEQ ID NO: 40253 - DNA, 245 bp, Glycine max
cgccaattgaaagggaatgatctctcaagattggaacgactgcatagggctgatttccctcccatagaacagattgaaaagtttcatggaatgcaaatgtggatgaatgctcgtgcttcaaatgatgaaatggatttactgttgagcattgatacgttgggttaacaaggagcacgtgaagctcttttaaacataattgtttatgatgataaacttgtgtaggctaacacacaagaattttttga

SEQ ID NO: 40254 - DNA, 386 bp, Glycine max
gtcttacggagctcataacgttaatcatccccatgagaaagatttgttggagggaaatctttcctttgatattaaatctcgctctagattggaaaaagtttcctctacaaaaccacaatttgttagtggaaaaaccttcaaatatgatataattggtgctggttcacattcttcagaagatttacctgaaaaggaagatcaagaaaaacgcacacagattgttgccagatagagacaaagaatagatcctcaatacaatgaggttgaagctcagatggaaacatatttgcttaaatggtctcttgatgatgttgaaactcctaaaagatccatgttcgatctcgaaatttctcaatctaaaattgcacttgcgaaggacacatttg

SEQ ID NO: 40255 - DNA, 208 bp, Glycine max
aaccattctgcgttgtgatctatcgacaaattatttgacagagggcaattttagagcaagtgttgatttgcagatcactcctcgcattacaggaatgatctaaatggtggccacagacggtattacggagaatacaggcatataactggcctgtgctataaatagctcttctagggtgcacgccaactctgatattgacaccaactga

SEQ ID NO: 40256 - DNA, 331 bp, Glycine max
  unsure (1)..(331): unsure at all n locations
cattgatagattctcatgtccagattgcaacatanttggtgcaatgcttttggttgatacttatgataccaatccttaaaatgcaggtcgtagtattttcgttgcgcctttcataggcagaatgcccattcaggtggtgacatttccgaataccatagtgcagattgaaccagacatgaattcaaggtttcagcttttgagtaccactaccaatggtgatgtttttcaaagtgaagatcttccaatggttaaaggtaatagagcatgtgctgctgttggcttgacattcaattacactccaacttctttgttggaaatctgtttgcaaaaa

SEQ ID NO: 40257 - DNA, 290 bp, Glycine max
caacgcctgctttagcacaatctttccgagtccttgaacgtatggcaaacctgaatacgtacgatgatattgctatggattatcaatattgggaagatgctggcgatgatttccgagatggtaaaggtgtattattaccactttggcggttcagcggcttagccaatgcgggcgcttcgaaaatgacgacgggtctttgctggagtcatcaatacgttgactattttgccgttgggtatggatcttatgactttgttcgtcaaggtatcgctggtgcccccactggcttt

SEQ ID NO: 40258 - DNA, 105 bp, Glycine max
gggcacttcccgatgtgttaagagaatgcctctgtctatagggggaggagctggtttcaagaatgctattcccatgaatatgctaaatgcttggtcttttaatgt

SEQ ID NO: 40259 - DNA, 184 bp, Glycine max
gctcggatttcggctcgaggggggaatcaggaacctttctgctatggctgctttgcaatactgggaatcgctgcgtaattcgcaccctgagctctccgattggtacaattcgctggcggatctgtaccagaaagaagctctggcaccagcttcactcttaaagctttgagcagttttgtgggct

SEQ ID NO: 40260 - DNA, 368 bp, Glycine max
gggacctcttcttctctacctccccttcccacctcttcaacatttacatccactctgacccctccttcaacctcactctccctctttcccctcttttccgtaacaaattcatctcctccaaacccacctttcgctcctaccctacccttatctccgacactcgccgccttctcgcctacgctctcctcgacgacccttgcaacgcctacttcgccctcctctaccagcactgcatccctctccactccttcaaatacacctacaactgccttttactcttcccaaccttcgattccgaaaaccccgaatcctcgtcccggttcggcctacgacttaaatacagattcttcgtcgagatcctgttccac

SEQ ID NO: 40261 - DNA, 350 bp, Glycine max
gacacattacaacgtgttagcataaccattaaaaacgtggatgggttttccatactatggacatgtttatataaggcctcattttgccctgctttcattgcaaccaaatgcacttattgttatgataataattcttcttattgttccttaccttctctcattcaagacaggcctgtctatgctgcccctgcccccatcatcaccccaactgtgatacaggatatgacataggaatacgatcaagctattgaagatctccagatactgacgagggattttagtgaactcattgccacaactgctgagaaagtggagcaaataacagcttctctgggaacatcataatgcga

SEQ ID NO: 40262 - DNA, 380 bp, Glycine max
gtacgcagcaacagtcggcggtttatgccgtcccaggctgatgaagaggcgcatcagttgtcgtatctgcaaaagcacttggctaacattgtgtctcttctagcagagcctgtggagggagaaggcgatgagtccctggtttgttaatttactgtatgctacctatgggttgttgctgattttgactgcaatccattatttcttatattcccaataccagactttgcatatgggatcgattcttgtaattcatatgatatgatgctttggtgaggtcaaatactaacctgaaagtgattgagtgtcatggaaagtaattttccattgtttgctgtattcttttttgtgtccaacggttgctcctagcttctgttaaatga

SEQ ID NO: 40263 - DNA, 368 bp, Glycine max
  unsure (1)..(368): unsure at all n locations
attaactatatatatgtcaagcattctatctaattgctgataaaaaaaaaaaaaagcattctatctaataacgtattgcctcaacatatttgacgagaaaattgtgtagatagatttggaactaatatctttaattcataaaaaaaatgaacaataccttttaaagtcatcaaacgaaggcgaagaaggaatgaaggagcacgacaatgacgtcatcaccaatgccgtttcggggagcgggttccggcgcacgcgctcgcatgcggagccggactggagcgtgacggaatcgctgattctggtgaacgaggtcncggcggtggaggcggactgctccgtcgcgctctccttgtaccagcagtggaaca

SEQ ID NO: 40264 - DNA, 368 bp, Glycine max
ttttgtcattggtgtcaagttgacaaccataaacaatatgtgtgcatatgggctcaatcctggtatttcatgttctcgccttttgggcaccattcctcaatccatttcacagcaaactgtttggaatcaaatggcaccactgagaacaccattgaattctgattctagccagcagagctcttgtcagttttctattgaccttctcggtggaggaatcttaacggacaaaactggagattggatcacacttatacaaaatcctccaattagtaacttgttgagagctgctgcttgaaagacaggctggttaatggtcaagattgtgatgtctgggaatgcagcaatcaaaaagagtgattgggcctcat

SEQ ID NO: 40265 - DNA, 300 bp, Glycine max
attgtcattatcttaccactttcaattgcatattcactgtgagaaatgataagggctagcccatcaaacactaaaccagttgacgaattcagagtttatgatgcccggggaaatgctgttaatctcgccgcttacagaggaaaggtccttctgcttgaagcggtgactgacaatgcggattggctaattcaaactagacagagcttaatcaattgattgataaatacagagggaaaggacttagaactctggcatatacagtcaatcagggtggggctgaagagccaggatctaatgaac

SEQ ID NO: 40266 - DNA, 370 bp, Glycine max
cacgtgtaggaggtgcagtggtagtgggaggcattcatagaattgggaccttgacctccactgtcaccgtgagaagaagaagtaaagcagtgactactgcaatgcgagcggtggttcagcgcgtggcctctgcctccgtcgaggtcgaaggccgcatcgtctccgagattggccccggccttctcgtcctcgtcggaatccacgactccgattccgacgccgacgccgattacatatgccgaaaggtcttgaacatgaggctgttcccaaatgaaaatacgggcaaagcgtgggaccacagtgtgatgcaaaaaaattatcaagtcttattggtgagtcagtttacgttgtatggattcctgaaggtaac

SEQ ID NO: 40267 - DNA, 355 bp, Glycine max
gtcactgccgccttcgccttttctggtaccgaacttgtgggtttggctgctgccgagacaaagaaccctctgaagtccctgcccggtgctgtccgtcaggtcttctggcgaatcaccctattctatgtgctcggtctccttttcgttggtctgctcattgactctactgatcctcgtctgcttggttctggtgccctcatcgatgtcacggcttctcccttcgtcttggtcggcgagtatgccggtctcaagggcttcgatagtttcatgaacgtcgtgattcttgtctcggtcgtctccatcggcgtttccggtgtctatggtggctctcgtacgcttactgcgctcgctgagc

SEQ ID NO: 40268 - DNA, 269 bp, Glycine max
cgcacctgctgttgccttgtcggtcacggatggcaatttgtaggagagatggtaggcgagttgaatgtggaatcccttctggatttacgatcacagttatttgcattagcattattaatgagatgctcattcaatatagctatgaaaaattactgcgccacgctaaagctgcaaatgtgtccttccatgcttcaaaaattttgcctctttgtgcgtgttggcgatgatgacttaattggtgttcatgactgttgtcaagccttacttta

SEQ ID NO: 40269 - DNA, 314 bp, Glycine max
agcttttgatcatctcatcctggttctggatcaaaagcggaggacgttcaatgggagggggtcgccatgacctacccggaaactatacttcagctgccctccactacttaaaacaaacaccagcttctggggcaccctgtgggcccgccctctcgcctggtccaatggttactgtaattacagacaacacgctgacgtttggcacgcctatccaatattaaagaaaggaagtctggaagaagaaaaaattattggttttatttatgatgacattgcattcaatggggaaaacccaacgcctggaatcatcatta

SEQ ID NO: 40270 - DNA, 133 bp, Glycine max
acggctggacactgctggctttcggcgaccagaaaccttcccagaaccgtggctcgagtgaccacttaggtgggcatgctcgggccttggctgcgtcttcccgaactgttgtcccgcaacggggtcaagtttg

SEQ ID NO: 40271 - DNA, 350 bp, Glycine max
  unsure (1)..(350): unsure at all n locations
cttttcccttccacacaaatacatcacatcattggcattgctctctctctctctctctctctctcgggcggacacaatttttgatggggatatacctcagcactcccaaaacaaaaaaagcctcttgagaaggggagaacgacaagcttcgctttggtttgtcttccatgcagggctggcgtgcttccatggaagatgctgtaactacctttttcttttgggtcatcttatttcatttgccaccactcgttttgtatgttgccatcaacaagtgccacgttcactgctttggttgtacacaanggaagttattctaaaagagtagtttagtgccagtgctatatgacaac

SEQ ID NO: 40272 - DNA, 277 bp, Glycine max
  unsure (1)..(277): unsure at all n locations
gattttgaacaatcaggaaaactgcaagatggacgagaagttgctatcaagcgtctatatgagcacaactacaggcgagtagaacagttcatgaacgaagttcaaatcctcacacgcttgcgccataaaaatctggtgtccctctatggctgcacttcaagtcacagccgtgaactactccttgtgtatgagcatgttccaaatggcactgttgcttgccacctncacggtgagttagcaaggcgcgacactcttncatggcacacaagaatgaaaa

SEQ ID NO: 40273 - DNA, 322 bp, Glycine max
atgggaggatcttgatattggagagcgccttgcatttggttcttatggtgaattttatcgcgcacgactcgaatgggactgaagtagctgaaaagaactttctggaccaagatttatgtggcgatgcactatctcaattcaaattcgaagttcacatcatgttcatggtgcggcattcgaatgtcgagctattcatgggagctattactcgcttcccacatgactctatattgacggaatatctttcatgaggcaccttatataggctattacatcgacccaatcttctactagatgagatgaaactgttgctcatggatat

SEQ ID NO: 40274 - DNA, 333 bp, Glycine max
aaagcaatgactatgtcatttaatccacacccgcggtctgacgcatggagtatgtaattactgaagcggactggatttcattgcgatatcatgtgtgtcactggatagactgccaccccaatgcaggatgttcaggctacaattgattggtttatttcctctcacgaatgcgctcccaggacctattgcgtttcaaatccacaagacccttttgcgtcaaataagcggatgggaaaattgactttccgccatggcactttccgaaacgttaagaaaatgtctatttctatagggggaggagctgatgcaaagaatgctatactgatgaatatg

SEQ ID NO: 40275 - DNA, 295 bp, Glycine max
cgtcattggtgacaagttgacgaccatcaacaaaatgtgagcatatggactcaatacgggtattgcagggtctggtctattgcgcaccatacctgactccatttgacaacagactgtttcgaatcaaacggcaccagcgagaacaccaaagaattgtgattctagcatgcagagcttctgacagttctctattgaccttctagacggaggaatcttataggacaaaactgtagattggatcacacttatacaactgtctacaatttataacttattgagagatgctgattggaag

SEQ ID NO: 40276 - DNA, 230 bp, Glycine max
acatgtggttggggacgtggtggtttccccaccactgcttggaggggatctgcccataacaggcggtcctcagatatcaacaaaaggattcgcacagcacttggcaaaggtaagaaaattgtttttcttactagagttgatccttttccacacgctatactggctgttcttttcggcgctaacaatgaaattctgagtgctaacgccgctagtcctatgctgacactact

SEQ ID NO: 40277 - DNA, 396 bp, Glycine max
ctcggtggaggaatcttagtggacacaactggcccattgtacggcactgatacaaaaatatccagggaccaactaaatgagagaggctgattggattgccggctatggaagctcatgatcgaactggatgggaagccagcggatactgacgagagagttccgactgattggtgcaagtagcaccaacaagcaccctgcatgacagagccttttgaagcatgtcagtggacaaaattagaaccacatttctgggaattgatctctccaatagaggaatgtggtcctaacaatgggttcgaaatgtggagttctgagtgggcaaatcaaacttcatggcatttgagttttcttattgacaattccaaacagtctacagtttttgatattctcttggga

SEQ ID NO: 40278 - DNA, 312 bp, Glycine max
caattacctacagaggctggggatggctatgtcacacgaggtagtggacgatgatgagctcgcgccggctaacacacaagaattctttgatggaaattttccagaggattcttggataccaatttttgagaattggctatatgctgtaagacaattacctttactagctgtcattcttaatgatacatgtgactgggtgacgtggtggttacccacacacgagattgtatatattctaacgccactacattctatgctgacgcgactacttgaggactgtcacagtcttaaatatatggtagatgagtgttc

SEQ ID NO: 40279 - DNA, 332 bp, Glycine max
aaaatagctatgacgttgcacgcgctcgtaagctgggaattcggttcgggatctagatacctagaaacagtgtgatgaaaatgacggacctgggtggcttcatggctacaattttgggagcatggcaatgccatccttacaaaatgtaccctctccaaatgaacactggctatggggcccgtactccggaggggaaatgcccaagttggaggctcgctgtgtaatcacacacacatttttggctttgagaccattcctgaagagtgcgttgaagcatcaaaggaatacatccttgtcgaacaatatacatcagactccaaaacatttaacca

SEQ ID NO: 40280 - DNA, 326 bp, Glycine max
aatttcggttgaggtcattattggcatgcatgggggcaggaaagttaagggcttccaataccagtggattttgcaatgggggtaaagtggccacccttaaccattatgtggccttatgggctcattcttgtgatttaaggttctcgtcttttggccaccattcctaagtccatttaacagaaaactgtttggaatcaaatgccaccagtgagaacaccttggaattttgattttagcaggcaaagtttttgccagttttttattgaccttctcggggaaggaatcttattggacaaaactggaaatgggatcacactaatacaaaa

SEQ ID NO: 40281 - DNA, 319 bp, Glycine max
agcagagactgctcattgctttagcactcaccagtttgcctgtttagtcagatatggtgcaagtgctgtgtgtccagattaggcattggagacatgtcattaataggctaagagtaatactactctgaatgtgatgaggcatggaaagatacctacgctgtaaatagagcctgcgcaggagaacaatatgactgctcttaaacagctctttttcaaatccttttcaaaatgggcatgtcactgctaggaagttaccgcggtgcacagatattttaaaagtatatatttttgaacccagatggtgctctttcggttaaag

SEQ ID NO: 40282 - DNA, 406 bp, Glycine max
agaaacttgtgatattagggaaggagatagtaaagaaatgtgggggagtgcctcttgcagcaaaagcactaggaggtcttctacgcttcaaaagagaggaaagagagtggctcaaaattaaggaaagcaacctttggagtttgccacacaatataatgcctgccttgagattaagctacttgaacttaccaataaaatttagacaatgttttgcttactgtgcaatatttcccaaagatgaaaaaatagaaaagcaatatttaattgaactttggatagctaatggtttcttttcatctaatgataagttagatgctgaagattgttgactcgttggcaagtgtaccaaatcgtcacaagtagtaaagttctcggaagtccgagtgtcgaatccacagggactttg

SEQ ID NO: 40283 - DNA, 390 bp, Glycine max
aaataaaaagatgttcatcagctggattttctgaaaatacaggtgtagtgattggactgtgctgtgggtagctcttttagggggcgcgccagttctgatatttacaccatctgctctcaagactgtgaattgcggaatcctgtttgcacaaaagcaatgactatgtcatttaatacaaacccgtgttctgatgcatggaagttggaatttctgaagcgtactgtatttcattgagatatcatttgcgtcactggatggactgccaccccaatgcaggatgttcaggctacaattgattggcttattttctctcaggaatgtgtttccaggacctattgtgttttaaattcacagaatccttttgtgtttaataggtggatttgaaaattg

SEQ ID NO: 40284 - DNA, 397 bp, Glycine max
aggatgacgtcgcacgcccgcgtacgtcaggcaatgaatgtctcgagggagacgaattctgcctacaatgaaggatgagagtttatcgtcaacgcaaccagaagattgggtgattgttcccaaaatgacaacgataaacaatacaagcgcatacgggctcaagagtggcatgaaagggtctcgtcgtaagggcaccatgacgaagtccatacacacagggcactgttaggagagaaatggcacacactgagaacaccattgaatttcgattctagcaagcagagctcatgacagttcactatcgaccatatcagtggaggaatcttagtggacaaaactggcgatcgtatcacacttatgcgcaattctgcaattagccacttgttgaaagttgctg

SEQ ID NO: 40285 - DNA, 347 bp, Glycine max
  unsure (1)..(347): unsure at all n locations
caccattgaattttgattctagcaagcacagcttttgtcagtgatctattgaccttctgggtggacgaatcttactggacaaaactggagattggatcacacttatacaaaattctccaattaggcactagctgagagttgctgcttggaataaaggctgtttaatggctaagatagtgatgcgcgggaatgcgaccatcgaaaagagggattgggcctcattggtacaggtgattttaacaaacangggcagggcagatcattttgatgcatgtgagtggactgaatctgaaccacattcctgggaatagatcttaccaataaaagtatcaggacctaataatact

SEQ ID NO: 40286 - DNA, 270 bp, Glycine max
gcgaaatatagagagatattggagatggagcccagcaggagggttgtaattttgtgctggctgacggtggctggaagtatccgagtcggagtccgagacgactcgctgtgaaaacatacactaattcatatcattctgctgcaatgaagcggccaaaattagaaccacattcctgggaattgatctttccaatagaggtatgcggtcctaataatggttttgaaatgcggaggatctgccaacgggctatagactacgaaccctacgaca

SEQ ID NO: 40287 - DNA, 431 bp, Glycine max
gcatgcgcccgcacctaagcatggaactcgaggtcagatggagatgtttgtccttcaatacaaaggcctaatcaagtgaggctctggaaaaggctcagaaattggtgatttccttacaatgcatccaggagtgaactgtataagctttactggtggtgatactggcatttcaatttcaaagaaggcaggcatgattcctctgcaaatggagttaggaggaaaagatgcctgcattgtacttgaggatgctgacctggatttggttgctgcaaacattataaagggaggcttttcatacagtggtcagaggtgcactgctgttaaggttgtcctggtaatggagtccgttgccgatgctttggttgagaaagtgaaggctaaggtggcaaaactaactgttggaccaccagaggatgactgtgatatcaccc

SEQ ID NO: 40288 - DNA, 406 bp, Glycine max
aacaactacttcgactttaccaccaaacaaccaccaactaaacaaatcaatcaagatgtctgacatgggccgacaatctctcggggacaaggctggggcggctttgaagcctgacagccagaagacctacctcgagcaggctaccgacgccgtcaagggcaaggccgactccgccgcatctaccgggcagccggacagtcaaaaatcctggacccagtccgccggtgacgccatctccggcaaccagaacgagaactctggttccatcctcgactctgccaagaacgctctcggcatgaacgacaagaaggcctaatcgaccgacgaccgaccaacgatgatcctcaccgatcgacgatggtagcttgtattctggttccgacgtattgattgaagagagagagag

SEQ ID NO: 40289 - DNA, 335 bp, Glycine max
gaacatgctaaaaaacagttctttgagtacttacaagggtttattcttcaactagaatcttagtttgaaatgtcttgcatttgtggcagctcccctacaagcgattttttttccctacaggtgaggcagaatctggtttggagagacttcatcaatgtgctgaaaaggaactacagctattcctgaatgctgatggcccatctaaagaattcaatgactttcgcactaaactagctggattgaccaggtatatgttgcagattttaagtattcctcatgctgtctatttatttatttattattgtcttgcgttgcgattgaagtttgactttaaa

SEQ ID NO: 40290 - DNA, 408 bp, Glycine max
cttttcgttgtcacactcgaccgtgacttcaatcaatgtatcataacaccttcttctctggtaacaatgagcgtttcgttcatggatctgtccgtgcatcgtcgagctgcagtcgtctcggtcctgatcctacttctcggccttgtctttggtcttgccttggacgccaatgcacacattcccaagccctggaaccgcatatcgagtatcattggttggatctacttcttctgctggagcgtgagtttctaccctcaagtgtttctgaaccatcagagacaaagcgtcgaggggctatctctggactatacagtactgaacatgttgggctttacgtgctactccatcttcaatgttgctttctactacagtaagagtgtgcaacagcaatacatgagacgtcatgac

SEQ ID NO: 40291 - DNA, 312 bp, Glycine max
ctctaactttcacgacactgtcagcaagttagagtgatccaatgtgggcacaaactcatcatggctgggggccttaacaaaactagggcaactttgcaatatagaaagttcgcagattgtgattcactcacgagaaactgtaagcatatgactaatgtttagtgggaggatcctgaggtcaaggcgagtttatggtcacaacttcgttatgtttcccgtaataatccggaaaagcaagaagcttatattgtcaatttcctaaatgtgttacaagaaatgtttttgcacagtccattagaagctcgtcaattg

SEQ ID NO: 40292 - DNA, 389 bp, Glycine max
ttgcatcgtccatggctgcaaactctaccgacgtcaaattgttctccaaatggagttacgatgatgtccaaattatggatatctcccttgtggactacattgccgtcaagcagaagcctaaataccagtgttatactcctcactctgctgctcgattcaacaagcagagattccgcaaggctcagtgcccaatcgttgaaagattggtgaactccctcatgaagcacggacgaaacaacggaaagaaactccttgccatcaagatcgttcaacacgccttcgagatcatccacttgttgactgacaagaaccccatccaagttttggtcgaggccatcgccaactctggaccccgagaggattcaaccagaattggatctgccggaact

SEQ ID NO: 40293 - DNA, 454 bp, Glycine max
acactatagaagagcttgacgtcgccgcgtcgtaagcaggtaattagtctgctcgagctcccgtgaattcttaaaaaactgtcttttcttatagggggaggagctggtgcaaagaatgctattctcatgaatatgccaaatgctgatctttcaatgtggatatattcaagtggacaaccataaacaatatgtgtgcaagatgacttctccctacattaaatgtacagtctctttcttgatagcatttgtaaatcatgctgcagataccatgaatgaagaagctgttacccacgagctcacgcatgtagtatagattcaggaaaaagttgtattgaaattttcacaagaggaatttcttacagcttggtcaactcaggtgcgtcctgcaacaactcttgtggctgatgggtgttcatatttgtatgcaatggtgcatgatagttcaatgtctaca

SEQ ID NO: 40294 - DNA, 369 bp, Glycine max
cacacccacagcatgtcttaccgtcaaggcaaaaccgcccttgcgctgactcgcgtctggcacaggacatcatgcgaagaccgcatcctcggtcgtctggcaacgcggatagcgcacgtcttgatcggcaagcacaagccgacgtacgatccgtctgtcgatgcgggagactatgtcatcgtcgagcacgcctcgaaagtgaaattgtccggaaatcaatggcaggacaagacctacttcaagcacacgggttacgcgggatcggagaaattcatccccatctcgcgcttcaaggagaaggacccaggagagatcatccgccgcgctgaatctggaatgttgcccgagaattcgcaccgcaaaacccgc

SEQ ID NO: 40295 - DNA, 357 bp, Glycine max
  unsure (1)..(357): unsure at all n locations
acgtgacatgccctgcaccgtaacctcggaattcggttcgagtccagggcatatttgttgacctagggcaatntttggacatgctgggagcttctcttgtcaatccggcacagacagtaaacgagaattgtattcgctcaggccacagtgaactagcctctcgtgaaggaaagctctctctcgtattgaatggctgcaaatagctgatgtgcctaccatagcacaaattgaaaagttccattcgaggctgcgataatgcatgctccttactcgaatgataatattgatttactggtgagcattgatttgttgggtttacacggagccngtaaagcttttccaaacaaaattggtttt

SEQ ID NO: 40296 - DNA, 346 bp, Glycine max
gcggaaaaaccctcaaatatgatataattggcgctgcatcacattcttcacaagattttgctgcaccggaagatcattataaaccccacatgatcggtgccagattgagacaaagaatatatcctcaatacaacgatgttcacgctcatatcgaaacaaactagattaaattgtctcttgatgatcgctgaactcctaaaggttgcatgtgggatctgaagattcctcaatctaagattgcactttccaagaacacagttggaggaaccattctgcgctatgatctattggcgaatattctgacagatggcaattttagagcaagtgctgattcgcaacgcactca

SEQ ID NO: 40297 - DNA, 149 bp, Glycine max
aggacacatcagtgcacctgaagtcaacagacacaagtggggctactcccaaagggttgttgcttcatttttcattctaaaacttgtactgagaaacagaaccatcaattttctctgccttctcattgtgcaataaaattcttaccttg

SEQ ID NO: 40298 - DNA, 162 bp, Glycine max
tacatgttaggcagcagcaacaccagcagttgtagtaggtgttgacggaggatgaagtggaagaagactaatttgtctaaaatgtaatgtttttatagtcttggagactatttttgtttatggttacatgtacctttacagcttataaacctttttgctgtg

SEQ ID NO: 40299 - DNA, 395 bp, Glycine max
  unsure (1)..(395): unsure at all n locations
ggttcacattcttcagaagattttcctgaaaaggaagatcaagaaaaacccaaaaagattgatgccagatttagacaaagaatagatcctcaatacaatgaggttcaggctcagatggaaacaaatttgtttaaattgtctcttgatgatgttgaaactcctaaaggttccatgttggatctgaaaatttctcaatctaaaattgcacttcccaagaacacagttggaggaaccattctgcgtagtgatctattggcaaattttttgacagagggcaattttagagcaagtgttgatttgcagcgcactcatcgtattagaggaatgattaaaatggtggccacagttggtattcctgagaatacaggtatatcatttgcnctgtgctatgaata

SEQ ID NO: 40300 - DNA, 236 bp, Glycine max
gattgggcctcattggtacaagtgtttttaacaaacagcaacagtacaaagcattttgatgcatgtttgtggacaaaatcagaaccacattcctgggaattgatcttcccaattaaagtttgttggccttattatgggtttgaaatggggagttcttaagggggaaaatatacctcatggcctttgagttttcttattgtccattcccaacaggccacagtttttgatattccctt

SEQ ID NO: 40301 - DNA, 384 bp, Glycine max
aaatcaaatagtaatgtggttcacttttaagttttgccatgtaacctgtgcattctaaaatacttttgcactggttcacttttgatgtctccattaattgtttttcttaatctgacaaatattgcacatttagtaggttgtaaatggtcttctccaaagagaggattgggatacggcaataaagatgccccttggggtagttcctgcaggtacgggaaatggcatggcaaaatctcttcttgattcaattggtgatccttgtgaaagagcttatgccgttcttgccattatacgaggcagttaacgaccgcttgatgtagctaccatcacacaaggggaaaccagatttttcagtatattgatgctcgcatggggtaattactc

SEQ ID NO: 40302 - DNA, 285 bp, Glycine max
atcaactctttcaaaggggagaacaaaaggaaagggaactgaacgcacaacggattattatagcaatggcctaacataaccaaagccggacaactgaagctggaaggctcctataggttgtacacaacatccttctccagagtgatgctctttaccaatatattgtggagaccaacgtctacccaaaagaacctggatgcatgaaagaactgtgcgagttgtcagctgaacacccatggtacatgatgacaacctgtgcagacgaaaggcaattattgaacatgc

SEQ ID NO: 40303 - DNA, 248 bp, Glycine max
ttataattaggcttttaattataataacaatcaatcaacatgctgcagaagggttggcgaaggggttgaagaagcgaggcttatgagccatggccaatggcgtcttacgggaaccgtcgccgtcaccggtgatgccgtcgacgttcctgtcacaagaggggcacatggtgagtgttgccgaatgcataggcatgtccagaggctgcaccatactcagcgctttaatctcttgaagctccttgtgtgac

SEQ ID NO: 40304 - DNA, 192 bp, Glycine max
gccctcggaacgcgaccccggtgcttgtatgatacttgcagagcttgctgagaaggctggcttccctccgggcgtcatcaacattgtacatggtgcggctaaaacggttgatttcatcatcgacgaacctcgcatcaaggcgattagcttcgtcggtagcaacaaggctggagagtacatctactcgcgcgc
